United States Patent Application Publication US 2015/0315605 A1 - sequence listing, part 10

SEQ ID NO: 15153 - DNA, 1569 bp, Zea Mays
ccataccagatcttctgtgagcaaaggggccaatggaaggcaacaacccaatctcaggagttccttcgaacccttcaacgctactacaataacgcctacactgatcacgagaagcaggatgctataaacatgttcttaggtcatttccaacctcagcaagggaaacctgcattgtggaagctggactcagatcagcattacaacattgggaggcaaggaactttaaaagaagagattggaagatcattcataaagaggtcactatcagatggtaacatactgttggagagcagcttgcctgtaactatctgtaacaatgaaacagacaacacagaattgctcccagtgcaacagctggatgatattagagaagcttctgattctgcgccagagatctccatatgcgaacctaacctgtgctccagtatgaactatggcacagtgcctggaagacactccatgtcagaagagcggcagagttatttgaaaagattaggttaccctgaattgcactcttcaaatttctttgaccttgatttgttgtcatcttcaggaaattcgtttgacgaggaagtttttgagaggtcattactgatcaattcacctatggatgtgatcagtcctgaatcatctatgtcatacagtgaacaaggacacactgatgagggaagagatgacacggatctttcccgttctagcagccagctctcagacattcgggactactctgaccactttgcgcagtgggtcgtgaatggagacacgctttgctactaggccctggacttttgtcttggtgacagctcagtagatgtgacacggcaggaaatggaagtctgacggatagagcagatgaaatggctgacgactagccgggctaggtgccgtgcatctacctgcagaggcggcgtagcagaagaggtggtggacatgggagaagtctcgcatcggcatgcttgtggtcactggaaggcttgaacgatgaacgctgatattcgtcggatgcagctttcggtggggtacatgattcaatttgctatggtgaaaattttgaccgtagcttagacaataaataggcaaaatatatctgttcttttagtttagcttaccttgcgtttcccttctccatagaaaagtatcaaaaggaaaaacaatggaaaatctattaggaaaaggaaaaaacaaacaaaccataggtaaagaacacttctgttgtaaatagttagtttgctacagaagtataaatatctggtacttgttgggtttcttggcggtgtctgtttcataattgtttctgtgaaaaagctgaaagaaactcggtatgtcttttaatatgcaccatttttgcttgaggactctccatgacattgcgcagagaggagtgcaagaacttgaatgtctcatgcttctcttgcggtggacatccacgtcgatgacaaaattctagtatatggtacgtagttcattcgaaaggtgcaaggtatccaatttagttttggatatctagagttcacaagatagtacttatctgaaaaatgaaatcaaattaccattgcaaaatataaataa

SEQ ID NO: 15154 - DNA, 1770 bp, Zea Mays
cttggtggaattgggcatagaagttgacgggcaactcaagtgtgagaaatggatccgtgacgatgacagcaagtcagaggaatcaaagatgaaatggtgggtcaagcgtttgattggcaggcctaaggatgtccgcatcatttggccatacccattcacggaaggcaagctatttgttatgactttaacagctggtttggaaggttaccatgttaatgttgatgggcggcatgttgcttcgtttccttaccgcactggttactctcttgaggatgcaactgcattatccctgaatggagacatcgatattgagtcgatttttgctagttctctacccaattcgcatccaagcttcgctcccgagcgataccttgagatgtctgaacagtggagagctccacctctgcccactgaacctgttgagcttttcatcggcattctttctgcagccagccattttgctgagcgtatggctgtaaggaaatcgtggatgatgtatacaaggaaatcatccaatgttgtagctcggttctttgtggctctgaatggaaagaaggaggttaacgcagagctcaagaaggaggcagagttcttccaggacattgtcatagtgccttttatcgatacctatgacctcgttgtgttgaagaccgttgccattgctgagtatggggtgcgcgtcgtccctgcaaagtacgtaatgaaatgcgacgacgacacattcgtgaggatcgattcggtactggatcaagtgaagaatgttggaaacgataaaagcgtttacgtagggagtataaactacttccatcgaccactaagatctggcaagtgggcagtaacgtacgaggaatggcctgaagcactgtatccgaattatgctaatggacctggctacgtaatttcatccgatattgctcgctacatcgtgtccgaattcgacaaccagacgcttcggctgtttaagatggaggatgtgagcatgggcatgtgggtggagaagttcaacaggacgcggcgggcggtggagatccggcacgacgtgcggttctaccagtcgggctgctacaacggctacttcacggcgcactaccagtccccgcagcacatgatctgcctgtggcggaagctgcagtccgggagtgcccggtgctgcaacgtcagatgacgcattgcgagagagagcctgattttgtactctttcttgatcaaagaggagagaaacagatggtggtggacgacgggtcggcagcccgtaagcgcagctcttctgcgatggacacagctgacgacgacccgttacgacggtgggtttgcaggaggaggttgctcttctggaccttgtgatgcgatgattctttcattcttttggtcggtggcccgtttgagctgctgattctgacagccctggtcggcgtccatggtcggggattctcttatgctgctgctgctgctaccacctgttgatatttttaggtggtagatccagtacatgaggctaagtagggctccggatcatatgggatctatccttgtgctttgcgtcaaacttctttgacctagaaattttaacttgggtgagttcggttggtaggctgtgcttgtctataaaaaatgattttctgagtttgtatttgtgttggcttatcttatatacgaacttgtgcgtgaaaaaaaaaatcaacgtgtcttcttttgttatgccattctcgttaaatagcatgccacatattcaagcaggatgatatggcatgcaatttaatggagaggtgt

SEQ ID NO: 15155 - DNA, 1346 bp, Zea Mays
cgcgattccccaccccgcgcccgcagcccccccccccgtcctcccggccgcagccgagcacagccgccgcgcccacaaatcacgcgactcccgcttccatgtcctcgcgtcctccattgcagccgcatacatagcgtcgccccttccatcgatggcagccagccgcgcccgcaaatcacgcgactcccccttccatggcgtcgcccccttccatccatggcaggtccgcgcccctacgccccaaatcacgcggatggaaggccgaagagaaggcggtgagctgcggcggaggaggggcatctgaaatccctgagctcgctgtcatcagggagctacatcttaggacaattgatgagctcggtttagataagtcgattgtttcagggacccttctccccaacacgcaggggtagcgtaggaggtgttgtggcggcattatctaggaagcggtctgtggacatgaggcagatcaacccgaaggtgcctaaggaggaggctgtcaccatctccggtcgactcgtccagatcctctccgaccatgggcccctcaccatcggcaacacctagaacaacacgaaggtacccaatcaaccagtcagtcaggcagagtggcaaaagctggggagcgatgcaggcgtcagagcagcaacaacggaggatgtagatgagaaggaaacacgcaaagagcatcaaaagcaagttcaacgatcttatgtcaacccatccacctctgaatgaggcatattcagatgtgtgtgtattcagagctcaatatgttacatcgaccttcccaacccgccggcagagcttaagaagctcaagcacaagaagtgcctcgtccagtccccccaactccttcatggatgtcaagtgccaacgatgcttcagcatgtccaattcgcttgtggcataggaatctcatcctagattcaatagaggggctgcaatgccggcatcgccatagctggaaatcgagcactgacggacaccgggcgccgagatgggccgtcttgtccaccgccgcaagaaccgcatgcgttggagccatccttacacctgctcctacttccgcgccagcaacccaacacgccgacgacacgagctcctccttataaaagtgacatctttattgtatagataacgaatggttatagttatttattcttgtgtccaagtggtattggatttttttagcttggggttaaagaaaagacagtcatgtactttgcatcttttttgtatttatgttttatgctaaattgtggaataacactatattagttgttagcaaagaatttctgagatattaaggttgatgataatatatgttgttatttcatttaatc

SEQ ID NO: 15156 - DNA, 1451 bp, Zea Mays
atgatcgtcgggtcagccgccgagctgaacggaggtcgctcaccgttggggggccgttgggccgcccgcgctactccccaaccaactgcggccagatcacgctgcgcagcgcaggccctctttactcagctgtccatgctgctgctgctcagagtgtggggcgccgtggacacggtccacatcaagatgctgagccacataactccggtgggtgtgggtccaacgccccccacctgcacgctgccctcccccgccccgccgcgggatcaaatacgccgcctccgcccgtccactccctcgccgcccccgtctcctctcctctcctctcctctcccccgcatccacggccgcaggcagcaggcagccactcgacgatctagtcgtctctctccccgctctgccgcctcgctgccgcggcttcccgtcggcgggaggatgaaggtcacggtcgtgtcccggagcggccgggaggtcgtcaagggcggcatcgacctcaaggactcggccaaggtcgcggacctgcaggaggccatccatgccaggactaagaagtattatccttctaggcagcggctcaccctcccccttcaacctggaaaaggcgggaagccagttgtcctcagtccgaaggccagcctgctagaatactgcgagaagggttctgggtcactgacagtggtcttcaaagatttagggccacaggtctactacagcacactgttcttcttcgagtacctgggtcctctcatcatctaccccatgttctactatctgcccgtctacaagtacttcgggcacgagggggagcgggccatgcaccctgtccagacctacgcaatgtactactggtgcttccactacttcaagcggatcatggagacgttcttcgtgcaccgcttcagccacgcgacgtcgccgctctcgaacgtcttcaggaactgtgcctactactggaccttcggcgcttacattgcttactactgcaaccacccgctgtacaccccagtgagtgatctgcagatgaagattgggtttggttttggggtcgtctgccaggtcgcgaacttctactgccacatcctgctgcggaacctcaggagcccaagcggcagcggcgggtaccagatcccccgcggtttcttgttcaacatcgtgacctgcgccaattacaccaccgagatctaccagtgggtcggcttcaacatcgccacacagaccgtggcaggttacgtcttccttgtcgtggcggcgggcatcatgaccaactgggcgctcggcaagcacagccgtctgaagaagctgtttgacggcaaggatgggaggcccaagtaccctcgccggtgggtgattctccctccgttcctgtgaagaggcggtggtggtggctcactgttggtggtcggcccattgtgattcgatgtctacagacagttgtacttccaaaaaaaaaa

SEQ ID NO: 15157 - DNA, 3411 bp, Zea Mays
gtccgctcggcccgtcgccgcgctcgctcctctggtcggtggacggcaccgtgccgagtgccgagtgccgaccggtcggaacggaagaaaccatccgctcatccccgttttctcttgtcccgttcaccacgcctgctctctcccttgtcatcttctggcgacgactgggcgactgccgacggccgctgctgccgccggccgctgctgccgccctagaccaggtggccagctcttgtccgagaccgttgctggcgacgagaatccaataggtgctcatcatgtggaaaggattcagcagcatcttcaaaatctgaagacttctatgaactcgagctgaatattaaaggtttcaataatttggaagaaagtctagacgactactttagtgaagaaggactagttggggagaatcaatacttttgtgaatcatgtcagaaaagggtagacgccactcgctgcataaaacttagatcacttcctccagttgttaattttcagctgaagcgttatgtattcctcccgaagacaacaaccaagaaaaagatttcttcgtctttcagtttcccagggcagcttgatatgggaaaacggttgtcaaaccctacatctagttatacatatgaactagctgctattttaattcacaagggtaccgctgctaatagtgggcactatgtggcacatataaaagatgaaagcaatgggcagtggtgggagtttgatgatgaaaccgtatccaaacttggtttgcacccttttggtgaaaacttaggaaaaacatcaaataaagatgataggaaacctcaaggcatttctatagaaggttctgttacgaacaataacaatggacaccaggaggctgcatcatcttctagccccggggagatgttttcatctacagatgcttatatgctgatgtacaaatgtaccaataaggatggcaatgctactgaaagcaacaaaattatggaattcaataatagtttgcttccacaccattttcttgatgaaattaatgaacaaaatgcatcgtgtatgaaatcctgtgaagaataccaaagcaagaaaggcagccatttggcatatataacagagaggcgccaagaagtaaaatctattctgatagaagcacccgcaaatccagaggacaattcatacttttggatttcaacagactggcttcgccaatgggcagataacatcactcctcccttatccattgacaatggaccaattcaatgtgagcatggaaaagttccagtgtctaaactcacatcaatgaagcgtctatcagctgcagcttggcagaaattattttcaaaatatggaggggggccaacattgagtggtgatgatttttgcatggtgtgtcttaaagatggggcgaaaaatgcagtatctgctgatgtctaccgtgaccgcaaagaatcatttaaaaaccttgcagaagcagctcttgctggtagttgttcagatagtccttcttacttcatctcaaaggcatggttgactcattggctccgcagaaaaaatgctggtatcctttctgatgctgataatggaccaacgagtgctttaagatgtcgccatgggtatctcctgccggagcatgctccaggagcaaagcgggtatccgtaccagagagcctgtggttatttctctatcaaaccatcagcgagaaggttgatgatgttgttacttttccatcagactgtcaaccatgcaaaatctgtagtcaggaattgtctgatgttgcttctgttgagggtaatcttagagcagtgaaacttgagcaacgatacaaacatgaaaagttaatatctgggaagagctttgcacttcgtcctggtgaaaaatattatttggttccttcatcttggttgtcagagtggagagcttatattacaacgacgggaaaaaatatttcttcactaccagaacctcaaagtcttgaagctgttgtcagttcacttatatgtgaaaagcattcgagattgctgcaaaagcctttggatcttgtttgtaagcgcggaagcatcactcagaaaacatcaaataacgatggtttaacaatcatcccagagtatgattggaagttattctctgaggagtggagtgcgacgcctggaaaaggtatatctgctgaaatcgcttttagcaaggacgctcaagataaagtgcacggttcctctgaagcaatgccgattacggatggaaatttggaccagtctctttatggtgcaaatgacgattttggggccagagagccctatgtcagaactgatcctgaggtttgtgaagaatgtgttggagaaagagagagctgtgcattggtgcagaagctcaactaccagaatgaagatatccacgtttattttgtccgtggaaaagcaccaccaaagtctatcaaagaagcatctaaagatgttcctgtatcagatcgtcggatttcaaagcgttccaggaggacaagctctgggaattcaatcagtttgaaagtctctggttccacatccgtctatcagttgaaactcatgatatgggaatctttagggatcgttaaggagaatcagaagcttcacaaaggaaatgttgagattgaaggtgacttggctactcttgccgacaagagtatctttcctggggatgttctttgggtcagagactctgaaatctttgagaaccgtgacatagcagatgagatttcagagcagaagggtgatatactgcaggttgaggaaggctttagagggactcttttgacatcaagtgtttcagcacagctttgtcagggcataacatttagtgaatgagtttcttccgtgagatatatggctgcacatacctgttggcataagctagttaaggtctctagaaggtacctgattgcttcagagggtagtcaatcatgtcagttctagcagtcctggcgaaaagttatgtctatgcttctctccatgctgtcacactaaggatgtcaaatgtatcctcgcttgaggaaaacggaagaaggctcttccttcttccctaatgtaatggtgacttaggtataccactgggctacggggctgtgatgcctgcatgcttagtgtttttttttcctgttgttggccatgcgggaccgtgagggctacgagcgacttgcattgtacttggtggttgtgcacacatcggcttattgacaggtagattactatgaaagtctcaaggcgatgcagagcattgtgcagttttttcatgccttttattttaccttagatcctaagggtgtgcaatgccatttgatatatatatacctttatgatcactctggtttgctcacctctcgttgctcatagaacagagttacgaagtcgaaaccttttccttcatttagaaaatcaatcgttattttttctgtgatctctttt

SEQ ID NO: 15158 - DNA, 771 bp, Zea Mays
  misc_feature (770)..(771): n is a, c, g, or t
agtcaccagccatgatcaaatacaggagattgatgaatggagcgatatttcaatgcctaaggaccatacgaaaccacccagactaagaactttgggtgccaacacaacactctcgggctttggccaggagaatatggaaaaagtatactctgacactgccactacctctaatgaccaatccaaggcggaagattccagtgtcacaaagaagcgcgctgcaagcttttggtttgatgaggatgggttgtttaacaacgatgatgaagggagggcggaaaggcagcagtgtgctattgcagcctccaatataatccgcaatttctcttttatgccagaaaatgagattatcatggttcaacataggcattgcttggaaactatatttcattgcttagaaaaccagaatagagaagatgatgagctcataacaaacatgctggagacccttgtcaatttagcacctgtgctggacctgaggatcttcagctcatcgaagccttcgttcattaaaatgaccgagaaaggtgcaattcatgccataatgggtatgctttcttcttccgtaaagccatggcactgtgctgctgctgaattgattggccgtctgataataaatccagacaacgagccatttcttcttcctatcattccacaaatatacaaacgactcgttgacctattgagtgtaccagcatatgatgcacaggctgctgctgttagtgcactctacaatgtagccgaagtgaatatggattgcaggctcaagcttnn

SEQ ID NO: 15159 - DNA, 149 bp, Zea Mays
ctttgctaaaaagaggttgaaatctgtgctgttctaaaaacgagcataaaaaaaaactgttgttcactttgcttcaatgtaaacgctgacttagtgatcagtcagtagtgccgccatctgaaccaaggaaaggatcaacccaaaaaaac

SEQ ID NO: 15160 - DNA, 1143 bp, Zea Mays
ggctgcgctccaaatgcaaaagtgttgcctgaagaacctgattgcccaaatgtaaatgtgctgggtggggatgaacttgagccaaaagggttgctaaaagctgaggctgaagaagctgtagaggtgctggcaaatacactcgtactggccgctgttgatgcaccagcagaagagctaggtgaagaaaatgtgaacccagtgcttgaactagagctaaatggattcgcaaaagtagctccagttccaaatggtgaattgccaaatccagtccctgatgtggaagttgctgcaccaaaagaggcagtgctaggtcctgatgaggaagttcctgccccaaaagagaaaactccaggtccagacgaggatgctccaactccaggagtcatgaccgggaatgcaagtgacgatgtactgaggccagtagattgggctggggagctgaacccaaaaaggttgtttccagagctcggaaatgtaaatgaaggggttgaagcagactgtaaacctggtgcagtggaagtactagatggtgcagccacagatattccagcagcatcacttgaaggtgcaactgcggtgaaagtaggcgtagatgtggcgggggaacttgaaaagcttgcaatacttgatgacacaggtgaaataaaaagttccgatgatgccttgctgcttgcatctggtgcaacagatttcacttcagcttttgtaccccctataccaaatgataaggtgctagctgccttattttcagcagttgtgccatcagatttagctgatgttaccaatgacaatccaaccggagcactggaagaaaaactaaatcccgtaaatgcaggagacgatgaaatagctggactgctactggatacggcaaatatggaagtggaaacagctgagctgatagcaggtttatcagtaggtggaggagttgtgagctttggtggtgagtatgacaagccattgctcaggctcgaagtagatgccacagatgtaaaatggagaggtgcattcagtgttgttgatgcagctgaaggcaacaccttctcagatgggttggctacatcttctgctttttctgttttatcacctctctctgaactagtgctggctaatgttgtgggcttggtgacactggaaaaataa

SEQ ID NO: 15161 - DNA, 492 bp, Zea Mays
cacgggtttactgcatatgctgtagattataataagatgtagacacacaagagcagtttgcgctcaaaatctggatcaagggagggaagaagttcctgagctacttccggtgttgtatcaaggcctgaagaggtgctgctctagtgcctgcagtccctgtgtttttttttcgcagcagaacacttgtgagcaatcaggcctcggttttgttaagtaccccgtgtccaaaaacgtgtaatatatttgtccttatggatcagtcgttgggcctgtatgaagaacagaccagtttatggggtaagcaacgttctttttgtacacatacatcaccatcgatttgtccttgatacgatcaaggggcatggttcgaatgaattggttttgtaattatgatgggaaaatacgtacggaaagcacaaatgactcctggcacctttttctataggagcacacaattttttatatatagaagtgtggagacttctcagcgaa

SEQ ID NO: 15162 - DNA, 684 bp, Zea Mays
tgctgtttagtcctaggatgttcaagtgccaggtggataccaacctggaatcaccaaaggatattgtcccagaaggggtgccattcacaggttcagggtacaggattgctccctactcttccatcttgcttaaggcaaagccttagaatggcggaggcaagtcattctcaagtaagcacgaataatggtgttgtgatccctaactttccaagctcttagccaactgtactgcaagtatagcaaactttggtatgtgaagtcggaccaacccttgcggaaatcaacggaagccatggtttgctaaaggtatactcatggagaattggagatatggcaaacacatacgcaagtaacctccacacatctaagcaagaagagcctttcattaggggatgcatggctcgaggaaactatatttgcatttggttgattcatttttatttgttgcacatgtcagtatgtcacctgtgtgtgtcaagctcttatttgcttaaaaattggacattcctttgttacatatttgtgttgtactgtgttggagctagcgttcctggtatattgcacgggggtgggaggacgggggacgctttgtcgccgtggtcttaggctaccagcaatggttttctctatatttctgctcctgtatcacttttttgcgtcacattatcaatatttcatcctcta

SEQ ID NO: 15163 - DNA, 154 bp, Zea Mays
catgattacagccttttctttccaaaacagtaacaatccccctggcgcctgaaaaagcacatatgtctccgcggctattcaagattttctcaaaggcctcaacttcgtgactgatccattcaatcgggccttctggattcccccttgtgaaatt

SEQ ID NO: 15164 - DNA, 568 bp, Zea Mays
gtagaagggtgcaagctcatcagaaaagaaaagagttacaagaagatcaagcttggcggtggctgctgctgtgttgcctcctcttgttggaccgaagagagggaggggagaagcagctggcgtgcagacttctactcaggtggtcttttattctctatggggcttctaggatacatcttctccagaagcaccataagtcttgtcttgggcattacaccagggctagccactctacaacttggcactctcagtctgaagttctagaggagcggcagatccagcttcctgcttatcttggctcaggcagaggtgatgatgatgtgcaagcatcttcaccttgagttctgccttgccagaatgaatcaagtttattttcccatcctgctccatttgtggtagcccaatcgtctgtcctcacatcaactttcacctgccttaagcctttaggttcatttgtcttatatataccatggtaaaccacaccatgaatatgccataaataagtaacaagagtgtctagcaactcagcacacacaggaagtcaggatccttcacgtacacctttcat

SEQ ID NO: 15165 - DNA, 1017 bp, Zea Mays
gttgaagttacaagggtaggcctgttgcagttgtgggagctgtcttattaaaatcattaggtcacgggttcaaagcagcctctgtgcatttgcagtggtaaggcttgcttccgtttatcccttcctcaactccactcatgtgggcctctggcactgggtctgccctttacttttagttaaagttgatagaatgcttctgttcaccgttacaaccttaccctccttcctgtctagctgcatggctttctcttcatgcattcaaaagagttgtattttttcctatcctgttctacttgatattcttttcctgtcattagtttgcgtttctgttatctttcagggcctttcaagatcaatggagtaccgatccgccgtgtgaaccagacctatggagaagaagcagaaggtgaagaagaccgagggcgagctttttgagacagaaaaggaggcatccaagtcactgcctgacttcaagaaggatgaccagaaggctgtggattctgctctgatcaaggctatcgaggctgtcctggagctgaaaacctatcttggcgcccggttctctctcagggatggtgacaagccccatgagatggtattctaagtttctagttttggagttcgtaggaagctgttttgtctgtgttcttgtacttctgagttttgtaccagtagcgaacgtttcattgtgattgaagtcttcctgccaaatattataagatctaagaaagttctatccgtgttggtggttcagcagtgcattatctgcatttggttccttaggtagtccatggtatcttgaggtcccattttgtttgaattgctgactgtcaggtgtttttgctgttggtttggaataaacttggcatgtagcttgccgaaactggaataaacttgacatgcatcgtacaaatgagtcaatagcatggaacggctagttcctgaactagctgaggggccgtgcaatgaatatgccttgtgcaggaggtaaatgtgcatgcaatagttaaaagagaa

SEQ ID NO: 15166 - DNA, 1476 bp, Zea Mays
tgatactgctagtagttcctaaagttgggttatctgctgcaaactatgctaagaatttattgcgtgtcactgttcttcttcaatatgtcccccgtatcatcagattcgtaccacttcttgatgagggttaaccaatgtctacgagatgcttgttctatatcgaccattccatattgtgattcttttatagactgtggacgtggcattgggagtggactgtacagacagcagtggttcaatgactcgggtgcagaagcttgttttaacactggaaatgatgctactttccaatatggaatttatgagcaggctgttttgctcactacagaagacagtgctgtaaaacgatatatatattcattattttgggggtttcagcaaataagtaccttagcaggaaaccttgtcccgagttactttatatgggaagttctgttcacgatggctattattggtctgggactgttgctttttgcattgcttattggaaacatgcaaaattttctgcaagctcttggaagaaggaggttggaaatgcaactcaggcgccgtgatgttgaaaagtggatgagccataggcgattgcctgaagatttgagaaggagggttagacgagccgaaaggttcacctgggcagctactcaaggagtgaatgaagaggagcttttgagtaatttacctgaagacatccaaagggacatacgtcgccacttctttagattccttaataaggtccgattattcaccttgatggattggcctatattggatgcaatatgtgacaaattaagacaaaacttgtatattagtggaagtgacattctttaccaaggtggcactgttgaaaagatggtcttcatagtgagagggaagctggaaagcatcagtgcagatggcagcaaggctccattacatgatggagatgtatgtggagaggagctcctcacgtggtacttggaacactcttcagcgaacagagatggtgggaaaattaaattccaaggtatgcggttggttgctatacgtacagtaagatgtttaacaaatgttgaagcttttgtactcagagcaagtgatctggaagaagtcacctcgcagtttgctcgattcctgcgtaatccacgagtgcagggagcgatcaggtatgaatccccctactggcgaaccattgctgcaactcgtattcaggttgcatggaggtatcgtaaaaggcggctgaagcgagctgagaagtcgaggttgagcgaagagacttatgcctcacttggatcttgacacatgattcttttcagcgtagacggaggggatgattgatcgctacctgactaggcactaacttttcagtttcagttcagcatctaaagcttctagagctgtgaaatttctccgaacatgtctacttggtggaacctaacggggcaaatatttttggctttggtgttccgtgtacataataagaggaaagttttttttttc

SEQ ID NO: 15167 - DNA, 579 bp, Zea Mays
ctccttacactttaggctgcagaagaggcactgaagaccttgaaatcaaccactgacccacaaattaagaagtatctgagacctgtaagatgcaatggctgattcccttccacgttctgagctccgcaaccaaatgagctttagctcatttcaccgttacagatgtcattgatttagcagaagtgcatcaccctttctgtgagtatggttgacatctcacctcgagcacatgatgtgtgccaaacacatgtcttgttctggaaatcctggctttgaaggtggtaacatagagagcggacatggtgctttatgcattcttttgaccatcatacaagtatagatgttatgtcttgtttaggatagtggcatagttggctgtaaacaagcaggagagtagatgcggatctaaaattcttgttttgaaggttatgctgactcattaacagttatggatcgttaaaaattgaatgcctgtaccagttgtcatgtttacatgtctgttataaagtgctaaatcctttacaaacttatttcaactacaaataaattcaagtgctcgtatttgttgagttatacatt

SEQ ID NO: 15168 - DNA, 562 bp, Zea Mays
tgacgtatcttccttaatgccaacaactgatgctgaatccgtacctggaccgagccacgatgataactgggcggggatcatcagccgacgagctgccagagttttctccgacatacgtggcgttctcgacgcttggactcgtcatcctcaccatcttcaccaacgtcatgttcaacctgtacataaaaccctccgtggacggcgtcgatccaccgcctgaaagaatccagagaacggccctagtcaatccagcagacaggccgtccgaatagttttctgcgcagcacaatacacacagtatacggttttgatgatgaagacatgtgtcccaggtgggaatggactatttaattgtgtggacagtgggtggactcacacattattactagcgtcatactgcttctctcaagtgacccattatccggtgggattacatgactgcgagctctgatgtgtgtcttgcatgctagctcctccatctttgctttaaagttacacaagatggcagctgcattttgtgatcgggtgttcttctttgtttcctttttatcctctccagtcc

SEQ ID NO: 15169 - DNA, 826 bp, Zea Mays
ctgtgtttggcagcctaatcaattatggggagatatctatgtggaaccatttgtcaatatacccgatgacaaaataagggaggcgctcaaagttgtcttagacccaagaaaccaacctctgcttattcattgtaagagaggcaagcaccgaactggttgtttggtcgggtgcttgaggaagctgcagaaatggtgcttgtcttcagtcttcgacgagtaccatcgctttgccgctgcgaaagcgcgaatcactgaccagagattcatggagctgttcgacgtctcaagcttgaagcacctgacaccctcacattgttaaccccaaggcgcgtgatcgcttgatcccccccaacttctagtacatctccaaggctatcttcctgcagctactgaaccgattcagccgtgaataattttggaaccccctagagtccatgaggtagtgatgaaaccattgcagaacattcgtgcttgagaggtttagtttcccccctgcttagcgcactggagagcctgagaaccagactgctgcggtcgatttgcgaggggttctcttttttggtagctctcgcgaggaattcgccattgtttttgggtactgaagcagcatgtactcgagcagcttctgaggaggaatgaactactctctaagtgcaaaaaaggcgtgtctcttcttgcacgagtgtggttagggatactgcatattaacaagaggttgaaatagcatgataattgcctatttaagcctcaattagcccccaaaaaaataagaaatatttatcttgcatttctcactttggactcgcatttctcagtttggacacca

SEQ ID NO: 15170 - DNA, 881 bp, Zea Mays
tctttctttacttcagccgctctttcccactcttcacttcgcccaatttctctcccaccctcctgctcctcctcccgcggtcccgccatttcgtcccccgctcaccaactcaaaccccctccgctctcaaaccctaaccctagccctagcccgctcccggcggaccgacgatgccgaaggcaggcggcggggcggcggacgaagaggagttccgcgccgaggtggaggagcgcctcatcaacgaggagtacaagatctggaagaagaacacacccttcctctacgacctcgtcatcacccacgcgctcgaatggccctcccttaccgtgcagtggctccccgaccgcaccgagccgccggggaaggaccactccgtccagaagatgatccttggcacgcacacctctgacaacgagcccaactacctcatgctcgcgcaggtccagctgcccctcgacgacgccgaggccgacgcccgccactacgacgatgaccacgccgacatcggtgggtttggcgccgcctccggcaaggtgcaaattgttcagcagataaatcatgatggagaggtcaatcgagctcgctatatgccccaaaattcatttataattgctattaagacagttagcgcagaagtatatgtttttgactatagcaagcacccatctaagcctccactagatggtgcatgcaaccggtggtttacggctgaagggacataattctgaaggatatggcttatcatggagtatttttaaagagggacatttgttaagtgggtctgacgatgctcaaatttgcttgtgggacattaaagcaaatagtagaaacaaaagtcttgacgccttgcagatttttaagaattctgtaccatctctttg

SEQ ID NO: 15171 - DNA, 97 bp, Zea Mays
atgcctgagcggggcgaagccagaggaaactatggtggaggctcgaagcgatactgacgtgcaaatcgtttgtctgacttgggtataggggcgaaag

SEQ ID NO: 15172 - DNA, 652 bp, Zea Mays
caactcgcaaggtcctgcatttaatgaacaagatgaaccttcctgctccatttcggatggcattgcctactccaccactaccatcgcaagttcctgttatccctcatcctcagccaccaccgggatctactacaactggggagcttcattcagcagatttgtctagtgatgagtctgagttagaatcatctgatgaagatattgataaacggaaaatcaagcgtgcaaagcatgaagcaattgttggtcctgcagttgacaaaaacgttgctcatgaagcagtgggggtgaaatctgttgcattggtttctaatgagcttcaagtgataaaaaagaaaaacccagtacttcagataaaaattacccctaagcctatacagaaggaaccacctgtcccaagtatgactgaaaatgaaccggattcaactcatgaacaacttcaagagaaacattttgtcacacctcaggaaatgtcgagagagaaattaccaccagaggagattttatcccttcctatgttcaagaattacactccaggaaatccagccagtgttctgtacattaagaacttggcaaaggatgtcactcatgacgacttctactatgtctttggcatgccttaaatttaacggccgagatgcatgtattgctg

SEQ ID NO: 15173 - DNA, 1381 bp, Zea Mays
cccgtgccacgggtcagataagcttttctctccccttcgcagctgcaaccgctcgccgcgtgctccctttgtactgaaccgcatcctccccgcgccgacctgctccggcgagttaaacatggccgtcctcctccgcagcacctccgccgccgcctcgactgctggcccctcctcggcgctgctcgccaccaccttccgccgctcccgcggctgccttctgccccgtgccgcgccgcagcgccgcttgtatgtggcccgcgcctcggcccagcccctcgaggtctgcgctaaggagtccatcaccatccctggccgcctcggagactgtcctttcacacagagggttttgttgactatagaggagaagcatctgccttatgatctgaagctagttgatctagctaataagccagattggttatttgaaatcaacccagaaggtaaagtgcctatcgtgaagctcgaggaaaaatggattggtgattctgatgttataacacaagcattagaggagaaataccctgaaccacccttggcaactccaccagaaaaagcttcagttggatcaaaaatattttccactttcattggtttcctcaaaagcaaagatccaagcgatggaacagaagaggcactacttaatgagcttacttcatttgatagttatctaaaagacaatggtccatttattaatggtggaataatttctgctgctgatctctctctgggtcctaaactatatcacatggagataactctgggccactacaagaattggtctgttccagattcactttcttatgtaaaaacatatatgaagtcgattttctcaatggattcttttgtcaaaactcaagctctgacagaggatgtaattgctggatggcgcccaaaagtcatgggttaaattcatttctaaagttagacgttaaggagagggagagaggtgtcgattggcgaatggagggtctagatgcaaaggtttgtcgcatggctgtaatatgtacatgaaatgtggtggattttgttaggaattttctagggcatagcatatctggtattcatatccaatctcctttgctttgtatgtcaaatggaaaactccttcgagactcaggtttaatttctttagtggcaaattttttggattggttaaaaaaatctctcattgtgtctcatccactttcgggttacaatgtcatatatgttactctttggttggaccgctgcagaatgaactgttgatgttggtgcgttagtgattggaggcgagattttcatggctggtgcgagcacaataccctacgctcggcggcacgggcgaagggccagcgcgccaactcaggtgccgcgtcggcgtgtaggtgcgtttgggcgtagg

SEQ ID NO: 15174 - DNA, 1298 bp, Zea Mays
ataatggtggagggaaggtacatcgtgccaccgacataggggctacaagcgtttcttcaaacgaactgccctagaaacatcagactatcttaaagatgattgccttttagtgaactgcactgttggcgttgttcaatcacatactgaaggaccaaagatatacacaattccagtaccgcggtccaacatggctctacatattggtcagctattgacaagtggaaagaggacagacattgcattcgaagttgatggagagatgtttcctgcccacaaggtgattctttcagcccggtctcctgtttttagggcacaactttttggcccaatgaaggataaggacatgaagtgtataaagattgaagacatggaggctccagtattcaaggccttgctccatttcatgtattgggatgagttgccggatattgaagagcttactggtgtaaatacaacttgggtatccaccttgatggctcaacatttactagctgctgcagaccgttatgcattggagagattgaaattgctctgtgaacttaagctgtgtgaagatgttgcaataaatacagtggcaaatactttggcactggctgaacagcaccactgttatcagctaaaaactgtttgcttgaaatttgtagctctgcctgaaaatttgaaagctgtcatgcaaaccgatgggtttgattatttgcaacaaagctgcccatccctcctgaccgagcttctcgagtatgtggccaaggcaggagagcactccgtgagcccctgcttgtattcaactgaagtccttgacggtggtgatgccaatgggcgacgcgtgaaaccaaggatctaacggttggaagaggagttcctcgtgcccattttaagttgtaaagtgtttcgaatgacgggtgcttatgtggccgtgccatatcatgcatgttgtagcgtgtgggtttgtgtgtgtgttgtgacttccatccctctccccagccgtattgatggtactgtagagggtgttatcgctaatatataccctactgacttatgtattgcatcgctgtttcaaagcagtctgtcatcataagtgcacacaggtggaatagggcgaggatggtctggtgcaaaggtgaaataatggcacagactgtgtatgtgtgtgtcctgtttttcagaagttttaccttgcggtaggccagatttgtcgattcttagtcgtctgtatttggctgtattcaattgaaattgtgaaatgtatcagttgaagttatgcgtagacattcacttccatacctctcgaatacccgttt

SEQ ID NO: 15175 - DNA, 894 bp, Zea Mays
ctcgatctttggtggcatctagctgcgcagggttacctgaacgaccccgagtcgacgaagaacaccatcgacaaggacggctggctgcacaccggagacatcggctacgtggacgacgacgacgagatcttcatcgtcgacaggctcaaggagatcatcaagtacaagggcttccaggtgccgccggcggagctggaggcgctcctcatcacgcacccggagatcaaggacgccgccgtcgtatcaatgaacgatgaccttgctggtgaaatcccggtcgccttcatcgtgcggaccgaaggttctcaagtcaccgaggatgagatcaagcaattcgtcgccaaggaggtggttttctacaagaagatccacaaggtcttcttcaccgaatccatccccaagaacccgtcgggcaagatcctgaggaaggacttgagagccaggctcgccgccggtgttcactgaggcccgtatgcagcttcttctcggacggccaccacgctgctgcgaaaaaaaaggcgatgtaatggcggtaacactactattcatgaactggcaacagaagggacacgtattcctgtggaacacatgttgccagaaagaggttttagtttgtctgtttgttggccctgtgtgtaatgttcataaacgatatagacgtcgtctctatgttgtttttgacccaaagaacaagcctgattacggcaatacagctacggagtaccgtgtttcatatgcctagatgtttgtcataagttattatagccggagatggcgatgggcctcgatctctccttcactaggactagtttggcaacgaggagagaaaaatcccttgaaaattaatctaggaggggattttagatgccaccttatttcccccctcttcggtgt

SEQ ID NO: 15176 - DNA, 105 bp, Zea Mays
cttatttaactaagaattgttagtgtggtcagctaattaaaattgtgcaatagctctagtttcattttaaataaatatcaattaatataatcagatcaaactaaa

SEQ ID NO: 15177 - DNA, 2326 bp, Zea Mays
ggcagccgagcaccctgtttgccgctcgcggccggctgaggtgctgctgctgctgtgcaaatgcgatgagcaatttctgcggtggaatttgacactccagtccaggtgctgctgtcgacggtgggactgggaccacgcggcgcggccgatccagatcccgcgcactcgtccgcgctgctgcctctcaccagcggcggcagcggcagcggctttgcctcgcggggcacggttgcgccagacgaggaagaggggagagacggggcgagctcggctgaatcgcaggaagtggcagaagcagcaaacgattcgttctcctactcactaagagagtgccagaagcagcggcgtctcaagtcagagaggtctgcactggtgcggccaccggcctcgcataagctcaataatgccggaggtattgagcttctagtgctctcgccgaggtgcttgattggtggtaacccgggaggaatgagcaagagctcaacgacatcatcccggagcagatcaggcacaggcacgttcccaagccctgggactccgagctgcaaccggcattgtgcaggcagcatgcagtactccaagggttggagttcagagcgcgtgccactgggcactggtaggaatagaaggtatgggggcagtggggttgtgcttccatttaacaatgggaggaagctgccatcgaaatgggaggatgcagagaagtggatcctaagtccagtttcctgtgatgggttggggaggatgtctgcaccagctccacatcatagacggcccaagtcgaagagtgggccacttggccatccagctggcattccaggggcttatgcggctgtttcaccgcttgttccttgctttgatggtgtgctggcagcagctaatttcgcagcacattcacctttctctgctggggttctcataccagagcacgggcgcattggcgacttcagcagtggaagagacagatgtggtgatgacggtagcagcagatcctactccgctgagaaagagtcctatatattaagatctgcaagcatacatgcatggacagaaacacttatggaggcatctgcttttgctaatatctcagaagaaaccgtacaagatgataaactgcaacgccagacagaagcaacttccatgatttccagtccaatcataaagaaagacatcggcacacagatgagtcctgaggatagtatatcttctccaaaagcgagacattcctgctccagtctgccttcaggacatctgataaaggaagcaaatagtcatatacctaaacctgaaattcgggacgtgcaggttgatgaccaagtaactgtgacccggtggtccaagcgacatgtaacacgaggctctgataagaggtcaacaaatattattgaatggaggaagaagaccactgaaacccgaactccatcttttgatgaaaaagaaagagaaagatgcatgtcacagtgcaaaagggaggaagcaaagatcacagcttgggaaaatctacagaaagcaaaagcagaggcagctatccgtaagctggagatgaaacttgaaaagaaacggtcatcatcaatggacaaaattttaggcaaactccgctctgctcagaagaaagcacaagacatgcgaagtgtagtttcttctagtgaaggtcagtgtagtgtgagggcaaccaagaagacatcttcctctgtcaaaactggcaggcctttcagctgctgctttacctaccgtgcttgctagttgtgatacacagttggtgcctgtggatacagcaatggatataggtctattcgacctcttctcaggcaacagttatggacgcgaagggaagtcagttgggttttgactacaaggcctaattgttaatgagatttgcactgatgaatgagatatcgttatggagcagcagacgaagaaagccacgcgaaatccactcatgtaactgatggagtggactaatgcagtctagtatgcgacgatcaatctctgtacacccggtagaaaaagttcatgagcttcatggcagttagaatcaggattgagctgatattcatcccgcttgatgtgtagctagcattcttgtaactggaattgtgtgtgtaatgcaaatcatgggcgcattagactgtaatgaagaaaaagtcagggctgcgcctttagaatgcagcttgctcactttttgagtttagtactgagactgggcttgtttgttattggttggcagcaattggaactgtgacgacgtatattttccttttttttggaacgcgctaaacttgttttcccgaattttatggcgaccaacaaagtacatattccattg

SEQ ID NO: 15178 - DNA, 991 bp, Zea Mays
aaaaggcttaggagagagggagaggtatgagaacatggacatcgctttacattatggtgctatgttgagggaatgtattcgccaccaaagcattgcaaggtatgttttagagtctgaacacatgaagaagttctttgactatatacagcttccaaattttgacatagcttctgatgcttcggctacctttaaggaactgttgacaaggcataaagcaaccgtggctgaatttctctccaacaattatgattggttctttgaagaatttaactctaggttgctgtcatcaaccaactacataacaaaaaggcaagctatcaagttgttgggagatatgctgctggatagatcaaatgctgcagtcatgatgcgctatgttagctccaaagacaaccttatgattttgatgaatctcttaagggattcgagtaaaaatattcaaattgaagcatttcacgtgttcaagctgtttgctgcgaataaaaacaaaccgcctgaggtcgtgaacatactggtcaccaatagaagcaagctacttcggttttttgctggattcaagattgacaaagaggatgaacagtttgaagcagacaaggagcaagtcataaaagaaatatcggcactttgagtatgcttgaggaaagcggagctgacaggacggtcccacggtgcagcgagagggagtgagcgcacggagggagccccatcacgttgatgagacggacccgcaaggaagagagggaaagggggcgcggacgagggcaactggtatcgacagagcggctccactgggtagagagagggagggagcacgcggcctggctgggccgagctagaccggtttgggctgaaatggttttctctttttccaggaaatttctcattgcttttctttttattttctctaggattttcaattcaaatttaaaccaagtttcaaattcaaacaaattcaaacatatgcaacaatttaaagaatgtttaagctcag

SEQ ID NO: 15179 - DNA, 2540 bp, Zea Mays
ttttatctcttttatgtgtttccccgtttcgttgttttcggttctcctttgcctttgtttcccttttctgttctttgggggttgagctctgaggttttcatacggggtttcatctctagcctaccccaacgtgcttgggacaaaaaaggctttgttgttgttgttgttgttgttgttgttgtataaatagaatgtatattccgtctccaaagtccaaagcagttgttcctcgccgtctcggggtctcggcctctcctcggtctctcctcccagatcgggccatccaggtgctaccgctcttcgccccctccacttcaccgccgccgcgtagatccgtctccgcctcctggaagcgctaccagtggaccaacgccgagccggcggagttagcggcgttagggttgcggttgggaattgattgcgggggacgcagcggtggcgcctggcatggcgggggcgcccggggtcgggccgggtgcggggggtgggggcggcgccgctgcggggctcaagacttacttcaagacgcccgaggggaggtacaagctgcagtacgagaaggcgcactccgcggtgctgcactacagccacggcggcaagaccgtctcgcagttgacagtggcatacctcaaggagaagcctgctagccagggctctcagccatcaacaccaagcgccagcagtgggatgcggtctgcagcagcaaggctgctgggcactgggaatgggagcaaggcacttagctttggtggcggtaatggtgcaagccgagctgttgctggaagcagccgtgtaggaggcggccttggtacacctacaggccttggtggatcacaggggggcacaaattatgatggcaagggtacatatattgtattcaatgctgctgatacactattcatcagtgatctcaattcccaggagaaggatccactaaagtccatccatttcagcaactcaaacccactgtgccatgcattcgacccagaggccaaagagggacacgacctgatcattgggatgggatcaggggatgtctattcaatgtcgctgaggcaacagttacaagatcctggaagaaaacccgtggcagctctacattacaataagggtgataaagatgtctcacccaatggaagacatgatcaaggtagcataggtacatgtctgaacaaggatgggaacacagactgtacgtttccagctgtcaaggatcagtctcagtttatggttgcacatgcaaagtcgagtaagagcaacccagtcgctaggtggcatatatgtcaaggttcgatcaatgcaatttccttttcaccagatggcgcatacttggcgactgttgggagagatggttatttgagagtattcgatttttcaaaggaacaactaatatttggtggaagaagttattatggtgcactgttgtgttgcacttggagctcagatggaaaatatctattaacaggtggtgaagatgatcttgtgcaggtatggggcatggatgatagaaagatagttgcttggggtgaaggacataattcatgggtcagtggagttgcttttgattcatattggtccccaccaagttctgatggaaatggagaaaatgtatatcgctttggttctgttgggcaggacacccaactacttctgtgggacctggcactggatgagattgttgtcccactacggcatccttcaagtgcctcacctacgtttagcagcgggagcccttccacacactgggacaatgcatgccctccaacaggtgttcttcaaccttctcctagaatgcgagatgtcccaaaactatcgcccctagttgcccaccgagtacatgccgatcccctatctggtatggtgttcaccagtgaatctatcctcaccatctgccgcgagggcctcatcaaaatctgggttcgaccagagcagagcgaaaacaatcagcaatcgaattcttcagaatttgctttaggccctgcttcgaaggatagggcgatcacatcttccaataaagcaagtagctccagctttaagaagctgccgcctgttcttgtcacatgatgaatcaacgggatggttcttgtggatatttctgcttcacgtggcattagtggtggatatgaatcttactccatggttgatggggatgaaactctcatatggagtctgcagactgcaagtaatgagggtgagcatttgatggttgatgttcccaggaagcagggccagcgttgccagtttttttggcacgaaagagtaaatgggagctcttgtacagacacatacttaatgataaaattgtaaaaactcactgtccgtttcataatattcaatagccaccgaaagatgattggacgaccatgttatcgattttagctggtgggttgatagtatccttaaactttggtacttcggagacttgtaattatggaccataatatctgaggaatgcttcagtcttacctggtgtaagttgtgttactatttccttctgccttttgtcaattattagatctagtttggcaactccatttttc

SEQ ID NO: 15180 - DNA, 1822 bp, Zea Mays
cagccaagctggataggcctagcggtagcagaatccttgaccaaacttccctgctgagaatgcaaccttggtaccccagaattcatggcacctgaactttatgatgaaaattatgatgagcgtgttgatatttactcatttggaatgtgtttgttggagatctttactcttgaatatccatacagtgaatgtacgaatccagctcagatttttaagaaagtatccacaggtgttaaacctgctgcattggctagaatttctgatcttcaagtaaagcagtttattgagaaatgtttagttcctgcttctgagaggtcgtctgccaaagaacttctgcaagacacatttctttgtcctgacaatacacatgaacctgctgtcactaagtttatatctccagcacctaaaaaaacagtagatatctctctggcgtctttgcatatggatgttgacactttggaatctagccatactgattcaggcaaggaaaatggatctgttgctccacatacaccagttttggagttcacaagaaccaacaaaaatacagagctaaagctaaagggcgagaaacttgataacaactccgtgtcactggttttgcgaattgctgatttctctggtatgccttacttggatacatttctttgaagctcagtttttgcatattgttggtgccttaacagctaatgcctttctgattccaggtcatgcaagaaatatccatttcctcttttacttggactctgatacagctatgtctgtagctgctgaaatggttgaacaattggagttagcggactgcgacgttacgttcattgctgattttattgaccttttgatagtgaatcttattccaggttggagacctgtaaatgatgcagcagcgaactcgtataggcgatctgaaagtgaacttgcagtcaattcccatcagaacatctcaaagttggtacctgattatgcattaattgatggtgtgatgcgcccaaaagatgtgaatgcatcaactagttgccttgactctgtctcaagtgcaaccaacctaggaggatcacaaggttctgaaggttcagtcatttctgtacagcttgctgagagttccaaaagtgtgagtgactatggggccgaggattatggcactatggactgtggtgggtacaaagacggaatcagcacattagattgcagccatgttttagataatggatcgaggtcgattttccatatagatcaagcatcacctttcttggagttggccagctgtggttcatcaacttcaactgataaccaggatgtgatgaacggggagcttgtttttattgaagctcagtacaagcacttggttgatgagttgacaaggatgcgagaagaggctagggaaggagctcgaaaaaactggttgccagatacatgatgtttttgttcaaatttggcatttcctctaaacatcataaactatgttcgatttcatgtttgaagtgtgagaaatgttaataatctgttttagttaaagcattgatgtagtttgcaagtcacagcaaacttcgtgcccgtccccagatcaggtggtcgttctctcgttgagggcggagcaggaccagattttcccagagcacagaaccaccttaacactccctacaaaaaaaataattgtatgatcgttctcctgggagccattcctccgttcttccctcaattcatgtcgctgtatgaaagcagggtgatgataagacggggtgcagaattgcaggtttgacaaggtagtatgcgtttgggggcggtctgccgtactaggcataacgtcaatcaacgaatacaa

SEQ ID NO: 15181 - DNA, 1186 bp, Zea Mays
atggccaatccatccgaggctcccgtgacgctgacgccgacgccgccgacgccgacgccgacgctgccacctcggcgtcggcggcgtcgctgaacgacctctgcgccaccgccgcggcgggggcgcccgcgccgttcccgacggcggctgcgtgggcggtcgccgcgctgctcgcggtgggcctcggggtcggcgccctcgtcctcgccgtcgtgcgcagcccggcgctgctcgtggtggcggtcctcctcgcggcgtccgtggcggcgttcctcctgtggaatgccgcggccgcggcgtcgggccacgcgctgcgccggttcgtggacgggctccaggcctccagcctccgcgttgcggccgatggccagctcgtcaagatcaccggatttgtttcatgcggcgacatttcactgatatcttcatacgagaaggttgagaattgtgtatacacatctactattttgagaaaatgtgctagatggggttccatgacactaaatccttggaatcgatgttccaagtggaaattagcacatgccgagaggttcgctgctgatttctacgtagcggatgcaaaatcaggtaggagggccttggtgaaagctgggcaccactcaaaggtcgtgccgctgatcgacgagaacctcctggtgacaacaagcaggggcaccgagttatcttccactctagagcactggctcgaagaaaggaacctttcttccgaagaagcccagattatccgtctagaggaagggtatatcagagaagggatgcggttgagcgtggttggagtgctgagcaagaagaacggggatgccgtgatacttcctccgctggagcctcaatcgacgggctttgtgttgctgtcgtgtctcctcccgtcatatttcgacgggatagtgctgagactggccgccgtgccgaactcgggcgtctcatgaagagccgctatgggtaggggagctcggtgagatgtaacagctaacaacaactcttgtgcggtgcccttgcccccttgggatctttttcctgtacgggtccacctttttcttttttgtttgcttctgggactcgatcgtgtatgtggttttcttttcaggtaatcctaatgtacattctcactatatcatagttgtagtgcgaggcatttcagcgctcttgcctggctcccttctatctgaaa

SEQ ID NO: 15182 - DNA, 100 bp, Zea Mays
gtcttgctagtgtcgcgctgccgtcgatgcaacgcggggttgtccctctgctctgcccagctcgtcgagtcccaaaaatctgcacgcacgtcatagttgg

SEQ ID NO: 15183 - DNA, 326 bp, Zea Mays
gttgcctggtcgcatacggcgcacgtgtttggctcgacgtgataccaggggactcgaaacctgctgttggctctactctcattggtggtgagacaggagctctggagaggttgaagaagtttgctgcagaatgctctatgcagccaaacaaagcagataaaagcaatacccaagatagcatatatggtgctaatttctcctgcaaaatttctccatggctcgctacaggttgcctttctccaaggttcatgtatgaggagttgaagaagcatgctactagagcaatttcttctgagtcacacccagaataatgatggcacatctga

SEQ ID NO: 15184 - DNA, 2264 bp, Zea Mays
atcgacgattcctctgttaaaagttcaacgagttagccgcttcggcaggcaagtaggacgaggagcagcagctcagatttcggatcctggcactggcaactggcatgggctcgtttgggatggacatggactggaaccagaaggcctccgtgctgctgtgggactgggagaacctgccgcccgcagccgcaaacgggagcgagagccacaggacgaccgctgccgcgcctcagttcgcgggccttgaggccacagggcatgaaccggcgccttcttccgtatcctcgtcaatccattctctgcccagtgccaaggggaacaagaacaagaacaacatggagctcatcagtttcgcacctgccaaagcgcccgacaaggacactggttcggtgctcagcagcggagagccggtggtgctaggcctgaagcttggcaagagaacgtatttcgaagatggttgtggactagggcagagcggcaagagttcggcggcgttaggcactgccagtgcagcgacccctccgggtcctgcgaagaaggcgaaggcggcggcggcggctccaaccgcgcagcagcagaaatcgtactgccaggttgaaggctgcaggaccgatctgtcctctgctaaagactatcatcgcaagcacagagtctgcgagccccattccaaggcgcccaaggtggtcgtcgctggcctggagcggcgcttctgccagcagtgcagccggttccatggactggccgagttcgaccagaagaagaagagctgccgcaggcgactcaacgaccacaacgcgcgcaggcggaagccccagcccgaagcgctccctttcggctcatcgaggctgtcggcgatgttctatgacacgaggcgccaggcgagcctcctgtttggtgaaggtccctacggtcagatgagaagctgtgcgagttcttggtgggatagcccaggagcaggaggaggaggcttcaaattcgcggagacgagaggagctccttggttgaagccggcgagagctgctgctgatgggctgctgcctttgtcaggtcagcagcagcagcaggtgtggaatgactcgattccgcatgttgcccatcaggaggatttcgatgggttcacggtcacggcgttcaaaggaatcagtccaaagacccttgatcatcaaggcgcaggcgttgaagcctgtgcggccgtctccagcccggacggcgccccggaccttcagcgtgctctctctcttctgtcaaacagtccggccggtggcggcggcaccaacaccaaccacccgccgccgccgccggcggctgagctgcaccaccaccgcgctgccccgagcagctgcctcgccgccggctccgtctccgtgctgcaggaggcctcgtcgccggggctgtggcaggacggcggcggcagcgcggccctgggccaccacgcgcacgcgcggctccaggctctcgacgccgccatggcgacggcgcaggagctcctccagctccccaggccgccgccatcgtacggcggctcctcgtcccactacgacctgatgcgctgatgcttccttccttgtggattgtggtggagaactggagatggagcgggagcgccgccgtgcccccggttggcgcgtggaaatcagtcagacgtggcttctgtggcgtcgtctctgcaacgcgggagcgggattttgcttgtgttctgaacgaacagaaaataataaaaaagaagaaggccttgtcgccatgggaactcgtggaggtcgccggtagagctgcgcgcgcttgaataatccacggttttgtgacgctagcagttgaagttctattgatttgtgcaatgtaataacttggttgcttcggaagagttctattgtcatctttaatggcaccattagttcaatctaacatttattctgcttccaatatacgtagtacattattagaactaggagcgcaaccctaaaaaaaagcatagctgcattattccaaccaccgcacatagctagctactcacaaaaaagctgattgattcatgagacagctaggcggccggcaagacagccctcggcgtgccaagatagaacaccaagaacaccaagacaacaaagcgcctttcagtcaagttgacggggccaggccgggtcactaccgcttgccagctcccaggactcggcaccggtactctcccagagcccagatcgggaaggtgttcctgtactgggagtaactgatcatgcagttcttgttgaacactcctatgatctcct

SEQ ID NO: 15185 - DNA, 756 bp, Zea Mays
gttgaggatgttacaatgtgaaacaaagtcatattgagccctaaaaaccagtggtgacaatcagcaaatcaaagaaagcgaccacaaatagaattcagaaataggcttatattgagagagggagacttggaggagcgggcgagatactgtgtgtgtaaatacggttgtctgtgacaacacagaataactcaaactctatattaatggttcacttcagccataacagttcattaaccagttgctggcaatacccccctgtcgcccaactcaaactcttcaaatattagtaaaaaacaccacctaatgaaacctgaatattgtaactttgttgctgccataatgaaattcagtgttaccgtggtgagaaaaaagtcgccacctaatgatttgtcttcgccatgtacatgttctgttgctggtgcaaatttgcaaaatgatagatgccaacagacctgtgtctctagttccatcccatggatagttggcaacaagagcccccccatgcaagctagcagaagtcgtgaagtgttcttgctttacccaattcataatggctctagtttcaggctgtctgtagtcaatatcgttgttaacggggaagaacttcaatttcggctagtgtcaattgaatggttggtcaggaaaatccctgttgagatcaatattgtttgcattaccatgccatctaagagcaaacccatcagggttcattgtcggaagtatatgaaggtgcatgttctcaacaatgagagttgc

SEQ ID NO: 15186 - DNA, 1905 bp, Zea Mays
tatttgtctgaggtggccgggttacctctgctgagtgaaaatggatggaagtagtaaagggagtgggcattctgaagcattaaggaactacaacctgggaagaactttaggtatcggtacatttggaaaagtgaagattgcagagcataagcttactggacatagggttgctataaagatcatcaactgccgccaaatgagaaatatggaaatggaagagaaagcaaagagagaattcaagatattgaagttgttcattcacccccatatcattcggctttatgaggtcatatacacacctacagatatatatgttgtgatggaatattgtaagtatggcgagttatttgattacattgttgagaaaggcagattacaggaagatgaagctcgtcgaatcttccagcagatcatatctggcgtcgaatactgccatagaaacatggttgtccaccgtgacctaaagccggaaaacttgttacttgattcaaagtataatgtaaaacttgcggattttggtctgagcaatgtcatgcatgatggccattttctgaagactagctgtgggagtccgaactatgctgctccagaggtaatatctggtaaactatatgctggacctgaggtcgatgtatggagttgtggggtgattctttatgctcttctttgtggaactcttccatttgatgatgagaatattcccaatctgttcaaaaaaattaagggaggtatctacacacttccaagtcatttgtctgctttggccagggatttgatcccacgaatgcttgttgttgagcctatgaagagaatcacaattagggaaattcgggagcatcaatggttccagattcgccttccacgttacttggcagtgcctccaccagatacgacacaacaagccaaaatgattgatgaagatacacttcgagatgttgttaatatgggatttaacaagaaccatgtgtgtgaatcactgtgcagcagacttcaaaatgaggcaactgttgcatattatttactattggacaatcggtttagagcaactagtggctatcttggggcagattatcaagaatcaatggacaggaatttaaatcagctggcgtcatctgaatcatctagttctggtacgaggaattatgttccaggaagcagtgatcctcatagcagtggtttgcggccatattatcctgttgaaagaaaatgggcgcttggacttcagtctcgggcccaccctcgtgaaataatggttgaggtcttaaaagcacttcaagaattaaacgtcagatggaagaagaatgggcactacaacgtgaaatgcagatggtgcccagggtttcctgaagttaatgacacgttagatgccagcaacagctttcttggtgactctaccatcatggataatgatgatgctaatgggaggctacctactgtgatcaagtttgaattccagctttacaagacgaaggacgacaagtacctcttagatatgcagagagttactggacctcagctgctcttccttgacttctgtgcggccttccttaccaagcttagggttctatagtggtctaccatgtgcaaattttcactgtggtgatgaataaccgaaagcatgtaaataggaaccttgttctcgtcttttggacaacgaacatgtttgagtgactggtcttgtgttgagcgcgtaaaggtcatgtatacttaggttagtactattttcgttcttaaatatttgtcgtctgctagtgatagttcatttttgaactaaaacgttacgaataaaaaaagagtatattactgtctgcatggacatggctgtttcagtaggccgtggcaccgcagatggcgatgctcactgcaacctattatgaaaaaaaatgcaagattcaacttttgttc

SEQ ID NO: 15187 - DNA, 1740 bp, Zea Mays
ccttgtcctcccaccccgccatttccgccaagctgtcgtcagcctgacgcggtaaccgtgtggactccgctcgggtgggggtggcggcccgaagcccaaaccgcatgggctcgcggccgagctgaccgagccggacccagacccactcgctcctccgcccccgccgcaatggaggagccggcggcggcctctgccctggaggcgcgcggcgacctgcgctcgcgctcggccccgacgtcagccgcgtcgcctcgggggacgttctcgccgacgcgctcaccgacctccgcctcgcgctcgccctgcccgcgctgcccccgcgcgctgccgacggcctggcgctcttcttcgacgacctcctttcacgcgcccaggcgcggggctggttctccgaggtcgtccccaacctcgcacgcctcctcctccgcctccccaccctgctcgaggaccactacgccaaggctggccacggcgcctccgggctccgcgtcatggcgtcgcaggacgcgggcgtcgtgctcctcagccaggagctcgtcgccgcgctgctcacctgcgcgctcttctgcctcttccccacggccggtagggcccaggcgtgccttcccaccatcaatttcgatggcctgttcgcgccgctgattcacaatgcgaggcaaagccaggagcagaaagtgaggtgccttgttcactatttcgagagggtgactgattctatgcctactggtttagtttcgtttgaacgcaaagttcttccccgccgagcgttctctgatggcgttccctatcctgacatccatgcgtgggtggcatctagtgcaccactctgccaattcacggtattttcatcaggtttcatagaagatgaagaacaagaagcccttcaagttgactttgcaaataaatatttggggggaggtgccctttcctggggttgtgtgcaggaagagatccgcttcatgataaaccccgaattgattgtgggtatgctattcttgtcttgtatggaagataacgaggctatagaaatctttggtgcagaacggttctcacagtatatgggttatggttcctcctttcgctttgtcggtgactatttagataccaaaccctttgattcgatgggcagacggagaactaggattgtggctatcgatgctttggactgtccagctaggttacactacgaatctggctgtctcctaagggaagtgaacaaggcattttgtggatttttcgatcaatcgaaacaccatctctatgcgaagcttttccaggatttgcacaacaaggatgacttttcaagcatcaattccagtgagtacgtaggagtttcaacaggaaactggggttgtggtgcttttggtggaaaccctgaaatcaagagcatgattcagtggattgctgcatcacaggctcttcgcccttttgttaattactacacttttgaggacgtgtctctgcaaagattagaggaggtgatccagtggatacgacttcatggctggacggtcggcgagttgtggcatatgctcatggagtactcatctcagaggctgggaggagaaacgcacaagggttttttggcctggttgcttcccagcgacaggcccaagaatcaagtgcattacatgtccgaatagcaatagacccggtttttgtgaggagtgtgtgcatgaacgaagttattgctgacaaaaaaaatgaaataaagataaaagcgtatgtatcaaaaaaaaa

SEQ ID NO: 15188 - DNA, 2770 bp, Zea Mays
atgggcttcgccaccgtcggcgccctcctcctcggctccgcgcccgcctccggccccagcgacagcggtggggcgcccaagtccgcggagtcgtacatcgggagtcctctacaacatcaacaccgaggagtccagaatcggcctgcacaatggtctacacaagatgtgaagtttatacaattccaactaacggtcaatgtcgcagctctgataatcaatgtagttgctgctgtcagttctggaaacgtgccgttgaatgctgttcagaagtatgctgacgtgatcattcctcgaggtggtgataaccgtgtagcagttgatctgattgttcaacatatccgtacaaaacttggtcagcatgacttgtgcaaaatctatccaaatgttcatgttgttcaatcaacttttcagatccgaggaatgcatactcttatccgtgatagggacatcaccacacctgagattgccttggaagagcagtggcggcttcatgggcaggatgatcctattagcctttctagctatgctgccgacgcgttaagtaccactggtgaggatatgatagagtgtggcggcctcccgaagccgccgcagaactatatattcttagagcagtgccaaacagactctcggataaaaagttttctgacagtatttctctctctcccagatctaataaaaaggaaaatttgccgcctccccagactccatgttttaaaaggtcgcggtgggcaacgagccaacgaccggtgccagcagagacgaccggccccggccccgccccggccgcagctgcccgaagccgccaaacaccgccagtcccccaccacatccgccagaaccctctccctccctccctccctccctcatcggcgcgccgccaatggccgtgtggtgaagcgcacccgacggaagaagcaggcaccaacagccaagccccctttgcccttgcccttgcccttgccctcgccgccgccgtccgcggaaggttgagatcccaggattcagactggtgccattcgatttgatttggcgcggggtactttcctatggccgcctccatcgcggcctcgcccttctttccagggtcgccggcgccggccgctcctaagaacggccttggagagcgcccagagagcctggacgtccgcggcgttgcggcgaagccgggagcctcgtctaatgccgtgagggcgggcaagacgcgcgcccacgctgccgtccccaaggtgaacggtggcaagtctgcggtggcggatgtggaacacgagaccgtaactgtaccttcgtcggtgccgaggactttctacaaccagcttcccgactggagcatgctccttgctgccatcacgaccatcttcttggccgccgagaagcagtggacgatgcttgattggaagcccaggcggcctgacatgctcactgacacttttgggtttggccggatcatacatgatggcctcatgttcaagcagaacttctccattaggtcctatgagattggggctgataggacggcatctatagagacaatgatgaaccatttgcaggaaacggcacttaatcatgtgaagaccgctgggctgctaggtgatggattcggctccacaccagagatgagtaaacggaacttattctgggtggttagccagatgcaggctatcgtcgagcgttatccatgctgggattggcatatacgtgattctatgacaggccacacaatactgaaggcgacaagtaaatgggttatgatgaacaaactcactaggaagcttgcaagaattccagatgaagtgcggactgaaatagagccatactttgttgggcgttctgctattgttgatgaagacaaccgcaagcttccaaaactgccagagggtcaaagcacttctgcagctaaatatgtgaggacaggcctgactcctcgttgggctgatcttgatataaaccagcatgtcaataatgttaaatacattgcgtggattcttgagagtgcaccgattactatttttgagaatcatgagctggccagcattgtgctggattacaaaagggagtgtgtccgcgatagtgtgctgcagtcacacacctctgtccatgaggattgcaacattgagtctggagaaacaaccttgcactgtgagcatgtgctgagccttgaatcaggtccgaccatagtgaaggcccggaccatgtggaggcctaagggaaccaaggcccaagaaacagcggttccatcttcattctgattttgtcagatgttcgagatggtgactttggcagcaaactatctggcagaagatcagaatggttactagcatcctctattggaagcaaatcacacggaccgtgacctaaactaatttaactatgaagtgtgaccaatagaggagatataagtggggtcacaatggaggagaccaaagcggggagatcgaagacaaaggaggcctcctgtgcatggtttgtttctgtttccgcctttcgagttctttcttacgacaatcttgggtcgcacaaatgggtgttgtaagtattgatctgtagctacaaatgtatgatgggggagtgattgcttctcatacatgttccttctggggctatgtccatatgttgtaagccccatgaaaacagatttgtcgcagccatatccattcagaatctcatactatattgtatttgctgatattaaaattgatactactactattctccaggctgctcaagcgtgttgaaacttcgtgtctgggacaaatattgaaactgtaca

SEQ ID NO: 15189 - DNA, 1291 bp, Zea Mays
  misc_feature (1)..(2): n is a, c, g, or t
nntttacctcaatttggtgcttgaatatgtgccagaaactgttcaccgtgttattaaacattacaataagatgaaccaacggatgccattgatttatgttaaactttatatgtatcagatttgtagagctttggcttaccttcacaactgcgtaggagtgtgccacagagatataaagccacaaaatattctggtgaacccacatacccatcagctgaagttgtgtgacttcggcagtgccaaagtcttggtacaaggggaaccaaatatttcatatatttgttctagatactacagagccccagagctcatatttggggctactgagtatacaacagctattgacgtgtggtctgctggttgtgtacttgctgagcttcttctaggtcagcctgtttttcctggggacagtggtgtcgatcagcttgttgaaattattaaggttctaggtactccaacacgggatgaaattaagcgcatgaatccaaactacaccgaatttaagtttccgcaaatcaaagctcacccatggcacaaaatcttccacaaaagaatgccatctgaagctgtagattttgtgtctcggcttctgcagtactcaccaaacctccggtgcacagcattggaggcgttaatccatccattctttgatgaactgcggtacccaaactcacgtctaccaaatggccgttcccttccccatctcttcaattttaaacctaatgagttgagaggagtaccagaggagtttgttgtgcaattgatccctcagcatgctaagaagcaatgtgctttcttaggagtttgagaaagcagttcaattttattccagaaaagaaaaaagagagaggatgcagcagttgagaggttacctgagtattgattacttacgttctgtttaaccgcacagtagcattagcctacagtattatcgactaggcaacgtgtgctgttatctttcacgacggcttttacatcgcaatgttctaccacggtggtgggatctttttcaccacattctgtaaagcagaagaagacgtaaatcgactggtcacccgttcttgtggtctgtatattggtctcccccaatcttgagaacacgttcttttgtttttggagatggattcatttcgtatctgtatcactatcaccaaatgaaacaagaactcatgtattcttgaactggattcagttacatgagagtcaaaccatgtcctttctctaagggaaaccgtgcaactcaacgatttgatgctccagttggatgggaatgagttttgccatgaattag

SEQ ID NO: 15190 - DNA, 1039 bp, Zea Mays
tcatgtgggacgtccggcacttggttcgaatcattgatgatgacatgcccctcgctcaatttgctgttgctttcaatggagcatcatgggtggatcctgattctgttgcactgatggttatgcaaacaatgcttggttcatggaacaagagtgctggtggaggaaagcacatgggttcagagcttgtgcagagggcagcaatcaatgacatcgctgagagtgtaatgggattcaatacgaattacaaggacactggtctttttggtgtctatgctgttgctaaggctgattgcttggatgatttggcttttgcaattatgcatgagatgagcaaattgtcataccgggttacggaagaagatgttatccgtgcacgtaatcagctgaagtcctctatccaactccaccttgatggttcaactgctgttgttgaggacattggccgtcagctgctgacctatggacgaagaattcctacccccgagctttttgcaagaatagatgctgttgatgcaagcactgtgaagcgtgttgcaaaccgcttcatctttgatcaggatgttgctattgctgcgatggggccgatccaaggacttccagactacaactggttcagacgccggacctacatgctccgttactagattaatcagccggtgtacccatgtttaccgtctgcaaaagacaagataaaatttgcctcttttagcgtcagtatattaaggcctcagcactgcacattacgtgctgcgatggaggaattttttgagaatttgttttatttcttgtcgtgtccaaaatccacaaatctgtcaataatgataggcaggttcgactgacgtggctgacttggttggccaccggatgttttcttacaacgagtcatgaaccataccgtcccatcttttgttggaagattttactttggcaaataattttgtggcacgttatatgtaaagatggtacagttttagcttcattgtccacaaatcttgttttgaacgattattgtcgtgtatttagtcaatttcctggcgtt

SEQ ID NO: 15191 - DNA, 2741 bp, Zea Mays
cgccacttgccgcccgcacgttcttgtattctgaaccatcgagccatggctgccaagctgactcgcctccacagtcttcgcgaacgccttggtgccaccttctcctcccatcccaatgaactgatagcactcttttccaggtatgttcaccagggcaagggaatgcttcagcgccatcagctgcttgcggagtttgatgccctgtttgatagtgacaaggagaagtatgcaccctttgaagacattcttcgtgctgctcaggaagcaattgtgctccccccatgggttgcacttgctatcaggccaaggcctggtgtctgggattacattcgggtgaatgtaagtgagctggctgtggaggagctgagtgtttctgagtacttggcattcaaggaacagctggtggatggacaatccaacagcaactttgtgcttgagcttgattttgagcccttcaatgcctcctttcctcgtccttccatgtcgaagtccatcggaaatggagtgcaattccttaaccgacacctgtcgtccaagttgttccaggacaaggagagtttgtaccccttgctgaacttcctcaaggctcataactacaagggcacgacgatgatgttgaatgacagaatccaaagccttcgtggtctccaatcatccctgagaaaggcagaggagtatctactgagtgttcctcaagacactccctactcggagttcaaccataggttccaagagcttggcttggagaagggttggggtgacactgcgaagcgtgtactcgacacactccacttgcttctcgaccttctggaggcccctgatcctgccaacttggagaagttccttggaactataccaatgatgttcaacgttgttatcctgtctcctcatggctacttcgcccagtccaatgtgcttggataccctgacactggcggtcaggttgtgtacattctggatcaggtccgtgctttggagaatgagatgcttctgaggattaagcagcaaggccttgatatcactccgaagatcctcattgttaccaggctgttgcctgatgctgctgggactacgtgcggtcagcggctggagaaggtcattggtactgagcacacagacatcattcgcgttcccttcagaaatgagaatggcatcctccgcaagtggatctctcgttttgatgtctggccatacctggagacatacactgaggatgtttccagtgaaataatgaaagaaatgcaggccaagcctgaccttatcattggcaactacagcgatggcaacctagtcgccactctgctcgcgcacaagttgggagtcactcagtgtaccatcgctcatgccttggagaaaaccaaataccccaactcggacatatacttggacaaattcgacagccagtaccacttctcttgccagttcacagctgaccttattgccatgaaccacaccgatttcatcatcaccagcacattccaagaaatcgcgggaagcaaggacaccgtggggcagtacgagtcccacatcgcgttcactcttcctgggctctaccgtgtcgtccatggcatcgatgttttcgatcccaagttcaacattgtctcccctggagcagacatgagtgtttactacccgtatacggaaaccgacaagagactcactgccttccatcctgaaatcgaggagctcatctacagcgacgtcgagaactccgagcacaagttcgtgctgaaggacaagaagaagccgatcatcttctcgatggcgcgtctcgaccgcgtgaagaacatgacaggcctggtcgagatgtacggcaagaacgcgcgcctgagggagctggcgaacctcgtgatcgttgccggtgaccacggcaaggagtccaaggacagggaggagcaggcggagttcaagaagatgtacagcctcatcgacgagtacaagttgaagggccatatccggtggatctcggcgcagatgaaccgcgtccgcaacggggagctgtaccgctacatttgcgatacgaagggcgcattcgtgcagcctgcgttctacgaagcgttcggcctgactgtgatcgagtccatgacgtgcggtctgccaacgatcgcgacctgccatggtggccctgctgagatcatcgtggacggggtatctggcctgcacattgacccttaccacagcgacaaggccgcggatatcctggtcaacttctttgacaaatgcaaggcagatccgagctactgggacaagatctcacagggcggcctgcagagaatctatgagaagtacacctggaagctctactccgagaggctgatgaccctgaccggcgtgtacgggttctggaagtacgtgagcaacctggagaggcgcgagacccgccgctacatcgagatgttctacgccctgaagtaccgtagcctggcaagccaggttccgctgtccttcgattagtacggggaaagaagaagaagaagaagcccaggccggagaaccatcgcctgcatttcgatctgtttcaccgcaattcgcattgttagtcgtgtattggagttatgtgtacttggtttccaagaactttggttccttctcgttttttttccttgtttgagcgtttttgggcagcgctggcctggttcctagtatggtgggaattggctgcaccttttgcttcgaataaaaatgcctgctcgttcaccaaaaaaaaatcataaaataaaacaaaaccagaactcagatgg

SEQ ID NO: 15192 - DNA, 2000 bp, Zea Mays
ttgcatcctgtcttgctcttgcagacatcatccaaggtcgaagatatagtcaggtttgtaaacatttgaggaatatatggacaaccaccttccgtgcgatggatgacataaaggaaactgtgcgaactgccggtgacagtttgtgccgagccgtaagctcattgacaattaggctctgtgatatatcactaacttctacttctgaggcaaacgaaacgatgaacattgtgctgccatacttgctttctgagggcatactcagtaaagtatcaagtgttcaaaaagctgctattagtttggtcatgaagcttgctaagggtgctggtcctgcccttcgtcctcatctgccagaacttgttagttgtatgcttgaatgtttgtcaagtctggaagatcaaaggttgaattatgttgagatgcatgcagggaatgctggcatcaaaacagataagcttgaaactttgcgcatagctgttgctaaagattctccaatgtgggaaactcttgatatctgtataaaagttgttgacaagaattcacttgatctattggttcctcgcctggctcaaatgattagatcagctgttggcttaaatacaagggttggtgttgctagtttcataactctattggtgcagaaggtcatggttgacatcaaaccattcgcagcagtcttaatgaagttattgcatagtgcagttctggaggaaaggagttctgccgctaaaaaggccttcgcgtcctcttgtgctactgttttgaaatacgctagtcctccccaggctcagaagcttatcgaagatactacgtctctgcattcaggtgggaaaaacgatcagttgtctggtgcaattcttattaaagcctacttgagcaatgcatcggatattcttggtggatataatgcggtggttatccctgtaatttttgtgtcgagatttgatgatgataaagacaccagtgctttatatgaagaactttgggaggatattcctagtagtgaaagagtaaccctaacactatatttaccagaaattgtatctcttttatgtgatggcatgtcattgtcatcatgggctggtaaaagaaagtcagccaaggctataaagaagctatgtgatgttctaggagaacccctttcagcacactaccagaatattctcaaatcacttctgaaagaattgccaggtcgattttgggagggaaaagatgctattctggatgcattggcttcattgtgtgcttgctgtcatgttgctataactgcagaagactcctgcttgccaagtgttatactaaattgtgtttgtgctgcatgcagtaggaaatcaaaattgtaccgtgaagcagctttcttgtgtttacacaaagtgattacggcattcagagatccaggatttttcaatagtgtgtttccaatgctgttcgaggtttctaaccaatctgccatctcgaagacaaagggctctgctgaactagatgaaagtgaaggtgcttctgtttctctggataaagtgctcaattgtgcaacatcttgcatcagtgttgcttttccacaggatattatcaaccaaaagaagaatgttgtagaattaatattgaattctctcttgcctgaggagagttggcaagttaaactatcatccttcttgtgtatcaaggagttgtgcctcaaatttgacaattctggtgatagtaacacatggcctcaagacacagcttacttggttgaggagctatttcatttggtatcaccgaaattagtagactccataagattagtaaagattgctcaggttcacgttgctgcatcggagtgccttcttgatttgagcaaactgtacagagacttcccgctgtcgaacagaacagaggccaagttcgaggatgaactcacagagctctgcgagtctgaaaaaagcgaacaagcaaaggcgattctgaaggaatgcctggccattcttaaagctctccctggagtaaccatgacgacggattag

SEQ ID NO: 15193 - DNA, 1193 bp, Zea Mays
ttcctgtttggcgtgtcccgagtagcaacgcccgggcgcgtgaggaaggcgttccaagtgagggcatcagctcgggttgacaagttctcaaagagtgatatcattgtgtccccttcgattctgtctgcaaacttcgccaagcttggtgatcaggtaaaagccgtggaggtggcaggatgtgactggattcatgtcgatgtcatggacgggcgctttgtgccaaatatcacaattggacctttggttgttgatgctctgcgtcctgtgactgatcttccattggatgtacatctgatgattgtggaacctgagcagcgagtccctgattttatcaaggcaggtgctgatattgttagtgtccactgtgaacaaacatcgaccatccatttgcacagaacagtcaatcagattaaaagtctaggagcaaaggcaggagttgttttgaatccagcgactccactcaatgcaattgattacattcttgatgttgttgacctggtgttgattatgtctgtgaatcctgggtttggtggccagagctttatcgagagtcaagtaaggaaaattgcagaattgagaaggttatgtgcagagaagggagtgaacccctggattgaggttgatggtggtgttggtccgaaaaatgcctacaaggttattgaagctggggcgaatgccatcgttgctggctctgcagttttcggggctccagactacgctgaagctatcaaaggaatcaagaccagccaaaggcctgcagctgtacacgcataaggaactggacgtgtgatcgtgctctgttcaggtttagcagtgttgggattcgtatagatagatgtgtcttgttttcgagccatacgttatactggagatgaaaggagacggaggaaatatttctctacgtgggtgaatcaatcatgtggacggtaatcacatgacgacaaagcatatggacgagcgctggctcacgagacagagtaatcaacgggagaggcttctagacagctctgcatgtccattccctctataaacaggagagcagttcagtctccattgtaaaggcacccagatatagaagaaagaaataaagagctctctatttgtctctgtttctatcgtgttattctctatgcattgatagaacaatttcttatcaccacgagttctcccaaactttgtatgccagcgaacct

SEQ ID NO: 15194 - DNA, 2083 bp, Zea Mays
cgactactgtgcggctactgtggtacagctcttcttgatcgtggttggaggagatctggttgttttctttacaaacctgagatggaacggacatgctgcccctcatatacgatacgcttgaaggcaaatgatttcatttgttccaaagagcaagctcgggtacttaaaaagatacaaaggttccttgatggcgagctcgatccacagattggaagccctcagtgtaaggcaagtccaacaaagcgctcactgggtgaacctctgaattcaccaacctcgaaagtatcaaaggtatcagcggaagagtttcaaaaaggcacaagtccaaatatattgaaagaagatgacatcatttgttgcctggcaaacaaaatcaatgaggccacagctacatgcttccgaggtggggtatttggttctgttcaactccccaaagctgttgtgaagaccgttaaacctcaagtcaaaaggaaagttggagaagcagtgcaagaaaagaaagtaggagaagcagtgcaagctttggtttatacgtgtaatataagtttccaaatagtggcagcagttagacgggcattgcctaaagaaaatggtgctactcaaactgaagtaccagcagatctttctccaaattctgttgcagaaaagctatccgtggcaatggaacgtcttggagaactagctggttttgaagtaaaagcttgtaatgggcatctaaatttctatttggcctccaatcaggcaatgcagaaccataccagcgttgttgtacctgtgcaagcttcagacaaatctagtggttcaaagccaagctctgtgaaccaaactaatgcaaaatatcctctgaaaaggaaaaacctggagattaggttgagcacatctcattttgatcctgaggagtttgctctgtaccgaaggtatcagacaaaggtgcataaggagaaggcagttacagaaagctcatacaagagatttctagtagatacaccaatcctgtttgtccccccaaagactggtgataatacagttccaccgtgtgggtttgggtcttttcatcagcagtacaggattgatggaaaacttgtggctgttggtgtagttgatatccttcctaaatgtttgtcaagcaagtacttgttctgggatcctgaccttcctttcttatctcttggaaagtatactgctctgaaggagatagattgggtcaagacgacacaggagcactgtcccagccttcagtactactatctcggttattatatacattcttgcaataagatgagatacaaagctgcatatcgaccatcagaacttctatgtccactccgttatgagtgggttcgctatgatttagccaagcctctactggatgccagtcaatactccgttctatctgattatgctacaatgcaaggtgaagtgccccagcctcagatttgtggtccctctgatgactcttcagcaaaagttgaccaccatgagtctcccagcgatgaggatgaggacgacgacgatgaagatttcgacaactatgaatcagatatgatggtcgatgaagagacaattcattcagaaaaacccgatacagctgaaggcagttccgagataaatgacataaacaacatcaccctggacctgaaaggctcgagggttaaatttaagcaagtttttgggccaatcgagaggcgacacctcaatgcgctagaaaggcaactgagcagatacgtcaaggttgttgggaaggagctgtctgatcgaatggtgtattgtctttcttgatatgcagccggtcccgagatctcaattctactgtgaaaggtgcacatgagagttaaactagtttcattcagaaagaaaggtcatattgctgcgtgtttctgcatggttttcgttgtaaaggtacgagagctgaggctgacatagaacattctccggtcgattttgtatgtgtattttggcactaaagtcttcatggatggcttatactgaagagaagtggcgattcggtacgcctaattgtgcttatagggcaattgaaccggcacagtaataaagttgcagcgaatgggcttctgtcgaaaca

SEQ ID NO: 15195 - DNA, 880 bp, Zea Mays
caaactccctatacaagtttctaaaaagggaactgctgatgaagtggtggattggtctcatggtaaacaactttgggaactttgcaaagacaagtatgagcccttatggctcaggggaggaaagcactgtgatttggagctctttccggaatacatccggcacctcaagaattttttccactcactagagaaatcgccatcccataggcaagcatggagggagaatgtggaccggattgaaccctcgcggaagagcactgatttctttgaaccctcgcgaaagagcacagaccaaaggaaaaaatcaaggtcaactcgagataagacgagaaacactgaacatagatatagcaacgtcgagaaggtagacaagctaaagatatcatttgatcagttcgagaaatccaggagaagtgttgatatcttcgagaggccaaagaggaacattgagcagctggattgtggccggaagagtgtcgacagattggacaggatctgggctagttaattcctttctttcacatgatatacaggttgggcttcggttgttttgggggattttacaggtgtggcgttaagagttgattcaccgacactaaaggagccaagcgtcgttgacgaggcttcgtgtagatgtgatggcttgtgtggtgggagaagtgtatgttgttggtcttcaaaaaaattgttatctggtcttaaactaaatgacactggggaggagtccatggcagcattgtgtataatctaatgctttggatcaacgatgtttttttcttctatttcattgaatcgaacttttccttccatggatattggctgtgtatggattttacggaccgtgaagttaaaagaaaggtgaattagataacttacaata

SEQ ID NO: 15196 - DNA, 1397 bp, Zea Mays
gtcaaaaaaaaaaaacaccaaatttctcaggcctccctccccgcgtcgctttcgccggacaccaccacctgccgctttcccctcgcccctccgcccctttttgaccccggttacgaatccgcaccagggcctgcggcggtatactcggttccctgcccccccacgaccacgccgccgcctcctccccacgcccgcccggcgctcccggaaccgccgcattcacatgatgtatcatgcgaagaatttttctgtgccctttgctccgcagagggcacaggataatgagcatgcaagtaatattggaggtattggtggacccaacataagcaaccctgctaatcctgtaggaagtgggaaacaacggctacggtggacatcggatcttcataatcgctttgtggatgccatcgcccagcttggtggaccagacagagctacacctaaaggggttctcactgtgatgggtgtaccagggatcacaatttatcatgtgaagagccatctgcagaagtatcgccttgcaaagtatatacccgactctcctgctgaaggttccaaggacgaaaagaaagattcgagtgattccctctcgaacacggattcggcaccaggattgcaaatcaatgaggcactaaagatgcaaatggaggttcagaagcgactacatgagcaactcgaggttcaaagacaactgcaactaagaattgaagcacaaggaagatacttgcagatgatcattgaggagcaacaaaagcttggtggatcaattaaggcttctgaggatcagaagctttctgattcacctccaagcttagatgactacccagagagcatgcaaccttctcccaagaaaccaaggatagacgcattatcaccagattcagagcgcgatacaacacaacctgaattcgaatcccatttgatcggtccgtgggatcacggcattgcattcccagtggaggagttcaaagcaggccctgctatgagcaagtcataaggcaaacttcaccttgacagaaaattttcagagttgacctctccacgagatgagcattctcatgtgaatatatattatcttaacaacagaatgtacgggtttttgaccctgcacctgatcccttcagccacgtccagttattcttatcactgtagtatccatcaacaagtcctgtaattatgaggatggtgttacagagtttctagcaagcatttccatcgagggaatggccctgagttgatccatgtagcaagaaagagaacatgcttacaagcaatatatttgctgtgaaaagggcacgcccctggatcttcctgaagttatgttgataaaaaaaagattatggcatatttctgaattatttctgaactcggcattatttatagtcttcgtttcatgt

SEQ ID NO: 15197 - DNA, 1810 bp, Zea Mays
acccgtgagatcgcgggacccacactcagcctcagcgaacccctctgcgttccgccgcagcttccgaagacatcgatgtcctagcaagttggaaacccccctccctcccctcatattcgcctccgcctccctctccctccgtccctcgtcaaatccacgcgaccgcgagagctctcagaaggccctagcacgcaaaaaccccacgagagagacgaatcttccgaatctctcggtggcgatggcgctctccgaccgctcccgcgagtcgctcctcccgagcttcctctacggctcctcggcgcgctctttcgctgccacaggagccgccgcgcgcctccctgtctcctccccggcgcctgccgcggctggagcaggaggcggcgtgccgttctcgatccaggcgcccaaggagaagatcgagatgtactcgccggccttctatgccgcctgcactgccggaggaatcgccagctgcgggctcacccacatggccgtcacgcctctcgacctcgtcaagtgcaatatgcagattgacccagcgaaatacaagagtatctcatctggatttggtatcctgttaaaggagcaaggggccaggggtttcttcaggggatgggtgcctactttgcttggttacagtgctcagggggcttgcaagtttggcttctatgagttctttaagaagtattactcggacatcgcagggcctgagtatgcccaaaagtacaagactctaatctacctcgcaggatctgcatctgctgaggtaattgctgatgtggctctctgcccttttgaagctgtgaaggtacgtgtgcagacacaacctggatttgctcgtggattgagtgatgggctccccaaatttgtccgatctgagggtgttcttgggctctacaagggaattgttcctctctggggtcgtcagattccttataccatgatgaagtttgcttcctttgagaccatcgttgagcttatctacaagcatgctgtgcctgttccgaagtctgagtgcagcaagactacccagttgggtattagctttgctggtggttacgttgccggtgtcttctgtgctattgtttctcacccggctgacaaccttgtgtctttcctgaacaatgccaagggagctacagtgggagatgctgttaagaagcttggtctctggggtctcttcactagaggacttcctcttcgtatcgtcatgattggtacccttactggtgctcagtggggaatttacgatgcattcaaagtgatggttggactcccaacaacgggaggtgttacacctgccccagcagcagaggctgaattgaaagccagtgcttgattttttttttctgtgttccctgagatcatatttggtagagtggaattgtatcagccagtcgagagcttagttcccgaatctttttttaatcgtaacggaaaatttgtccgtcatccttctgatgagaggaactcattaaacaggcgaaataggtcttttttgcgctgggaaaagtttgcgcttgatgcataataatttttaggacggcaacgctcttagagcgcaggttttgttcacctcctgtaccgaggaatgcttactaagtcccatttcacattatggtctttatgaaatatttacgcttgatgcataataatttgtaggacggcaacgctctagagcgcaggttttgttcacctcctgtaccgaggaatgcttaaagttacatttcacattatggtctttatgaaagagtgcacctcggttgatgttccttttgccgttgctggaactatgcgatttgctgtaatt

SEQ ID NO: 15198 - DNA, 3023 bp, Zea Mays
tcctcgccttgctttctccgccatcctctctgctttccaccaccctataccaaaccagccaaagccctccactcctccccgcctccgcctccgacgtcgaacattcttctccaatggcgacggcccccgcatccctctcgctctccgcctctaccctgcccacccggctccgtgccgcagcggtgctggcgggcatgcgctggaggcagccgcagcgcgggcggatggtggtgcgcgccaagatccgggagatcttcatgccggcgctgagctccaccatgacggagggcaagatcgtctcctggtccgctggagagggtgatcgcgtctccaagggtgacgccgtcgtggtcgtcgagtctgacaaggccgacatggacgttgagaccttccacgacggcatcgtggcggtggtcctcgtccaggctggcgagtcggcgccggtgggcgcgcccatcgcgctgctcgcggagtcagaggaggaggtgccgctcgctctcgccaaggctcaggagctctccaacgggcagccgcagcaggcgcctcctgctccgacggaggatgccgcagcgacgccgccccctccttctgctccggccactgctcccacgccggtggccgtgggtacgaagggcattgccagcccgcacgctaagaagctggctaagcagcacagggtggaccttgccaaggtgactggcaccgggccgtatggtcgaattacgtcggcagatgtcgaggcggctgccggaatccagccgaagtcaaagcccgctcctgctgctgctgcgccaccacctgtggctgcaccttcagtgggtgcggtgcctcaatcggcagttctaccaccggttcctggcgcgactgttgttccattcactaccatgcaggctgcagtgagcaagaacatggtggagagtctggcagtgccagcattccgcgttgggtaccccattattactgataaactcgacgagctgtatgaaaaggttaagccaaagggagtgacaatgacagtgctgctggcgaaggctgcagccatggctcttgcacagcaccctgttgtcaatgctagctgcagggatggaaagagcttcacatacaacagtaacatcaacattgcagtggctgtggcaattgatggtggccttattacacctgttcttcaggatgctgacaagctggatatatatttgctctcgcaaaattggaaggatctagtgaagaaagcacgagcaaaacagctccaaccaaatgagtacagctctgggacttttacactgtccaacctgggtatgtttggtgtagatcggtttgatgcaatccttccacctggccagggagctattatggctgttggagcctcgaaacctacagttgtggctgataaagatggtttctttagcgtcaagagcaaaatgctggtcaatgtcactgctgatcacaggattgtatatggggctgatttggcagcattcctacaaacttttgcaaaggttattgaggatcctgagagcttaactttgtgagatctcttgaagagttatgatcttatctatatgcccataaatagtctggttgcagttggagttctgttgttgatctccagtttttgtatctttgaacattcgacatgatttatctgatctttttgtgctggtttgtatctctcattgttgtggatcttgttagtataccgttgataaaagggtagacccagtgccaaaggctactagataagtagggtttgtgaaagggataaactgagacaagccttctccctgtaaatatggagaggctgtttcgaaaacccgtgacctggtgaatgagtgagtgagatagctctcaccactgcactaggcctgccctgtaccattgatattgtggaattattggagagcaataaattataagctgtagatagttctgcagattttgtatctaaaatatggtttatgtccctttttcatttatcttatgggaagtatattttcttgaaatttgtaaagcggtagaggtcccccggtgcacttaaactggcatgtaaatggacatggtactgttttgaagtgtactggcgcagtggccctgccttgctgtctttggagtttgattttttttttaaatttattagcaaaacgaaaacatacaagagtacaggttatataggatgctccagaacaataacatggtcagcattaagttgtgacttgtgagtatattcaatgaattgaaaaccatgcaaccaaaacacatcatcatcctaatacaattctgcatgtgtacaaactctccataactgatacaaacccatcattaagccaataactatacacacagttccacaaaaatgttaatttgttaatgtccaactggttaatgtgaagtctgatcatgaacgtattcacctgagtggaagcactatgttcagaggttgcatgtgctttgaacccctcatttctcggcacaccctatctagcaaaccgagaaaatccctcatgatgacaaatatatggaggaggttgcactcgttcttgccaacctctccatgataatactctgtaaggtccttcccgacaagccttatcaatcgagccagtccacgtgatagattcgagattgaacttttcaagtgtggcttgacaagatccagaagttccactgggcttatctgaagcctttgatccctgcgatcgctccatctcttggacgacaaagtgcaggagggttgtcttcccgtcagctccacgtatatctgacagcttcagcagtgcgtcaagtctgaaagcatttgcccctcctcttatagttccaacattcattctgtttccagtcttgagtaccgcttcaagtaatcttagaaacaatttgctcgacctgagctcgctgcaggctccctagtaaacaaagaagcagttgcagcttcaatagagtgtttctatctttttaaattaatcaaatagctctacttactctaatcagtgcaaaggacatcctgagatgggcaacttcgtcgtcaaaag

SEQ ID NO: 15199 - DNA, 180 bp, Zea Mays
atgggcgaggtggagcaggtcgtcgtcctagatgtcgccgaggacatccggttgtcgcttgctcatggcgtcaggctggttgcttcctcaaagcgagcggtgcatcaactatttatctacgtcctggataatcgaattgctttgccgtggaagcaggagaaggaagaatgcaaaacacgt

SEQ ID NO: 15200 - DNA, 1999 bp, Zea Mays
ccgcgatgaagctctacttacagattggaagcagcagttggatcgtgatgttgaaacccttaaagccaaatcaaacattggtagcattcgcacgtttctgagtcgcaatggaattgaatgcaatgatattgaagaattattcatcaaagaccaatcactgagtaatgaaaatgtggacaagattgttggatacgcagtgagttatcaccttaagcacaataaaattgaaacctccaactcgaaggataataaacttgtactcacaagtgaaagccttaagcatgggctcaacatgctgcaaagcatgcaaagtgataacaagagctcgaaaaaatcactgaaggatgttgtcacagagaatgaatttgagaaaaggcttttggtggatgttataccacctaatgacattggagttacctttgatgatattggagccttggagaatgtaaaggacacattaaaggagctggtgatgctccctttacaaagacctgaattgttctgcaaagggcagctaacaaagccttgcaagggaatattgcttttcggacctcctggcactgggaaaactatgcttgccaaagcagtagcaactgaagcaggtgctaatttcatcaatatatcaatgtcgagcattacgtcgaagtggtttggtgaaggggagaagtatgtaaaggctgttttctcactagcaagtaaaatagcccccagtgttatatttatcgatgaggtcgatagtatgctaggaaggagagaaaatccaggggagcatgaagcgatgcgcaagatgaagaatgaatttatggtaaattgggatggactgcgcactaaagataaggagcgtgtgcttgttcttggtgctacaaatagaccttttgacctggacgaggctgtgattaggaggttcccccgcaggttaatggtaaacttgcctgatgcatcaaatagagagaaaattctgaaagtaattttggcaaaagaagagctgggatcggatgttgatctcgactcacttgccaatatgactgatggttattcaggaagcgacctgaagaatctgtgtgtgaccgcagcgcattaccccattcgagaaatcctagagaaggaaaagaaggagaagagtttggctaaaacagaaggtaggccagagcccgcattgtatggaagcgagcacatccgtcctcttagcatagacgacttcaaatccgcccatgagcaggtttgcgcgagcgtttcatccgactcggcaaacatgaacgagcttctccaatggaacgacctgtacggtgaaggcgggtcgaggaagaggaaagcgctgagctacttcatgtgacggcgagagacataaaaccagaaggatcacaaccgcgccataaagccagaaggtatcgcagttgcgccatattgtacagccgccatagtacttcccccctccctggccctaaatccagccagggttttcctcctccctcctgggtagccgtggccgcctgtagtccctccctcgtgtaattagaaccgtgtaccgagtcgagttcatttacccactgtttgaggttccagagagttgagatttaaattttaagtggcgccattgcccttcctttcttcctcccctcctaagtattaactttgttgcggccattgttgtcgtgactctggccatagatccttttatgtacatgcgaaatgtaaccaagggatatggaataagaacatgttcatcctgttgtagacagcatggtggtacaggaattctttttatttttcatagttgattggtgatgaactggatcggtgccagcataagaattatgataaggtaccttttctgccgctgaattttttggtgtatgtcgatttgtcgagtggatttagtattgagatgaatgatatgacatcacatggatttttatgcgtctcatgttgttaattgtcttctaattgcgaaatgcgcatgatgcagagctgaattttgtctatttactttttacaacaa

SEQ ID NO: 15201 - DNA, 1102 bp, Zea Mays
ctggtggccggccacctctgctgctcccatgtaaaatctctggagaattaggtggaggagaaggttaagttcaacgctccttaggtgttctatgaagtgcttgaactgaagttcgttgtcgttctgttcaccgcggttcgttaattgatcacgtgatgcggacgacaagagccgagttgatcccaaaatgatgctggtgaacgaacctgaagcttggatgatctggtcaagtaccaggacgagagatgctccccaagcggacatcatctaacaacactgacttagtgttatctcagacaagccccggtgtatttgccacctccttctgttttaaaaacttttatcacttacctgctgtattaggtgataggagttgtgtgaataaacaattgatgcattatcattccttggaatttgattatcctccttgctacttgttttataaagagaactaatgaggctaagcccttcctagagaactaaaacttgattatttttaaaagaatgttgtgtaacactgggtatgggtttgttttatgaaaaaggacttgtaatggtgagagcatcatctgtagtgatgaattcatcattcaagtatgatacctctgtctggtacatggttttgggaaggaaataataatatgagaccagacgttgagtaggaaaggtcgtccgtctgtatcgattaaggaccgtaccgaaagtaggcttgctgatctaggaccctttaactggccacatgcctcgtcatgggtaagcttagcctcggctggaccaatatcagaaaggccggctcgcaatgggagtggagagatggcgagagtatcatgtatccacctgacaagaggctggatggtggggtactgagctcttggttggcggggacccgttctggtcttgagaaacccgtgggtgagttgacatatgcaagggttaagtgctacatatgtcgtgtggttggagatcctcagctgagtattaatcgattcagatcgtcgttacttctcggatatgaagactggatcactgccctgcatcgtagataacaagtgaaactaaagctgctacaatgaagctagtgtaggacaggtgaatgctctag

SEQ ID NO: 15202 - DNA, 75 bp, Zea Mays
ctttacccacaagtcatgttacccatctgccaagatatggccaatcccttacacctctaccgaggaggcgaggca

SEQ ID NO: 15203 - DNA, 731 bp, Zea Mays
gtcccctgtctgtctgcgtttaaaaggccaccggtttccccaaatcgaggttgcctgccgtcactcacctcggctcagctccaccaagtgcccgtgaggtgccacgaccgcagcgaggagtgaccatggttgaggtgatgatggtacccagctcccacggctgcggcgagggtggtggtgtaggaagcgacgggaaggcggaggacgggcagcagcaggggcagggacaggggcaggtgctggcgctgctgctggccgcgctccgcaagtcggtggtgctaccgtgccagatggcggacgccgacgacccatcgggggcggcgtgggggatggagatcggctggcccacagacgtccgccacgtcgcgcacgtcaccttcgaccgcctccacggcttcctcggcctccccgtcgagttcgagctcgagatccccggccaggtccccagcgccagcgccagcgtgttcggggtatcaccggagtcgatgcagtgtggctacgatgacaaggggaactcggtgcccaagatccttctgctcatgcaagagaggctgtacgcgcaggatggactcaaggcagaggggatcttccggatcaccccggaaaacagccaggaggagcatgtcagggagcagctcaacagcggcatcgtgcctgacgacatcgatgtgcactgccttgctagtttgatcaagaacatgaattttgggttctccagatctgatttatgc

SEQ ID NO: 15204 - DNA, 2650 bp, Zea Mays
cgcaagagaaaatttcacgttatcttttctttttcgttaaaaaagaagcaagcgaaaaaaaacacttctagccgtgcgggcttggccgtccgcagtagcagcagcaacgaaccaacgaagcactggttgttggtaggtgcacgcaccccatccccccacccaatccctcgcggcgggcgggcgagagagcgagcggcgatggcggcactggaggcggtgaggtcgtgggcggtgtccgtcatcccgccggagctcgccgccgccgcggggggagacccgctcgccgcgctggcagccaccgccgcggcccttgtcgcggggctgcttatcctcgccgtctggttccgatccggaggcggggcgccgtccaagccggtcgccacgccattacggccgccgccggtgaaggtggacgccgacgccgacgtggacgacgggcggaagcgcgtcaccatcttcttcggcacgcagaccggcaccgccgagggattcgccaagtcgatggcggacgaggcgagggtgcggtacgagaaggccgtgtttaaagtggtggatctggatgactatgctcaggaggacgaggaatacgaggagaagctgaagaaggaaactgtggcgctgttcttcttagcaacatatggggatggagagccaactgataacgcagcaagattctacaaatggtttactgagggaaaagagaaggaagtttggctgaaggatcttaaatatggtatttttggccttggaaacaggcagtatgaacattttaataaggttgcaaaggtggtagatgagctactagaggagcagggtgggaaacgtcttgttcctgttggccttggagatgatgatcagtgcattgaggatgatttcactgcatggaaagaactagtgtggccagagttggatcaattgctccgcgacgaggatgacacaaatggtgcatcaactccatatactgctgctattcctgaatacagagttgttttcattgataaatctgacctgtcattccaagatagatcatggtcactagccaacggtactggtgtgattgatattcaccacccttgcagggctaatgttgctgttcgaaaggagctgcacaaaccagcttcagaccgctcttgtattcatcttgagtttgatatttctggcactagtcttgtgtatgaaaccggagaccatgttggtgtatatgcagaaaattctgttgagactgtggaggaggctgaaagcctacttgacctttctccagatacagtcttctccatccatgcagatgcagaagatgggtctcctcgtaaaggaggaagttccttggccccacctttcccatctccatgtactttgcggactgcgcttctacgatatgctgatctactcaatccaccgaagaaggctgctttgcttgctttagcttctcatgcatctgatccagctgaagctgaacgacttaggttcttggcctctcctgctggaaaggatgagtattctcaatggataactgctagtcagaggagtcttcttgaagttatggctgcattcccttcagctaagccaccactgggagtgtttttcgcagcaatagctcctcgtctgcaaccacgatactactcaatttcatcatctccaaagatggctccctccagaattcatgtaacatgtgcattagtttatgggccttcaccaacaggaaggatccaccaaggagtttgttcaacatggatgaagcgaagaatgcagctgggctcccatatttgtgaggcagtcaaatttcaagttacctgctgacccatccactccgattatcatgattggtcctgggacagggctggctccttttagaggtttcttgcaggaaaggttagcactgaaacaatctggagcagaactgggcacttcaatccttttctttggatgcaggaaccgtaatatggactacatatatgaagatgagctgcaaactttccttgaggagggggcgctttctgagctaattgttgcattctctcgggaagggccaactaaagaatatgtgcagcataagatggtggagaaggccacagaaatttggaacatcatctcacatggtggttacttatatgtatgcggtgatgccaagggaatggctagagacgtacacaggatgcttcatacagtagtccaagagcagggatctttggatagctccaaaaccgagagctacgtaaagagcctgcagatggaaggcaggtacctccgtgatgtatggtgacacatcacccccattcagccatagctctagcgtgtggaagtaaagctggctttgcgtgtacgacatgcctaatgccaaatgaagcgtgccattgattagaaactgaaatgttcagtcgatcagtgtaattctttgacatctaactatttatcattatatggaatgggaggaactgttgtagatttgtagaactacaaaaaaattgtgtatccctaacaagtttgtagcaaagggggtacattattacagtttgagatgaggacatcatgtatactgtttgagacgaggacattatgtatatacttggtacattagaaggccaccgaaaacaaattttgcatctggtttttgaaagcatgtgctcctatcaactatcgtgctgtctgcaat

SEQ ID NO: 15205 - DNA, 1028 bp, Zea Mays
cctcgcctccctcttcctttccggccgccgcctgccgccggaaggagaaaaaatgggtgccggtggggaggaagcgccgcggataatcgtgcctatggcggtggagggtaccccgaatcagctggcgtttgtagaggagtcgaagctgcagaagcgcaaggagaacgtggactgggccgtgaggaaccgggagcgcagggcggccaagcgccagcgcatccgcgacgagcacaaggtcgccgtcaggcggcccgaggagttcgtcaccgcgttccgcaacaaggagcgcgacttcctgcggatgaggacccgcatcaaggtccgcagccagccgcccgtcgaggcgctcggctccaggctcgtcttcgcgattcgcatccctggggccaccgagttgacgctgaagaggctgcttgtggtcgaaccctttgtcacatacgggtttccgaacttaaagagtgtgaaagagcttatctacaagaagggccgcgggttctttgacatggaacctttccctcttaccagcaacgatctaattgagaaggctcttggagatcatggcatcatatgcttggaagaccttgtgtacgagatcgccactgtaggcccgcacttccgagaagcatcgaggttcctcatgcccttccagctcaagtgtccggagaggaggctgcagatgaagaggaaaccgtacagggatggtggcgactcaggcaaccggggcgacaaagtcaacgaactaattgaaaaattgaattaaagcagagttgttcgcttcggactggtacggattaaaaccaaacgaacaggcctgtctctctctagttgtgattttgtggtggagtgatggatctgttactttgtcagttttgtaatagtatagctggatgtaatctagaggtgctgtttggtttacgaaatataatggtaacgataatgattcacactcgaatgatgttggtaataagtttgaatagttagtattaacttttggtgtaatatctaattactgttgaacctaaataaat

SEQ ID NO: 15206 - DNA, 2645 bp, Zea Mays
gcaagtgtgaaattgcatctgttgaatgatggctgatgcggaagctggtgaattctggggtttttttggcggctttgcccctcttcctaggagggcacctgcagaaggcaatgagaaacatgatgaaactgctttcaaattgctatgttttgaccaaggaaagctggagcctgtcgactgccaatctttagcacatgaattacttgagacaaacaagtgttacttcttagactgtggtgctgaattgtatgtttggatgggtagaattacatccctgatggagagaaagggtgctagtgaagctgctgagaaattgctctctgattcaaaccgaacaagaacacatataatcaaagtgattgaagggtttgagactgttacgttcaagtcaaaatttaaggagtggccacagacacctgagttgaagttgtcatcggaggatggaagaggcaaagttgcagctcttctcaaacgccagggcttaaatgttaagggtttgatgaaagctgctcctacacaagaagaacctcaatcctatattgattccactggcaatctgcaggtttggcgtgtaaatgataaagacaaggttcaactctcaccctctgaccaatccaaattttacaccggcgattgctacatatttcagtatacttatcctggagatgataaggaggaatgtcttattggaacctggtttgggaaaaagagtattgaggaggatagggtaatagcagtttcacttgcaagtaagatggttgaatctgctaagtttcaggctgtccaggcgcgcttttatgaggggaaagaaccgatccagttctttgtgatatttcaaagcttccaagtgtttaagggtggtcttagttctggatacaagagatttatcgctgaaaatggcatcgatgatgaaagttattctgaagatgggcttgcactctttcgtattcaaggttcaggaccagaaaacatgcaggcgattcaagttgaacctgtggcctcatcattgaattcatcatattgttacattctacataatggaaacactgtgttcacttgggctggaaatctgaccactgcattggaccaagagttaatggaaaggcagcttgatgttattaagccaaacacacagtctaggtcacaaaaggaagggtcagaaacggaccagttttggagtttactggggggcaaatctgagtactcaggccaaaaaatggtgcgagaactcgaaagtgacccccatcttttctcatgcatcctgtcgaaaggtcaaagaaatacaccactttactcaagatgatctaatgacagaagatgttttcattctggactgtcacacgagcatatttgtttgggttggtcagcaggtggatgttaaaggcaggttacaagctctggatgctggggagaaatttattgtgcttgattttcttatggaaaaccttgcccgtgaaacaccagttttcaccgttatggaggggaatgagcctccctttttcactagattcttcacctgggactccgcaaaatcactgatgcatggcaattcataccagaggaagctcgccattgtaaaaggtggaggtgctccagcattggataaaccgaaacgacgaacaaccgtctattcaggaaggagtactacacaagataaatcccaacgctccagaagcatgtccttcagccctgaacgtgtgcgtgttaggggaagatctccagcattcactgcattggctgctaattttgaaagttcaagcaacagaaatctttccactcctccacctgtagttaagaaactttacccgaaatctgttacacctgatccgtcgaatactgcttctaagtcacctgcaattgctgctctggctggttctttggatcacccttctcaaactcctgctctagaattcatgaaaggtggctccgagtcagagaagccaaaacaggagggagatggtaaagaaggtgttgatactgtggccacaagagttgaatctctgactataaatgaagatgtaaaagaaaacgagccagaagatgacgagggccttccgatttacctgtatgaacgtctgaagaccacagctgctgatcctgttactgaaattgatgtcacgaggcgagagacctacttatcttcaactgagttcaaagagaagtttgggatgacaaaggaagcatttagcaagcttccgaagtggaagcagaacaggctaaaaattgctcttcaacttttttagcctgatcatcaacacttccaatgtaatcaccatctgcaatgccacatcaattttcacattgtcctggatcggtctcctttttcctagtttggatttgttttgctagctaagtagctctcttattcttccagttcataggtgtgctattccctttttcctttttttgtcaagtgctcttcattgattcaaggtcacacaggtttgattctgaggcttgatttttttgtgtatcaactctgcctgctgtgttctttttttgtttttgagatgagttgcggtttgagggagcgataagtatgtacagcagagtgccggcactgtaacatcacaataccgttatctttgatcaatataattattttttgtgtgtaacttaatattgtttttccagaggatttaagg

SEQ ID NO: 15207 - DNA, 2611 bp, Zea Mays
cagtatgatttgcagcagggctgcaccaaatttttttcatgagaacaggccgtcaccacttggtccaccccttcgctgtcctctctggctaaaaagaaccgcagaaagatcgttttttttccctgtccccgttcttgcactcgagttcttcagttcttaggaatagtcagacggaacaactcgagtttgccatggtggtgatctggaaccggggtgtgctgccccctctttgattccctgattggtctcgctccagttcgacgcgggatttggacgggacgggcggaagttgggagagcagagcggccggcatgtttgggtccagggtccaggatgaggtggagatgcagaggaggcctaacaacaggatctttcccgacgagagacaaaatcaatctaagtcattgtatcaaactacacgggctgacagatttggcgcaaatagaatagatctgaagaatcctgagaagcttaaggtgttaaatgaaagcaacaaaccctggcaccagcgtattctagaccctggaagtaatattgtactgagatggaacagggtgtaccttgtggcatgtttgtttgctctttttatagatccttttttctattaccttccattgattagacaaaatggcaatggatcttcatgtgttgccaaggaccagggactgagcataagaatcactgtcctacgatcacttgctgacttattttacatgttgaacatagcaatcaagtttcatactgcatatgtggatccaaagtccagagtccttggaaagggagagcttgttgtggatattaagaagattcaacgaagatatataagaactgatttctttgtagacatacttgcagctgtgccacttccacaggttactgtgtggttaattatgcctgcgataaaaagctcagattataacatccggaacactacatttgctctcgtaattgtaattcagtatgtcataagaatgtatctcatcatccctttaagcaatcagattatcaaagctgttggagtagttgcaaagtcagcttgggggggagcagcatacaatcttcttctctacatgcttgcaagccatattactggtgcaatatattaccttctctccatcgaacggcagattacatgctgggatcagcatgcactgagtaaaggtgctgtatcatctccattccttgagaagtatttcttttgcctatggtggggcttgctgcagcttagttcaagcggaaatcctctcgtgacaagtgcatttatcacagagaatgcatttgcgatagcaattggtgctatcagtctcatactctttgctcagttgattggcaaaatgcagacatacctgcagtctatcagtaaaaggcttgaagagtggaggctgaggcaaagggacatggatgagtggatgagacaccatcaactcccatctcatcttcaagaacgtgtgcggcggttcgttcaagtcaaatggcttgctacaagaggagtagaagaagaatccatcttgcaagctttgcctgctgatattcgtcgggatgtgcagcgtcatctttgtttggacctcgttagacgtgtaccttttttctctgagatggataaccaacttctcgatgccatctgtgagcggctggtgtctttcctgtgccctgagaacacgtacatctctcgcgagggtgatcctgtgaacgagatgctcttcattatacgcgggaaactagagagctcaacgacaaatggtggccgcagcaacttcttcaactccatcatcctgcgccccggcgatttcgcaggcgaggagctgctcacgtgggccctgctccccaagaccaacgtccacttcccgctctcgacaaggaccgtacggagccacacagaggtggaggccttcgctctgcgggctgaggacctgaagttcgtcgcgaaccagttccgtaggctccacagcaagaagctccagcacacgttccggttctactcccaccactggaggacctgggccgcctgcttcatccaggccgcttggcggcagcaccagaggaggaagctggccgagagcctcagccgctgggagtcgtactcgtggtggtcggcggaggaccacccaaccggcgataagccgaggcaggagggcacctcgagcggcggcggcggcacgaggacgatcgctgaaggtgccatcgcccatatgcacaagctcgcctctgcttccagaaggttccgcaccgaggacgtcgctatccgcaggctgcagaagcctgacgagcccgatttctccgcggaccattttgattgaaccttcttaatattgtgcttcgcagctgggagttgcatgttgtacgaacgatcgcagccgtagcatatatactctactgtaattttactgcacagccatcttaggtgtcgtgaattgtaatagaaaaagaagatgtatcgtgtaattctaaatccagaatctaccctgtataggcttaaccttttgtgcagtgcataaacttgagtatttcgaagcgtcatatgtgacttgttagagaccagagcagtgacagcactacagatgagtgataacattggtatagctcgagcacatgtcaccagcgccaactctgc

SEQ ID NO: 15208 - DNA, 622 bp, Zea Mays
gaactgagaaaatcatctaggaggttgaggagcggcttgtttcagtggatgaactgcttgatgctgatgaggtattctgcacaggaactgctgttgtggtgtctcctgttgggagcattacatatcaagggaaaagagtggaatacggccaccaaggtgttggcgttgtgtcccagcagctgtacacttcactgacgagtcttcagatgggtcaaaccgaggattggatgggctggactgtgcaactgaattagttggccgtggttcgtggatcattcccaacagatgatgggttcgcaagatccaaatctggaggatcacaaccatgtgtacctcttcggttacagttttgtagtgtcttatgcgatggcgtcctgctgtatatttcttagacggtatttaaaccataaaacagtattcgtctgtacgactgtacccttcagttctgtagcatctgccggagacgagtactagttttgttattttctttcttttacaaaccaagaacagttctatagttttattgtagacactggaccatcatatgatctcaatgggtagctttttcctttttatatttaaaaataaacagaattttaattttataaattttatattttaa

SEQ ID NO: 15209 - DNA, 2201 bp, Zea Mays
ctgtcttgactcttcatcgtctccactctccaccatcatctttgattcctgtctccgcagcttgacccacaaacgcgactagggcagtcaccgcggcgtagctgccgcgtcttgccccgaaacacaaccgtcaacgccgtcccggaccgcagcagcgcggcgcaaccccaatcggagccggagctagcgaagcgagcgcctcgcttccacaagtcgctagctgcatctggagcgccgccggcccgaccaacgcccgagccagccgtgggcgttcggccgccgattcctctgggctctggtggatgtcttgtaggaacacacttggatgaggttacaatacgcgtggaacgccatacccttcattctgctattttgtgctatctccacaaataaaatcttctccaacaacaaacctttcagcttcaccatagcgtctgctaggtcgttgcttcagattgacccaaattcaggacttgttcaggacaaggtaaaagttggacaaattttggaagaggacacccaaaacattgtcaatatgactatgaatgtgtcgtctggatggagcattgtgaaagaagaactcatacttcctgctagaggtgcccctttcaatagttgccatgcttctactattgtacagattgaggaagacaattttttggtagcatatttcggtggatccagggaaggtgccccggatgttaaaatctggttacagagatatagtgatggtcactggcatcctccagtggtggctgatgaacaagatggggtgcccatgtggaatcctgttttgtttcagcttccctcccgtgagctgcttctcttctacaagattggtcaagaagttcagaagtggagcggtgccatgaaaagatcgttagatggcggtgtaacctggtcacctagagagcagttacctcctggcatccttggtcctattaaaaataagcctttcttgcttgaagatgggcgcctactgtgtggatcatcagttgaaagttggaattcttggggtgcatggcttgaggttacgaaagatgccggatggacctggagaaagtatggccctatatgtataaaaggtcaaccacttggggtgattcagccagttccctacaggactgacgatggaactattcgagtgttgctgcgatcatttgaaacaattggtcatgtctgtatggccgattccattgatgaaggtgtgacatggagttatgtccgtgagactgagcttccaaacccaaattctgggattgatggagttaagatgaaggatggaagagtactgcttgcctacaacaccttctccagaggaacgctcaagcttgcagtatccttaaacgacggtgattcatgggacgaagtaatgacactagaggacacaaaaggtatggagttttcgtatcctgcagtgatccagtctatggatgagctcatacatgttacctatacatacaatcggacacaggttaagcatgttgttcttcgacctagttcgatggtgaaattgtgagcctgcaactgatgaaggcctacggctggcaacttcaggacacccaaatttatcaccaaatgtttggtgtgggggggggggggggggggggggggtcattgcatcggattggctagattatgctcagttgatgtcaaataaaatgctttcaggtgctacttaatggatttttcgaggttcatctaaaaaaagtaaatactgtttaaaatgttctgcttctttctcatctcggttattgttcaaatatacttttcctttggttgtgcgttggctttcacgctttaggactcctttggagcatagtggttttacagaaaccgtgtaacaaatttatatgaatcagttcattttcataaaaaaaagagaggaagaagcaggggaaaaaaactggcattcaaggggacatgggtaatggtaaatgtgtttctaagactgtccgcagaagatcatgtaaaatagacgatttacattgtagataatattatttgtagagtcaagtttgaaatagaggatgaggcatgatagctactgaagacagcattaaagaagcatccatgtaaccgggtaccttgtgtaacctgttgtttatccgggatatgtcaagccacgccccttatattgcggagaaaacattgaagtaacacaggaatctgtcgccggcgtgctctttgtgaaaatttcg

SEQ ID NO: 15210 - DNA, 808 bp, Zea Mays
gcagatgtgattaggaaaagaagttcttcgctgttgaaaagccatctttaatcgacacgacaaaggggaccgatatttgaaaccattcgtcattccaaaaccagaagtcaccgttgttcctagggcgaaagatgacgactgcctcattcttgcaagtgatgggctgtgggatgtagtgtcgaatgaagaggcatgcaaagctgcgcgtcggcagatccagctgtggcacaagaacaacggtgtcacatcatcattgtgtgacgagggtgatgaatccaatgatcctgctgcacaagctgctgctgattatcttatgaggctcgcactgaagaagggtaccgaggacaatatcactgtcattgtggttgacttgaaacctcgaaagaaggccaagagcaactcataacactgggatggatccatcacggtagagctgaccatgatatgtccaaaggcttctgctgctagttgttggtcgtccgcaagagacttgaccccacaggtttttttcgttgggcctcaagaactgtaggtgcattttccatggagggttatgatgcttaaccccactctggtttctgatggctaaaacattctctccagtcggcttctaccatgagccctggcacttagtatatccctaatgttgtatgatagttgaacttgtaaagagacaagcggctgagacggtcactaaaattaacatattgttacttcatgattcaaggactatccatctgcctgaatccgatgaaagttttgtattgcagcttcaagtgtgtgcccacctatatatacagtttgattg

SEQ ID NO: 15211 - DNA, 1388 bp, Zea Mays
caaatacattgaggatagcacgagaaaggggcgccaagcaaaccgggtcggccagcagacaccgccatgaggactctactacctgtggccgccggtcgcgggaccgtcgcctgcgcggccacgcccgtcccccggaggtcgctgctcctctccaccgctgccgcaggtgcggcgctgcagccggagcaggtggctgggacgaggccgttgaggctgaccaggagcgtggcgagcgccgtggcaaagcccaggacctcggccgacgaggccatctcgtgggcgaagaaggacaaccgccggctcctccacgtcgtctaccgggtcggcgacctcgacaagacgatcaagttctacaccgagtgcctggggatgaagctgctcaggaagagagacataccagaggagaagtacagcaacgcgttcctcgggtacgggcccgaggaatcgcatttcgtcgtcgagctcacttacaattacggggttgacaaatatgacataggcgaagggttcggccatttcggcatcgcagtcgaggacgtggccaagacggtagagctcataagagcaaaggctggaaaggtcatcagggaagccggtcctgtcaagggcggcgagaccgtcatcgccttcgtggaggaccccgacggctacaagtttgagatcatcgagaggcctggaactccggaacccttgtgccaggtgatgctccgcgtcggcgaccttgaccgtgccataagcttctatgagaagtacacagtggcaatgatgggttacggccctgaagacaaggacgcggtgctggagctgacctacaactatggtgtcaccgagtatgccaaggggaatgcatatgcccagatcgccattggcaccgacgatgtctacaggaccgcggaggcggcgaagctgtccggaggccaggtggtgcgggagccggggcccttgccagggatcaacaccaagatcacagccatcctggaccctgatggctggaaattggtcttcgtcgacaacatggacttcgccaaggaactggagtagccacgccaacgacctcggacgccctgcaacaggattaactcgcactgctgttggtccgtaattaaaatgaaagctatcctagtgaaatcccaaattttcatcatgcatagaatacaggaccaccattatatttgcgaaagaccctgaatcaacgatcccagacagatgacttatgggccaattccctgtataccactggaaaatatactcatcccttgtatgccactggccccacatgtcatagacactaaaaattatacctatatgccactcagtggcatacaagggatgagtataaaatctgatggcataccaggaattttctcatgacttataatgtgtccact

SEQ ID NO: 15212 - DNA, 1432 bp, Zea Mays
cggacggtccgtgatggcgcaaaggatcgtcttcttcgcagcagagacctcgtcggggaggagagatcatatggtgtgtattggcgtcggcaggccatccaagacgtctctagtcgacgtagagctgaagagagctgaagatttgagtttgtaataggcagtggcagtaacatgtctgactttacctatgtggaaaatgtggcccatgccaatatttgtgctgagcaagccttgtcttcaaatgcagcttctgtagctgggaagcccttttttgttaccaatgacgaacctatggaaacatgggagtttatgaattgcatgatggaagccatgggttgtcagaggcccaggattaatcttcctgccaagatgttattgtttgcagccttgttctccaaaatgattcatcacaggcttggttttcaaatgctttccacccctcttcttcatccagatacaatatacttcttgtcgtgtacgagaacctttaacacttcaagagccagaagattacttggataccacccaattgtatcattggaggatggaattatgagaactcttgggtcattttcagaactagcagataatttggggttgtcaagaaaacagggctcctgtggatcctcgaaggcagataagctgctaggaagtggaacagctgctgatattcttctttggagggatgaaaagagaaccttttcatttgtcacagtattgtttctgcttttctactggttcctgctttcagacagaacttttgtttcatcagctgccaaatttcttctagtgctctcgcttgctctctttatccatggtgtgctgccttcagaagtgtttggttttacagtcgagaaggtcacatctgatcattttgaagtatcacactcagcattgaggaattcacttatgtgtgtggcttctgcatggaatgggagttttcataaactaaggcttttagcagaaggtgaagactggagtttacttttgaaggtatttgcatttctgtacagcatcaaactaatgctgaactttcagttcagatttttgatgggacttgtactggcatccttgttcattgtcttcattgtctatgaacaatgcgaggaagaaattgacagtttggtggcaaacgcttctgtcaaagtcaagtggctaacagacagagtagtcagaaatttgccggcctttttgaaggcgtatatagcctagaggagacatctgaaggatgtctcgccaactcgccatggtgctcctatctgtaaaaaaccttagttcttttaagctaacatgtactgtgcgatttacccaaatgtttgactagcacttttatattcttgttcaagtttcaccttttttttaattgagaatcctttcccacccctttttacaactcgtgacttggcatacaactgcctgcgttttatgctca

SEQ ID NO: 15213 - DNA, 2498 bp, Zea Mays
cgggcggcgctatggacacggagccgttcgacgaggcggagctcctggcgctcccaccgtcccccgtcgcgtccccgcctcgtcgcctcaagcgtctcaagaaatcctcctcccaagccaccgccaccaccgccactaccaccagccctcatgtcggctccccgcctccgcctttgtcgcctccgcctccgccgctgctggcggaggcgacgccgggcgaggaaaccctggcgttcccttcccgcgacacctccccacacccgccgacgccgccagatgcggatgccccgactccgctaccgcatccctctcccgcccccgtgtcgccgccgctgcagccgaccgtcacccccgacaacgacagcgacgaggaggacgacgggctcgacccgctgttctccggggccgccggcgtcgcgcagtgggacccgctgggcgcgccggccgaaggggacggtgagggcgacgacgacgacgacggactggggggcggcggcctcatcgaggagctacggagggaacagaggtctgcgaagaagcgtctcgacatggacgaagcggacggggaggtggcttcgggtgcgggggcgagggcggaggcaaaggggaagaggagcaagaggaagaggaaagaggaggcaccgaccatggagtcggcccgggagaagaagcgatctgagaaggaaaggagggcgcagcttgattcgatccatgccgagtcacagaggctgctgcgggagacgaggaaggcgtcgttcaaaccaactgtgcagccagttcacaagcccatctcatctgtcctggagaagatccgccttcgtaagatggaggttctgaagaaatcaaatacttctattgaagacagtgatgacaatgatgctgttccggagccagtggttgatttggctgagcaattggatgtgcctcagtctaaagaagtggcacttgataaagacttgaggattgatggcgctgaaaaggagcttggagcaaatggccacagccttgatcggtgtgatagtgttcaagaggatgaggatggtttgagttgcaaggagaaatatctctataactgtggtaccaaagcttcagatgaggaattttctgatagattgcaagagaatcacgagaacacccagccaagtaataatcataacgattcagtagatcagagtcaactgcccccttcttcaagccctactgagagtacagatgaaatttcatcagaagacgaagaaaataatgataaagagaacatggatccaagcgctcagaataatgatgtacatactcttgaacacctccaacaagccatcggaggaaactcacgtccagatgatgctatcttaaaggattttctagatgatgaagctgaggaagaggatgatagtgacaatgacatgactagatttaaggacaatgaagaagatgatggaagcgatgaaaacgaggtgttcaatgacctaatagcagctggttatgaagaaaaagaagtagatcacgagaagcgtaatgaactccaccaaaagtggcttcaacaacaggatgctgctgaaacaaataatgttgataataatacattgatatccccattagaagatgacaactcaagggaggtatttagtctaataaagaagctcaatattgctcctaaacctaagatgagaggaaagcaatcaacatcaaatcatgaaatgcttatggctggaaggaacaccattgcttcaaagtcatcgtttcttggacgaacagccagtggttcactggcatcttctcacagatcagtctatagatcctatgtatttggtcgtgatgacagcaatagcagcagtaggagctgcatttctacttcagagagtaatttagatctggatcagaccaattcctctcaacccaagaaggccaagttcagttcacagccgaaaccagaggggacaagggcaactccagagtgtaacacgagttcaggtgtttccctcttcgacgtcctgcgcaggacttcagagcagagcagtcaggaaagctgtagcacaatcacagaaagtcaagctgtgcaccagttctcggcattcaagttatcaaggaggttttccaaggtgggttcaaaaaattgacaaactctagatggctgttagtatcgagagggttactgttggagcttatggggcaacgcgttgagttagtttcgagcttcaaaccgccaaaatgttccggattgcaccatgagcgccaggtgttttatgcacgaactgagaatgctgagacctggccctgttgtagattatgaaacccagaatcttgttgtgtgtactcgtatgctcttgagaacgcacgctgagtttcctgagatgtttaaagtggagtgtaatgtttgcttattctctctgcattgtctcatgagataggtagatgttgtaaggcttttaccaaaaccaaatgttcgaaatattagatgtaaccatacattctgttcatggatgcctgccgatgttaccatg

SEQ ID NO: 15214 - DNA, 1000 bp, Zea Mays
cccatcctgagctcggctcctcctcagaaaaacacaagggaagacagctgcctacccaacctaccagccatggcgccacattcttactccatagcccccgtccaaagcgagctgaacatgacgctgtacaacaaggaggtgtacggtgggcgggggaccaacggagtgaccactctagtgaaccgagggccaatcggcaccacctgggtcttctcgtggcctgtcaccgacgggcccgccggcgccgacgcgaacgtcgtcggccatcttcagggcaccggcgttcaagtcgccacttaccccgactacatgtggcactactcccttgggctggtgttcggccagggaagcaggttcaatgggtccacactacaaatacaagggacttccaaaataaatggcgagtggagcattgttggagggacaggagaacttgctatggcaaagggcacggtcagacgcacagaagtttcgtatacgggaaatataaggatttcagaactcaatatacatgtgctttacactccaatgtgacctatacagatgtcaagaacaagtatctctggaggaggactactatgataagttcgatgagatctagggtgtggagaagttatcttaatctggtttattttatttagttatttttgtaagatgttttgtcatgtaataaagattgtgacattggtttatatacacactgagtcgtcatatatgtgaaatttgatcctgacacgtacatatgaggtgcatatggatttgtccttaaatccgggtgtgatattacttgagtgaggagagggttgaaagagacccagtcctcggactcctcaacagagacataggtttctctttgaaatcaaactctagtaaacaaaccaccatgtctcctatgcattttccttccctatttgcatttgtcttttcccattcaagcaaaacttgctttgttcttcatttgagctttaccttttgatattctgttgctagcctctattcc

SEQ ID NO: 15215 - DNA, 1090 bp, Zea Mays
cgttaatgcttattaataatctggacttagtccttaagaggagctgtcgtcattcgttagggcttcatttatcttctaagcctcttccacctcttcctaatcttgaggtctcagatgcgattgttgaaaaagctgcaaatcatgctcttgtatggatcaataggctgctggctgttggtcatgacatcgccatcaagagagataggaaagtttttataaaggtgatactgattttgtgggtggtttcattcattggaatgctcttcaattttcttacgcttatttacattggtgtaatgctttctctgttggttccaccactctatgagaagtaccaggaccaggttgatgagaaggttggtgtagcgtacagtgtactatcaaggcacatagataccatcattaccagggctgggcaatcagccaagcagaagaagactgagtaaaagaaacgttttgctgtattgtggaacatccctggttgtccaatgaagttgacagtgggcctttcatctttgaccctctattccactaaaatgaaccctcgatatgctgatatgaggttttgatgtgcattacgggaaatgaggtggcttgtgtatttcctttttggacatggggtttactatgggtgcatatcgcactcggaatgatatcgagaaattgcgactcgtacatgcaattatgcaggctgcttgctctgttagtcatatgatctttccgtcagtgattttaagttttaggctgctccgaggaactttgcaggctgctccgagcaattatgcaggctgcttgctcattcgatgcccatctactggtagctcgttttctgaaatactactactccctccgtttctttttagttgtcgctggatagttcaattttgtactatccagcgacaactaaaacgaaacggagagagtacctaataaggtgtattctacatagacagttgcatatcatgtgaatggataggtatttctggcggcagttctgtttttgctttacctgtatttatatttatactgtcatgtacgggcgctcgtatgccaggcagcgtcgcgcccgtgacaggcgccgcgcacagga

SEQ ID NO: 15216 - DNA, 2295 bp, Zea Mays
cacgctagtacgctacgctaccggctgcggtggctctcccgagtcgaagtggcagctcccagcctcccacgcgtgaccgtgagagggaagggggtatttaacagacggcgggccgaggatgcgagctctcgcggcagcagcaactgcagtggcggcgcctacccccacgcgcctccgcctcccgctcctctcccgcaccctgcgctctggtcactgtagaagctcttattcctccaggctcctacggttctcgtgcagtgccaccaccatgggagatgagacctcaacctcggttgctccccaggaacaggaatccactgtgcaggctgggagtgtcaagcaacagctctccgggctggtccttatgtccctccgggctactgtgcctgaggtggaggtagaaccgatggttgaagtttcagcaaagtttgctgactaccaatgcaacaatgctatgggattatggtcaaaggttaaaggatctggaaccagtttcaaaaaccctaatgccattggacaggccattgccaagaacttgccttcttctgatattattgaatccacatctgttgctggacctggttttgtgaatattgtcttatcaaaccgctgggttgcacagagaatacaagacatgctcgttaacggtatcaagacttgggcaccaattcttccagtaaagagggcagtgattgatttttcatcacctaatattgcaaaggaaatgcatgtgggacatctaaggtctacaattattggagatacattagcacgcatgtttgagttctcgaatgttgatgttctgcgaagaaaccatgtaggagattggggtacacagttcgggatgctaatagaatatctttttgagaaatttccaaattggcaagagattggtagccaggccattggagaccttcagattttctataaagcatccaagcatagatttgacaatgatccagaatttaaagcaagggctcaacaaggagttgttcggctacagggaggagaagagagatatcgagaagcatggaaaaagatttgtgacattagcaggagtgaatttgacttggtctacaaacgcctaaatgtggtgcttgaagaaaagggggagagtttctataatccttatattcctcaagtgttggaggaattgagtagcaaaggcttgatcaaggagagtgagggtgccagagttatatttattcaaggtcatcagatccccttgatagtggttaagagtgatggtggcttcaactatgcctcgactgacttggctgccctttggtatcggctcaatgttgagcaggcagagtggatcatatacgtgacagatgttggtcagcagcagcactttgacatgtttttcagtgctgcaaagatggctggttggctgccaggtccaaacgaaaagaagtttccgaaaacaagccatgttggatttggtctagttcttggttcagatggcaagcggttccgaacgcgcagtactgaggttgttcgattggtagagctacttgatgaggctaaatctcggagcaaatcagaactactacaacggctcactgaaaatggcaaaattgttgactggacggatgaggaattagagcaaacttcagaggcagttggatatggtgctgtgaagtatgctgatctcaagaataatcgtctgactaattacacatttagttttgaacaaatgctgagcgataagggaaatactgctgtgtaccttcagtatgcacatgctcgtatttgttccattattcggaaatccaacaaggatgtggaagatctgaagatgactggagccatttctcttgaccatccagatgagcgtgtgttggggctgtatcttatccgatttgctgaggtggttgaagaggcatgcacgaatctgcttccaaatgttgtgtgtgaatacttgtacaatctatctgaaatgttcacaaaattctataccaactgtcaggtggtcgggtcaccggaggagacgagccgactgttgctttgccaagcgactgctgttgtcatgcgacagtgcttcaatctgctagggatcaccccagtctacaagctgtgatcggctgcatgtttgaagtttgatttatacattcaacatcgctttacgtagaaacccattcatcatggttgcagttttggccttgtaacctagttgaggcagttaacagactataatccatctccctgtttgaaaatagaagcaactcaaaagtttgtaacaaaatatgctctgcagagtttctattgatccattacattacgtaaaaaata

SEQ ID NO: 15217 - DNA, 1390 bp, Zea Mays
ccgcccttcgtccaggctgcagaccttatccaccaacctccggtccacggtgactggccgcaagctcctcctctcccgcaaacacccacgcccactccattgctcctctcctccaacatcgctcacgcggtctcctctccccgctcagctccgctccgctcccggagacacgcaagcttcccgttcccgggaacgcgcactaaagatgcctccagccttcgccgccgcaccttcctcctcgatatgtggcgttcgcatcccaactgtgcgccgtttcgaagcgcaaagcacggtttccacgcccagatttatgcgtaatcgggtggcagcaaaaacacggtctacatcagcttggtccttgaaggctggcttgtgggattctctcagatctggccttttgaagaataatagcagtacagagacagtagagccaccaccagcaccacttgaagtggaagagcctttgcctgtggaaatagtactcctagaaagaacactacctgatggaagcacagaacaaattttattttcttcagccggagatgttgatgtatatgatctccaagccttatgcaataaggtaggatggccacgcaggcctctttcaaagatagcagcctcattaagaaatagctacttggttgctacactatattcaataattagatcttcagaaacagagggagaagagaagaaacagctcattgggatggcacgagcaacctcagaccatgccttcaatgcaacgatttgggatgtccttgttgatccttcataccagggtcagggtcttggtaaagcactcatggagaaagtaattcgtactttgctccagcgagacatcaacaacattacactgtttgcggataacaaagttatagatttctacaagaacctggggttcgaagttgatcctcaaggcatcaagggcatgttctggtaccccagattttagcaccagcagccagatatatcgttcgaggggttgttgtacttgaagcatctccccgttctgaaagggtaattgacaggtcagggctccacgccctgatggatctcgcacttaatatttcatccttggtgagaagctgtaattttcttcaatgctaaaacgaccatgtgatcggctcaactctccgcacccctgttgtaaccataaccccaacaaaacacgctatttgtaatacccgtgtttcatacatgcgctctagactcttgccatctgtatgtaacgtacgctttcaaatttctacattcgaaatggaaaaaaaaactgtatccatcagttatccatatgcgcacaccatcagtttttactgtctcttggaaagaatttgctttccatcaacatccacttgctgttgctggaactgtaacttaagttgagtcg

SEQ ID NO: 15218 - DNA, 1777 bp, Zea Mays
aagccagaaccccagtaaacccaaacccaactcctccctccccacttccccagtccccagtcctcgcggccgaaacccttgctcccttccgcgatggccggccggggcgcctccccggccgcggcggccgccgtccaggtgcgctgcgccggctgccgcggcgtgctcgccgtggctcccggcatgaccgagttcatctgccccaagtgtcgcatggcgcagcgcctcccgccggagctcatgccgccctccccgcccaaggcctccccgactccgcctccctcaggtccaactccgcctccaccacctccaccttcgctgccgcctccgcctccgcctccgcctcagccagtgccgcaccctctgacccgccgctccgctccccgggcgcagggcgtggaccccaccaagatccagctcccctgcgcgcgctgcaaggccgtcctcaacgtgccccacggcctcgatcgcttccgctgcccgcagtgcggcgtcgacctcgctgttgacttgtccaagctccgccatttccttgcatctgctggcccaggcttttttccgcccccactcccacctcccccacccccgcaacccccagtgccaatgcctcatctgccctttctgccgatgatgccacgccttccattgcccatgctgccgatgctctctcctgctgagctaccggaggagatcaatgaggttgcagttgatgttgagcgcgacgaagatgaaagtggcacttttggggaaactttcattgattatagacctcccaagctatcttttggttttcctcatcctgaccctgtagtagaaacatcctccttgtcagcagtgcaacctccagaacctacttacaagttgactatcatgaaagaattggatgaaaccaatgcattatcttccttacagattgaaacaatagtgtatgcttgtcagaggcatcatcatcatcttccaactggagctagagcaggtttcttcatcggtgatggggctggtgttggtaaaggacgtaccgttgctggattgatctgggaaaattggcagcagggaaggcataaagctttgtggatatcaattggttcagacctgaaatatgacgctcgcagagatctggatgatgttggtgcaaaatgtgtggaagtgcacgctttaaataagcttccatattctaagctagactctaaaacctttgggatcacagatggagttgtttttgtaacttatagcagcttgatagcatcctctgagaaccgttcccgtttgcaacagttggtacagtggtgcgggtctgagtttgatggtcttctggtgttcgacgagtgccacaaggccaaaaatctgattcctgaggcagggagccagcccacccgcactggtaaagctgttcttgagattcaggatatgttacctcaagcacgggttgtttattgttcagcgactggtgcatctgagcctcgaaatttaggttatatggttcggcttggtctctggggagatggaacatcgtttgagaatttcaaccaatttttaggtgctcttgagaaaggaggtgtgggtgctcttgaacttgttgctatggacatgaaagccaggggaatgtatgtttgccgtactctaagttacaagggtgctaactttgatatcctagaatcacttctggaggaaagaatgatggatatttttgttagtatgattgctcattgacatgaagtagtattcttttaaatttaattaacttggcgagaacaaagtggtagaaactgaaaggaga

SEQ ID NO: 15219 - DNA, 836 bp, Zea Mays
aaaaaacttgtttaaataacacttgcggcaaaagggatgaactatcttcataagcgtaatcctccaatagtccaccgggatcttaagtcaccaaacctgttggttgacaaaaagtacactgtgaaagtctgtgactttggtctctccagattgaaggcaaacacatttctgtcttccaagactgcagcagggactcctgagtggatggcaccagaagttctacgagacgagccctcaaatgagaagtctgatgtttacagcttcggtgtaatcttatgggagcttatgacattgcagcagccatggagtaatttaaatccagctcaggtcgttgcagcggttggtttcaagggacaaaggcttgagatcccaagcagcgttgatccgaaagtggcggcagtaatcgagtcctgctgggtcagggagccctggagacgaccctcttttgccagtatcatggaatccctgaaacttctcatcaagacattaccacccaatcagctcctcgaagaaaattagttaccacccaagcaacttgcaaattatgtcacctctagagttttctcgatttgtttagatccgatatgcgccaggcctctcaaaccattcgtcttcggcgccacgtattccctgatgagaaatattcaaaactacacctgtcacaaaaggggaaaaactatggttggacaataagattcatgaaaaaaatatgtgatccaaattaagtgtacatctcttttatcaaggaaccaaatgtaagttggtcaaatatatacatataagtactaatatttatggaatatatacttttacaataaaattattaaagatataaa

SEQ ID NO: 15220 - DNA, 1713 bp, Zea Mays
cgtccccatcccactcgtcgcccatctgccgtgacgtctctcctctctccagcggttcccatctactacttaactcgcaggccgcggccgcctagaccttcctctcacttcgcgggtacgcagagtcgctagacgcacctcgctcgcaacttgttggactcgaaggggcaatagacagcaggcagggccccgaactgcgggaggagattcccaaggatctcgtcggccgggtagaggaagggacggggacgggcgatggcggcggacggcggcggcggggtggactgggagagcctggcggaggccacctccggggcaatcggctcgctcgtcagcaccaccgtgctctacccgctcgacacctgcaagaccaagttccaggccgagctccagacgcaccagggcgctcagaagtataggaacctttcagatgtcttttgggaagcgattcgtaaaaagcaatttttgtccctatatcagggcctgaacacgaagaacattcagtcttttgtctcctcgtttttttatttttatgggtatagctattttaaaagactctacttggagaagagtggagcaaagtctattggaacaacagccaacttgttagttgctgctgctgctggtgcttgtactgttatcgtgacacagaaggtacttggatggaagcattcgatggcttaggcatttccattatattgacttgcaatccttctattcagtacaccgcgtttgatcagttcaagcaaaggatacttcataggcagcggcgcaaaaatgcaggatcagcggaggataattccggagttgctctttctgctttctcagcttttctgcttggcgccgtctctaaaagtattgctacagtattgacttatccattaatcagatgcaaggtgatgattcaggctgcagaccctgatgaggatgatgacgatgaacctggaaggccaagcaaatcaagaacaccaaaaacaatgctaggtgccttgcatgctatctggagcaaggaaggcattccaggcttcttcaaaggcttgaatgctcagatccttaaaacagttctgagctccgccttgctgctgatgattaaggagaagatctcgaagttcacttgggtctcactgcttgccctgcggcggtatcttttcgtttctcagaagaggatcaagagtgcaactgtataaatacgttagctccaaaacacaaactagcacacatagcgacatggtgcttctggagatgttatgccaaggaataaatctgaggaataatcagcagaaatacttaaccaagagagagagaataaggtgtgtatctggggtcgatagcatcagagggctcttcaataagtttgtccatttcttttttttctctctctctctgaatctcttgtagctagtgacgtagatgttgcgcggatctgaaactggactgtacttttagcgtttgttgcctgtaattaggggtgataatgggctctgaattttacagtataatatttaaggttcggattatgattgggtcctgtttctattcatttttaattaaattttatttaggactctaagaaattgtgaaaaacatttagagcgtgatctattatcatccctacctgtaacgtgtaaaatagcagcgtgttaatattccctttaaaaaaggtaatcgatcggcagtgtgatgtaagatgtgttgtcgatcgttcccttttgc

SEQ ID NO: 15221 - DNA, 954 bp, Zea Mays
gtctggccacgacaaccccgctgcatcaccatcattcataggctgccttcctgcctgctgatctcgcacctcaaacccacacacagcagcataggttgagatagatggccagtctgtggaagaccaaggttctgcctggcctcaacaagatcttcgacaaggatggcaagaaggctgcagctgcaggcttcttcaagtccttcaacaaggaggagattggcaaggagattgaggagaagaaggcagaactggagcccaaggttgcggaggcttatgaagcatctcctcctgaggtcaaggctctgttcaaggataagaagccagtcaagatcagcaagaagaactcgactgcagttaccaagttcctcgatgagctggctaagattgacttccctggagccaaggtggtgagcgaggcggtggccaagtccggcgcctcgcccctgtctccggcgatcaccttcatcttggacaaggtcgcaccgtacatccccaaggaggagcccaaggcggaggacgcggtggctgaggccacttcccgggaagtcgccgtggaggtggaggatgccgagccggctatagctgatgcagcggccgagacaccatcggaggcgaagaagggagaggaggaaaagccggctgccgaggaggcggcgccaccggcagcggctgctactgaggagaagtaatactccgatccacagccatgcctctccctacgtagctgcagcagagtgaaaagtgattcagtcagtcagacatacacacttgcattggcacgcattattcatggacatgtacgttgctgcgccgtgtgtgcgtgtgcgtgtgcgtgtgtgtgggggttctttgttttttattttggggcgattgttacaaatgtgtaattatttatatcgatatgtttgtttcattgatggaccgcatttaataagacaattctttcttgtgtat

SEQ ID NO: 15222 - DNA, 3924 bp, Zea Mays
cctaggtctgcatctgtactttccacgacatgttcaatctccttctacggccatgtctagactttccacatcggactcatcaagtttcacactgccgacagccttagccggtatggagcttggcctcgagtgtaggcccccaggaatgtcaggctaacaccaagccaagctgggttcgtcttctacatagtctcgtttgccaatatgcgatggaccccgcgctggcgagggaggtcctggccgccatcaaggctgacgccgcgggcgctctcagtggatttgcggtggcagtgatgctgttcgtggccagggtgccgaggttcaacgagggtgccgtgagtgtgctccgggatgcggtcgtggtgtcccgccgggattaccgaatgtcaaggcggtgcaagtggttgccggattgtatggaaggggaatatgcacgggccactcaatgtgtcgagaagggaatactaaaatctgtcgacgagagcattgttggcagggagcatgttgtgccaagcattgttcaggtggcttttcgcctgttagaagtctcagaaggtgatcaaggtgaggaagctggcttaggtgaaggagtaatgagcaccgaagaaataggcattaatatgctcaaatcattgtttgaggtccatgaaatggcacggactgagataattgaacagtgcaagttccggattctctcggcaaagcctcagcaaagtgtgccagttctcaggttgattggatgcttgattttgagtcatccatttccaatgctggaattcattgcacatttaaaggagttgttggattatttttcttttatgaatgacaagatatcaactgctttgatcagttgcatcttgccactcacaaagttcagccgtgatctgaaggattacgtaatactggttgtaagaaaggcgatgttcaagagggaggacatggttcgaattgctgctacaaatgctataattgagctgattattgcagaaaacaagaaaaatgaagccaatccttttgaagattcaacaagtcagccaagctctagccaacagcctgaaacacatctagagtttggtaggtgtctctttcaggaactaagtgggttgcttcggagatgtctctcacatcaggccagtgtcaaagaggtcttgtacgagggtcttatacgtactgctatctctgatccagctgtttctgacaatatccttgattttctctggcctcacttccaaaactattactcagaggatgcagaatgtcctcttaaaattggttcatgcttcaaagtagagcatgccaaactatgcattgtggaacctttagattgtctgctgtcatgtatctcaagaattctgcaaattaagcaacatagtaaatgtgaacgaccacgtgatgcatattggaagtgctttggttttgctgcttcacaagataatgaggttggacgagcatcatcaagtgatttattcgtgaaagctttatcaagcatccaaaagtatttgaggatatccctcacagagcagagaggacaaagccaagaagctggatctctttcttcaccatcagagatggctcattgtcataactttgctatgcttggaatcattgaggtttttattgatttttctgcttcaaaactggagaaagcctctggcaaatcgaaggaaatgatagaaaaagaaatcgtggagcttgttgatgcgcacagtggctttgagaaaaaaattagcagtggtagggaaaggatagcacggagaagagcaaatgctggtgatgctacagataagcacaccaacgaacccagggagaattctaatgcttcattgcagaaacatcatggaaacaggggtaaatttgctgattcgagtttgtatgaactttcggtaatgtgtgtcaagcagtgccatgctgataactacaacaatgttagtcaacattctagccaaactaaattgaaccagagctccaatttgacatcctttgtactgaaagcctttcttgaattgttgaaatcacttgcatcaaagcacagtagggacttcacaataaagctgcatggagattttaaaaagttaagccagccaataatgcagctagtatggtgttttctgttagacccaattcaagaaaatggtggaagcaagaagaacatgacccaaggaaagaaaaacactgagtgcaaaaaggatcagttatatttggctctgacatgcctaaaaaaattccttgagccaagtgtttcaggagaacactctagtgatatcattgattttctaatatctttggctccacctaatatagaggatacaatgggtactggggatcttgacaataatgataccactatggttgaagatagaagcacaagaaatgtccatgtgattttgaacatactgaagacgttatatgccagacttcttacccaatcagttttacgtgaatctgaggctgtaattgaattgattctgggtatttcaagaaaactgcaacttgaacgaaggcatcttgttggaaaatgggctacagatctatgtagaaagaaaaccatgcaaagtcctagaatggcacgagagatgttaaaactagctatacatcttacaccagctccagatgacatgattcttgtttatgaggtgtctactgagttgatgaatttaatgacctctggagatgatggagattcttctgatacatttcatatcattaactgtaaaacaaagagctcactcgctgctctctctcttcaaatggttgagtcatctcttactgaattggattggggctttggaaagcttaaagcaatgcttacattaggttatgattgtgctaacattgatgaagatcaaccagcagatgaaataatgctaaggttggctttggagaaagcactctactcgagatcaacattagtagttcaagtgctctcttcctttgcacatatgagccctatggatactcaagcagaacattttctgaaattgactgtcaagttctacaagcttttaactcgcatgtcaaagtcccagattgtacctaaaggctacagacaatccattccaagcctcaagtttcagaaactggcagaagtaacttgcaaaatgctcaccgctcccctttatgattttgtgtttcaacagaatcagcaaatacccataaagggaaacctcgccaaaattagaagagaaaccaaatgtatccctgatcttatttttcagattgaggattatgagaagtatttaatacagctaagcaaactaactaaggtaaaccttttgaggcatgccaaacgcagtgtagcaagagacttccagataaaagataaatctgggggacaacaggaagatgatcacattccagacaatgctgcagcatctgataacgaggctgataaggacgcaatgggtccaaacgcaccagttgaatcatgtgctgacgatgctcaaaaatcatatgctgacgaaaatgcatcatgtgaaagtgggcatgatgaggatgcaggaggtccaaacactccagcagaagcagatgctgatgaaatcattaggtctagcattccatatggtagtccagtccaggagtctgaatctgatagagaagaggaagaattattagcacggacgaagagagctaagacaaaacaagttgtgcaggattctgatgaggatgcagatgagtaggtttttaaacattatcaatagttcaattttcgaagcgtctattgtgggcaacatcatgccaaggtgtatatacataagtttttatgggttatcttgctgattatagacgatgaacacaagagatgtaaaatatatggttttgcaaaaattcttgtgggccatcatgttgattatagaccatgcacagaacatatgtaaaatactttattgtaaattataagttattctaattttctttaagtgaaaa

SEQ ID NO: 15223 - DNA, 3137 bp, Zea Mays
ttctagaaaaaccgtgttagcatttcaatggaacttgtgacagctgtgttaggagatcatgggcaaaggcccaaggatgattatgctgtggttacagctgtgactgagttgggcaatggcaagccaaaattctattctactccagaggtgattgcattctgtcggaagtggcgcctacctaccaaccatgtgtggttattttcgacaaggaaatctgcctcctcattttttgctgcttatgatgcattatgtgaagaaggaactgcaacacctgtatgcaaaacccttgatgaaatagctgatatagctgtaccagggtcaaaagatcatgtaaaagtgcaaggtgagatccttgaaggtctggttgcccggattgtgcctcgtcaaagtttagtgcaaatggaagaggttttgaaaaactttcctcaggctccatttgacgccggcgactcagatttgggaccaagtttacgagaaatttgtgctgctaataggtcagatgaaaagcagcaaatcaaggcactgcttgaaaatgttggagcttcaatgtgtccagatcattcggattggtttggaactggtggacttgatgctcagtcgcgaaatgctgatagatcagttgttacaaaatttttgcaagcacatcctgcagactatgcaactaagaaactgcaggagatgattcgcttgatgaaacagaggcacttctcagcagctttcaaatgctactggaactaccacaagatcgattctctttcaaatgacaatttgtattacaaaatggttatccatgtgcataatgattctgtttttagacgataccagcaagagatgaggagaaaccaagggctgtggcctctgtatagaggtttctttgttgatgtgaatttgttcaaggcaaacaataagaaggcagctgaactagccaaagatggtaacactttactgaaaaatatcaatggtgccttggattcaaatggttcagttgtggatggtttggctgatgaggattcaaatctaatggttaaactaaaattcttgacatacaagttgcgaacatttttaattcgtaatggattgtctacccttttcaaagatggaccatctgcttatagaacttactacctaaggcaaatgaagaactggggaacatcaacaaacaaacagagagagcttatcaaattgttggacgagtgggctgtattcattagaaggaagtacgggaataagccactctcatcctcgacatatcttagtgaagcagagcctttccttgaacaatacgccaaacgaagccctgcaaaccaggctttgattggggctgctggtaaccttgttcaaactgaaaatttcttggccattcttgacgcaaagagggatgaagagggtgatctccggacagatcatggggcagcaccttctggtcctgtgtcaacatctgttgatgtggttcccaaaacagagggccttatagtgttctttccgggtatacctggttgtgcaaagtcagctctgtgtaaggaaatattgaacacacctggtggccttggagatgatcgcccttttcatagcttgatgggggatcttattaaaggaagatactggcaaaaggtcgctgatgaaagaagaaagaagccagctagaataacccttgctgataaaaatgcaccaaatgaagaagtttggaagcagatcgaggatatgtgtgggtccacaaaggcagctgctgtccctgtggttcctgactcagaaggcacggattcaaatccattttctcttgaggctcttgccgttttcatgtttcgcgtcctccagcgggtcaatcatcctggaaatctggacaaggcctcacctaatgcaggctatgttttgctaatgttttaccacttgtatgatggcaagagtcgaagagaatttgaaaatgaactttatgaacgttttggctcccttgttaagatgcctctcctgaagccagatagagcgccattgcctgatgcggtgaaagccatcttagatgaggggattagcttgttcaagatgcatcggagcaggcatggaagagcagagccatcaaaaggttcatacgctaaagaatgggcacaatgggaacaaaggttgcgtgcgaccttgtttgggaatgctgatcatcttaactcaattcaggttccttttgactatgctgtgaaagcagtactggaacagttaaaagctgttgcaaagggtgatctcaaaacacctgatactgggaagcggaagtttggaaatatcatgtttgctgctgttcgattaaccccgcctgatatattgggccttctccgtaaggtggcagagaaggacacggctgtcgacagttttgtgaacaagataagactggaggacaacctaacgaaggttcacgtcacccttgcccacaaacgaggccatggtgtgtctgctgtcgcaagctatggcatctaccagcaccaggaagtccccgtgtcattcaacgcattgtactacactgacaagatggccgctctcgaggcacagctgggagcagtaaacgatgagccgatcaattccaggaacgagtggccacatgccactctgtggacggctccaggcgtcactccaaaggaggcaaacatgctgccgcagctggcttcagaaggaaaagcagaacgggtgccgattgaccctcccatcaccatatcgggggtggtggacttctactgatttgtctcctcggttttaggatacggatgtgcagaggtgaaggtggaataaagaataatttgctgctgcgggccttacgttattagctgattgtggacaagacaatcgtcgagtcttacaccacataaatttttgatactataggactgacctggactgctgcatttctacttccatgttttccaataagtgcaagataccatcgattttttaagccagcacttagcactagaggagataattatctgtatagcaagcacatcattctactttctagtgtatttttgaatttccagaggccgtttgacaggacagttgaccagaaataaagttcgtgttggtggtatgttacctttattttgtgtacttattacaaagttgcaacaccgaatgcttcgttgactggctaacataatgctggt

SEQ ID NO: 15224 - DNA, 2948 bp, Zea Mays
cttggcttggccgctgctgcccgtgcgcgcaccggccgccccacctccatcttcccatggtggtggtgtcatcccccttcctcttcctcccctcgtgcaagtgcaaccacccacccgctctcccaccgccctcctcgcctatccctgccgccactgcggccgtcgatgagccccatgcccaccgcgccgtacacctccgcgacctcgctgctgctgggcagccgcaggctcccgcggttccagttccagtccctccgcacccccaccaagccccccttccgccgcccggcctcctcttcgtccacacctctccctcgatgccgcgccagcgcgaccccccgccctctggcccccgtctgcgcttccgccctcgcgctgcccgtgtcggtggcggccgctcccccaccgcaggtggacggtggctgggtgggagggacggcagcagccgtgaggagagtagctgtggcggttgcgtgcggggctctcgcggcggcgtggtgccgccgggcgatggctgtgggggctgccgcggcggcgggagccggggccggggcgccggggacggtggaggctgctgcagggattggatggatggcgctgcgcgggggctggcccagggtgctacagattctgcagctgctcagggagcacggcttgattctggccgcgctgcttagcctctctgcgttcttctccatggcagaaacttctatcacgacgctttggccttggaaggttcgtgaactagctgagaaggaacctgagaatggtgttttcaaaatgctccgaagtgacgtcacccgtttcttgaccaccattctcattggcacaacagtggtcaacattggtgcaacagcaattgttactgaggcagcaacagcaatgttcggtgaagcaggcgttagtgcagcaacaggtgtcatgacagttgccatcttacttcttacagaaatcactcccaaaagtgttgcagtccataatgccaccgaggtcgctaggtttgtggtaagaccggtcgcatggctttcactgatcctctatccagttgggcggattgttacttttctgtcaatggggatgctaaagattctaggcctgaaagggagaagtgaaccatatgttactgaagatgaactgaagttaatgttacgaggagcagagttgagtggtgcaattgcagaagatgaacaggatatgatcgagaatgtcctggaaattaaagatacacatgtgagggaagtaatgacgcctttggtggacgtagtagcaattgatgctatcgcaacacttattgatttcaaaaacttgtgggaaactcatcagtactctagagttcctgtatttgaggagcgcatagataatattgttggaattgcttatgcaatggacatgcttgaatatgttgaagaggttgagaaattgaatgcaatcactgtgaaggaaatcgcacatatgcctacatactttgttccagattcaatgtctgtttggaacctattaagagagttccggatcaggcaggttcatatggcagtggtcctcaatgaatatggtggaactattggtatttaacattagaagacgtagtggaagaaatagttggtgaaatcttcgatgagaatgattccaaggaggaaatccagaagaaaacaggctatatagtaaggcggggggatggaacatttgatgttgatgcaaacacatcgatagatcacctatctgaagagcttggtatcaaaataccagagggacatcagtatgagacggtgtctggttttgtctgtgcatcttttggctatattccagaagaaggtgggaaaatgcttgtgattcttgaaaagaatttcagagaagaaaacggtgaatatcaggaggaaggtcctgatcgccaagatgatagagaaaaaactcaagcttatgaactcgagatagtggaagctaatgcaaggaaggtgggcaaagttctattcaagccaataagcagtgaatgtgttgatgtcgacaacaagggtgtgaaccgcctcatttccaagaagatcatcaagcggaagaagaaaggctctgatgattcctccaatgatgacgagtgtccagacgtaacagagaatggttgccctgcagagttactctcatactcggatgataacagtgccttgttggaagatgcaagcagttctagtgccaaaagatgacaagaaaggaactgcaagaccatcgtactactggtaataattacagcacaccgtcacccctcctaataccccttgttacaacagaagaagagaacatagtagtaggctaccaaaaaaaaaactgcgagagcaacaccaagtggttaacagaagtttatagggcattggaacatttttttagtagcagtagcagtctagaggtgcagcgaggtgtcgacgtcgacttcaccagagacatgtttgtagttgtaagtcttactgggccacagctccaccgtgatggggtcgttatcgccgtggagctggaagcttttgcattcacaggccgggaataaggaggcggcagcggtgtcccgcagtggcctgcacgggtagagcagctccggatggaagaaccacttcacgggcatctccctcggggaggtggtggccacagggcgcggggcgagcacgtggagtagcctctcctcccgcttctccctgatcctctccagctccctgaacctctgctgcagcagggcgatggaggagaacatcatctggccctcgctgctctgtacccccatgatgaacaaaaactcctcgttttcagttgatgtgtgtgtgtgtgtgtatctcagccagcgtctgtctacttcgctcgctcgctgtgtggggttttgctgcttgaggtggtggtggtcttgggcatgcgcctacttataagctgcaaagttttgtcacggcgcagggcgtcgtcttgtggtcgtcttgcaa

SEQ ID NO: 15225 - DNA, 100 bp, Zea Mays
tttttaaggatccactcatagtaagcttttccgcaaatagagtctttgaatcttgataagctttaccttgattcccaaaagccagcatatccttgagagt

SEQ ID NO: 15226 - DNA, 1989 bp, Zea Mays
atagactctcttggagttgcttgaagggtggagacacaagatggtggagatgcaaaagtagaagtctcccctcgtgacatagtttacatggaaaatgctgagcctataaatggtgaacacccagagattctgcataaacttgaccttcgctatgctggcacctcttggtgtgatgaatctcttgctttagtgtatgaatcttggtttaaaactcggaaaatcagaacatgggtgctctctcctgataaaaaagatgtcagcccacgcgttttattcgaccggtcttcagaagatgtatactctgaccctggctcaccaatgatgcgaagaactgtgatgggaacatatgtcatcgcaaagatcaagaaagaagacggaaatatttatgtcttgttgaatgggatgggtgccacaccagaaggaaatattccattcctcgatttgtttgatataaatactgggagtaaagagcgtatatgggagagcgacagggaaaagtactatgaaactgttgttgcactgatgtcagacaaaactgacggggaactgctccttgatcagttaaagatacttacgtcgaaagaatcaaaaacagaaaacacacaatattacttgcagacttggccagaaaagaatcaagttaagataacaaatttcccccacccatatcctcagcttgcttcattgtataaggaaatgataagataccagcgaaaggatggagttcaacttacagcaaacttatacctgcccccagggtatgattcatcaaaagatggacctttgccatgtctagtttggtcctaccctggtgaatttaaaagcaaagatgctgctggtcaagttcgtggttcccctaatgaatttccagggattggtgctacatctcctcttctttggttagctagagggtttgtgattctgtctggtccgacaatcccaattatcggtgaaggcgatgaagaggccaatgacagatatgtggaacaactagtaacgagtgcagaggctgcagttgaggaagttgtcaaaagaggggtggctcaccctgataaaattgctgtcggtggtcattcatatggtgcattcatgacagctaatctgctggctcacgctcctcatcttttctgctgtggaatcgctcgctctggagcttacaacaggactctaactccatttggttttcagaacgaggatagaacactctgggaggcaacaaacacatatgtcgagatgagccctttcatgtctgcaaacaaaatcaagaaaccaattttacttatccatggagagcaggacaacaattctgggacattgacaatgcagtcagaccgattcttcaatgccttgaaaggtcatggtgcactgtctcgtttggtaatacttccttttgagagccatgggtactctgccagggagagtatcatgcacgtcctctgggagaccgataggtggttgcagaactactgtgtaaatggtactagcaaggttgactcagtgtcagaggctgacagtaaaaacaaaacattgtcagctagtggtggcagtgcagcccgtgaaggtctaaaccctgaggaactctcatcattaccaagatcgcttctgtggtgatcatgttactggcatgcaggagccccctacccccccccccccccccacccccaccccacaaatataagaaaggcctagtctctggtggccactgcactcagatatatttgggtcaatttgtattctattggtaatggccaatggaagtcattcttgcgattaatatcatgtacagaaatatagccttttgcagttttgatcccaactcttgcacttggcagcgaactgatacgttggttttctttgacagcaatctaaaataaaataataactaatgagattatcatatgctccaatgtctcgcatcgtcacattttacctgttaccattatttactgcagctgttgtactgacattcgttgcccatttgagaggcgc

SEQ ID NO: 15227 - DNA, 515 bp, Zea Mays
ctaaaaccctaaaccgcacaaaaccgcctacgccattccgctgtccgcaatccactccctcctcccacgaaactcttggccatggcttggcgcggcgccgcctcccgctcaatcttcgccgccgtccgtgcccgcgccgcatcctcctcctcctcctcagcggccacgcgcctccgctcggcggctccaattgccgccaccccgcgccgcaccgtccccgcctttgctttcgcggccgcgaggccgttggcggcgatggcggggtaccccgcggcggtcgcggtgaggctcaccgggcactcggcgacgagcgtgcgggcgtgctgtgagctctcccagggcacttgaatgcacacttttgtcttccaatgcaagggtaggatctctcgtcgggcttgcggcctttttcctgcattttgcagagtgcctcgtgtgtcggcaaacggacagtacacttgctgcaactaaaatataaacaagcctatgttagcctgctacgcactgtgtccggtgca

SEQ ID NO: 15228 - DNA, 677 bp, Zea Mays
tatgcatcaggctttttgagcataccatctatttttttagggcaccacaaggcaaaagaagctcaggtgagaatgttgtgatggttgatccactggaagctaagcgcctagctgctaaacaaatgcaagaaattagggccaaagaaaagctgaagaggcgccgtcaagcagaagcgatcaacggggcattggcagtgataggactcacggctggattgctagtggaggctcagacaggaaaggacatcttagggcagctagctggatatctgacggctatttctagtttatttgggcaataacactggaccatggttggagatttatttttcacgttccacggccaggagaggtcttatctgaatcttatttgatggatccacccaatttttttgggagctgatcccagatggatgtggaatagcgcacccagacttgtatgttgatcaagcacgatagcatgggctgaacattagtatttctatgtagcacatcaatttctgacgatagcgcctgctaaagagcagttctattcatactcaaatgtgaaatgttgaagtcttcgagaaatcttttccttcttctgcccaaaccattaagctgatggcacattggcacctgcagtggattgatgagtctcgctagcgtgtgacttcatcttgccatgaaaatgtgag

SEQ ID NO: 15229 - DNA, 865 bp, Zea Mays
ctggagctgtaatgcattttgtttaattgactatatgattggaaatgggcagcatcccgaagtttttcatttggtacaaaattttaatttggaggacaagtatcctccattttctcttctgaagggatacattcagaaggccaagcagacttttgtggagatgtttaaaaagagtcaaacacacgagtccttgaactgggctataccaaaggaactatggattgcacattatctagctgagcagaaactcactgattctaagcaacgcagtgctatcatggcagaaattaaatatttgatgagtggatatgaaaagaaacaaaggtcagaaaatctctcaacatgggcttcacagcatccgccaacggaatctaaaaggaggaacaggaagcgcaaggaggaggagcaggagcaccatgaagcacaatacaaccagcagcagcaggaacagaatgaaaacaagttaattcaaggaaagcggcatcagctgcatcaagaaaatatggcgcaagtgacacagcagcagcagcagcatatgcaaccgacaacaaggccagctactcttaagcttccgacgcctgctattcctctggttctgaatgcagctcagatccaaaactttgcgcgtccagcttacgccgctgtgcctggagttcacaattaccctgcccagccaggttggtctgcagctcaaggaagtccattcgtaccacagttcatgtcaccgcagtatatgggcctgccatttaatccctttggccttcatcctacttgctatcccagacgcagatagcgtagagagttctggcgttccgcgtccatttgctgagtgaaactgtggtgaagcgtacaagttatatgaaac

SEQ ID NO: 15230 - DNA, 2200 bp, Zea Mays
tttgcccttttgccttggtactaaccgaaggaaggtatccaatgatccagaacttcaccagaaggtggcaggtgtattggttgagtcaaatggtgtcaacaatgacttacaagagctgtctcctgatagaaaatttccacaagatgattttgcaccctactcaaatcacagccatgattggaatcctgctgtatcatgtggaacaaatataattttcctgtatttctactttcagaagagagtacaaacactcttcaaaagatttcagaaaaaaatgagaagactggcaatggatataaagcaaatgttgcagaattcgaccttgttatgcagacaaccaaagctcaaacacatgattcagcatcctgcctcaaagaacaatcatgcttgcccttaggtggacacagtgtatggacttcattaccgccacttaataacggatctacagagcatccgaaacctttaatattggctattgcgtctcaagactctgcatcattttttcgggaccgtagtcttggttcagattctcccatatctggattgattgctttgctcactgctgttgatgctctttctcacattcatggtctaagcaagcttaagaaacagcttgtgttcgctgtttttaatggtgaggcctggggttatcttggtagtcggaaattcttacaggaattagatgaaggcgctgcttctgtgaatggaattagtagcttaaagattgaccaggtactggagattggttctgttggcaaggctatacttgaggaatatccatcattttatgtgcatgctgaagggaatccatcagcttcaaaggaaatattagatgcactgcaaagtgccagcaagtctcttggttctgataatgttaaagtaaaacaagcagcttcatcaaatcctggtgttccaccatcttcattaatgtcattcataaggaagaacatgtcaacttctggagttgtgttggaggattttgattcccacttctccaatagattttatcatagctatctggataactctgtaaacatcaattcctcgtcaatagctgcagccgccgctttggttgcgaggtcgatgtatattcttgctagtgatgactcagttgttgaccttataacactaaacactataaaagtgaacgtttcattggtcgaagaacttattggatgcctgcttacttgcaatcctggtctttcgtgcggccttgtgaaaagattcatttctccaagcaatccctgcccaagtcattatgttggtgtttttctggatgacccatctggcacgcagcttccttcatatgcagatgacacgtctcggtttgtatggaactttttggcagacagaactaattcagcaggcaataaaagctcatgtactggaaagtgtggtgatgaaggtgaagtatgtgtaggggcagaggtggagggtggaggtagatgtgttgtatctacaaccaggtatgttcctgcttattcaactcgggtgaagtttgaggacaatgcatggcacgttcttccagcgaactcgtcagatccaatgggtgctgcagatcccgtgtggactgaaagcttctggaacactattggcctcagggtctacgccgtgcaagatccagcttacgattggcttattcttcttgccgggctcggaatcactgctgcatcttattgcgctgtacactttggcagagcatacatttcaaaggtggcgaagcttgactgaagcgtcagtgagctgccccactgataatgggtatctagagctggaaatagaactaattaggctggcaattcgtagaacattagcagcgcatgagacagggtgattaagctgcgagaaagccgcaataaattatgagaaccaagcacacccgaagcaagtcctccatcattatgcggacgtccaggtcgatgtaatattaatgaaattgtgaccgtgttacgttttgtgttgaactggtactggtaggtaggttatgacacgcctctagctctagttggtggatgtttccggtaacgtgtttttctgtttgtggatcctgcctactcagttttggttgcgtataagcctgcccctcatgaatcctatgagtttgtgaacaccaactattatactggtgacttgcattcgcatgatgattggatcttgtatcgtgtttggtttcgccgctccagttgccactgtttgggct

SEQ ID NO: 15231 - DNA, 1014 bp, Zea Mays
aagacctcaggctggaccggtggacttcgctggcaggcctctggttcttggacgctcggacaagagagcagttttgatgcatgccactattgaagaaatcgaagcggagaaatccctcatcgaagaccaagctaaagaaaagatggagaaggcaatcgaaacagtccaagctaacttcaacactgtgaggacaggacgtgcaaacccggccatgcttgaccggattgaggttgagtactacggaactccagtaaacttgaagagcattgcacagataagcactccagatgcaacttctcttcttattcaaccatatgataagtcaagcctcaagcttattgagaaaactatagttgctgcaaatcttggtgtgacaccaagcaatgatggagaagtaatacgagtgactgtcccaccattgacatctgatcgcagaaaggttgctataaggaacataagaagagatgcaatcaaagcttatgataaactagagaaggaaaagaagctttctgaggacaatgtgaaagatttatcagctgatctacaaaaagtcacagatgagtacatgaaaaagatcgaatccatccagaagcagaaggaacaggaactgatgaaaatttagacctcaagctgactgtatggctggtgaggagtaaccgcctccgtgaagcatggacccctgcatatgttggtgtttctgaagcaatttgtttggttcatggctttggcgtctcggcgctgcgccagggatgcacgttttgaatcaggcgctttgctggaacttttgggtgcacacaagttgagactgctgctgctgctgtgtgtgtgttttgagattaagacaatgctgctgtgttttttctttgagattaagacaatgctgttgcgtgtgttcttctcgttttctgtaatgttcgtaaatagtctcttcgtcgccgtgttgtctgactgctacattgtcaatatttcaaaacatacgtctctgaatcaaatgtctggattggttctgcctac

SEQ ID NO: 15232 - DNA, 966 bp, Zea Mays
ttcagtgttgggccctgggtcgttgctcgactcatccgatggtatgcagaaccagatcatgtgccatgcttgccggacccttctgctctacccgcgtggcgcgtccagcgtctgctgcgcggtttgccaggccatcaccaccgtgccgccaccaggattggagatggctcagcttatatgtggtggctgtcgaactttgctgatgtatactcgcagtgcagacaccgtaaggtgttcatgttgcaacacagtgaaccttgttagaccagtgaataatatagctcatgtgaactgcggccagtgccggacaactttgatgtatccatacggcgcaccttcagtaaaatgtgccgtgtgcaattatgtcacagctactggagtaaatactgtggcacccaccccatctgcgaggccaacatcagatgggtcttcatatagtggctcatctacttctgctcctaaatctcaatctcagaatgtaactgttgttgttgagaaccctatgacagttgatgacaagggaaaacttgtcagcagcgttgtagttggagtcacagctgggaaagagtgattttattgacacttcgtacatcattgttgtgttttctatacacgaagttggaaaataccatgtagcatccaatgatgggttgcttggacttccttgaagaacagagatacaccacgaaatatttgtaggaccttcctaatgaaaccatggtcggacgttgtgtattgattcttttgtgtgtataatatgagctccgttagacttgtgtaatcagatatttgggggaaatacagcatagtttcgctgtacgtgcattgttacacaatttgtttgtttgttagtttgtgctgtcttggttgttcatagctcgttactgctttacttgtataccgtattcatgtgaaacgagtaagctgcaatttttgttaacgacttactaggagatgtgatgcgac

SEQ ID NO: 15233 - DNA, 261 bp, Zea Mays
attgtctcaaaatgaactaaacgcattggctattatgtctggagtagtgtgtttgtatgtaatatacatgtagaatctacttagttccagctgcagtgtgtgagatgctgctaccttggattctgtgcaacactgcaccggattttaaaaaatctcaggaaaccaaacgcagccttcacaaggtaataagtagaaatgtactagtactagatcagatcatgtttgcacccaacaccggatttcagtgagaaatcatctgga

SEQ ID NO: 15234 - DNA, 1872 bp, Zea Mays
gtaaaatgttgatccccaaggagataagcgggctagtggtgatccatacttgcagcattgtgtggagactgcggttcatctggccaatattggtgcaaacgcaaccgttgtgtctgctggccttctccatgacacaattgatgattcgttcatggactatgatcatatcttcaggatgtttggtgctggtgtggccgatcttgttgaaggggtttcgaagttaagccatttgagcaaacttgctcgggacaacaatactgcaagtaggactgttgaagctgatcgcctgcatacaatgtttcttgcaatggctgatgcacgagctgttcttataaagttagcagatcgtctgcacaacatgaatacgatagaagctttgcctttggttaaacaacaaaggtttgctaaagagactatggaaatatttgtgccattggccaaccgattaggaattgctagctggaaagaccacttggagaatatttgcttcaaacacttgaacccagaggagcacaaggagctttcctctaaacttctgatgtcttttgatgaagcacttcttacatctacgcttcataacttggataaaagccttagagatgaaggcatttcatatcacagtctttctggaaggcacaagagtttgtacagtatatactccaagatgataaagaagaacttaacaatggacgatgtccatgacatccatggtctacggcttgtggttgaaacagaggaagattgttatcgagcacttgacatagtgcacaagctgtggccccgagttaccggaagatttaaagactatatttgtcatccgaagttgaatgggtatcggtcgctgcacactgtcatcatgtgtgagggtgtccatccatttgaaatccagatccgaacaaaggaaatgcacctacaggctgaatatggattcgcagcgcactggaggtacaaagaaggtggctgcaggcattcctttgtgctccaaatggtggaatgggcgaggtgggtgctcacatggcaatgcgagacattgagcaaagagcgtccctcgtctttgagcagttctgttggcataaggccaccatgcccttttcccctgcattcggaagattgctcctactcttacagccgacagtgcaactatgaaggccctatatttgtcatcatgcttgaacatgacaagatgtctgtccaagagctcccagccaactcgactgtagttgatctaatggagcgagtcggggccaacagtccgagatggagcccttgcagcttcccactgaaagaggagctgcgaccgagggttaaccacaagcccataagcgacccaaataggaagctcagcatgggcgacgtggtggagctgacgcctgcgctccctgacaagtcgctgtccgagtaccgggaggagatccagcgcatgtatgagcggggagggtttgcgctcgccaccacccctagaagctgacaccatcgtcgccatgttaacctgctgctgtacaatacacctgtaaatacgaactaatccttgcagcagagaaatcccagatgaacaaaccccccaactgaattggctaatggtgcggggtttgatccaggacgctgctgtgtgtaacgctttttacaagttgaaatgtggccaagttcctccgaagattcatgagaaacatgaagtacttgtgtccttgtacgcttttggtttggtttcaatgtttcatttggactggatcaagtccgacctcttccgcgctctaatcaggacgcgacaactgtgttgattgtggcttctcttccacaccatgtaaataagcaggaaaatatgaaccaacgttatcgtaccttctcgtccacatatatctaactaaatactcc

SEQ ID NO: 15235 - DNA, 1386 bp, Zea Mays
ggaggtgttcgattgaccacttccattagtttagtgaaacggatgatgcggtttttactttgaccgattcagaacctctaacagctttaggcaagaaggaaggttccacaaaaccagaagaaagttgtgatcttttccatggcgagtgggttcccaattcatcaggaccagcttatactaatgcaagctgccgcttcattgagtctcctcagaactgtatgacaaatggaagacctgacacagattatctcaattggagatggaagccatatggttgtgaggtatcaccatttgacggcaagaagtttttggatggcatgaaaggcaagcattgggcactcattggtgattccatccttcgcaaccacgtccagtcattgctttgtcttctttccaaggtcgaagatgctactgaggtttaccacgacgatacattcagatccagaagatggcacttcccttcgtacaattttacgatctcccttgtctgggcaccattcctggtcaaagctaaaatatttgaggacgacgatggagtttctactgctgatctccagctgcaccttgacgttctcgagacagactggactagtcaatgggagaagttcgattacgcggtgatatccacgggccaatggttcttcaagactgcagtgtactgggagaatggagctgcgattggctgccactcctgccagaacaaaaccctggaagagaggcctccggagtactccttccgcagggcactcagggtggccttccagttcatcacatcctcacctcacaagccagtagtcttctacagaacgtgggctccctcgcattttgagaacggcgagtggttcagcggcgggacttgcaacaggacggccccattcaagccaggggaggccggtgacagagaatgggacaatagtatgtggaggattgagagagaagagtttcacaacgcggtgcctatcggtggtgaccgtctgaaactgctcgatacatttgagctctctctcctcaggcctgatggtcatccagggccttatagagcataccatccttacgagaagggcgtgacagccaaagtccagaatgactgcctccactggtgcttgcctgggcctattgatgcgtggaacgatgtaattatgaagatggtggcaaaggactgaagcattatcaggtggtagtgtggtaccctaggcatggcatctgatctgaacaccagtattgtctcaagtctcattttcatacatatgtatgtttctgggcattgcatggcgtctcctctatctggtgtcaagaaactcaagtagattcggacttctcttcatggtgggtatgatttttttttatgttaacaaaattcaattaaatcttggaaaaatcataaaa

SEQ ID NO: 15236 - DNA, 1277 bp, Zea Mays
cgccatgtttatgtggtgcgccacgcgttgttggtgctcaacgcgggtctacggaagttcttcggaacctcgaaaacaggatgcctgtacattctctccttcggttagcagcaaagattcactgcataaggtggtcacgcttacaccagttcaaccacagaaacctgtagactccagaggcagtcactgtaatgcaggatctgattctggagaggccccatttgatatatgcatgagtggtaacaagtgcgctgtaaagttaaaaccatccatattcgagaccaacagagaaagaaagcagcgagacagagaatgttccaaggatgtacgtccattgcagttgagacctgggatggttctgttgaaaagattcataaagcctaatgatcaggttaaaattgtcaaactttgttcgcaacttggtgttggtcctgggggattttatagacctggctaccgaaatggtgctttgctaaaactgtggatgatgtgcttagggaagaactgggatccagattcatcctcgtatggagatagacgtctgtttgatggtgctcaaccaccgaccataccagaagaatttcagaagttcgttcaagatggcatccaagcttcccatgaattcttgaaacaacaaaaaggagctaccaatgttgtgcaagaaatccctgcaatgtctccggatatctgcattgttaatttctacaatagtagtgggaggttgggtcttcatcaggacaaagatgaatcacagagcagccttgacaagggattgcctgtcgtttccttttcgataggcgagactgcagaattcatgtttggcgatgttagagacgaagagaagatttcaaaggttgatcttgaatccggcgacgtcctaatatttggtggcgagtcaaggcttatattccacggggttaacaacaccaaacctaaaacggcaccaaagtggcttacggacgagacaagtcttcgacctgggcgtctgaatctcacattcaggcagtactaggcaggtttcccccaccttgagcatttgcattggaacagcaaagaacttgctcatgatattctagtactagggtcagttgggttagttaccagtagagatcacctgtcatttcttatatatattccctcatgggctactcacaaggagatctatctagtcactgaaaaccaccacttaatccattgctactcgcttaaatgtttgtttccatgttcaactttttcattttgccttcatcatgcatgcgagtatacgcggaggggga

SEQ ID NO: 15237 - DNA, 1689 bp, Zea Mays
cgccgagaaaactcaaatcgaatccccaaatccttcgccggcgattccactccaagtctcgatcggaaaagcgcagaagagcaacggaatcccaattcccaaagggacaagatttcgggtgataaatccgacgaacagacagcacgcgacgatggaatcatcaagaatggaagggaaatcctatttcaggcttttaactgggaatccaataagcacaactggtggagtattttggaggaaaaagtaaccgatcttgcggaatctgggtttacgtcagtgtggcttcctcctccaacacagtcattatctcgagaaggctatctaccacagaatctgtactgccttgactcatgttatggttccctccatgagctaaaattgttgcttcataaaatgagcgaacataatgtaagggctatggcagatgttgttatcaaccatcgaattggaactactcaaggatccaatggcatgtataatcgttatgatggcatcccagtatcatgggatgaacatgctgttacatcttgttctggcgggaagggaaacaagagcactggggataactttgatggggttcccaatatagatcatacacaaccatttgtacgcaaagatattatcgaatggttgatctggcttcgaaaatcagttggttttcaagattttcgctttgatttcacgaaaggttatgcagccaagtttgtaaaagaatacattgaggaatcaaaacctctttttgcagttggggaatactgggatagctgtgaatatagcccccctgactaccgactgaactataatcaagacgttttggtttctttttgtctgccagatatccataggcagaggattattaattggatagataacactggaggactttgtgccgcatttgatttcacgacaaagggcattcttcaggaagctgtcaaaggagagttgtggcgtttgcgagattcagaaggaaaaccacctggtgtgatgggatggtggccttcaagatcagttacatttattgaaaatcatgacactgggtccactcagggtcattggccttttccgtcagatcatattatggagggatatgcttatatactcacccaccctggcatccccacggtgttctatgatcacttctatgaccagggtgtgcctctccatgacgaaattgctaaactgatgcaaatcagaaaatgccaagatatacatagccgttcatcaatcaaaattctggaggttgggtcagatctgtactcagcaatcatcgacgataagttgtgcatgaagatcggggacggctcgtggtgcccaagtgatccagagtggaggctggcagtctctggtgacagatatgctgtgtggcacaagtgaagcatataagtgccctcgatacagtttatttctgctctcaggaacaggagtaattagcatgttagctgaataacagcacggtaaaacatgccaaaaatgaccctcttcgaggttttacctgtacaagaggagtgcctaaatgcaatgcttaattagaaatacgtgagatcgtgcggctggtcccgaggtgagacatacattttgctaatcgcaacaactatggattacctgcaaaagaaatatatatagggcatgtgatgtctctgtggaatattttatcctggaaccagaaatttgaattatttttataaaaaa

SEQ ID NO: 15238 - DNA, 2116 bp, Zea Mays
aagtgctgaaaagcacatggaagccaatggagatgtgaagggacttatcgatgagttccgcattcctgagagggaagaccgaaaggcgctagagtttgttccatcatggcggtttgccaacggaatgtttgcaattgtgttgtcgtttggccttttactcactgccctgaggagcaggaaggcacggtcatggcgctatggagcaggttggctgcgtggcttcatcgctgactatggtgttccactgatggtgctagtttggactggagtgtcttacataccatatggaaatgtaccaaaagcaattccgcgacgccttttcagtcctaatccatggtcccctggtgcatacgataactggacagtcatcaaggatatgacacaagttccactcctctacatcattggtgccttcataccagcaacaatgattgctgttctctactacttcgatcatagcgttgcatctcagcttgctcagcagaaagagttcaatttgaggaaacctccatccttccactatgatttgcttctcttaggcttcctgacgttaatgtgtggccttattggtatccctccatcaaatggtgtcattccacaatcacccatgcacacgaagagtttggctactctcaagcatcagctgcttcgtaaccggctagtagccactgcacgaaagagcatgagccagaatgcgagcttgagccaactgtatggcagcatgcaggatgcttatcagcagatgcagacaccactggtttatcagcaacagtctgtcagaagaggcttaaatgagctcaaggactcaacagtccagctagcttcgagtatgggtaacattgatgcaccagttgatgagacagtctttgacatagagaaagaaattgatgatctgcttcccattgaggtcaaggagcagcgcttgagcaacttgctacaggcttccatggtgggtggttgtgtcgctgctatgccactactcaagaagatccctacatctgtcctctggggctattttgccttcatggccattgagagcttgcctggtaaccagttttgggaaaggatcttgctgctcttcactgctcccagcagaagatacaaggtgcttgaagagtaccacaccacgttcgtcgagacagtgccattcaagacgatagccatgttcacaatgttccagacagcgtacctgttggtctgctttggaatcacatggattccaatagctggagttcttttccccctcatgatcatgctcctggttccagtcaggcagtacatcctccccaagctcttcaaaggtgcgcatctaactgacctagatgcagctgaatatgaggaatcgccggctataccattcagccttgctgcgcaagacatcgatgttgcattcggaaacacccagagtgcagaaatcctagacaacatggtcacaagaagccggggtgagatcaaacgcatcaacagcccgaagatcaccagctcaggtggcacgcctgtggcagaactgaaaggcatccgcagcccatccatttctgaaaaagcatacagccctcgtgtcattgagctctggcatgagcgcagccctaggacgccgtccatgctgggtgaaggctcaacaccaaagtgaatgaaagcaacgatacattgcttaagctattcaaccactggtcatcagttatatgagtggttttaaagtggtttcagtgttagtatccttatatgaagatgtcctctgatgagattactacttatgtgtatctccagtctctcttttttttgttctcctgattaaaggagtgatatacctgtaatctctgaactagcagaatattagagtggctacttgaaaaatcatgtcactagcatattatcattctttaattgtctataatcattgatactatattactatgtacatgaaattggtggaaattatgcacatgcatttccattgaacccaagcatgtatctggattctggaatactcaaatgctcacaatattccattgacggcggtggtgaagcatggaactttatagaccctgcttcccttctgaatttgcacacattttgcatttttgctagttgtaacaagttctcttgcttcttttta

SEQ ID NO: 15239 - DNA, 648 bp, Zea Mays
ccggcatgcagggatggtggttgcacccgattcggccacaccaccgggtacttgaacccgcgtccctcgcctctcgccataccttgcaaccttccttgagttctcctatgcttcgtgtgtgtttcaccggtgtgaggggagagattggtgagcgatccgccgccataaaggctctgattcaccgtcgttgcggcgtccggtttgggccggagatcttcgtccggttccaggggcctattccatggcgtcgcgagggtgcatgtgacgatagggatgctgggattgctcgtcggtgtcaagaaccctcgcggagccgccaaaccccgtcgtcggccctcagcaccgatctatcaccggtatagtacccctaacctaactccacgtgatatcctcttcgtgcagcaactcttgggttgaagtttgggcggttgtgtatggtagtggtagcacctggctatggcgccgccgtgtggtgcgcacacaccgccgttctgggttgccagaggtgggtgatgggtcagctgctgtagatttgggttggacgactgggattgaaccgtgggtataccccccttcggcactttaaatcttggctgtaagtcgtccatccgagggctgggagtgggcactggcatggttggatctcgg

SEQ ID NO: 15240 - DNA, 865 bp, Zea Mays
taaattatttagtttgaagcatggagggaaaatcctttttggaggatctgccattgaatcagaaggaaactttgtgcaaccaacaattgtggaaattacaccttctgcaccagttgtgaaagaagaactctttggtcctgtcctttatgttatgaaatttcagtccttgaaggaagcaattgaaatcaataactctgttcctcaaggattgagcagttctatatttacaaagaggccagatattatttttaagtggctcgggccccatggtagtgattgtggtatagtgaatgtgaacatacctactaatggtgctgaaattggtggagcatttggtggagaaaaagcaactggtggtggacgagaagcagggagtgattcctggaagcagtacatgaggagggcgacttgtacaatcaactatgggagcgagctacctctagcccagggaatcaattttggttaatcctgcagaaatgttgcgcgtggatctcagtgttttctgcagacgtggatgccgtatggaaagaactgatgcaaccgcatttgagatctcagcagacttgagcagcatttattggcgtcagttgtgaaacttaaactgcaggagcatcttgtacataaataaaataagatgtttgttgctcgtgggccgtggcacgttttggtaccggtgtccagtctactaataaaatctaatgcaaaacggtcataactacattctcatgcagtatgattttccggccttttgatctggaattgaaatgagcgttgttcgttttgaacaagcacatgaagaaaaaactgctaagggttaatttggcaaccttattttttcaagggattttaattttttcaagagaaa

SEQ ID NO: 15241 - DNA, 4146 bp, Zea Mays
ctccatgctatttcgaaaaaatttggtggtgcagtttcactaaaagaagctgcagttcctgccccacggttcttcaggcctcacattgaaataaagcgcgatcgtcagactggcgaagtttttgaagtacttgatggtttgatgttcaaggatggatttctgtataaaaaggttgcacttagttctttgatttattgggggatacaaccgacagaaacagagcttttgaaattctcttctagtccaagcaatagagcttctgctgatgacctggattggctctccggcatgtatggttctaagaaaaggaaccttccagcagaacgagatatgaagtcatcatcttctaaaataaaatcctccaaagcaccagaccttaaagggtcaacttctactgaaaattatgacgacaatgatgaattcaaccttcatgatcttgtactctatgggcgaaaagattttggtgtgatcattgctgttgagaaagatggttttaggatactaaagggtggtcccgaaggatctgcggtgacagtgaggaagcaggatattaagaaaggctgtgtagacaaaatgtttacagctgttgatcatcataaaaagacgatatccattaatgacactgttaatgttgtggaagggccatttcagggtaagcaagggctcgttaaacacttgtacttgggaatactgtttatttttaatgaaagtgaaagtgagaactgtgggtttttctgtgctcaaagtgggtcatgcgaaaagatacggaagggtctgggaagctctactactgaaaattcggactttccaactcccatgttttctgaacctgcttatgagcaaaatgagcataggaacactgaagggccttacaggagcaccagagaacaacttttctctattgggcagatgctgcgcattagaaagggtcctttgaagggctacctctgtcgagtagttaggatatttcggaatgatgtgactgttaagctagactctctactgaaaattgttacagtacaagctgatcttctttcagtcccagctaataggggggataacttgtctggtgctccagctagtaaatttggaagtcaagatacacccttcttcgggtcagaagcaggcaaaacttcatgggacagggggttgccatcatttggcagtgactcatggcaacccttttcaagttccacgctaccagtccagaatgcaggtgcagaatcagaagctgatccatggtgtaagaaaacttctgctgaagatgattctgatccatggggtaagaaaacagacggtgattctgatccgtggggtaaggaagcggtatctgctgctgacggtgattgcaatccatggggtaaggaaacagtaccttctgctgctggtgattctgatccatggggtaagaaagtgttttctgctgatggtgattctgatccatggggtaagaaagcaatatcatcagctgttgaagtttggaacactagtgccacacaaaaggaaggttctagtggcaatgcatgggacaaacaagctggagttggtggatctgatgctgctggcagctcctgggacagagcggttgtcaataaggagagtgaaaagagtgacaactggggagaggcttgcagggttatggacatgggaactggagctgacacagacccttggggaagcaaggtcaaagcagtagatatggaaggaccaaatagctgggaaaaggctacaatgcctccagacaataagctggaggatgtcagccaaggatggaaccaacataagggcaactcaactgaagaccaagcaaaagacaatgtttctaaagatgaggacaacaatagggcttggagcagttctttgcctgtcactgaagatggtacctggggcaaatcaaaagacgacaactgtgatggagcaggtggtgcaggaggttgggatgcttctgttgccaactggaacaaatcatccgttctggctgatgcacaggatgagggttggggaaaaggaaattggtcatctgctaagtctgaagaaacaaacaatgaaattggaaattggaacaaagctggagcttcggaccaagctggaccgaaatcttttggtggtgatggttggaacaagggtggtgatcagaatagcagttggaacagtcctggaaattttggaggtgggcgtggctttgggcgaggacgagggagagttaggggtcgggaatctggagatttcaatggcagaaatgatcaaggaaattggaagaattcatggggtggtgacaatgctgaaaaatcttcttggaggtctgataatcaggtagacaatgaagctggagattctggtggatataggggacggggaagaggaggaagggggcaatatggaggacgaggaagagggagagacaatggttggagaaatggtgatggaccaaaatggggtggtggagataattggaacgctacaaatccaccaagtaatcagccttggagtagcagtggaggcaccaagtcatatggtcaaaatcagccttccacttggaataatccagaggataacaaaccatctgtaggtgaacaaggtgatccttgggcaagcaaggtgtcttctactgaaggtaaaggacaacagaatgattcttggtcaagtaagatgacttctcgtggtgctgaggataccagcggtggctgggacagcaaggagaagggctcttcctgcaatggtgggggtgaaggactacaaaatgatccatgggcaaacaagattggttctaacgaagaacaagaagctgatccttgggccagcaagatgtcttctgctgtgggtgctgatgacaagaatggtacctgggacacgacaacaaagggcactctatctaacgaaaaggctgacgacccttggaatagtaagcggggtaatgatgatgacagcaagaaaactgacgcctggggtgctggctcgtcaggtgggaatcaggaatcttcttggagtaaacctattttctctctgggggatcaggaacctacttggaacaacccaaggtttggtgacgatgacaatgtaaataatagaggtgggtttggacgcggaaatcaaggcagagggagaggaaggagttttggtggtggtggtggtggatcatcatggaatgaaagcaacaaaaacggtgaatcaggtgggggaaggtctggagaaccatggaacagaaggggttttgatggcggcagaggaagaggccgctttgggcgaggtgaccgcaatcaaggcaacaacttggggtcaggagatggtggcagctggggctctggcaggggaaatggtggtggccgtggtggttacaggaactggaacgataacaacgaaagaaggcccttcggtcaaggtggtggctggtctcagtcttccgactggaatgccaacaaaggaagtggcgaaggaaatcaagctttctcgaagagcaagcccagctgggacgcgcagaacgcctctggtggagatgaccaggcaggaaagaagagtgacacagacaactcctggagccagaaccgatcatctccatctatcctgggtcagccaagcggtgatgctaataacaagtctagcgcttgggacggcgctcccaacggaggagctggcaggggaggttcaggttcttggggaaagagcgacgaggatggctggaactcgtcgtcgggaggatcagccagagagaagccttcgtggggtggtggggcagaagctcctcccaggaaggaggacgacggcgcatggggcaaaggcggcgaggggagccggagcctaggaggaggaggagagggtggtagcagcagttcctgggataaaccggcagatggtgcatggagcggcaacaacaagggtggcagtggcagtggtgggtggtaactggtaagcttgcgacttattggcgctgactgcatgtaaatattgtgcccgcgctgtgtgaactgttctggtgcgtgtctagttcgtatcagttacttggccatgcgtactctaaactaaaataaaacatggcttgtgactgtgactagttaaatgtagcctgttgctgacagtaattaggtgccttaactttcagaaactcatttgttagcatcctcgattcctagacctacgaattaaaaaaaa

SEQ ID NO: 15242 - DNA, 894 bp, Zea Mays
tttggcctctgcacaatataagctattaagctgttgcccccccctcccgaattaagattattgagggcatgtagatgggtggttgaaaatcaggttggcaagaagacccttgctattgatgattgtgattccagacaatctgtctatgtgtatggatgcaaagattctgtccttcaagtaaacggcaaggttaacaatatcactgttgacaaatgcactaaatttggaatcgttttcaaggatgttgtagcagcttttgaggttgtcaactgcaatggcgttgaggtccaatgtcagggtacgtcaccgacaatatcaattgacaacacatctggatgtcaattatacttaagcaaagattcgctgggagcttcaattacttctgctaaatctagtgaaatcaatgtgatggttccaagtggcggctctgacggtgattgggtggagcatgcattgcctcagcagtacatccatagtttcaaggatgggcaattcaccacttcaccagtttcacactcgggggcgtaaatacaatttgttgctgctgtgtttgttttttatttcgcttttgccttgtttttgaagatgaacgtatgatgatgaggtttgtaacagttttgggtctcgcagcactggactggaccctgactgcgattgttgtttgtgttgccccttgctcggtgcgcggtgtgtatgttctgcatgcacgtggttccattcgattggtgtatttgtgtgccaacaaaccactatacgtggtgtgtgtgtgtgtctttagctgaccattctttgacactgaatctcactatatttgaattgatgtggacgcttgctttttcgagtctcttttcagattcttgtttaacaaagtgacaatgacaatgcagttatcgt

SEQ ID NO: 15243 - DNA, 1106 bp, Zea Mays
gcttgttctgttatagtttatcgttcaggacgtggaggttctgctggtaacaagttccggatgtcactgggtctaccagtggcagccactggaatcaaggggcgccttaacaggcttccttctgcctgtgttggtgacatggttatggcaactgtgaagaagggaaagcctgaccttaggaagaaggtgatgccagctgtcattgtgaggcagcgcaagccatggcgccgaaaggatggtgtctacatgtactttgaagacaatgctggagtgattgtgaacccaaagggagagatgaaaggctctgccatcactggacccatcggaaaggagtgtgctgatctgtggcctaggattgccagcgcggcaaatgcgattgtctagtggaatcagttgatcgaaatttacttcaaataacatttgtttgtgttgcgaattgggaagagagtttttagttagacgagcttttgatggccctaaagatgttttcccggatgatgtttgtgctgctggaccgtttcctgttagcttcgatggcatcctccccatatcgataaactgttgcttagcctgacaatcggaagagtttaaatgttaaagatttgatatctctctcgctgtttcgcattgcttttcttttacttgcgggagctgaaatgttggcgcttttggaatggaatgcaggaatttcatgggaatggcgtagaatctggaggtaatcagctcattttcattgaaataagatactgtatgttgagaacttgttctcaaatgctataaattaagaacaaggcaacataaaatgttaaatattaatacccttcgtccgtggaagcattatttccccaaggatttaatgacctccgaacgaaggctataaacgaaatatcacgaagatcatgtcttcgtggttagacttgaaaaacaatatgaagtaaaatacttgaaaaacaatatgaagtaaaatacagaacacaaaacattattgaaagatataccgaaaatgaataacaatatttttatatatattctattatatgaacctaaatattatgtttaatatttaggtatatttgtaccttcgtcttagcagaaagcaataatcc

SEQ ID NO: 15244 - DNA, 83 bp, Zea Mays
ctgacaaccacgtcggcatgtacatagggctctggctcctctctgctagacacattaccacattgctacaccccccattatac

SEQ ID NO: 15245 - DNA, 4840 bp, Zea Mays
gtagcccccttcaatatctgttcccagtatcccccttcaaatctttgatgggggttgtgaatcatgatcctctaataaccataccctggaaggctggaacaaatttcgttccaaaagggacataatcagagaaggccagttaagggggcagtgagaagggatggcgatggagttggccaagcaattgctcgtcgctgttctcagaagctatgcaccacctctctgggctacaatcattgccagtgtttttgttatcatctccgtctcactgtccctgtacttgctactcaatcatctgtcagcctacaaaaacccagaggaacagaagtttcttgtcggcgtcatcctcatggtgccatgctatgcagtcgagtcgtatatatcattggtatatccgtcaataagtgtggacatcgaaattatgcgagatggttatgaggcatttgctatgtactgttttgggcgctatctagttgcttgcttaggtggtgaagataggacaattgaatttttgaaaagggaaggtggttcaggttctgctgtaccactcttaggccaagcatctgaacaacgatatgtaaaccatccatttccaatgaactacatgcttaaaccatggccgctaggcgaatggttttacttggtcatcaaatttgggctagttcaatatatgataataaaatcaatatgtgctattcttgcggtgattcttgaatcctttggagtgtactgtgaaggagagtttaagttgaactgtgggtactcttacacggctgtggttctcaatttcagtcagtcatgggccttatactgtctcgttcagttctatgctgtgataaaggatgagttagctcatataaagcctcttgcaaagtttctgacattcaagtctattgtgttcttaacatggtggcaaggtatagcaattgcactgctcttcaactggggttcgttgagaggccctattgctcaagaattgcagttcaagtcaagtatccaagactttattatctgcatagagatgggtgttgctgccgttgcccacctgtatgtcttccctgcgaagccatacgagctaattggtgattgttttgttggagatgtttcagttcttggagattatgcttctgtcgactgccctctagaccccgatgaagtcaaggatagtgagcgcccaaccaagtttaggctcccccagccagatgatcatgttaggtgttccactgccataaaagaaagcgtccgtgatgtcgtacttgggggcggtgaatacattgtgaatgacttgaagtttaccgtgaaccatgctgtggaacccatcaatgaaaagctgcacatgatatccgagaacatcaaaaagcgtgagaagggaaagaggaaaacgaatgatgatagctgcatcagttcaccaacatccttgaccagggtcatcagtgggattgatgatccgctcctgaacggaagcttgagtgacaacagcggtccaaagaaagcacggaggcagcgcaggaaatcaggctatgcaagcgcagagagcggtggggagagcagcgaccatggcctaggcgggtttgagatccgagggaacagatggattactagggagtgacagctaggagcaatctgtggagatactatgtaaatgtcacaggagttggcctgtggtgatgtgcgataaccgggccagtgggttctgagcgtaagacgaggtctctagcaatgatatgttgtagcgtgactaaatcgagatgagcaatcaggttgttgtctgttgattctttcggctgaccatttcggctgctgaggccttgatcctgtatttgagatgtcaggcctacttagagcaaatgctggaaggaagcaatgtgcctgttctgaggtccctccagcatcacttgtaatttgtaaagtactcaagtacagactagaactagtcatgcataccagaagaatagatagatgtttcagaagttgaggcctgagatgccgtgccactctatttgctctgtttcatgctttgccgttattatatcactattttcactgttcattctaaggccgttgtcacacggttatatataaagtgaagacggttgtctcacgcaatatgtgaagtgcaagatgagctctacactgcaaggaaccccaagaaaaaaccacaggtcaagagcaaattcgccactgcagctactgtgcaagaagataaaactatggcaactgccaaaggcgatgtcgaccatctccccatatacgacctggaccccaagctggagatattcaaggaccatttcaggtaccggatgaaaagattcctagagcagaaaggatcaattgaagaaaatgagggaagtcttgaatctttttctaaaggctatttgaaatttgggattaatacaaatgaggatggaactgtatatcgtgaatgggcacctgctgcgcaggaggcagagcttattggtgacttcaatgactggaatggtgcaaaccataagatggagaaggataaatttggtgtttggtcgatcaaaattgaccatgtcaaagggaaacctgccatccctcacaattccaaggttaaatttcgctttctacatggtggagtatgggttgatcgtattccagcattgattcgttatgcgactgttgatgcctctaaatttggagctccctatgatggtgttcattgggatcctcctgcttctgaaaggtacacatttaagcatcctcggccttcaaagcctgctgctccacgtatctatgaagcccatgtaggtatgagtggtgaaaagccagcagtaagcacatatagggaatttgcagacaatgtgttgccacgcatacgagcaaataactacaacacagttcagttgatggcagttatggagcattcgtactatgcttctttcgggtaccatgtgacaaatttctttgcggttagcagcagatcaggcacaccagaggacctcaaatatcttgttgataaggcacacagtttgggtttgcgagttctgatggatgttgtccatagccatgcaagtaataatgtcacagatggtttaaatggctatgatgttggacaaagcacccaagagtcctattttcatgcgggagatagaggttatcataaactttgggatagtcggctgttcaactatgctaactgggaggtattaaggtttcttctttctaacctgagatattggttggatgaattcatgtttgatggcttccgatttgatggagttacatcaatgctgtatcatcaccatggtatcaatgtggggtttactggaaactaccaggaatatttcagtttggacacagctgtggatgcagttgtttacatgatgcttgcaaaccatttaatgcacaaactcttgccagaagcaactgttgttgctgaagatgtttcaggcatgccggtcctttgccggccagttgatgaaggtggggttgggtttgactatcgcctggcaatggctatccctgatagatggattgactacctgaagaataaagatgactctgagtggtcgatgggtgaaatagcgcatactttgactaacaggagatatactgaaaaatgcatcgcatatgctgagagccatgatcagtctattgttggcgacaaaactattgcatttctcctgatggacaaggaaatgtacactggcatgtcagacttgcagcctgcttcacctacaattgatcgagggattgcactccaaaagatgattcacttcatcacaatggcccttggaggtgatggctacttgaattttatgggaaatgagtttggtcacccagaatggattgactttccaagagaagggaacaactggagctatgataaatgcagacgacagtggagccttgtggacactgatcacttgcggtacaagtacatgaatgcgtttgaccaagcgatgaatgcgctcgatgagagattttccttcctttcgtcgtcaaagcagatcgtcagcgacatgaacgatgaggaaaaggttattgtctttgaacgtggagatttagtttttgttttcaatttccatcccaagaaaacttacgagggctacaaagtgggatgcgatttgcctgggaaatacagagtagccctggactctgatgctctggtcttcggtggacatggaagagttggccacgacgtggatcacttcacgtcgcctgaaggggtgccaggggtgcccgaaacgaacttcaacaaccggccgaactcgttcaaagtcctttctccgccccgcacctgtgtggcttattaccgtgtagacgaagcaggggctggacgacgtcttcacgcgaaagcagagacaggaaagacgtctccagcagagagcatcgacgtcaaagcttccagagctagtagcaaagaagacaaggaggcaacggctggtggcaagaagggatggaagtttgcgcggcagccatccgatcaagataccaaatgaagccaggagtccttggtgaggactggactggctgccggcgccctgttagtagtcctgctctactggactagccgccgctggcgcccttggaacggtcctttcctgtagcttgcaggcgactggtgtctcatcaccgagcaggcaggcactgcttgtatagcttttctagaataataatcagggatggatggatggtgtgtattggctatctggctagacgtgcatgtgcccagtttgtatgtacaggagcagttcccgtccagaataaaaaaaaacttgttggggggtttttcttctactctgtagtctgttcttgctagaacaaagtagataattgtctaaatatttctagcaaagtaacaataaaaaaaaga

SEQ ID NO: 15246 - DNA, 222 bp, Zea Mays
ccatatccaagcctaaaccaaagcagcctggctgtgcctacacgcttgccttatcttctcccgttcaccccgccgtgcgcgcgcgcccccgcggcgacaaccgggcgaccgccgccgacctacgccaggtgccaagccgttcctcagtcccatcacgaggccttcaacgagcccttcgccggcgacgagaaaaattatgaagcatgttgttcctcttcctcc

SEQ ID NO: 15247 - DNA, 1704 bp, Zea Mays
tctcaagctgcgggtacgctccgacgtgtcgatcgagaacgacacgtgccgcggctggggagcaaaaggtacgggaccagtccccacggccgtcacgctcgcagcaccggccgttttctacgggcggtgcagtggacgggagtagtaccctttctttctcttcgaagaaaatgcggcggcgtgtggtataaaccccgcccgtcacgccgggccgtccgtgcgtttccttttgtcttcgcttgcttcctttcgaaagtccttgcgtcacactcgccgatcgatcgagtctctccggattccagagaggcccaactgccgaagccatcgatcgccgccacctcttcgagcagaatagttgagaatggctgacgaggatatccagcctatcgtatgtgacaatggcactggaatggtcaaggccggtttcgctggtgatgatgcgccaagagctgtcttccccagcattgtgggaagaccacgccacaccggtgtcatggtcggcatgggccaaaaggatgcctacgtaggtgatgaggctcaggccaagagaggcatcctgacactgaagtacccgattgagcatggcattgtcaacaactgggatgacatggagaaaatctggcatcacaccttctacaacgagctccgtgtttcgcctgaagatcaccctgtgctgctgaccgaggcccctctcaaccccaaggccaacagagagaaaatgacgcagattatgtttgaaaccttcgaatgcccagcaatgtatgttgctatccaggctgttctttcgttgtacgctagtgggcgaacaactggtattgtgatggattccggtgatggtgtgagccacacggttccaatctatgaaggatacacacttcctcatgctattctccgtttggatcttgcggggcgtgacctcaccgaccacctaatgaagatcctcacagagagagggtactccctcactacgagcgctgagcgggagattgtcagggacataaaggagaagcttgcctacgttgcccttgattatgaacaggagctggagactgccaggagcagctcctctgtcgagaagagctacgagatgcctgatggtcaggtcatcaccattgggtcagaaaggtttaggtgccccgaggtgctgttccaaccatcccttgttggcatggaatcgcctggcgtccatgaggccacgtacaactccatcatgaagtgtgatgttgatatcaggaaggatttgtatggtaacgttgtcctcagtgggggatctaccatgttccctgggattgccgatcgtatgagcaaggagatcacgtccctggctcctagcagcatgaaggttaaagtgattgcgccacctgaaaggaagtacagtgtctggatcggtggctctattttggcttctctcagcacttttcagcagatgtggatctccaagggagagtatgacgaaactggtccgggcattgtccacatgaagtgcttctaagtttttttgggaaatttttccaaaaaaaaaaagaagtttctggggaagttcgacatggtacgtcaggcgttaccggctcattgtgaaccaatacatgaactgccatgataaggttataagcagaaataacagtagcactggctccaattcctgaagatgagtctggcccagcaagttgcatcgggccgtgctggcctagacccggcccaaac

SEQ ID NO: 15248 - DNA, 834 bp, Zea Mays
cgctggccccccaactccgtccgctccaacagcggcgaacccaacgcaccccaccgcacactcacaggcgccagcctagcccacgctgttgttctcctctctcagtcgcctcgccccaccgtgtctccctcccctcggtgtcgtcaatcaccgcacccgctgctgctagcccgcaactccctcgcttcctgcacccacatccccgcggcgctacctgcctacccagatcccgctcgccggtggtgccctcctcagtcctcactctcccgccgctggcgccgccggagcgagggggactgcccataccctactaggacgagcagtaggaggcggaggggcgagatccggcggaggccgccccgatgggggacttcaatgtggcactggtgatcgtggcggcggtggtcagcgtgctggtgctgctcgtcagcgtctaccttctcgtcaactaccagcaccccgacgacgtcaaccaggcctacttccccaagctcgtcgtcgtgctcggcctcaccgtcgccgtcctctccatcctcatgctccccgccgacgtcgccaaccgccaggcatgccgcaaggccgtctacaacggcgcctgcagcctcacgctccccatgaggacgctctggctcgtcgtttacatcgttgacgccgtcctcgtcttcctcgtcatccccttcgcaatgttctactacgagggcgaccaggacaagtccgtcgggaagaggctcaggaccgcgctcatctgggtcgtcgcgtccgcggtagtgtgcggcctcgtcctcggcatcctatacggattggagtgacatcctgaaagctactggagtacca

SEQ ID NO: 15249 - DNA, 4073 bp, Zea Mays
ggttgggatcagtatttcagaagctgtgtcatatgttggtggacttggtggcaaaggtccagcttcttcaagtcttcctagcttgccaaatcgtccaacttctctcactgagtcatccaagttcacatctgcacctgtggggtctggcctggcaagaccaaatgatgactatatggctgtgcgaggttatgcacagaagcaagaccaatatggcacagattatccactagagagacgtatgtatggtgaacactcggccaatcttggtagaagggatggtctcagtgatttggatagaagatacactgatcagatagctgctggtcatcagagttcatcaatgcgccatcagcagctcttgaaaggtcagctgcagcctggatctgatacgagacaagccgattactttgcaggaaggtctgctccagttcatcaagcatcccaggaaattggtgtatatggaagagttgatgctgataaccacaacatgtccattcttgggactactccatatggaagacagcaagcagcctcattgttggaaggagctccgaggacaaacattgacagcctctatggacaaagatcatcaagtgctggttttggtgcaggtcttcctcctggacgtgattatgcctcagggaaaggcctgctccatccatcttcggatcctgattaccgagatagcatcttaccccatgtacatccaggtgtatcaatgattgatgaccgtagaattgatcggatcggttctcgtcgtgaattggatctaagagatgaagagcgccgaagggacctaatactggaaagagagaaagagcttgagtgggaacgtgaacgtgagttacgggattttcgagaccgtgaaagagaaagagaacgtgaaagggaaagggaccttgaaagactactaagagaacgcgaaagagaaagggagcgcgaacatgaaagagagcgtgaaagagaacgccttcgtgagcgccgggagaaggagagagagcgggaaaggaagcgcggagctgatccaaggcgggagcacactccatctagaggtcctggtgaccggcgacactcttctcttagatctgagaagcctgtgcggcgaatctcccctcgacgtgatgctgggcataggcatcgttcacctgttaaagaaataaagagagaatatatttgcaaggtgtttccatttcgcttcgtggatgatgagagggattatctgtccttgacaaaacggtatcccagacttgcaattactccagaattttctaagattgtcttgaactgggctaaagaaaacttaaatcttcctctggatacaccagtgagtttggagcacgatatccatgattcagatgatggtgctgatgaaggagcaattatctctactgagaaaacatcaagcttcaatactccggccaccatttggaatgcaaaggtactattgatgagtggcatgagcaaaggtgcctttgctaacataacttcattgagaagtactgaggaacgagttgtgcacttgaacaatatcttaaaatttgctgtattcaagaaggatcgttctctttttgcaattggaggcccttggaatgcagatatagatggtggtgacccatcagctgactgttcttgcttgattcgaactgccatcagatgcgttaaggaaacggttcacgttgatctatctagttgcacccactggaaccggtttgtcgaggtacattacaatagaataggcaaagatggactgttcagtcataaagaaattactgttctgtttgtgccaaacttgttggaatgcttgccttcagtggatatatggaagaataactggattctgtacaaaaaatcaaaggcagaaagggagcagctcactgttaaaaaggtaaagagccctggtgatccaaaagagcagatgcaaggggagctgaacgatggtaaaaatttagatgctgatcaattaaaagaggctgatgttggttgcagtgatatgaaaaatgagaaagacgatgttgatatcaaacagcaaggcaatgatggagagggtacgggtaaagttgaggaacctgttcagaagatgggtggggatgttgaaggaaaaagtacgggtgactcctctattgaccatgcaacaactggggataaaaagcccacaaaaaagaaaataataaaaaaggttgtgaaagttgttcgaaaaaaaataactggaccttcagttgataaatcttctgaggacaagattgttgtagcagaatctgcaaacaaaactgcagaaggggggcaaagtcaacaaaagaatgatgatgctggaaaacaacaggagggagctggtataagtcaacaaccagaagcaaagaaaactgtgaagaagaaaataattcgaaggattgttaaaaggaaagtttctggttcaggttctcagttgaatacccctactacacctgctgaaactagtaggcaagaagcagaagttcagccagaaaaaaatgttgagagttcggccgacgttggaaactctcagactaagctacaagaagggtccaaaattccatctgaagatatctcaaatcagaagaaagaggagaaaccagcggaaaaggaacacccattgactgatctcagtttaaatgcagataagggcaatcacaaggaagcttttgaacaaaaagacatgaaaaacgatggaaagaaggataaaacaaaggatgataaagagaagaatagagacctcaagatggatttaaagcaaaagctacctcttgacacacaagaaaaaaagaggtctgatgaaccaccaaagtatccaggattcattctccaggcgaaaagaaatacagaatccaaactccgcttaacatccctttcattgcatggcctcctagactatactgccaaggatatagaggagtcagtatttgagctttctttgtttgctgagtcattcagtgaaatgcttcaacacagaatgggttgtgttatcctgtcttttcttgagaaattgcacaggcgatatgttgtgaagaggaatcagcgtaagcgccaaagagaggaagatctaaagaaagaagagaaatcttcagagaagcggtctaagactactcatgagactactaaaactgaaagtgttgataatccaggaggcagctttaaaatgacaaaagagggtgaagaaaagatgagcacagatcaatctgcaaatgtccatgctgaactgtcaaaagagggtcagataaaacttggcaccgatcatccaattgctaaccatggagaaccagcaaaagggggtgatgaaaatatggaggaagatcctgaatacgaggaagatcctgaagaagtagaagtatatgaagatgacgaggacatggatgatgctcacgctgaagaacagattgcagaacagaatgagaacacaaacgacagagagattaagccaaaagaagtagcgacaacagatggtggaaataacaaaagtacaagacagcctgaagtagaaaatgttactaatatccatgaaagagctgcttcaatggaagaaaagcagtccgtgccagagataggagatttggtgggaggtggagaaaaggtagttagtaaagagattaagccagcaaaagatgaggtgatcgacaaggacctattgcaggccttcaggtactttgacataaatggagcaggatatctcaaggttgatgatttaaaatgtattcttcacaacatggggaagtttttatcaagcagggacgtgaaggacttggttcaaattgctcttgttgagagcaattctgcaagggacaatcgcataatctatcctaagcttgtgaagattgttgacctgtaatctggcactgcttggcccgcgtcagtccccttgaagttaaccatgctatgatcgttgagaagtcagttatgagaaactattttgtttacttattaatgggttcactgccatttttgtggctacctgtttctacgattatgctacaaggagctgcatttcgtttctgttgaattttttttacggaaattatcaagtcgtgaacgtagcagccgaaaaagataaacgaacattgtat

SEQ ID NO: 15250 - DNA, 2988 bp, Zea Mays
cacctcaaaactgaaaaaaagggaaaaaaggtgctctcgatctagggaatagggatccccttcccggcttctagttcccctcctcgtccaaaaccctaggccagcctagcggcggagcccgcgcgcccgcctccaggaccatggccgaagaccacttctcctccgcgccgtccgccccgtcggcagcggcgacagcggcggcggcggccgccgcggcggtcgggtcctcggtgatcccgatcgtcaacaagctgcaggatatcttcgcgcagctggggagcagctccacgatcgacctgccgcaggttgccgtggtcgggagccagagcagcggcaagtccagcgtgctcgaggcgctcgtcggccgcgactttctcccgcggggctcggacatttgcacgcgccgccccctcgtgctgcagctcgtgcaccagccgcgccgacccgccgacgccgaggccgatgagtggggcgagttcctccacctatcggggcgtcgcttctacgatttccgcgaaattcgacgcgagatccaggcagaaacagaccgagaggcaggtggtaacaaaggtgtatcggataggcagatacgattgaagattttttctccaaatgttcttaacattactttggttgatttgcctggaattactaaggtgccagttggtgaccagccaactgatattgaagctagaatacggactatgataatgtcatacatcaagcacaagacatgtatcatcttagctgtatcgccagcaaatgcagatttagcaaactctgacgctcttcaaatggctcgggttgctgatcctgatggttctcgaacaattggtgttatcacaaagttggatataatggacaggggcactgatgcccggaactttctgctgggaaatgtgatccccttaaaacttggctatgttggtgttgttaaccgcagccagcaggatatcaactctgacctcagtatcaaggatgctctggctcgtgaagaaaaattcttccgtactcagccggcatatcatggtcttgcacagtactgtgggataccacaattagcaaagaagctaaatcagattctggtccaacatataaaaacagttctgccagggcttaagtcacgcataagcagtcaattgactgctgttgccaaggagcttgctgtgtatggtgaccctgttgattcaaaggctggtcaaggtgctaagcttttgaacatactagctaaatactgtgaagctttttcgtcaatggtggaaggaaaaaatgaagatatatcgacaactgaactttctggtggagcgaggatccattacattttccagtctatctttgtcaaaagtttagaggaggttgatccttgcgaggatgttacagacgtagatatccgcatggctattcaaaatgcaactggtcctagaagtgctctgtttgtacctgaagttccatttgaagtccttgtacgtaggcagatcagcagattgcttgatccaagtcttcagtgtgcacagttcatatatgatgaacttgtaaagatgagccatcgctgccttgcaacggagttgcagcagtttcctatactccgcagaagcatggatgaagtcattgggaagtttttgcgggatggacttaagccagcagaaagtatgatatcacacattattgagatggaggaagattacataaacacatcgcacccaagttttattggtggcagcaaggctgttgaggaagcacagcagcaagttaggtctgccaaaacgtctgcagtggtagtaagaaaggatggagtggattcacaggtttctgagaaaactcaaaaatcacgcccgatattgggtagaagtggtgtaaatggagtagttactgaccacatccagggggtacggcctgctgctgaggcagagagaccaggatcttctggtagtggaagcacatctttctggaatcaaatatttacttccaatgaggatcgaacacatgctcctgcaagagataacacagcaaacaaatcttatgctatgcctgcccctaatctggatcattcattctccactatacagttaagagagccaccagtcgtcctgaagccttcagaacaccagtctgagcaggaggcacttgaaatagcaattacaaagttgctattgaagtcatattacaatattgtcaggaaaaatgtggaggacttcataccaaaagcaattatgcatttcctggttaatcacacaaaaagggcactgcataattacctcataacaaaactttatagagatgatcttttggaagacttgctcaaagaacctgatgagctaaccataaagaggaagcagatacgtgaaaatcttaaggtccttcaacaagcttacaaaactttggatgagataccacttgacgcagaggcagtagagaggggtggtggatactccctcgattctgatgcgattggtctaccaagggctcatgggctttcttcatccctccacggattcaatgatggaagctcatcatattcaaccccgaagcagtcaaggtcaaggaggccaaaccattctggcgagcaacttcctttcaaccccgcaacgagtggcaatggtttttgatgccaccctacacgatggccacccagattggttatggaaccaaccattgcagcaagcacaccttactctgctccaagtttgttggcacccgtagatatatgttatttctagttaaattctttgcagcgttgcgctgatgaagcctggcatggtgcgagttttgtcatttcgccttttgtacagtatatatctttgcccagtcatttcgtcttgaaatggtatcaagtgataggtatactttttcttcggacccagggaaagcaatggaaaaagttatactaggtgcagcacccagcgtctgagtgacttgccacggatttgccttgcaaaatagacatggcaaaaacttggtctagctgagaaagtttctgtaattaccctg

SEQ ID NO: 15251 - DNA, 1327 bp, Zea Mays
agagattagaaacgaaattaggaaagggtaagagaagaaaaaggaaggagattagacgtacacgacaaagagacgaagacagtgtggaggggaggcagggtagcccccgcggcgccgctccgctcgaaatccccaaaaaggcaagatcaaatcaaatcagatctctccacccccagcccatccatggcgatcgtgtacgccctggtcgcgcggggcacggtggtgctggccgagttcgccgccgtctcgggcaacgccggcgccgtggcccgtcggatcctcgagaagctgccgcccgacgccgagtccaggctgtgcttcgcgcaggaccggtacatcttccacgtcctccgatccgacgccgccggcatcaccttcctctgaaggatcccctttctctacctggaggacatccaaatgaggttcatgaaaaactacggcagagtcgcccactctgcgctggcttacgccatgaacgatgagttctccagagtgctccatcagcaaatggagttcttctccagcaacccaagcgccgacacactcaaccgtctccgtggagaagtcagcgagatacacaccgtcatggtcgacaacatagagaaaattcttgacagaggcgatcgcatctcgctccttgtcgacaagacatccaccatgcaagacagcgcctttcacttccgcaagcaatccaagaggctccgtagagctctttggatgaagaatgccaagcttctagttgtgttgacagttgtcatagtagtgctgctctacttgatcatttctgctttctgtggaggcctttccttgtcatcatgcagatcatgagtaacacaccagatggctttgcccctcccttaaatggagggtagaacaccatggaatgatgcctgctgtgttgagcaccggagcttccggaggcaaaaaaaaaaggagatcgatggataccactgtggtttccagtaacttggatcagtttgtacagtggacgagtggagttggccgttgctgtttttgatgtcgccatggttgtgggtgaactcaaaccttaaatcgtggtgtgcttagcatctttcttggcgtgtcaaactgtcgttgtgacttgtgagggatgggactagtgagttgggttttgtagagttacttggttatcaatgtgcagacatatatgtatgccgcgatgagtgttagtacatgcctactatggttatcggtgtacgaaagtgtcttagctgctgttgtttgagactgccatggatggatgtggttgtgttttgaaggagctgcccttgtggccatgtgatgaataaaagcacgtaaagcaagc

SEQ ID NO: 15252 - DNA, 985 bp, Zea Mays
gttgcacatgtggtgctctccagaatacgaaccgcttgacttgaaagggacttcgatgtcatgccctcacatcagcggggtggcggcgctcatgaaggcggcacacccagactggagcccatccgccatcaagtctgcgctgatgaccaccgcctacaccgtggacaacacgaactcctcgctccgggacgcggcggacggctccgtcgccaacgcgttcgcgtacggcgccggccacgtggacccgcagagggcgctttcgccgggcctcgtgtacgacatctccacgcacgactacgccgccttcctctgctccctcaactacagcgccccgcacgtccaagtgatcaccaaggcgtccaacgtctcgtgcggcgccccgaacaagtcccgccccggggacctcaactacccgtccttctcggtggtgttcggccagaagcggaagacgaagccggcggcggccctgcgtttcaggagggagctgaccaacgtcggccccgcggcgtcggtctacgacgtgaaggtggtcggccccgagtccgtcgccgtcacggtgacgccggcgaggctcacgttcaggcaggccggccagaagctcaggtactatgtcacctttgcgtccagggctcggcaaggccacgcgaagccggacttcgggtggatttcctgggtcaacgatgagcacgtcgtccgcagccccgtcgcgtatacgtggaagatgtgatgtgaggttccctgcctgcctaaaatctagctcgatgacgaaggaataggataggttggtgtagtttgctcaccgcttcgcaaagagaatcggcgtgaagctctctatctctctctctcggctgcagtgcagacctgtacttgtttcctatctttcttttcggacatcaagtaaccctgaatctgaatgacgaatccgccgtttggtgtttgccatatgaatctgactggattcctctgctgccttgtcaggttgtac

SEQ ID NO: 15253 - DNA, 567 bp, Zea Mays
ctgccgccgaggtccgagcaaactgtcgtacagactgagacgcttgcgcgattagcgaacggaacggaaggaagaccgtggaagcaaaggcgcgcaggcgcaagggagcagagcacacggcacaccacaagagaacaaatacacctcaggtggccttcctaagatcgccgactgaatctacctcgcttcgcgcctccagttccgcaccgggactgccgaatctgtgctcgggatcgtctcttccagcggcaatgggggccgattctgaggacgccgtcaagcagctcagcctcctcatggagcaagtggaggccccgctgaagagatcatttcagaatatgcaccagggctatcccaaagaaacactggtgcgtttccttaaggctagagagtggaacgtaccaaaggctcataaaatgattgttgattctttggattggaggattgaaaatgaaattgatagtgtgctagagagacctatagtcccagtagatttatacagatcaatacgtgattcacaacttattggcctgtcaggatacacaaaggaggctacaactacagcca

SEQ ID NO: 15254 - DNA, 1187 bp, Zea Mays
gtaaagacggctactccttccctctccccccttctccccctccgtcttcttcccccaggggcatccgtgttttcactttttgctcccccacgttgaaccttgatcctcgtgctccctttcttgattctttctccgtaggatctcttgctaggagtagcctgccccgtgtgcgcgctcgcacggacatgcttgtttccgcgtcttgaaaggcgagaaaaagtggagatgggcgcttgcgcttcggtacacaaggacccggggcaccccaagaagcagtttcttgactctcccaccaaggcgaaggccgccaacgggaagggtggcgggggcggcggtgttgctccggttggtgatggcttcggtgatctcaagtccaaggtcgacgctgaggctgagcagctgcgggcagagtttaaccccaagaacccggattctggtagcaaggatgaagtgttcttcgaatctcgagcctggttagattccgactgcgaggatgacttctacagcgtgaatggagcacacccgtctaccagcccagagcgcagacggtgatgagcagcatctttcagccagacacgcgcagttccaaatcaccggagccttctccgaccggacggaggaagctcgctgagctgctgcaggaggcaatgcaagacggtcccgaagaaagcgccgacgaggaggagcagcagcagcagtcgctatctgctgccgctgatgggaagccgccggtgtctgagtccacgtccagctccgcttgcagcaccgtgccgactccggtcgcagtcgccaagagccggaaggagaaggcgtggtacaccggacgctgttgcctgccgagctttgttcatagcctgaccttagacgagagtgagagggggcagaagatgagctctaggccatgtgctgtttgactgtggggctccagtgccctcctgagtcctgccctgagctgtatttagcgcgatatgttatctgaatgcccgattgggacgctgaagctactgtattgagagtactatatagtaatcaagtggataataggcactcgttaaatcctgtggagaccatgtgtatgtgtcgaccaatttgcgcgggtagagcatctacctcaaggaattgcccttccctgtgcatgtctaactgaatctttgaataaataaacacactgtataatttttcagatg

SEQ ID NO: 15255 - DNA, 2183 bp, Zea Mays
ggaccaaatccgatctcgtggccacggccagaacacacctcctcacgtccacctgacctcttgctcctccccaataatgcccagtgcggcagtgcctgccaccgtctaagcccaccccaagtctccgccgtcaacccgtcctcccccatggccgccgccgccgccatctctctatccttccactttcgtttccgcccgccctttccatctccacgtacccccacgcgccacgctcccttttccttgttctccccttcccttcttgccccctgccgcctccgcgtcgctcccggccgcccctcaccgtccccgtggcgccccgacgtgcgggcgcgcgctggaagcaccatcggggcgccgcctgcgcttgtgcgcccaggcggagccgtggagacggaccgcctcccctccgacgtgcgggaccgggccatggaggcggtcgaccacttcggcggtcgcgtcaccataggagacgtcgcttctcgcgctgggctgcagctcgcgcaggcggagcgcgcgctccaagcactcgccgccgacactgaaggcttcctggaggtatcggaggacggggaggtgctatacgtcttcccaaaggactacagggcaaagctggctggcaaatcgtttaggatgcgggtcgagcctctggttgacaaagccaagcaagtgggtgcttatctggtacgtgtttcatttggcactgcgctcattgcctcaattgtgctggtgtacactacaatcattgccattctctcaagctcaagtgatgaagatggtcgtgggaggcggaggagatcttatggttctactatcatcattccgacggatatgttttggtacttggatgcagattattatagaagacgtcgagtagaaaacgaaaatgggatgaactttattgaatctgtattttcatttgtgtttggggatggtgatccaaacgatgggcttgaagaaaagcggtggaagatgattggacagtatatttcatcaaatggtggagttgttacagctgaagaactggcaccatttcttgatgtgccacctccatcagaagagtccaaggacgatgaatcatttgttcttccagttcttttacgctttcagggacatccagaaattgatgagcagggaaatatcctgtatcgattcccatcgctgcaacgtactgcttcatcaaaaagtggtaggagcagggaatatgtgggtaccaaatggtctgcaatgtttagcggagttgaaaagtacttagaggagaaaccgtggaaattcagtaaagcgaatgcaacagagaaggcgatggttgctggtttgggaggactcaatctctttggtgtcatcattcttggaaacttgttgaagcaaatgacagtgacacctggtggactaatctcatttgccgcacagttatatcctttgcttcagatatacgctggctccttttttgcaatacctttgtttagatggtttctgctacgcaagaccaacaatggcattaaaaagaggaataaggccagagaacagagagctcaggagctcgtgtcaccagattcttctctaagaagaaagttgctcagtgcacgtgatatggctgaacggaaagtaatcacgccagaggagattgtctatactactgaaaaggatctattggagcaggattatgaagtcaaggagtgggagaggagatttaaggagctcgagtcagagtgatggacatgaccgatatacttgacacttgcagtagctctacatggtcctcaccatacttgtcggtgatttttatccgcatccaacggagtggaagatggatctgactgaaccactcgagcaagcgaaactggatggtactggacctcactaattgtcgtgtcaccaccagcccaccactgaccacttcgctatggaagttttgtggaagctgttggtttaattggaaccgaccattatttgcaagatgatgttcgtatctgtgccattgacctgcatatatgtatagttccaatcacggatcaaattcagaatttgacacgaaaaagaaaaaaaacagggaatatggctaggatgctactcggtttgaatggagtccaatcaaaacatgtaaaaaggtcagcctgtgaacagggactcagactgtttgctgcggctttaatccactggctcctgttttttcataaaaaaaa

SEQ ID NO: 15256 - DNA, 1190 bp, Zea Mays
taatcacctcatcacaggtccccccagcctcactctcgcgccggctcaaggtacattgcgtgtcctagccaagacacgcagctcatctcagcctcacacgcacagcaagagcgaggcgtgattcgccatgggcggcctcactatggaccaggccttcgtgcaggcccccgagcaccgccccaagcccatcgtcaccgaggccaccggcatccctctcatcgacctctcgcctctggccgccagcggcggcgccgtggacgcgctggccgccgaggtgggcgcggcgagccgccgccgccggcagccgtggccgacggcgagcttgtgttcgataacaagtggccccaggatctaccgggcttcagagaggcgctggaggagtacgcgaaagcgatggaagagctggcgttcaagctgctggagctgatcgcccggagcctgaagctgaggcccgaccggctgcacggcttcttcaaggaccagacgaccttcatccggctgaaccactaccctccttgcccgagccccgacctggccctcggcgtggggcggcacaaggacgccggcgccctgaccatcctgtaccaggacgacgtcggggggctcgacgtccggcggcgctccgacggcgagtgggtccgcgtcaggcccgtgcccgactcgttcatcatcaacgtcggcgacctcatccaggtgtggagcaacgacaggtacgagagcgcggagcaccgggtgtcggtgaactcggcgagggagaggttctccatgccctacttcttcaacccggcgacctacaccatggtggagccggtggaggagctggtgagcaaggacgatccgcccaggtacgacgcctacaactggggcgacttcttcagcaccaggaagaacagcaacttcaagaagctcaacgtggagaacattcagatcgcgcatttcaagaagagcctcgtcctcgcctaactactgctactgctaggatccatgccattgccatgtcgtcttcagattcagagcacgccatgtcgtcgctagcttcgtggtagaacaaataatgatgtgcgtgctgtgtgtaagcatggatatggatgtgaatatgtaatatgatgagcactcctactttggtatgtttgggaataacagacttgtgttggtctggttcattatttgtaagaaaatcaaaaagagtt

SEQ ID NO: 15257 - DNA, 352 bp, Zea Mays
tttggcaacatttttttgggatattacacatagggacaaaagtagttaagaaaaatagcaaaaagatagtggtctaccatagagggcacatgttccctaattggcctagagcatagcggctcattatcattccaccgctggtggcgggcggtactcgctgctctgtgaagccacctcacgcaatgtccgccactttaggtgttaggatgcaaaggcgtttgccaaggcacacgaaacccactacacaacttggaatgggtggtccacagtttgtagcactagacccaagcacatgcaccacaattgacatccacacttccttattgcccccgctcgggttacaagcaatcgc

SEQ ID NO: 15258 - DNA, 3446 bp, Zea Mays
gccgtctcacgttctacacccacccactcctgactccgacgacgccgttcaaacccacgcaatccagcagaggagaccatctccgccgccgacgacgccgttcaaaccctagccgatccgctggctctgccatcgcaagccaatgccccacaccgaaccctagcaacaccatagtccttccacaaccggtgcgaacagtactgcccgaatatggcggccgaacccgccgctacggccgctgcttcggcggcggccgctatctccgctgtcatggactggcgctcctcccccgacgcccgcgccgctgccttcgcgtacctcgaatcagttaagagtggggacgtccgagccttggcaagcacatcatttttcttggttcggaaggaccagacgtcagagatccgcttgcacgggttcaagatgttgcagcacctggtaaggttgaggtgggaggagctcagtgctgcagaacggaatgaatttgctaatatgacaattaatttgatatcggatgttgttggccctcatgaggtgtgggccttgaagagtcaaacagctgctttagtagcagaggtggttcgaagggagggagttgatttgtggattactttactcccatctattgtttctctctctaacaatggccctactgaggctgagttagttgccatgattctaaggtggcttccagaggatatcactattcataatgaagatttggagggtgataggcggagatctctgttgcgcggccttactgagtcactgtcacaaattctgcctctgttgtattctctacttgagaaacattttggtgctgctttaagtgagcatgcgaagcagcaaatggatttggctaaacaacatgcagggacggtgactgcagttctaaatgctgtcaatgcatatgctgaatgggttcctgtgacagatctagccaaatatggtttaattcacggatgtgggtccttgctttcttacagcgattttcgcctccacgcttgtgagttttttaaagtgatatgtcagaggaaaagacctgtggatgtggcagttgctgagtatgatgctgcaatgtgcaacatattccaggtgttgatgaacatttcacaacaatttttgaccagatctggcatgcaacccagttctattgatgagagcgaatatgagtttgcatcatgtgtttgtgagacaatggttgctctaggatcttcaaacatgcaatgcatactagccgatggagccaggactttccagttcttacaacaatcaaatgaaactttttggctggtgataagttatattggcatatctgaggagtttggctatcctagaatagttgattcctggctgtcgggcaaggcaaggatgctggagtattaccaacactacaaaatcacacttcatttccagtctctattattttggctggtggtattgagagaaccatcgaaatctaagtctattgcacgtgtttctggtgataattctgctgctggtaattctgcatctactggtgacttatcaacagaaaagaagaaaggggtatcggtatttgtcactgatgaaatatacagtacaattttggatgtttctttcaagagaatgctgaagaacaatggaagtgcaacttctgggttgttagaaatatggagtgaagagcttgaggggaagagcgacttctgcaactaccgcaccaaattgttggatctcattaaagtcattgcttctcaaagatctgtgattgctgcagcaattgtagttcagagaataaatgttgtctttggagatgctaatcaagcaactaagtccccacaggatcttgatgcaatggaaggggctcaactggggcttgaagcagttgtcaatgctattttcgatggctcagttgattgtgggaaaactgatttggatacgaaatcccaactgcacaagatttttgaaggcttacttcaacagcttctttctttaaagtggacagaacctaaccttgcagttattcatggtcattatttggatgctttgggccctttcttgaagcatcatccagatgcagttgccagtgttgttaataagctttttgaactgttgacgtctctcccaatcacatttcaggatccatcaaacaattctcgcctagcaaggttacagatctgctcatcattcattcgtatatcgagagctgctgataaagcacttctgcctcacatgaagaacattgctgataccatggcttaccttcaaggagagggtcgcttactacgtggtgaacataatcatttatgtgaagcgtttcttgtgatgtcatcctctgctgggattcaacagcaacaagaagttcttgcttggttacttgaacctcttaataaaatgtggactcaagtggaatggcaaactgcatacttgtctgatccttctggtttgacaaacatgtttgctgatagccaattcatgtggtcaatttatcacacagttacattctttgaaaaggcactcaagagaagtggaaccaaaaagtcttcagcaactccacaagcacccaccacaacagtacctggttatctgcatccgatgtcttcacatctagcatggattgtgccccctctcttgaggctgctgcgatgcatacatgtcctttggtctgagccatttgcccagtctcagacggccgaaatcaaagcagcaaaaagcatgactgttgcagagcaggctagccttctaggagagacaggtaaacttaccaaaggtcaggttgctccagctgatggtttgctggatgttcaaagagatggagaatctaaagaaaacaatataaaaaactggttgcgtgggatccgagacagcgggtacaatgttttaggactagcagctactcttggggaagcattctttcgatgcatagagggttcttctgtcacccttgctattatggagaatgtgcaagttatggagtttcggcatctgcgccaacttatccaccttgttattattccatttgttaaatattgccctgccgatttatggctgtggctagtgaaccttttgcagccgttatttgtccactgtcagcaagctcttaattattcatggtccagtcttcttcatgagggtcgggctaaggttcctgacagcattggtaatctttctgggtcagaactgaaggtagaggtaatggaagaaaagttgctacgtgacttgactcgtgaagtatgttctgtcctttgggctttatcatcaccaggcttaaataatggacttccatccttggaacaacttggaccttccaaccggatggattctgttttgaagaatctggagtcctttgcttcaagttctctaactggatttcagacgagtctcttcagcaagcaattcggacaatgcctgagccatggtgagagtatccgaactgtgaagcagccttgcacgaagggaatcgaattcag

SEQ ID NO: 15259 - DNA, 520 bp, Zea Mays
gtaaccgcccacttccccaaaacctgccacgcttgaacggctctcaatcccaaccctaacagcaccgtctctcggatctgatctgatctgatcctccaattcgttcgtccacgtctcgccatggaggacgaggaacttgttgatcagaagaaatatcttgaggaacgatgcaagccgcaatgtgtaaaatcactttacgaatatgagaaatgcgtcaagagagttgagaatgatgatactggtcacaaacactgcactgggcaatactttgattactggtcatgcatcgacaaatgtgtagcatcaaagctctttaagaagctcaaatgatttgtgcgatgtgatgcgacttctgacaaagtgaatcgaatttgcataccttacacctttggaaagtagcactggaaatttgacttctcttcaggatgtgtttggttcaagtgtgtggatgtgtttggttcaagtgtgtgagaaaaaaactgaaagttgtttgatttaaactattgtaagttatctattg

SEQ ID NO: 15260 - DNA, 1075 bp, Zea Mays
aaaagttgtaagatattgactgttataattagtgcacgaccaaagcttcagaatggcacacttccaaatggagatgcttcgaattcgaagagcaagcttacttcaacacacgatgtattgagaggtttggttgattggctctgttcacagctgaggaatcctacacacccgagctgctctattcctacttctatccattgcctctccactttgctaagagaaccatatgttaggacattatttgttcaagctgatggcatcaagctgctcattcccttaatttccccagcttccacacaacagtcaattcagctcctttatgaaacttgcctctgcatctggcttttatccttttatgatgctgcagttgattatttgtccaccacaagggttatgccaagacttgtagaggttgtcaagggctctactaaagagaaggtggtcagagttgttgtgttgtccttccgcaatttgctggcaaagggtgcatttgctgcccagatgatcgatcttggattgccacaaatggtacaaaacttgaaagctcaagcatggactgatgaggatctgttagatgctctgaatcaactagaggtgggactcaaagaaaacctcaagaagttgagttcctttgataagtacaaacagcaagttcttcttggtcatctggactggtctccaatgcacaaagatccaagtttctggcgtgagaacactgaagtgaggaaaaatgcattgatctgtgtgcagaggctcttccttggcgcaaagtatgccagtttcctgcaggcttgagaaaagctgagtcttgtatttagatccagagaacccctggtcatttttcagaatggctgttgagaaagaaaaaccttgaaaattcttgttcagtgtatcctattgttatttgatttctgaagccgatgtataataaataatcagagtcatagaatgctcgatgtaataaagtgtccatgggcttgttgattcatttatgtaaattttgacttgtaacattagcaaacctcttttttgttattcttctgcctgacaacattgcctgattcgtgtgcattac

SEQ ID NO: 15261 - DNA, 1068 bp, Zea Mays
tttgtgatcaagaggatgaaacggcaagggcaactcctaccggtctggcagacttaagtggagtccctggaggcgctggccttcgttctggattcgacccatcaagaggcaatgcatacgatggctctcatgttgccaatttcagctcttcaaaaactgggacccatgatgcatcaaggggtgccactggctttgactctctcaagggttctgggtatgatgcttcaaaggcgcatgtaactggacaggcgtcagctacagcggctcatgggggcattgctggttactacgggtccaatcaggcagcacatgcgtggggacaatctgcatcgccctacggatctgtacaggtgccaccatcctacgcatctgggtcaaacacatcctatggcgcagcagcagcagcagcagtgcgtccctatggttcagctcaggcgcaaccatcatatggacaaacgcaggcaccatctgcgtatgggcacacacagctaccatcatcctacagtctagcacaggcgcagtctcccttcaccgctgcgcaggggtcctcgccctatgggttggctgcgcagcctccagcctatggatctgggcgagcaggctccaatgctggcagttacgaagctcctcaaggacgtaaataagttcgcgccaaatttgcatacttggccacttgcgaaagagagctttgttacaccgagtccaaatcctttctgttgctacttaaaccttgtttaactgtgatgtcagaggaacctgttacagccgataaaacgattctctgtaaacgtattatcgtgaccgatgatgccgatgcatttttttgttcagtagagtaggccatttgggaacgcagatttgagttgtgcgatattggttctatatctggcttcactggttggttcattcataacgttaaattatgtttgtttaagttcaaccgtaatcagataccacactaaaaattgctaacagcgtattcgatctttttattgctgatacatctttttattgtcgatactcgagtgtaaatcattatcatttaagttaccaaacagtatccaagtt

SEQ ID NO: 15262 - DNA, 164 bp, Zea Mays
attatcgctccttatctttttcacctttagctcaaattcattttgagctctccttaagaagctcttaagagttccttgggtctcagatttgtcctgcaaaaagaaaacccaagtgaagcgggaaaatcatcaacaatgacaagaccatacttacttcccccgat

SEQ ID NO: 15263 - DNA, 1371 bp, Zea Mays
caccggattccgccccgctggacacgccagtcgacacaaggcgttggtggctactcatacttgcttgagccactgtggtgggcaggaatggtaacaatgattgttggcgaaatcgctaactttgcagcttatgcatttgctcctgctatcttagtcactccacttggtgcacttagcataattatcagtgctgttcttgcccatataatgttgcgggagaaacttcatacatttggtatacttggctgtattctttgtgtggtcggttcgacaacaattgtgcttcatgcccctccagagcgtcaaattgagtctgtggcagaagtgtgggatcttgcgaccgaaccagcattcctgtgctatgcagctgttgtgcttgcagcagcttttgtgctcatattccattttgtccctgagtatggtcagacacatatcatggtatatgttggcatatgttctcttgtgggatctttatcggtcatgagtgtcaaagctcttgggatagccttgaagctgacattttctgggatgaaccagctagtctatccacaaacatgggtgttctcatccgttgtaaccttatgcattgtaacacagatgaactatctgaacaaggccctcgacacattcaacactgcagttgtttcacccatatattacacaatgtttacatccttgaccatcttggctagtgtaataatgttcaaggattgggatcgtcaaaatccaacacaaattgtaacggagatgtgcggcttcgtcacaatcctttctggaacttttcttcttcacaagacaaaggatatggtggatggtctcccaccaaatttaccgattcggcttcctaaacatgcggatgaggacggctacgctgctgaaggaattcctctcagatccgctgctgacggtattccgctcaggtcaccaagggctacagattcatttcgctcgtcatgatgccccgctgagatttgcatgcgcactcaaatcgtgtcacttgaaggctcatacccagcaggcgtcagtcctatatatacatgggaagggaatgataatcctccattcactcggttcgatacacaacgtaggttttagctgtaggattcaaaaggtaacagctcggctgcccccttgtaaattctgaggcattggtacagaattttgaggattatatcagttatactcgtccgggtaagatcaccaggatgaccaagagcccaagtttttgggttgtatacttgtatgtatattgcggtgagccatataggtcactatcttgaattgctgtattttttcaacacaactctcagagtacaggatgttgaacaagcacatcatgccactaaaccatttaccagttttgtctgagca

SEQ ID NO: 15264 - DNA, 1864 bp, Zea Mays
ctctgctctcgtcgccgcaaatcgggatcttcctgtgcgcgcgtgacgcgtcccttgagatcttgcgcgtggctctggcatcgatggtggcagttctggtactcggcctcgcctgtgcagaggcggagccacagtgcacgcggcgccgcccgcccgcgccgccgcggccgcacagcgtgacgatcaccgagttcggggccgttggtgacggcgtcaccctcaacaccgtgtccttccagaacgccgtcttctacctgcgctccttcgccgacaagggcggcgcgcagctgtacattcccaggggccggtggctcaccggcagtttcaatctcaccagccaccttaccctcttcctggagagtggcgctgtcatcgttggcacgcaggacgtttcacagtggcctgttgtcgaacctttgccatcatatggacgaggaatggaccttccaggttcgaggcatcgaagcttaataaacgggcagaatctagttgatgttgtaattacgggaaacaatggaacaatcgatggccagggttctacatggtggaactggtttcgttcgaataagttgaactatagtcgccctcatcttgtggagtttgtggactctgagcaaatcgtcatttcgaacataacatttttaaattcccctgcttggagtatacatccagtgtattgcagcaatgtagtggtccatagtgtcacaattcagacttcattggatgctccacttaatcatggaatcgttccagattcatgctcaaatatgtgcatcgaggacagcagtatcagtgttagccacgacgccatatcactaaaaagcgggtgggacaagcaaggcattgctttcgggaggccaacctcagacatccacataagcagactggatctgcagtcctcactgggcgccgctctcgcgttcgggagcgagatgtcgggcgggatctcggacatccatgcggaccgcctcctcatccactcttcgtccagaggcgtcttcttcaagaccgcgccgggacgcggaggctatatcagagacaccgtgatctcagacgtccagatggaagacgtcgacgtcgccatcgcattcaccggtgactggccaagccacccagatgaccagttcgacccggccgcgctcccggtggtcagccacatcaccctgaagaacatgactggaacaagaatctcggtcgctggcgttttgtcaggaatcgccggcgacccgttcaccgacatctgcctctccaacatcaacttctcactggccgattcggccagtcccacctcccactggtcttgctccaacgtctccggatactccgagctggtcttccccgagccttgcctggatctgcagacccaatcctcagacgcttccgtctgctccaccctccctagcttccacgccgccgccattgcagcagcgtaaatgcacagagagtacaaagtgtccatcctttttcctgttcccggtcccctgtacacttcagaggatctctcaagccgccttttcctcccccgacaattctttgaagctataggcgcgcccctgtcgttgaagaaaagaatcgttcaccgtttttctccggccgtcggcttcgagggctcagctgcatcgcctttcttgcgggaggcaagcctggcggcggacggtcgacatcgagctgttaatttgcttgtacagttatgatttcttcattcaatctgtaagaaggaatttttgtggtagtagagggttgagtcgagtccagagagttgcttcatacgattgtcgatttggtgaataaaacacatgatgaattcatgatccagtggctctgtatacatcctgtcatccttgtgggtacatccatccatgat

SEQ ID NO: 15265 - DNA, 1108 bp, Zea Mays
gagcagtcccttgaaccccagtcaacctggcactggcagccctccccaaccttgcccgcgtctgcacagtccttggccgccgcagcacacaccgcactcgcacacctgcaagcctgcaactcatcgcccccccgccgccacgcaagtgcgcccaggcctcagcgaaatgggcgcgcaggaggcggcagtggaggatgtgctgcgcgccgccgccgccgaggtgtcaacctcctcggcgaagcgccgcttccgcctcttccgccacaccctacctcttatcatcgcgaaggtcatagaatcaccatcagatactgcattgttagtcgatatcattttccagacattgccaatatacgacgaccgggcatcacgaaaagcagtagatgatatggttattcaggctcttggtgaacccaccttcatgaagccctttgctgcctttcttgtacaatctatggaaaagaatctaaaggttataaacccccttacaagcttcaagcttctcagatggtcacactatcttctgaaatggagtcaatttgccacactttcaaaagttgcttttaccagactggccagcgcacaagcagtcttatgtcaggtccttatggacgggtccttccgtcggcgccgaacttgcaaacagttattcattcatcttttatctgagcctagtggaatatataagatgtacatggaggagctcaaagatttaaggatttccatgagagattctcctgcatttttgaatctaatactggattttaccattagttctccatcattatccactgagtacaagtcagtgttccttgatttgtatgtcaaaaccatcttgagttcaaaagaccgggcaccaaaagcagccactgaagcttttaagcctcttctcttggagattgggcatgaggattttaagaatactgttataccatcatgcataaagatgctgaaaagaaatcctgaaatcatactacagtctattggatatcttcttaggacggtccgtttagacctgagcaagtatttcatggagttcatgccaattgttctgcatcaggcttgtcattcagatgaagaaaggaggattgatgcttgagtattatag

SEQ ID NO: 15266 - DNA, 2472 bp, Zea Mays
gtctgaatcctatgtcggtagtcgtttgattgatctttttattggaacagcacatatacaaccaccagcaagccaatcatcagatggtctgcctgacatccgtcctgctttcagacatgaaatgagaacaatggtgaaagaacagcagaagagtagtcgcagatatggtgtgatcaagtgtgatccactggtccggcaaggcttggatagaacagcaaagcacatggtcattccgtacatgcctatgttgattcccccaatctgttggacaggatatgacaaaggagcacacctctttttaccatcatatgtaatgcgcacccatggtgctcggcaacagagggacgctgttaaaagagctccaagggaacagatgcaatttgtttttgaggccttgaatactcttgggagcacgaagtggagggttaacaaaagagttcttagcattgttgacagaatctggtcaaatggtggccggcttgctgacttggttgatcgtactgatgttcctgtaccggagaagcctgacactgaagatgaaaccttgctaaagaactggaaatggcacttgagggcagccaagaagaagaacagtgaaaggcattctcagagatgtgatgttgaactcaaacttgctgttgctagaaaaatgaaggatgaagagggattttactatccacacaaccttgattttagaggtcgggcttatccaatgcacccttatctgaaccatttgggttcagatctttgtcgaggggttctagagtttgctgaaggtcggccacttggcaagtcaggattgcgttggctgaagatacaccttgcaaatttgtatgctgctggtgttgataagttgtcatatgatggccggattgcatttgctgagaatcatttggaggaaatatttgattctgctgataggcctttagaaggcagacgatggtggcttggggctgaagatccattccagtgcctggcagtatgcatgaatctcactgaagctttaagaagctcgtctccagaaacaacaatctcacatattcctgtgcaccaggatggctcttgtaatggtctgcaacactatgcggcacttggaaaggataagttgggagccattgctgttaacttagtcgctggagaaaagcctgcagatgtttacaccggaatagctaacagggtgatggaaattatgaggatggatgcacaaaaagatccttctgtagaacctgatgcagctcgtgctcgtctgatagttgaccaggtggacagaaaattggtgaagcaaactgtgatgacatctgtgtatggtgtcacatatattggagcacgtgaacaaataagaagaagactaaaggagaggggggtcattcctaatgactccgaactgtttggtgcatcatgctatgctgctaaggttactcttacagcacttggtgagatgtttcaagctgcccgtagtatcatgaactggcttggtgactgtgccaaggtaattgcttgtgaaaatgaaccagtgagatggacgactcctcttgggctcccagttgtacaaccatatcgcaaacttgggaggcatcttattaaaacgtcattgcaggttttgacccttcagcgggagacggataaggttatggtgaagcggcagaggacagctttccctccaaactttgtgcattctcttgatggttctcatatgatgatgactgctgttgcttgcaaaaggcaaggtctgaattttgcaggagttcatgattcatattggacccatgccagtgatgttgatacaatgaataaaatactccgggaaaagtttgtggaactctatgatacacctattctggaaaatctgttggagagctttgagaaatctttccctaaattaaaattcccaccgttgccggagaggggagacttcgatatgaaggaagtccttgagtctacgtattttttcaactagcacaatcaatgttaacagttgcattatacacgctgctgcccggacatatctgagttctgagtgtagatctaccaactcgaatgatgaaagctaggtcatacatgagcataacccgaagagtggctttgcagaagttatcagaagctaagttggtactctgagcattcacaaatgcatcggcatcatttatcgcgttgaagttggcaatgaggtttgctaaataaaagtgggaaccatatcaaagttaaacgagaatccctgtaaatgtaattatgtaatttttttttgtctttagtgtttttattttccttgatcttggtactgtcgagagaaattcggctgaccggtagtttgtcggctggtgctgagtagagattatttcatactttgtagtttaacaatataatttagtaataaagtgatatactagtatttttctcgttgttttagctctgcataaagtttgaaagcttttttttttctcttcaagttaaaagaatggaaactacctgtaa

SEQ ID NO: 15267 - DNA, 415 bp, Zea Mays
gtctcccgtcccgtccagcacatagtttcttgttattggaaaagtccagcgtgggaacactgatcctcctctacttcacgctatccatgagcagggcggactccagtagcggcggcggcggcggcagcggcggcagcgacgcccggtgaaacgccagccgtctagagcgagggggcgtttggcctgatctgagaatttccagatctgcaaagatttacaagaacaccgtggtccaagcatatagaagaaaaggctgtggtgctgcgggcctatctcatggatgaatatagagcgagccaacgacagcgaagaagtcgagccggatgtggatttgatggagaagtttgtgatggtagacatccttgttccttgttgtattctctcactttttttttctgattttctaaaaaatagg

SEQ ID NO: 15268 - DNA, 1306 bp, Zea Mays
cttctccacagcattcggcggcggccagcgcccggacttcggcagttcctgctccagccgttcctttacatacagaatgggttccagaagatggacaagatcaaggactccagcaggcagtccaagcagctggaggatctcacggccaagatgagagagtgcaagcgcttgatcaaagagtttgaccgtatactcaaggatgaggagaaaaagaacacccctgatgtcaacaagcagctcaatgacaagaagcagttcatgatcaaagaactcaactcctatgtgaccttaaggaaaacgtaccagagcagccttggtaataagaggatcgaactattcgatacgggtaatgaccaggtggctgagggaactccagttcaaatggcatcagaaatgtcaaatcaagaactcattagcaccggaaggaaacaaatggaccaaactgatcaagctattgagcgctcaaaaatggttgtagcacaaactgttgaagttggagctcagactgctgcaactctgacacagcaaacggaacaaatgaagaggataggcaatgagctagattctgtccacttttcactgaagaaggctagtcaaatggtgaaagagattggccgtcaggttgctactgacaaatgcattatggcgttcctgtttctgattgtctgtggtgtcattgcaataattgttgttaagattgtcaacccgcataacaagaacatcagagacattccgggcctagcacctcccgccatgaacaggaagctgctgtccatcgacgctgcaggactctgagcgttgtgaatggctgcctcccgcagcacagcgcaacgcagcgcgtcagagttctcttatgagccacgatacatggcttcgcgattcttttgtgcttgtagtttacgtccgcccattctttccctattgcattggtgagtagtagcctcaggtttgtagcgggactcttgttgtttattgcttgcgagcccatagctttctggttgtttgtgtatatgcggtagtgatgtgaatgtgagagtcgagtggagattcttcatggttcgttcttatgagttgtgactggtttgtgagcttgtggtgaaaggttcgcagcttgcttggcatgcgtctcctctgttcctgccgtgctgctctgcagtcgatacaagaaaagataaaactggtaggttgcatcggggtttctgatggcaacgaacccagacacgccaggaccaacgttgatcaattatagacgctagcaatctgcaaaaggcgccccggcaacagtcacaggtgaatttcagcttct

SEQ ID NO: 15269 - DNA, 90 bp, Zea Mays
agaggcgtgcggagaacccagatctataccttgaagatcttcgggcccgatattcagaactttcagagaaatttgatcagaggaagcgac

SEQ ID NO: 15270 - DNA, 702 bp, Zea Mays
tgaacattggcaggtagcttatgtgaatgtcagatcacataccactttttccattggaagaaaggaacaccttttgctgatgaccagggaatgtacaacacattgacttggtgggaacaaatggacaatggcaaacagcttactcgtaataggaagttcctcattgttgttcctgttgtcctgtatctgatagctttgcacaccacagactaccaacaacctatgctcttcctcaatacccttgccgtcagcgtgcttgtggtcgccaaactaccgaatatgcacaaggtcaggatttttggaataaatgctgagagctaaacagcgtcatccttcaccagacattttacctatatgctttttcagaacggtctgtatgttccccttctagtgctttagttgggctcattcatcagagtaccatagtttaaaagttgttagcagatgggccttggtcgttgtatagagagatgctcagaggctggactggacatgtcgctgctgtacatctgatgtgcacagattctgtacacccttaatgttgctatatggtttgttgcgagcatctgtcagttgctatatatgtatgtatagtatcattcttgcagagcaatgtttcctcagctaccataatactagtaccaaaatagctccacagtactggctgcgcgtatggcaggggcaggtggtgatggattgagg

SEQ ID NO: 15271 - DNA, 2122 bp, Zea Mays
  misc_feature (2121)..(2122): n is a, c, g, or t
cgaatcgccttctcccagatctccagactccagatctctgctcctgcccccgcctgcctcttgccagcgacaaccccgccgcagcacgcggcggccgcggggagatgctccgcctacgggcgttccggccgacgagcgacaaagtcgtgaagatccagctccaccccactcacccctggctcgtcaccgcggacgccaacgaccgcgtctctgtctggaactgggagcaccgccaggtgatctatgagctgaaggcaggtggcgttgatgagcgtcgcttggttggagcgaagcttgagaaactcgctgagggagatgattcaaaaggaaagcccaccgaggctattcgagggggaagtgtaaagcaggtttccttttatgatgatgatgttcgcttttggcaacattggcgcaattgttctgctgctgctgaggccccaactgcagtcaatcagcaatcttccatgttcagtgcacctgcaccttcgacacgaggaagacactttgttgtcatttgttgtgagaacaaagtcatatttttggatttggtgactatgcggggccgcgatgttcctaagcaggagcttgacaataggtcacttctttgtatggagttcctatctagatcatcttctagcgatgctcctcttgttgcctttgggtcatctgatggcgtcatcagagttctttcgatgttgacatggaagcttgtgcggaggtatacaggtggacataaaggagcaatagcttgcttaatgacatacatgtctgcagctggtgaggtacatttagtttctggtggcaatgatggcctgctgatattatggagtgctgatcatatccatgactcacgcgagcttgtgcctaagattagcatgaaggcccatgatggaggtgtagttgcagttgaactttcaagggtgatggggagtgctccacagctcattacaataggggctgataaaactttagccatatgggatactgttactttcaaggaaataaggcgcattaagccagtgcctaaacttgcttgtcatagtgttgcatcgtggtgtcatccccgtgcaccaaaccttgatattctaacttgtgtcaaggactcccatatttgggccatagaacacccaacttattctgctttaacaagaccgctctgcgaactgtcatcacttgttcctccacaggttcttgcacagcataagaaactgagggtttactgcatggtggcacaccccttgcagccacatcttgttgctactggaactaatattggtgtcatattaagcgagtttgatccaagagcacttccagctattgctcctttaccaacaccaacaggcagcaaggaacattctgctgtttacatagttgaaagagaacttaagttactgaatttccaattgtcgaacacagcaaatccatcccttgggaatgctggtgttgcatctgatgcaggaagatcaaggaatgattcattggaacaactgatagtaaaccagagcaagaagcatatcagcactcctgctcctcacgattcctattcggtcctttctgtcagcagttctgggaagtatgttgcaattgtatggccagatattccctcttttgctgtgtgcaaagcaagtgattggtcagttgttgattcaggcacagggaagctttttgcctgggacacctgtcgagacagatatgctttagtagagagtgcattggccccaagaatgccacttgttgtgaaaggtggttcttctaaaaaggcaaaagaagcagcagcagctgcagctcaagcagcagctgctgcagctagtgctgcttctgccgccacagtgcaagtgcgtatcttattagatgatggaacagcacatgttctgcagagatcgattgatggtcgtagtgaaccggttattggactgcatggtggtgctttacttggtgtcacataccgcacatctcgtagaatcagtcctttgacagcaacagctatatcaactgttcaatcgatgcccttatcaggttttggtggaagtggatcatcttttgcatccgatgatccgttttcttctaaggaagggcctccacaaaatttccaattgtacagctgggagacctatcagcctnn

SEQ ID NO: 15272 - DNA, 2054 bp, Zea Mays
gtctagtagaagaaagatctccaaaaggaattcttgaaccgattggtgacagaccatggaagcattgatcttgaatggctaagagatgttcaaccagacaaagcaaaggacttccttctaagcattagagggcttggactcaaaagtgttgagtgtgttcgcctcttgacactacatcatatggcttttccagtggacacaaatgttggtcggatatgtgtgaggcttggatgggtgccacttcaaccactgccagagtctcttcagttgcacctcttggaaatgtatcccatgctggagcacatacagaagtacctctggcctcgactatgcaaactagatcaacgtacattgtatgagcttcactaccaaatgattacttttggaaaggttttctgcacaaaaagtaagcctaattgcaattcatgtccaatgagagctgaatgtaagcactttgctagtgcatttgcaagtgctaggcttgctcttcctgcacctgaagaaaaatgtttggttacattggaagatccaaatgttgtagagttttctcaccaaacatacataaactcagggagtgttggccaacttgagtggagtgcaaattatcctaaacatgctgtttctggtaatcatcagccaatcatcgaggaaccactgagcccagaatgtgaaactgaaaatatagaggcacatgagggtgcaattgaggatttcttttgtgaagaatctgatgaaattcctaccattaatcttaatatcgaggagttcacacaaaacttgaaggactatatgcaagcaaacaatgttgagattgaatatgctgacatgtcaaaggcattggttgccatcacgcctgatgctgcttccattccaactccaaagctcaagaatgtcaatcgtctgaggacagaacaccaagtttatgaactgccagattcacaccctcttctggaaggattcgaacagagagaaccagatgatccctgtccatatcttctttccatatggaccccaggtgaaactgcacaatcgatcgatgcccccaagacattctgtgattcaggggagacgggtagactatgtggaagttcaacatgctttagttgcaacaatatacgagaaatgcaggctcagaaagtcagaggaacacttttgataccatgccgaacagcaatgagaggaagcttcccacttaatgggacgtattttcaagttaatgaggtatttgctgaccattgctcaagtcaaaatccaattgatgtcccacgaagttggatttgggacctcccaagacgaactgtttactttggaacctcagttcctacaatattcagaggtttaacgactgaagagatacaacgatgcttttggagaggatttgtttgcgtgaggggctttgataggacagtgagggcaccaaggcccctttatgcaaggttgcattttcctgtcagcaaggttgttagaggcaaaaagcctggagcagcaagagcagaagaataatagtacattgaagaaatataggggtgctaaccagacgaggatggatagcccgaaatgagatgctgacccaataggtcgccaaatcacctccaaattctaacccaatgacttccatctgtaatgaatggcaataccttgaaaacctgtgatggagatgttttgtggcgacatgatctcttaaattagattccgtctttggtaacagcctagctgttcttgttgagtcgcatattctttattctgaagatcaatatagcaaatgggagaaaaaacatagtgcacagtcgagctgttctaattgtacctcttgtgagtggaatcagttgttgtacaacaggaagatggacctatctgtacaatggtcgtacatgttctttgatcatagtataaacaatgtaagcctcatcagccgttatttgattgtttcaaaacaaaggaaaagcattttcaattcatctgttcaaagactatttccttttccccccttctatcttgagatggaaactgactaattttttacttgtggggatctgacagtgaatatatcaaaa

SEQ ID NO: 15273 - DNA, 4301 bp, Zea Mays
caaacacaaaaataatgtgaaccatacatactccttcgagcacgttcccattgcgctttccctcgccatttcgcccccgccccccaatctctgcgtctctagctctcgggagaggcggctcgccgcgacatcgatcccgaccgggcaccggctcaccccggcccccagcgtagcagctcgccactagggctagcgctctgtccatggaggatgacgagtacgaggatgggatggacatgggctacggcgggcatcaccagcgcggcggcggccacgcggggtacggcgcggaggaggacgacgagatggggtatggcgaggggggtggggacggggacgagatggaggaggaggcggatggggacgccgagcagcaggaagatatcacgcaggacgacgcctgggccgtcatctccgcctacttcgaggagaagggcctcgtgcgccagcagctcgactccttcgatgagttcatccagaacaccatgcaagagattgtcgatgagtccgccgacatcgagatccggcccgagtcgcagcacaaccccggccgtcaggccgagtttgccgagactctgcacaagatcagctttggtcaaatctatctcagcaagccaatgatgactgaagccgatggagagacagctactttatttccaaaatcagcaaggctcaggaacctgacatactctgctccactgtatgttgatgtgtcatacagagtaatgaagaaaggacatgactgtgaggaagttacagagactgctgagtatccaaaagtgtttattgggaaggttccaatcatgttgcgttctagttactgcacactgtatcaacagtctgagaaggatctcactgaacttggggagtgtccttatgatcaaggtggttatttcattatcaatggaagcgaaaaggtccttattgcccaggagaagatgagcaccaaccatgtctatgtttttaagaagaggcagcctaacaaattcgcatatgtggctgaagtccgctccatggctgagaaccagaacagaccagccagcagcatgtttgtacggatgctttcacgagcaggagcaaaagggggatcatctggtcaatatatccgtgctactctgccttatattcgagcggacattcccattattattgtatttcgagcattaggatttgttgccgacaaggatatactggagcatatatgttatgacttttctgatacacaaatgatggaattgctacgtccatccctggaggaagcttttgtcattcaaaatcaacaggttgctctggactacattggaaagcgtggcgcaacagttggtgtcactcgagaaaagagaattaaatacgcaaaggaaatacttcagaaggaaatgttgcctcatgttggtgttggggaattctgtgaaactaagaaggcatactattttggtcgaagagctgaggatgaccgagatcattatggaaacaaacgactagatcttgctggtccactgcttggagggctgtttagaatgcttttcaggaagttaacaagggacgtgagatcttatgtgcaaaagtgtgtagataatggaaaggaagttaatttgcaatttgctataaaagcaaaaactattaccagtggtttgaagtactcccttgctactggaaactggggacaggctaaccaagctggaaccagagcaggggtttctcaggtgctcaatcgcctgacctatgcttctacactttcacatctccggaggcttaactctcccattgggcgtgaaggaaaattggcaaaaccccgccagttgcataattcgcattggggaatgatgtgtcctgctgaaacaccagaaggacaagcttgtggcttggtgaaaaatcttgccttgatggtatatatcactgttggttctgccgcaaatccaattttggaatttttggaggagtggggcacagaaaattttgaggagatatcaccagccgtcattccacaagctgctaaaatttttgtcaatggttgttgggttggaattcataggaaccctgacctgttggttaagactcttagacgtttaagaagacagattgatgtcaacactgaagttggtgtggtgcgtgatatccgtcttaaagaacttcgactctacacggattatggacgctgcagtcgtccattgtttattgttgagggccagaggctgctcatcaagaaggcgcatatccgagccttgcaacaaagggagactcctgatgaaggctggcatgaattggtctcaaaaggatatatagaatacatagacactgaagaagaggagactaccatgatctccatgaccataaatgaccttcaaaatgcaaggcacaacccagaggaggcttactctgaaacttacacgcattgtgagattcatccttcattgatacttggtgtttgtgcgtcgattataccttttcctgatcacaaccagtcacctcgtaatacatatcagtctgctatgggaaagcaagccatgggaatttatgtcaccaactaccaattaaggatggacacgttggcctacgttctatactacccacaaaagcctctagttactactcgtgctatggaacatttgcacttcagacagttaccagctggcattaatgcaattgttgctattgcttgttattctggatataatcaagaagattcagttattatgaatcaatcttccatagatcgtgggttctttcggtcactatttttccgctcttacagagacgaggaaaagaagatgggcacacttatcaaagaggaatttggtcgtccaaatagggaaaatactatgggaatgcgccatgggtcatatgataaactagatgatgatggccttgcaccacctggaacaagggtctcaggggaagatgtcattattgggaagacatctcctattccacaagatgacgctcaagggcaagcttctagatactcaaagcgtgaccatagtactgctctgcgtcacagtgaaagtggcatggtagatcaggttctgttaacaacaaatgcggatggtctaagatttgtcaaggttaggatgcgatctgttcgcataccacaaattggcgacaagtttagcagcaggcatggacaaaaaggaactgttgggatgacttacactcaagaggatatgccatggacaatcgaaggcattacacctgatattattgtgaatccacatgctattccatcccgtatgactattgggcagctgattgagtgtattatgggtaaagttgctgctcagatggggaaggaaggcgatgccactccattcacggatgtgactgtggataacatcagcaaagctcttcataaatgtaattatcaaatgcgtggatttgagacaatgtacaatggtcacactggaagaaaactgactgcgatgattttcctgggccccacatattaccaaagactcaagcacatggtggatgacaagatacattcgagaggacgtggtcctgtgcagatactcacccggcaaccagcagaggggcggtctcgtgatggaggtctccgctttggagaaatggaaagggattgtatgatcgcacatggagcagctttcttcctgaaggaaaggctgtttgaccagagtgacgcatacagagtccatgtatgcgagaaatgtggtctcatcgcaattgctaacctaaagaaaaactcgttcgaatgcaggggctgcaagaacaagactgacattgtccaagtacacataccctatgcttgtaagcttctgtttcaggagcttatggcaatggccattgctcccagaatgcttacccatgatatgaagacagggaaggatcagaagaagcgctgaacgtgtatcacgtgagatgtaaccagaactcatgccccgttgctatattcctggatcctggttcacacaatagtaccctgttgaggaactttgtggtcacttcttttctgatttggacttcggttcttcgcgatcgatggagggctgttactatctcttgatggattattatcctatctgtgctcgtgttgcctgaagatcagtgctagcagatcgtcgagttaattttgtacattaggaatgtgttgtaatgtattaatctgtgcgagtagaaagatttttgactaaaggtgtcaatttggaggtgtaactgtacgttaatactaaacgcgatgccattgcaatttcagttttattttgaaatacatggggttttagtggcatgtctctaaactatcacaatcttaatggcatggttctaattaatctttttcttcttataca

SEQ ID NO: 15274 - DNA, 1581 bp, Zea Mays
gtctcctttttcaacttcacagatggtgtacatagggtccaccttataagttggttaggatccctcgtacttccaaggagcttgttggagtttttccgcaacaggtgctatggaaggaataaacaaaataaagacaggctctctgaggaggactacccctatcgtgaagcagatgggacatgtaacaagaacaagctgaaaaagcgagttgtgactattgatggttacactgatgtaccttccaacaaagaagatttgttacttcaggctgttgcccagcaacctgttagtgtaggaatatgtggtagcgctagagcatttcagttatactaccaggtgcagatacataattagtttctcctgtcactaacatgtgttacagaacagtaaccatttattttacttcccttctaatgttttcttatgcagggtatctttgatggtccatgtccgacatctcttgatcatgctgtgttaatcgttggctatggttctgaaggtggcaaggattactggattgtgaaaaactcttggggtgaaagttggggaatgaagggctatatgcatatgcatcgaaacactggtgattccaagggtgtctgcggtataaacatgatggcatcatttcctaccaaaacaagcccgaatcctcctccttcaccaggcccaggtcctaccaaatgcagtctgctcacatactgtcctgagggatccacctgttgttgctcatggcgtgtcttgggcttttgcctttcctggagctgttgcgaactggacaatgcagtttgctgcaaggataaccggtactgctgccctcatgactatcctgtttgtgatacaggtcgcgggcagtgtctcaaggccagcggcaacttctctgctatagaaggaatcaggaggaaacagtctttctctaaagctccctcgtggactggctggctggagttgatggaccaatgagcgtataatcagacatggatagtagcttcatgcaagttgtgcgatccgtaggtcggtcattggccttgttccagtgccctgccacattcctgtacgcctactgcccgctgcgttgcaccgagatgcccttattttctctttattattgaaccctatggtgtaaagtttcacgattgtacatgtatgtcacacttgtattggcctatgcattagacgtctccattagtttacctatatgatcatctaaaatattgttttgcagtttttatactgtagagtgaagtttgaatataaaaatgaggatggtgctggatatagccttataggcgcgccctgcagattatttgccgcggttgagcttttgagggccaggccgcatatatattaatagaggactttgtgtaatgtttcatggctatatggtacagaaggatgcatctagcgcaggtcaatgtggtagtatcatacgctgttttggtacgacgagcaactaggaattcgttttcgtgtacacgttaaacatacttatattgtatcataaacaggcgagtaaggcgtaggcatagggcggcctagacatgttggtttttacaatgataattaattttagtgacttgggaa

SEQ ID NO: 15275 - DNA, 1166 bp, Zea Mays
tcggcctgtccgggcagccgctccgcctccacgaccccgcctccgccgccggcctcccggacatcgacaccttccgcggcaagctcgagcggctgcttcctcccgacgaccacgaccccggctggtcccgccgcttcgacgccgagctcggccccgtgcaccggtacttcggcccggacgcgccgctggacgtgcggcagcggatcgcgtacctgttcgcgatcctcgaccggtcgcccaggggcgtcggcgtcggcgtcggcgtcggcgagctggaggcctggctgcgctggcaggccgccgcccggctggacgccgtcacgcggagggagatggctccgcacgacacggaccgcgacggtgccgtcacgctgcgcgagttcttcgcagacaaaatggggtggtggatgcacaagtttgcgagcgcggacagagacggggatggctcgctcaacgccgtcgaattcaacgacttcctgcatcctgaagacagcagccaagagagcgtgatgctgtggctactcaaggacaagctaagcgagatggaccatgacggagacggcaggctaagccaggaggagttcgtcgctcaatctcacatcatcatctccggcgcgcgtcacgccgacgacggtggccatgcccatgaccttgagcgtgccgaagctgcgaagaagttcacagaactggacgccgacaaggacaactacttgacggtggaagaagcgcgctgcgtactgcagagcctcgtcacgggggagttctcctatgctacctcacatgccaagttcttgatgaaggtggtggcctcatcgaatcgaacgaagctgatgtgaaccatgacggcaaactgtcgctggaggagatgctagacgactacatatccttctacagcaccgtgtatatggatgatcattacgccagtgaaggtgaagtagatagtgattcccgcgacgagctatgagcggttaagccaggacaggacagcaagtcggaggttctttactttcaaatacactaggattttgcagccaaaggaaatgggaaatgtacaatcagctgcaaacatcaattttgttcatcgagaccagctgcctatctattctacagtttctttatataaaaaaagctaaacatataacataagggaatgcgtttttttttcc

SEQ ID NO: 15276 - DNA, 2909 bp, Zea Mays
cttcgatatttgttataattgttgagttaaattttaacagcatccataaacaagtaaacaacgactatgtgtgcaccagtgtctcctgtatcaacggggtggtccgtctggaggaggtaccgaggtcccgccgttcgagagacgagctacgcatttaagccggggaggtcggagcagtgagtgggagtagttcagggactgggagaggagaggaagcaggacctgggagacctcgcctcgtccgtcctcctgcctacttccttgcttttggtaggtgctgcttgttttatcttgaaatgggctctcatgatggcgaggatgaagagttgccacccccccctccggtgccaccagatgtgattcccattaaagctgaagatgctgtgggtgaatcaccagcaaaccatatattaaagccaaagagattactgatggacaggcctggtataggaagaaaagggcagccgacccagctctattcaaatcactttaaagtcgctgtgaagagtacagaagacgtcttctttcactactatgtaaacctgaagtatgaggatgatcgacccgttgatggtaaagggatcggcagaaaggtgattgataaactgcagcagacatatcgtgcagagctttctaacaaggactttgcatatgatggagaaaagagcctgtttacagttggtggtcttccacaaaaaaagaatgagttcaccgttgtcttggaggacgtatctactggaaagactgctgccaatgggagccctggaggtaatgacagtcctggaggtggtgataggaagagagtgaggaggccataccagacgaaaactttcaaagtggagataaattttgcagcagaggttcctatgagtgctattggtcaagtcattagaggcgaagaatctgagaactccctggaggcgcttcgtgttcttgatatcatactgaggcagcattccgcagaacaaggctgccttttggttaagcaatcatttttctacaacaacccttcatgctttgttgacttgggtggtggtgtgatgggttgtcgtggatttcattcaagcttccgtggcacacagagtggactttccctcaatgttgatgtctcaacaacaatgatcgtgaaacctggccctgttattgattttcttctttctaaccagaatgttaatgatcctagcagaattgattggcaaaaggccaagcgtgctctcaagggcttgaggattagaaccactcctgcaaattcagaattcaagatttttggtctcagcgagaggatctgcaaagaacaaacgtttccgctgaggcagagaaatggtagcaacggagattgtgataccattgaaataactgtctatgactactatgcaaagaaaggaatcgatctaaagtattctggtgatttcccctgtataaatacagggaaggcaaagcgcccaacatattttccaatcgagctatgctcgcttgttccgcttcaaagatacaccaaagctttgtctacgctacaaaggtcatcccttgtggagaagtctagacagaagcctgaagaaaggatgaccgttctaaatgatgcactgcaacgcagtaactacgattctgaccccatgttgagggcatgtggtgtttcagttgctccaaaatttacccaagttgaaggaaggatccttcaagccccaaagctgaaagccggcaatggtgatgatatcttttcacgaaatggacggtggaatttcactaataggaagttttatgaaacctgctctgtgaataagtgggcggtcgttaatttctctgcacgttgtgatgttcggaatcttatccgtgacctgatgaggaatgcatctgcaaagggaattcaaatggaggaaccttttgatgtgtttgaagagagtccctctatgaggcgtgcacctgtgtcaagaagggtggatgatatgtttgggcagataaaatcaaaacttcctggagctcctaggttcctcttgtgccttctccctgagaggaaaaattgtgaaatctatggtccttggaagagaaagtgcctggccgagtttggtattgtcacacagtgtctagctccattaagagtcaatgatccgtacctgcttaatttgctgatgaagatcaatgcaaagcttggtggtctgaactcgttgctgcaagttgaagcatcttcgtcaataccacatgtgtcgcaagtacccaccatcatcttaggtatggatgtttcacatggtcatccaggacaagatagaccttcggttgcagcggtggttagttctcgtcaatggcctcttatctctagatatagagcatcagtgcacacccaatctgccagactagaaatgatgtcctcgttgtttaagccgcggggtactgatgatgatggcctcatccgggaatcactgatcgacttctacactagctctggaaagcgaaaaccagaacacataattattttcagggatggagtcagtgaaagtcagtttacccaggtcatcaacattgagctggatcagatcatcgaggcatgtaagtttctggatgagaagtggtcacccaagttcactgtgattgttgctcaaaagaaccaccacaccaagttctttcagacggcatcaccagacaatgttcttcctggaactgtggtggatagtaaagtttgccatcctaagaacttcgacttctacatgtgtgcacatgctgggatgattggaacaacaaggccgacccactatcatgttctgcacgacgagataggtttcagtgccgacgagatgcaggagtttgttcattcgctctcttacgtgtaccagaggagcacgacagccatctcagtggttgctccagtgtgctacgcccacctcgctgcagcccaggtgaaaataagaccctcaaaa

SEQ ID NO: 15277 - DNA, 1454 bp, Zea Mays
catccgcccactgccaaacggccccacaagctcagcgcggcggcctcgtcgctgcataaagcccctacctaactccaaatctcgccagcgccaggcctcgccgagccggtggaaacctcgtgatctccgccgcctcgagccctccgcgcgcctcttccagagcaccatccactcttcggtggcgaggccgcggctccccgagacgggcaatgcagagcgcggctgccatcgggctcctacggccatgtgccgcgcggccgctcgccgcctacactagcccacgccgcggcgccggcgcgtgcagcggcggcacccagccgctcatcacgccccgcggcatccgcctctccgcccgccccggtctcgtgccggcctcgccgctggaggagaaggagaaccggagatgcagggccagtatgcacgcggcggcgtcggccggagaggaagctgggggagggctcgccaagacgctgcagctgggggcgcttttcgggctctggtacctcttcaacatctacttcaacatctacaacaagcaggttctgaaggttttgccataccctataaacatcacaacggtgcagtttgctgttggaagtgccattgctttgttcatgtggatcactggtatccataaaaggccaaagatttcgggtgcccagcttttcgctatccttcctctagctattgtccataccatgggcaatcttttcacaaacatgagccttggaaaggttgcagtgtcatttacacatactataaaggccatggaacctttcttctcagttctcctttcagcaattttccttggggagttgcctacgccatgggttgtgttgtctcttcttccgattgttggtggtgtagctttggcatcccttactgaggcctcctttaactgggctggattttggagtgcaatggcttcaaatgtaaccttccagtcaaggaatgtgctaagcaagaaacttatggtgaagaaagaggaatctctcgacaacattaacctattctcgatcattacagtcatgtcattcttcctgttggccccagtaaccttacttacagaaggtgttaaagttagtccagcagtgttgcagtctgctggtttgaacttgaaacaggtatacacaaggtcattgattgctgcattctgcttccatgcataccaacaggtatcatacatgatcctcgccagggtatccccagtcacacattcagtgggcaattgcgtcaagcgtgtggtggtcattgtgacctctgttctgttcttcaggacccctgtttctcccatcaactctcttggtaccgggatcgctcttgctggagttttcctatactcgcaattgaagagacttaagcccaagcccaagactgcttgatcatatacatttattcgcacggaacataaattgcgaggttccaatggacttagagctctggcgatgtgcgac

SEQ ID NO: 15278 - DNA, 1590 bp, Zea Mays
ctactcttatgaaagtttagaggttgcagggaactttacatatggagtcatggcactttctgctgctacttacatgttctggagtattttgggttctcaacttgtacctgctgctatccaacatggaggtaattgcttgtccttgtgctcttgggcttgccactcccactgctgtactggttggcacttcattaggtgcaacaagaggacttcttttacgtggtggggatgttttggagaagttctctgatgttgatgccgttgtgtttgacaagactggaactttaacaattggtagacctgtgataactaaagtaataccttctagaggcatgggcgatgcgaatacaaaggatttgggggccaaccagtgggcagaggctgacattctgagttttgctgctggagtggaatcaaatacaaaccacccgcttggaaaagccatcatggaagctgcaggggctgccaactgcgtcattatgaaggcaaatgatggatccttcatggaagaaccaggatctggtgctgtggctaccattggtgagaagcaggtttctgttggaacattagattggattagaaggcatggggtcattcacaaccccttcccagaagcagagcattttggccagtctgttgcatatgtagcagtgaatggtgctctggctggtcttatttgttttgaggataagctcaggggagattctcgtcaagttatcgagacactatctaaacaaggaattagtgtatatatgttatctggggacaaggaaagtgctgctatgaatgtggcttcagttgtcggtatccaggcagacaaggttcttgctgaagttaaaccacatgagaaaaagaagttcatatctgaactccagaaagagcacaaggtagtcgccatggttggtgacggcattaatgatgccgcagcactagcttcagctgatgttggaatcgcaatgggtggaggtgttggggcagctagtgatgtatcttcagttgtacttatgggcaacaggttatcccagcttatcgatgctttagagttgagtaaagagaccatgaagacggtgaagcaaaatctttggtgggctttcctgtataacattgttggactacccattgctgctggagcattgcttccagctacggggacgatactgacaccatcaatagctggagctctgatgggttttagttcggtcggtgtgatggccaactcgttgcttttgagggtgaggctgagctcaaggcggaagcgagaaccactgaaagccatctctgatgaggttgagaaaaattactcatcgaaatggagtacctgagtagttcggatcttagaccatgttcacgttcactcattcatatgatttggacacacgcatcaaaggcagttgtcagttgaacaaatgaaacagatgtagtatgcaattgctgaggtcagtcagttcctgtggtttggtagatcttcatggtgtgctataatataataccccctctattccaatttataaattttttgacttttttttaccaagtttgattagcttgtcttatttattttttttcgaaaaaatagaaatttcacttaaa

SEQ ID NO: 15279 - DNA, 1391 bp, Zea Mays
  misc_feature (1390)..(1391): n is a, c, g, or t
cggggtcagagaaccggtggacaagaaacctctccacccacccacctccgccgctgcagaatagaaattgcggcattgcctccggcttgagcagtaattgacttgacctcacttcccctgtggggaggctttaattttcttccgatcgatcatagtatccgctgcggtgtgattgcctgcccccaccccattgcgcctgcgcctgcgcctcgcttcatccggtgcgctgcccgcctcactcccgtcgtcctcttcctcgtcctcgctctcgtcgcggagcggtgtggaggcgcgcgctccttgaaggcacggggcaagagcggaggaagatcatctgggtgttggagtcatccagaggcacaagctgaggaatggggcaaaaggactccaagccttcacatggatatggctactcttcttatgattacgggagtgcttcatcgggatacacctcgagaaacactgggaattcgtcctccagttatagcgtcaggtacgcgccttcttcggagaacagtgtacagccggagacacatgccaggttgcagaggaagtattccaagatcggtgatgactaccgttctttgagccaggtgactgaagctttggcacaggcaggccttgaatcttcaaatcttattgtaggcattgattttacaaagagcaatgaatggacaggtaaaatttccttcaatcgccgctgcctgcatgatattggaaacactccaaacccatatgagcaagctatatctattattggaaggacactttcagcatttgatgaagataatttgattccctgcttcggatttggtgacgcgtcaactcatgatcaggaggtattcagcttttacccagagaaccgcccatgcaatggatttgaagaggcgctagacagatacagagaaatcgttccaactcttcgattagcaggacctacatcttttgcgccgatgattgagacagcaattggaattgttgacagcactggtggtcaatatcatgttcttctgataatcgccgatggacaggttacccgaagtgtcgatacacaatctggacagttgagtccacaggagcgggatactattgatgcaatagtaagagcaagccagttccccctgtcaattgttcttgtcggggttggtgatggaccatgggacatgatgcaccagtttgatgacaatatacctgctcggtcatttgacaatttccagtttgtgaatttcacggagattatgtcgaagagcatagcagctgacagaaaggaggcagaatttgcattgtcagcgctgatggaaatccctacacagtacaaagcaacaattgatctccaactcttaggccgtcgccaaagaataaccccaagaattgctctgccaccaccaann

SEQ ID NO: 15280 - DNA, 736 bp, Zea Mays
agctcagagagtcagtaatagataagggtcatgcatggactacagactatggttgttcagataaggaagaagagttccagtggctcattaaatattctccccttcataatgtacggagaccttgggagcaaagctctggtaataactgccagtatccagcaaccatgttgttgacagctgatcatgacgatcgtgttgtgccattgcattcactgaagttattagcaactttgcagcatgtcctgtgtaccagcactgaggacagtccgcagacgaatccaataattggtcgcattgatcggaagtcagggcatggagctggcaggccaactcaaaaaatgattgacgaagctgcagacagatatagctttatggcaaaaatgttaggggcttcgtggactgaatagtgaattttgtccagcttagtgtggagatggtgagcaagattactctatgcagtcaaagtaaagtggctgtaaaagttatattgcttatgttttgctcttgcttggatgatcatccaccaaatagtatagtgtttatgcttcggtttgagataagggttcagggagcattgtcatgcttggcgttggtgcaccatttctttcatatatatcttttgattgttaaattttatacgttactacttcattgattctaaattataagatgttttggttttttcagatatattgtttttgttatgctatattgctatgtatactatatgtctaaa

SEQ ID NO: 15281 - DNA, 107 bp, Zea Mays
gatgaatcacattttatgaagaatggccaagcaaagaaaacggttgcttcacttcctgttttgcaggtttggtgcttcttatgaggaaaacacattttctttgttag

SEQ ID NO: 15282 - DNA, 1572 bp, Zea Mays
aggggctgtggtgaacaacttggaagatgcgcatgagcagatcgacactgccatctccacggcaatcaaggagagcaagcctgtttacattagcatcagctgcaacctcccttcgatcccacatcccaccttcagccgccatcccgtccctttcttcctctccccaaggctatcgaaccagatgaacctggaggctgcagtggaagccgccgcggctttcttgaacaaagccgtcaagccagtgcttgtaggtgggccaaagatgagggtgtccaaagcatgggaagccttggcagagctggcagatgcctgcggctatcccgttgccgtgatgccttctgcgaaggggctagtgccagtgcaccactctaggttcattggcacgtactggggtgcggtgagcactccattctgtgctgagatcgtcgagtctgccgatgcctacctatttgctggccccgtattcaacgactacagctcggttgggtactcgctgctcctcaagaaggagaaggccatcattgtccaaccagagcgggtggtggtcgggcatggacccgcgtttgggtgtgttctgatgaaggatttccttcatgcccttgcaacccgtctgaagaagaacactgtcgcgtatgagaactaccgtcgaatttatgtgcctccaggcgaaccactttcatctgaacctggcgagccgttgagagtgaacgtgctcttcaagcatattcaggcaatgctgtccggcgacatggctgtcatcgcagagactggggactcgtggtttaactgccagaagctgaagctaccggaaggatgtgggtacgaattccagatgcagtatggatcaattggctggtcagtgggcgcaactctaggatacgcacaggctgccaaggataaacgtgtcattgcctgcattggagacggcagctttcaggtgacggcacaagaagtgtcaacgatgctccggtgggggcagaacagcatcatcttcctgataaacaatggagggtacacaatcgaggtggagattcacgatggcccttataacgttatcaagaactggaactacaccggtctggtggaagcgttccacaatggcgagggcgcgtgctacacagcaaaggttcgaacagaggaggagctgacggaggcgctggaggcagctctaggacctaagaaggactgcttatgcttcatcgaggtcatcgtgcataaggatgacaccagcaaagcgcttctcgagtggggatctagggtttctgcggcgaatagccgtccacctaatcctcagtgaatacatcaggtctcccgaattgccctgtaaaccgatccgctttctggtgacgcccataacaagaagtctcggcgatgacatgctgccgatttctgaataaattgtccctgtaattcactgatgttgcaagtccttgttgtaaaactagagagccgcttggaggaatcatggacagtctaaactcgggtctgagtatatacaagctgattgagtcctagataaatacaatatggacttaaactagatttcagtctatttcattattggaacatcca

SEQ ID NO: 15283 - DNA, 1112 bp, Zea Mays
ttttgtactgagtggagtttgaaatagggagtgcgataggaggttttaaatagtttaattgatctacaagcttcagaacatgttcaagaatacatttcagtctgggttcctgtccattctttatagcctcgggaccaagccattgcagatatgggataaggaagttgtgaatgggcacattaaacgaccccaagatgaagatatccaatctaatgtacttgaaattgttggaacaaatgtacagtcaacttacatcacatgcccagctgatccttctgctactcttgggattaagcttccatttctggctattattgtgaaaaatcttaagaaatacttcacgtttgagatccaagttctggatgacaagaatgtccgacgtcgatttcgagcatcaaattttcaatctgtcacaagggtgaagccatatatctgcacgatgccgttgaaactcgacgatggctggaacaacatccagttgaaccttgctgatctgacaaaaagggcgtacggcacaaattacgtcgagacgctgcgggtgcaagttcatgcgaactgccggctccgcagaatctacttctctgaccgcctctactcggaggaggagctgccgcctgagttcaagctctaccttccaatccagaaatcataggatcccgagggcgtggagagactctggtgaccgggagacttatatcgtaccattgtgaggataacctagctgcacatctgcgccttcctgagatacagaaaaaaaatgtaccagaatgtttctgttagttttctgattgttgtgcgatgaatgattaggctgttctgttttcatagcaagggcgagtagccttagttggggctgttacccagtgacccctttgtgtgaacgagtagtcaatgttattagtccggaccctttggctactggtccttctggtccaaagcaaaacgtaccgttactgctcactgcctggtcatttaacgtgcttcttccatggttgtaccgtctctatgatagtatcatgtggccgctgatctattggatacatgttacgcgtgactcgcattaaaagcttcacttctctttagcgtcagccgtgccgagtgctgcagtccag

SEQ ID NO: 15284 - DNA, 387 bp, Zea Mays
ctgggctttgctaaattgttgatccagccttgtttgaataacgaagtggtgttcatcattggaccagagaaggaggtcaggaaagctgaggccatctttcgaggccgaatgctggagttctagagatgttaccctttgcgatacaggtttcaactgctttatattttgaacgtaaaaaggggaatatccaaaaggtgtatgcgggaccgtggatcccttgaccgtctgtgaatcatgaaaacaaaataaaggatttcaacttggcacttcgcgtttctggcctgttttcctcaacgcgtcaggatgcagaagcatgtttagatttcactctagcctccacctgtgcactaacatggtaacgatcgttgtaattgcggcgcattgatt

SEQ ID NO: 15285 - DNA, 3554 bp, Zea Mays
ctgttgtagatgataattgttaaccgagctgcaaatgctgcttggcatatgggtgagtgggaccatatggcagactatgtttctcgcctggatgatgcagatgaaaataagctccgtatgttgggtaacgcaacagctagtggtgacggaagcagtaatggtgctttcttccgggcagttcttttagttcgttacaaaaagtatgatgacgctcggatgtatgttgagcgagctcggcggtgtttagctacagaacttgcagcactggtacttgagagttatgagcgagcgtataataacatggtgcgtgttcaacaactttcagaactggaagaggtgattgattactgcactcttcccatggaaagcccgattgctgacggacggagggaacttattcgcaatatgtggaatgaacggattaaaggaacaaaacggaatgtcgaggtgtggcaagccctacttgctgtcagggagttggttcttccccctaacgaagacagagacacctggataaagttcgctgaactttgctggaagaacggtcgtattagtcaggctagatctacgttagtcaaacttttacagtttgatcctgaatcttcccctgaattgacactgtatcatgcacatccacaagtagctctggcttatctaaaataccagtatgcagttggtgatgagcttaaaaggagggatgcattttctaaactgcaagagttgtctgtgcaggttgctaccaccatgggcaatttacctggaacatcagcaaaccatggcaccatgtcaaatgctggagtaccactcattgctcgtgtctacttgacacttggtagctggaagaaggcactatcacctgcattagatgacgattccattcaagaaattttgatttcttaccataatgccacgctaagtgcaaaggactgggggaaggcctggcacatatgggctttgttcaacacagaagtcatgtcacgctatactttccgaggccgaccagatattgctggaaaatatgttgttgcagcagtaactgggtatttttattctattgcttgtgcatctactacgaaaggggtcgatgatagcttgcaggatatccttcgtctgttaactctttggttcaaccatggggatacctcagaagttcaaacagcgttgcagaaaggtttttcccttgtcaagattgagatgtggctggttgtgctgccccagataattgctaggattcattcgaacaatagagtagttagagaactgatacaatctttgctagttcgaattggaaaggggcatccacaggctttgatgtatcctctcttggttgcctgcaaatcaataagtatattgagacaacgtgcagcgcaggaggtcgttgataagatccgccagcacagtggaggtcttgttgaccaggcacaacttgtgtcgaaggaactgatacgggtagcaattttgtggcatgaaatgtggcatgaggcactcgaggaagctagcaggatgtattttggtgagcacaatatcgaaggaatgcttgctgtacttgagccattgcatgcaatgcttgagaggggggatgagacaattaaagaaaatgccttcattcaggcttatgggcatgaattactggaagctcatgaatgctgtttgaaatatcgggctacaggagaggatgctgagctaactaaggcctgggatttgtattaccatgttttcagaagaatcgacaaacagcttccaagtcttacgaccctcgatctgcactctgtttcgcctgagctactcaaatgtcgaaagttggaacttgctgtgccaggaacttatgctgcagattcaccacttgtgacgattgagtattttgttccccaattgatttgttataacgtccaaacaaaggccaagaaagctgacaattcatggaagtgatggcaatgattatgcattcttgcttaaaggccacgaagatttgcggcaagatgaacgagtaatgcagctttttggtttggtgaatactctcctagagaactcaaggaaaacatcagagaaggatttatcaatccaaagatatgctgttatacctttgtcacctaacagtggtttaattggatgggttccaaactgtgacacacttcatgctctgatccgtgaatacagagatgccaggaagattttcttgaatcaggagcacagacttatgttggcttttgcacccgattatgatcacttacccctcattgcaaaggtggaagtgtttcagcatgctttgcaaaatactgagggaaatgaccttgcgaaggttctgtggctgaagagtcgaacttcggaagtatggcttgagcgccgcacaaactacgctagaagcctggctgttatgagcatggttgggtatttgcttggtttaggagatcggcatccaagcaaccttatgttagatcgctatagtggaaaaatattacacatcgacttcggagattgctttgaggcttcaatgaatcgagaaaagttccctgaaaaagtaccattccgtttgactcgaatgcttgtgaaagctatggaagttagcggtattgagggtacattccgaacaacttgtgaaaatgtgatgcaagtccttcgcacaaacagagacagcgttatggccatgatggaggcatttgtacatgacccgttaatcaattggcgtctgttcaatttcaatgaggttcctcaagtgtcgaactatggtaatgttcatgctcacacggttgtcagtagtgaagaagcagtggctaaccgagagctcatgcaacctcagcgaggagcacgtgagagggaactgctacaggctgtcaatcaactcggtgatgccaatgaggttttgaatgagcgtgctgtagctgtgatggcacggatgagtgacaaactaacagggcgtgacttctcttctgggtcagctttggctggagcaggtagctctatccaacatggcagtgagcatttggcttcaggagatgcccgggatgcccaacctggtctctcagtgaaggttcaggttcagaagctcatactccaagcgacttcacacgaaaatttgtgccaaaactatgtcgggtggtgtccgttctggtgagctctcttggaaacagtagcagtttataacatgtaaatattgtgaataccgtgtgcatagaagtttcgtggtgacagtttgtatgtgcagctttgtaattagcagaacttcaagatgccttggaccatccttttgtcagtttcttagaccgtgtttagcagttcacccttatggccatccaaaacactgtttttgtactgtagattgtattgtttgtagattgtactgttcgcagggtggatttttgaatatgagtataagaatgtgtaagctgttgaagatagccttaggttttcttccgtgccacttgagggtttgttcgattagctctcaatttatgtggattgagtgagatcggattggtttaaatctcaagcaagttaaattttcttcttaatttttctaatctcatcaaatccatgtgtaacgggaataaccgaac

SEQ ID NO: 15286 - DNA, 1889 bp, Zea Mays
ctcctcccctacgctcccccgtcccctcctccctctcttttcaaactcactcggtcactccatatttcgttaccatttcccacctccggaaaatacttttttgcatttttatcccctcgttctcctttccccgcgctctctccctctctctccgatccaaactaccgacaaacgccgccacccgaattcgaaaccctaggcggccgctgtaaaacacgtgtggctgtagtgcctctcgttcgtcggagccggcccgcgtcggtggcggcagccggccatgtcgacggaggacgagaagctcctcaaggaggcgaagaagttgccgtgggacgagcggctgcagcataagaactggaaggtgaggaatgacgcaaacatcgacctcgccgccctatgcgactccatcaccgaccctaaggacgcccgcctccgcgagttcgggccgttgtttaagaagacggttgcagattccaatgcgccggtacaggagaaggcgctcgacgcccttctcgcgttccagcgagctgctgacgccgatgcatcaagatacgcgaaggaggtttgtgatgcaattgtggccaagtgcctcactggccgaccaaagactgtcgagaaagctcaagctgcattcctcctatgggtggaactggaggcagcagaggtcttccttgaatctatggagaaggctgtgaagaacaaagtggctaaagcagttgtacctgctattgatgtgatgtttcaagcactcagcgaatttggaactaaggtagtgccacccaaaaagattctgaagatgcttccggagctgtttgaccatccagaccagaatgtccgggcttcttctaagggtttgacactagagctttgtcggtggattggcaaagaccctgtaaagtctattttgttcgagaagatgagggatactatgaaaaaggagctggaagcagagttggcaaacgtgtctggatttgctaagccaactcgaaaaataagatctgaacaagagaaggaacttgaggaggaggctgtgccagagacaagtggggctaacacttctgaagaggctgtggcagatgcccctgtggagatcgatgaatacgaccttgttgatcctgtagacattttaaccccactagaaaagtctggattttgggacggtgtgaaagcaactaaatggtcagagagaagggatgctgtggcagagctaaccaagcttgcgtcagcaaaaaaaattgctcctggtgattttcatgaaatttgccggacactaaagaagctcatcacagatgttaatttggctgtttcggtggaagctactcaggcaatagggaatttagctagaggtttaagagcccatttttctggaaatgcccgaatgctcctttcggttttacttgaaaaattgaaagaaaaaaagccgacaatgacagaagcactatctcaaacacttcaagcgatgcacaagtctggctgttttacacttattgatgtgattgaagatgttcgagtggctgtaaaaaacaaggtgccccttgttcgttcctcaacgctgacctgggttgcattttgcattgaaacaagcaataaagcgactgtactaaagttgcacaaggaatatgttcctatctgcatggagtgcttgaatgatggtactccagaagtacgagatgcttctttttctgttttaactgccatagccaagatggttggtatgaaaccattggaacgatccctggagaaattagatgatgtgaggaaaaagaagttgtcagatatgataggttcttccagtgacactgttctgagttcagggacagctccaatcacaacatctggagcagccacatctgctcgtggggttgcagatagcatgtcaatgaagaattctg

SEQ ID NO: 15287 - DNA, 1203 bp, Zea Mays
ccggcgtgcgtcggcgactgcaaccagatcgacttcctccccttcacctgcgaccgctgcgaccatgtcttttgccttgatcaccgaagttatacatcacaccaatgcccaaatgcaaacatgaaagacgtcactgtcctcatctgcccactctgtgctaaaggtgttcgcctcaatccaagtgaagacccaaatatcacctgggatactcatgttaacactgattgtgatccatcaaattaccaaaaagtgatgaagaaaaagaaatgccctgttcctgggtgcagagagacactgacattttccaacaccatcagatgcaaagattgcaccagagaacactgcctaaagcacagatttgggcctgatcataagtgcccaggaccaagaaaagtggattctggctttccctttgtaagcatgctaaggagaagtcagaaagcggagacacgctcaaatagcagtaacaacaatggttcttcgtggtggagctccagtcttgtgaatgcagcaacgaatttcaaatcatcagccgaagctggaatgcagaagctgagcaccgtgactagccaagccttccagaaggctaaggatgggatcgccccaaatagcagcagcagcagtggtgaccttgtggagcaatgtgttcactgcccagcaagattttccaccgtgggggccttaattgaacatgttgagaaatcccaccagatcaactcacaaccaagtcatggccgagtgacgattgatgtttgcccaaaatgcagcaaggcgttccgggatcctgtgttgcttgtggagcatgttgagaaggagcatggaggaacgtcaagagtgtagtgtaaagcttcgtgtgtactcttaacctttgtaatgtgtaacttttcgttaccttttctcatttcatcaatttgattatactctacacttttgggctcaacatttgcccacaggacaagtatattacgctggattgaaggcaaagcagccattgtccatcattatagaaactgaagtaagatttgttaagaaaatgttaatatctgtcgcaactggtgaaaaaaaaggcagcagctgttcttggccttcgtatggtttgcctcgtttgttaagtgaagagttcatgtgtcagtgtgtcaccatttaccgttggtgttactaataacacgttcgggaatgcggacaattctaaccgcttggctg

SEQ ID NO: 15288 - DNA, 600 bp, Zea Mays
ctgggaccttctggttacagacgatgcaaacaaaactggagctgcccaagaagctataaatggtattagacgggctagcaaggccatgactgagcaagaagcccggcaaattcttggtatcagtgaaaattcgacgtgggaagagattgtccagaagtacgacacaatgtttgagaggaataacaaaaacggcagcttctatctccagtcaaaggttcatagagcgaaagaatgcctggaacctttatatcaaaagcctgatgtactgaactgagattttgcagacgccctagcttctgtttgaagcggtatgcctaattgatcgatttattagtgtgctcagagatcaacgttcagtttattgatcggtttgccaatgcgcccagagatcaacgttcagttttgagttatgtgttgggcgcatcaggttggttccttgtaatgccagaataatgtttaacaaacataccgaattttggctgattctcattggcaacgtctcagtcactggttttaattcatagtatgttatttcacactttgtcaaccaagcaacactttgaaactttttgtcgataataaatggttcggttcgttcat

SEQ ID NO: 15289 - DNA, 518 bp, Zea Mays
aaggtactctctctgggcacaaaagaatggaagtccaggtacggagagatcacagcctggagtggcatgcccaccgtgaaggttgctgtcaccgtcgatgcccctgccgtggtagagctgatgatgcagaggttgatgactgatgactagcagcaataccagttaattggcagcgccaccattaagacaatttccagttcttaagggagaaacaaatgttggaacatggaagtgcatttgttgttcaccagaaatttggtcgtcttgtcatcaaaacaccagaattgcattattgcacgctagatactcatttctttggttgttatgtgcgtgcttggtgtttatgtacagttttatgtgcttgataatgggcacatgaccagttcgacaatgtcatacagttatactatactagtacattgcttatgcttgtgagagaacagaattaagttaaatgaagagccacctgatgccagaaattggtccgccagttgttgcacgatgttattatatggccg

SEQ ID NO: 15290 - DNA, 520 bp, Zea Mays
gccctagggcgtggaccgtccggccgtcaggcagggaacccgagctcctgcaccaggtcgcggaccgtccggcccttcgcggacaggaggaagaggaagaagaagcggcagcgagcgaggatgccgtgcctgaacgtgtcgaccaacgtgaacctggagggggtggacacctccgccatcctcgccgaagcctccaagtccgtcgccaacatcatcggcaagcccgaggcctacgtgatggttgttctcaagggttcggtgcctatggcatttggaggtacccaggagccagcagcttacggtgagctggtttccatcggaggcctgaaccctgatgtgaacaagaagcttagtgctggcgtgtcagagtgcttgcttcctacctagcatagcatgcctgtgctatcttgttattggtattggcttgatatcagtctatattatcatttattatggttggaaccaacaaaaaaaaactgattttagtgctggtttttttttttggcaagaagaaaacgtg

SEQ ID NO: 15291 - DNA, 1015 bp, Zea Mays
acgggtgtgccactgctggactccttgacgacggtctagacgatggggcccatggcggccatgacgtcactctgggttattggtgatgagagtagtactggacagaagcaacctcctgttcttgtcatagtgttgcagtttataactgcaatggttgttatggacacatggcagtacttcatgcacagatacatgcacattaacaagtttctgtataaacacatccattctaagcaccatactcttgtagtcccttattcctttggagctctatacaaccatcctcttgagggccttattttggacaccattggtggtgcactctcattcctcgtctctggtatgactccacggacatccatattctttttctcctttgcaaccatcaaaactgtggatgatcattgtgggctgtggcttcctggtaatatcctccaggcgctgttcagcaataacagtgcttatcatgacattcaccatcagctctatggaaacaagtacaacttttcacaacccttctttgtgatgtgggacaagattctcggaacttacatgccctactctattgaacaacgaaaaggaggggggatcgaatcaaaaccagctaaactcgactgagctgaggataccaagactgattagtacatgcatgcatagtttctatttttttttttttgacttgtccaatactcatgccttgtggtactgctgactgcgcaaatgatgtacacaccctgtgtcataacttcatatagtgaggctgcttttgctctctacatttcttgttttgttttttagggtgttctatcttgtaacaagatacagtgagtaaagtattgtaatgtaccaaagaatactcaacaccacttggatttgtgttctgttgaattttctgttcttccatccgtcattttgttcggaagttgatattggcaatggccctctactcgtgcgtcctgttgttaaacaaagaaagttgatattggcacatggcacttcatatagcctttgctca

SEQ ID NO: 15292 - DNA, 928 bp, Zea Mays
ccatgtgcttatatattataacagacacagaaaattataaataaataaaaaaacatagaatctaaaatctggtcttacactctggaaatttggtaccttaccaccagcccttatagcatttaggggtcatgtgcatggtatagacccatcatggcacctgcttggcttaggataccaagacaagacagatattgagagtgtcaggagggctgcagtgatacattacaatggccagtgcaagccatggctagacattgcttttaagaacctacaaccattttggacaaatcatgtaaactactccaatgacttcgttagaaactgccatattttggagcctgagcgtgtcaaggagtgatttgcagcaaatgctggacatagcgagggagtatagtttatggttcgcttgttggctggagaggctgattgctgctgtataagtataataggtaatcaagaaagcaaccggcattcaatacaactgaccatcccctgcgaaaactggcattcaaatatctcaggagtcttcatctgtatcataggggaacacaattcttaccatctgtatcatactgttgcatcattcttttctatactgtaactgcggaaaaggagatctgggactgggctgacctttggtcgcagaataattcagaaggctagaagattgagtgattggttgatcaagacgaagaaaggaggcggatattgtgtggtggcaagtttatatgctttccatccatccatccatttaattctttttacactcgagtcattgaaattttgttctggtagttttgtgattgatttggtaggttggagatgattgtagtagagatgccattgtttgtggagtaacctacaggatattgttacaattgttgacatactatagatgtgcagataattcttacaagagtatttgcgc

SEQ ID NO: 15293 - DNA, 197 bp, Zea Mays
ctcacacccccataggagaagaacaggtggtacaagaggagcctcacagcgaggagttcgacttgatctaggtggcgtctcccagttgacttatcggcgccaaggatggattttagttcattttatattttattttgtaagacttccacgatgtaataagtactctgatgttattgtgacatttatctctatacact

SEQ ID NO: 15294 - DNA, 392 bp, Zea Mays
gttgagttcaccacagcaacaagaagaaaaggagccagatcagagaagaagtggtggcgatgccgccgagggcagtgccgtcgtcgtctcccttgcctcttgcactcgccgccgtcgccatagtcgtcgtagcacttgccgtttcctcctgttccgcgaccaccgatgctccaggcctgggagtgggagcgagagagatggtggcacgggacgaccccaagtgcgaggagatggtgccctgcaccttcaggcgctgcatccagtactgcgtcagcatcgggctgcagcccaaggggttctgcaactccaagcccaacatgcaggctgcaggttcttcaactgcatgcttccgaacatgcttctgaacttgtatcatcgtacttggaatgtga

SEQ ID NO: 15295 - DNA, 897 bp, Zea Mays
tgacaagtgttagcgaagatttgtgactgagggctaggagggttacaaagatgtccaacagggtggcaaactcaatcctgtctggtgttctgaaagtcactggctttgtcacaagcaccgtgttgaactccaaaccagcacaaaagtttttcaagttaatgcctggcgaagttattcttgcttcacttgatggatttgggaaaatatgggatgctgtggaagtgtctggcaaaaatgtgatgcagacatcctcagttgtgaccacttctgttgtaacacacaggtgaagccacacacaattacctccacgctacaggaaatgttctcggagctgcgtgggctgtattcaagattagaaaagccctcgaccctaagggtaatatgaagaagtcttttgtcagccaagcagcgcacgccgtagctaaagaatcagttgcgaggcaaaagaagaagtgaactggcctggtcggtggttccattgtacctgtaatttgatatgtttgatgttgcagtatgttagcaatataggaactaagttgctgtttggtttatatgtttgtaatgtaatagataacaaataacgtttgatcatgtttgtttaagtctaaccgtaatcggataccacactagaaattgttaccagcctattcaaatttgttaccgctggtaatcgaatgcaaatcattaccgttaccatttacgttacattttgggaaccaaacgacacctaggaagctaggtcttagtgagtttgtggtgtcgtcattagattttgatcttctttacttctttttttgggccgtgttcgtttttttaaacagtgatgttctacgtacgtgtaaaatccttacgtttggtctgttactaacaatttcttaattccacctgtgcattcca

SEQ ID NO: 15296 - DNA, 1069 bp, Zea Mays
cgaaaattgtctaggacatgagcagcgttgccaacggttcgcgtagagccagtccgcggatccacacgaaactgcacacgacgcaggcactcggcctgccgtgtgtccctttcggccttcataggcgcacttctccctcccgctctcgcgccgccgccctcgtgcgtttgagcgagatccatacatccccatcccattttgcacccggattggcttcttcttctactactgtacagcacttcttttgtgtggctgcaaagttctgtaattctagaggagcaagatggatattattatcatcatctcacttgtcattcttttggcactaggagctctctttgtgatcccaaagtcacaaaataaaggtaaatcaaagagaaacgacttaggagctggaacgacatctaggagctttacgacagaagagatctctaaacattccacaaggaaggactgttggatcattatcaaggacaaggtctatgatgtcactccttatgtagaggaacatccaggcggagatgccattctaaataatgctgggggtgattccacggagggcttttttgggccacagcatggcactagggtcttcgatatcatcgaggatttctgcatcggtcagttgaaggcttcatgatgatgacaggatagtttgtattgaatttattacgggacataaatttgtgagaagctacattttatctatgtttgagcattgcgaccatcgagcatatgaatgccagtataattgttccacaactgttattaggcctgccctgagctgtgatgtaggagatcgttttttttcccctctgatggggcaatgtgagctgttcgaccactggttgttgtgcttgcacatttctgttgttggacaagactgaaacgtttttttcccaattgttttgtttaaatcaggactcgtttctcatgatcacttctgaagggatgttatggttaagatgttgcaagtttgattttaacttggtcgttgaatgcgttttacgatttgttgctctctaaggttaggtggtgtgcaaacatgaaagtgaaacaatttcaagag

SEQ ID NO: 15297 - DNA, 1349 bp, Zea Mays
ccgacactggctcctccgacccctcgacgctaggggggcgcagctcgttggcaccggacctggagcatcaggttgcgaggcaattctcgctggaggacctggtgcaggccaccaagaacttcagcgacacgaacatcatcggcgcggggagcttcggattggtgtacatgggcctgcttctcgatggcactgttgtcgcgatcaagaggcgcgtgggggcagcgacgcaggtgtttgctgatgaggttaggttgctttcagagattcgtcaccgaaacattgtaactctcattggttactgtcaagaagggggtctacaaatgctggtgtatgagtacctgcccaatggcagtgtctgtggccatctgtatgataacaggaaaggctctgcaacacggcttgagttcaaacaaaggctctcaatagctattggggcagctaaaggtttgaatcatctgcacagtcttgatcctcctttgatacacaaggacttcaagacaaacaatgtgctggttgatgaaaatttcattgcaaaggtggctgatgctggacttgttaggttaattagaggatctgacgatgccggcccatcgcgtgggttcagtaacagtgtttaccaagatccagaggtacagtcgatgactcagttctctgaaagcagtgatgtttacagctttggagtttttcttttggagctaattactggcagggaagcagcttccttgatacctacagagtccagagaatatttggcacactggatggaagcgcatttcagttcaaatgaactgattgacccaagattagccggcaacttcactgcagaaggtatgaaggagcttgttggtctggccttccaatgcttgaacccatcatcaagacgccgaccgaggatgaggcttgttgcgactgaactagaccggattctagagacggagatgtccatgacaacgttcatgggcgacggaaccaccattgtcacgctcgggagtcaattgttctcgtcgtgaagcgacgttgggattgatttcatgtctgctatttgatgacatgatgattgtgtgtgagagcctaacaacagctattgtttctgccatgctgttcaggctctgcattgttatgaaatgccatgtatggtcatttttaagcttgtcatggttgataggtaggagtgagaagaaatagagctgtatgtatgtctcttttttcttctttttgttgcatgggagaagaattgtatgtaaatcttttagattgttaactatccttcaatgtatttgcagattgttcttcctttcggtgttttaatttctgaaagggctaacttgtgctaagttttttctgctgat

SEQ ID NO: 15298 - DNA, 956 bp, Zea Mays
gggaagtgccctaccaagttgatactgcattttcaatgtgctgatctaggtggctacattgctagaagttctgccaaatcgcttgacagctgatgtgttggagcagcttcgtctaagtaaacaagcattggttgagctgggatcacgagcaggtgacctcaagcagatgcttatcgatctcctagatgatcctcatgaaatcagacgaatatgcataatggggagaaattgcacacttgatagattgagtgatattgtggagtgcactgttcctttagagaagcagattgctgaagaggaagaggaagaaattgaaatgttattggaaaattatcttcaacgatgtgaatcatgccatggtcaagcagagagacttctgaattctgcaagagagatggaagactcgatttctgtgaacttaagttctcgacgacttgaagtaagtagagtggagctgctgcttcaagtgggaacattttgcgttgcaataggagcattaattgcaggaatatttggcatgaatcttaaatcatatctggaaacaaatgcgtgggcattttgggtgacgactggtggaatagtagttggagcagtagctggatttttcgtcgtatactcgtatctaagggctaggaagatattgtgaaccctgtaacatctgtatgttaggatattttttggagctgtaaataatgtcattagcacatccagtgagggatatgcgtgttccaaactctgcatggtttgtgtactctgtactcttgcgagaatgttgccaccctatgtatttgtagttgcccgttgagacggaaataggttagaactcagaaacaaatatttggtttccaccctagacgatttctcgtagctgcattttactatcctgtattgaaaattcgtgtcaacatctgtcttaatcttctaaattttggtaatgcactaaatgcttggggacc

SEQ ID NO: 15299 - DNA, 2588 bp, Zea Mays
aaatggttgctgcatgaacttaatatgactatagagagcagcccttgtggtgagtctaatgaaggggaagctgtcactttctcacagctgaacctcatcgatctggcaggttcagagagctcaagggcggaaacaactggagtacggcggaaagaaggatcttatatcaacaaaagcttgcttactcttggaacggtgatatcaaagctgactgatggaaaggctacacatattccatatcgagattcaaaattaacacgactacttcagtcatccctcagtggtcaaggacgtgtttcactgatttgcacattgacaccagcgtcaagtaattctgaagagacccataatacactaaaatttgcccaccgtgcgaagtgcattgagatccaagcatctcaaaacaaaattatagatgagaaatctctaataaagaagtatcaaactgagattcggagattaaaggaagagctagaacagctgaaaatgggtattattactggcacacccttgaaagataccgaggaagataatattatcctttggaagcaaaagctagaggatggtaacgtcaagctgcagtctcggctggaacaagaggaggaagctaaagctgctttgcttgcaaggatccagcgtttaacaaaacttatactggtttctactaaggcgaccccggcttctagattttctccacatcctggaccaagacgaagacattcttttggggaagaggagctggcataccttccgtatagaagacgagatataatgatagacaatgaaagcaatgaattacttcttcctgtcgaagggtttggtgtatcacttgaagattcttcaaaggaagaaaaaaagaataggaagggacttcttaactggttcaaacttcggaaacgtgatggagcttctattctgacaagttcagaaggtgataagtccagtttgactaaatcaaccgctccttcaacacctattggggaaagcgtcaactttcctgctgaaccaagaatatcaaattcattagctggtgagaatgtatcatctgatctgtttagcattggtcatggggaatttccttctggcagcattcacggcgaagaaactctttcggccagtggaaaaacgatggaccatgttgatttgttgagagaacagttgaaaattttgtcaggggaggttgcgtttaatacaagtgctcttaagcgcctcacagaggaagctggaagaagcccaaagaacgagaagattcagatggaaatgaagaagaagaccgatgaaattaaggggaagcagcaacagatagcatctttggagagagagatagctcatgcaacattaggaactcaaggaaaggtcgatacgttagagcattcaccgtcttatcatgaactacttgagcagctcaatgagaaatctttagaacttgaggtgaaggctgcagataatagagtgatacaagatcagctgaatgagaagataactgaatgcatggaattgcatgctgaagttactcatctcaaagaacagctgtcccaagctcttgaagctaaggatttggtgtcaaatagcatgatacataataatagagttaaccatgaagttgaacaccttgttgatcaagatgttccaagagagatctcttctgaaccacagcaaaaacagcagtccgttgaaatcaatgagctgaagcaaaaggtgtctgaactcatggaaatcaaagctcaacttgaggatcgcaatcaaaagctactggaggaaagtacatatgcaaaaggattggcttcagctgctggtgtcgaattgaaggcattgtcagaagaagtgaccaaactgatgaaccaaaatgagaagcttgcgaccgagttgtcatcgctgagaagtccaactccagctccacgcagattcaacaatggaccaagaggtactaggagggaaagcatgagtaggcgagaaccagctagcagacgagacacgaatgcaagccatgaaagggaaaaggctctagaggcattgcttatggagaaggagcaaaaggaagcagagctccaaaggaaagtcgaggagtcaaagcagaaggaagccttcctggaaagtgagcttgccaacatgtgggttctagtagcaaaactgaagaagtcccagggttatgaccatgaggatctggaggccaaacatgatggctcgtgacctcttcagtttagatatctatcggcttggcttgcgtgtgggttttctgtatgtaaggttttggtattcgttttttctcttagcatgaattagtgtctcattctgtatattctccgcgtgttaaatatgccagtagtgccttgcctgactgtgcctagagctttcgatggatgctagagcggcattttgggttcttcaggcacataatctggatttgaagaaacagtgagcaagtgtttggaaatctgacgggtttctgatgcccactcaaatatctaacatgtattagcctgcccatcctgctcaggataacaaatgtgaatatgccctgaagtgtgagctacattgtattagaacactttcgttttcaacatcttcaatactgcttattgtatgcc

SEQ ID NO: 15300 - DNA, 1255 bp, Zea Mays
cgtccacttcacaaatttgcagtagagagtccagtccagactccatcgagttggtctttggtcgtgcatcgtgctgaactgctgacgcttcgcgcgggtccgaggtcaggcagcagcagcacggagtagcaccagggcgaccgcccaggttatcgtcggccgccggcgacctgtaccccggcgaggagatgcatctgagcgcgaacgaggggatcgagggtctgcgattcgcggtgacgggcgggcagggcttcgtcggagctgccctcagcctcgagctgctccgccgcggtgcccgcgaggtccggtccctcgatctccgcgcctcctcctcctggtcccagcagctcctcgacgccggcgtccgaatcatccaaggggacataagaaagaaggatgatgtgcggagggctttccgtggagtggactgtgttttccaccttgcttcttatggcatgtcagggaaggagatggtgcagactgcgagatctgatgaggttaatataaatgggacctgcaatgtactggacgcttgccatgagcaaggtgtcagaaggcttgtgtatgtaagcacatacaatgtggtatttggaggaaagccgattgtcaacggaaatgaggcgttgccttattttccgattgaagaccatgttgatgcttatgggcgcagcaaatcagttgctgaacagctggtactgaagagtaacgggcggccagctaagagtgataaaagtagtcgtctttatacatgtgcaattcgccctgctgctatatatggaccaggtgaagagcgtcattttccaagaatcctgtcccttgcaaagttgggattagctttcttcaaaattggggacccaggtgtcaagacagattgggtttatatagataatctagttcttgctctgatattggcaagcatgggacttttagatgacattcctgacaggaagggaactcctgtagcagctggtcaggcgtatttcatatgcgatggatcaccatgcaatacttttgaatttatcatcaagcccctttttcaaagtttgggttattccgttcctcaagtggtgctggatacctccgttgcccttgccgtttcaagaatatttttattcatatctacactgttctacccatggcttgatagtaaatggatgcctcagcctctaattctccccgctgaagtttacaagttcttttcaagggatctctctactgaactactcctgactaggccagcagacttgcaaataac

SEQ ID NO: 15301 - DNA, 1101 bp, Zea Mays
tgatcattacttaatttgtgcggatgaatgtgtcatcattacatattacgtttccgtccgaaggtgaattcagtaaactgaaggatagtgggttgttacaaagaatcgggttgcaatatcactggagaaatcggaattacaagagttttgatgagtttctgatggatttgaagcagcctaaacggaagaatatcagacaagaacgtaaaaagattcctgcccaaaatttgcaaatgaagcgacttcgtggagacgaaataaagagcagacactgggacaccttctataaattctaccgtaacacaactgataatcattggggcagaccatacttgacaagggatttctttcacctcttgggagaaaagatgggggataatgtgatgcttatagttgctgaaaaagatgataaactagttgctggcgctcttaaccttattggaggtgatacactatttggccggttatggggatgcctgccagatgcttactttcccaatttgcattttgaagcttgctattatcaggcaattgaagcagccatagagttaaacctgagtaaggtggaggcaggtgctcagggagagcacaagatccagcgtggttacctcccagtgacaacttacagctgccactacttttcaaatcctggttttgcggcagctattggaaattatcttactcatgagacggctcaggttaagcatgctattaaggtccttcgtgattccggaccatacaaggaagacatactgaaagagttcgctgctcaacaagacgacgacctgtagaatacagaagggacttaaactatttgcatactgttttatagaactaacatcttctatgtagcaacagggatacaggtcgtccaaagtgttaccaaactacgaatcccacatttggacactgctaggactgtaaatatttaacattgtaacatcagtcttacggcgttgagttgggagctatagctatactcagttgtctcgctcttacttttccccaacagaaggacttgatgcttcctgtatattgcgctttgactttgattagatttataggaaaaaaattacataaatatctgcagctgtcattcag

SEQ ID NO: 15302 - DNA, 1505 bp, Zea Mays
cctcaacctggttcggtggtgtgattatctccctctaccaggcggttccgtagtaaacaactcggcccggcagtcgttcccagggcgagatcggatcgatcgagagcttcctaggcagacctggacctgcgctagacctcaaagactcgatcgcaccgcatcttctctctctgctcctcgttcgcttcgtcgccggcgaccccgccgccagcttccccttccgctggccgccctttgcctcgcccctgaggcgtcggtttccactgcataggagtggggcggcgatccgactggacctagggttgcgagaccccatagggtgaccctaggagcatccgcctccacgtgggtgaggcggaggagggaggatgtcgtcgctcagccgggagctggtcttcctcattctgcagttcctcgatgaggagaaattcaaagagaccgtccacaagcttgagcaggagtccggattctatttcaacatgaagtactttgaggacgaggtcgtcaatgggaattgggatgaggtggagcgctaccttggtggattcacaaaggtcgacgataaccgctactccatgaagatattctttgagatccgcaaacagaagtatctcgaggctcttgataagcatgatcggtcaaaggctgttgaaatcttggtcaaggaccttaaggtatttgcatcctttaatgaggagttgtttaaggagatcacacagcttctgaccttggagaactttagggaaaatgagcagctttctaagtatggcgatacaaaatctgcaagagcaataatgtttgttgagctgaagaagctgattgaagctaaccccttgttccgtgataagctacaatttcctagcctgaagaattctaggctgcggacacttattaaccagagcttaaactggcagcaccagctttgcaaaaatcccaggcctaatcctgacatcaagactctatttgttgatcattcatgtggacaaccaaatggtgcacgtgctccatcaccagcaaacaatccattactcggatctatgcccaaacctggaggtttccctccattgggtgcccatggaccttttcaaccttcaccaacacctgttccacctctggctgggtggatgtcaaaccctccagcagtaacacatcctgctgtgtctggtggtgccattggatttggcactcctacaaatcctgccgctttgttgaagcatcctagaacacccacaactgctaatcctggtatggattatccatcaggagattctgatcacatctccaagagaactagaccagttggcatgtctgaggagcaggtgaatcttccggtgaatatgctgcctgtgacttatccgcagagccataattaccaacaagatgatttccataaaactgttgcacggaccttgagccaaggatcaacaccgatgagcatggattttcatccacttcaacaaactcttcttcttgttggtaccaatgttggcgacattggattgtgg

SEQ ID NO: 15303 - DNA, 1488 bp, Zea Mays
ctgggcttgtccttccacccaggaccttgttagtttaggaactatattaaatttgcaaaacaactgctaagtcaaatgaggtggatctgtttggcccaaacttgatggacgatttaattgatgcatctgcagcaactccagctacagacaatgctgcagaaccacaggttgatctgtttgctgatgcagattttcaatcggcaaccgcaagtacagagacagctgcaaatacagatgtcaaggcatcttttcctgcagcatttccaccacaggctgggtttattccaccaccaagtgccgggacatcttctgaagtaaatacttccgtatccaagaaggcagctccggaaccttttgatccttttggcgctattcctttgaacaattttgatggacctgacccatttggtggcttcagctcaaatgctggatcatctaccgcagcagcacccacccacggttctactggaaatatcagcacatcgaaccagaaccttcatgctgcatccgactttgctgcctttgtatcaaacaacgagggagcagcgaaagacccatttgatctttcttcgagtgccaatgttggaaaaacacctttggcagctcccaagatcgacgcatctgatttcggtgcatttgtatctagcaccgaggaagcagccaaggaccctctcgatctttcttcgggtagcaaccttggaaagacaggccaagcacccgcggcagcctccaagcctagcgcaaagaaagacaattttcaggtcaagtccggcatatgggcagactcgctgagccggggattgattgatctgaacataactgcaccgaagaaggtgaacctagctgatattggcatcgtcggtggccttggcgatgggtccgatgagaaggccctgccctcttggaccatgggcgccggatccggcctaggaatgtctggtattccaccgtcaacacaacaagctggtggcatcgagagcttggccaactacaacaagcatcatttcggcttcaaataggcctcgatctttcatactggaaaatacccgtcatctgcggtttcctcctctgtcggcctgcttcttacacgtgctgccctattgatttaatcacttttttgtttttggttttggtgatcacattacatggtgtcgaccaatcttggccccgtcttgtcacacgtgtatgttatttgtcgggtttgtgggtaagcatgcaactacatacacatcacaccccctgtgttccagctcgatgataggtggtatgttggccatgcagtttgtgtaaattccgtggcctgccttttctacttgatacagtactctacgcagcgatttgcagtgcttgagtttatattcaataataagagaacctatgccctttatgtcttgaattgtggctgatgctgtttgatgtatcactgaagtggcaaagtgaggcggttttttatcaacggatgttgtaaatggagccatcacatcaccc

SEQ ID NO: 15304 - DNA, 2361 bp, Zea Mays
ttttttgggccagttccagctctggtctataataaatttttccaggcagtgtttagatccaggaattagggcaaaatacttcagtccacgactaatggaggctgtgatctggttcttggccagatgggttgcaacctatttagtgccacttgacgtgagtagaggaaaagtaagcagagaaattgataatgtgggtacaaatggatcccaacattccagaaaactgctaaacagttttgcttgggaaaataaccaaggagagcttgttcttgattttgttgttctcatttcaatgttagctcttactacctatcagggagaaaatgagttgcagacactgacatgccagaagctacttgctacagtcgttcgccggaaacacacatgcacttatcttgttcaactggattcatggcgtgatcttacaagagcttttgcaagtggacggtctttgctttcattgagtggacgtttacaaaggtctctagcagaaacacttgcctctgcagcttcctgcatcaaagatcctgaagcatctgcacagtacctgagggatctcatgggaccagtggcagggtgcctggtagaaaatgctagcaggagtgatctaaaatctgtggcacagcaagcagatgttatttacatggtctgttgcctattggaacgactaagaggcgctgctagagctactcaaccccgaactcaaaaagttctatttgagatggctcatactgtgatgaacccacttttgactcttctggaggtctacaaaaatcattccacagtcgtatacatgatactcaagtttgtggtggactttgttgatggtcaagctgtattcctggatgctaaagagacatcagctttggtgagcttttgcttgcaactactccagatatactcctctcataacattgggaaggtaatgctctctctttcttcaagtctgcgtaatgagtcacaagcagaaaaatataaggatctgcgagctttgcttcgtcttctgacaaatatatgttcgaaggatttggttggctttctgtctgattgtggcggtgaaggttcacctgatatcgcagaggttatctacattggtcttgatattgtgacccccttgatatctttggatcttctgaaataccctaaacttagtcgtgattattttgtgcttatatcgcacttgttggaactgtacccggaaaaggttgctcacttaaatagtgatgcttttacaaggattattggaagtcttgacttcgggctccgtaatcaggatagcgatgttgttgagaggtgcctggcagcagtaaatgctcttgcttcatacaatttcaaagaaagattaggagggagaggaagactgaactcgcagctcatggaatctgaaggatctaatggcaaactgcaggaaagcatatcaagtcacttcttgagacttctgttgcaaatacttctttttgaagatttcagatcggagttagcaggttatgctgccgatgctttgcttcctttattgttctgtgaacaggagctatatcagaggttggtccatgagttgttggataaacagcagaatccgaccgtaaaatcaaggctggcaactgcgttccataaccttacaagttcaaacaatctctcaagctcactcgaccggccaaacaggcagagattcaggaaaaacctccttagcttcatggcggatgtatcgggcttcatgcagatcaagtagatgcgatggcagggaacaggtgatgtttgaccggtcaattaaaccccgaggaagcactgcaccactgtggtaggggtgcatgtgggcaccacatgtctgtggattgatgagagcgaagactgccacgacaagtctagtagatcttgaagagctagtgtcaccagaaaagacagggagatgagctagtcttagggttggcattcatagcgcatttgctggacaagatggaggcgtccctggccacgagatcgtcgtgtaaatgcgtttgttagacgcacagaaacggtggggattttgtggtggcgactcgttttgttcaattcccacaggcagaaggtagagatgttaagttgatgtaaataccgtttgatttaaacatgccttattcgtaggagaaagcgacacggcttgctgtaacttagggtttattactctttctcgtggcataggatccccaaagaagtctttgctggggtatttgcagccaaacgatgaccagtatgattgcgagaggttttcaatcttttgtaccaaatttggcctgcagttatgatgacactgagtgccgatacaggcatgaggcattccaaaattggcgggcaccacatgtgtctgtctgctgtctcagtggg

SEQ ID NO: 15305 - DNA, 1744 bp, Zea Mays
catcaatagagttctcaagtcttaggagcatcgtggcaagaatttcacagagaggaagaaagttcaacttctgaaaagaatcaaggaaaatttgttcctagtgaaaaggttatgcagcttcgaaagaaactaataaagtttatcgaagatcacatatacccaatggaggctgagttctacaaacatgcacaatcaacctcaagatggacaattcatccagaagaagaaaatcttaaagcattggcaaagaaggagggcctatggaacttgtttattccgctagacagtgcagcgagagctagaaagctattgtttgaagaccattctcaaatttcccttggaagttcgaataatcttttgctgggcgcgggtcttacaaatcttgaatatggatatctgtgtgagattatgggacgttcagtttgggctccacaaatatttaactgtggtgcacctgatacaggtaacatggaggtcctgttgaggtatggcactaaggagcaacagaagcaatggttagttcctttattggaagggacaattcgttctggatttgcaatgacagaaccacaagttgcatcttcagacgcgacaaatatagaatgctcaatatccaggcaaggagatttttatgtgataaatggaaggaagtggtggaccagtggagctatggatcctaggtgcaaaatcctgatattaatgggaaagacagatttttctgcacctaagcataagcagcagtccatgattttagtggacatcaacactcctggggtgcagataaagagaccattgttagtctttggttttgatgatgcacctcatggacacgcagagattacatttgaaaacgtgcgtgttccagtaacaaatatcctgcttggagaagggcgtggttttgagattgctcaaggaagacttggtcctggaaggttacatcattgcatgaggctagtaggagcagcagaacgtggcatgaatctgatggtagagagggccttaaacaggaccgcatttggaaagaggattgcacagcatggttcctttttatcagatcttgcaaagtgtcggattgaactggagcaggcaaggcttttagtccttgaagctgccgatcaactcgatcgacatgggaacaagaaagcacgtggtatcctcgcgatggccaaggttgcagctccaaatatggccctgaaggtgcttgacatggcgatgcaagttcacggcgcagctggtgtctcgtctgacacggtcttgtcgcacctatgggcaacggctaggacactgcggattgcagacggccccgacgaggtccatctcgggacaatcgccaagctggaactgcggagggctaggttgtaactcgagggcgatgtacagctcgcccgtcttgcgaatgaataaagaaggaacatcacccgtcgtcatttaacgtccatgtgaatacttagatgaataaataaatcctactttcagtagcagttactcttattttcaataaaccatatataatatcaatctttaataaatcatatcatttactcatcttcattaaatttatccatcttcaataaaccatattatatatgtgtacatatttacctacacacacacacttattctaagatactctaaatcttgttgagtgatttttttcttccaaaaaaggactcatgtttgtaatatgttattgtaatactattatacatataataagtatcagcgtatgcgaaggtcacgattg

SEQ ID NO: 15306 - DNA, 977 bp, Zea Mays
cagctagctaggccaggttccatgtggacaaggtatcctcggcacacgtctacctgaggctaaagaaaggcgagacgatacacaccatcagcgaggccctcctggaggactgtgcgcagctcgtcaaggctcactccattcaagggaacaagatgaacaacgtcgaggtgatctacacgccctgggctaatctcaagaagtccccatccatggatgtcggccaggttggcttccacaacccgcggatggtacatgtgcttatagtcgagaagcgtgtcaacgagatcatcaacaggctgaataaaacccgggtagaacgccgggcgccagacttgaaagcggagaaagaggcatcaaatgcagcagaaaaggccgagaggaagatgcagctgaaagagaagaaacggaaggaggagatggaaaggctggagaaggagaaatgggcggagatacggagctacaagggcctcatggtggccgagaagatgacgtccaaccgccagatcgcctccgccggcaagtccatgcaggaaatggaggatgagttcgtctgaagacgactgtcatcgtcactggagtctacatctctctctctctctctctctgtctgtgtgtgtgttgtgtgtgtacgtacatatgtccatgctcgcgtgataacgacgagtcgaagcaaccaaaagatctcatggatcgattattcgatccgttcctgatcctccgttgatctgtgctctgtacataacatgtgctcccagcatggacatgtataggtcacgagaagagctagcgcgtatgtatacaagtaactagtgacgagctgttgctcggagggatcaacatatatggagttcatcaagagaatcggtgcaacacacttgccgccaggagaaccagctgaggtactaaaaatatatggagttcctcagtttccacgatgtccatgcccaaaggggtagcacaggtaaacatattcagaa

SEQ ID NO: 15307 - DNA, 1461 bp, Zea Mays
ctatctgcgaggattctggtggccacacaaacaaagagacccatggtaatcgtgttgaaggaaaacatggcaacgggcatgaaatttttccatcttctgaccttgttcgcaagagcaaaaggattcccaagaagaaaacacttgacggagattctgatgatgaagatggtgaattacgctatctggaaaaactcaaaggggctaaagttgcaccagatcctgtgaacactagccataaaggttatgattttggtgatgatgctctcaagaaaaagaagctatccaagctttctagaaacaagagcaccccatatgaagtggacgacgacttcagaatgtctcgatctggcagggatggtaggaagaagttgaatttaggggatgacaatgagtttatagaagaggaggaatctgagatggatgaaacgaatgggctaaaggaacctgattcacctcaaggtgtgaagattgaaacccctggtcttacaacaagacagcgagcccttcaaggcaggggtggcaatggtgaaagctttattgagtttcctgatggattaccagcagcttcatcaagaaagcaaaaggagaagctctcagatatggagatacaagccaaaaaggcagaagctgcgctgaggcgcaagatgcaagttgagaaggcagagaaagaacagcaggctgaagcgatgaggaagatactgggaatagattctgagaagaaaaaggaagagaagaagctgaaagaacgagaagagagggaaaaacaggcaagattggaagaatacaggaaaaactgcgtccagactgtcatgggcccaactgggactgtgattacattccctgagagcatggggcttccgagtatatttaactccaaacctgtcagctatccgcctccgagggagaagtgtgcaggcccatcgtgcacaaacccgtacaagtaccgccactccaagactctggtccctctctgcagccttgcttgctataaggccgtcgaggaccgtcctcctgcccaggggagtgaaggtggtggtggccagggaagcgatgctgggcagggaactgatgccgcccaggagagtgctgggaagcaagcatgatgaatctagctgcctgacgcgattcaaccgtgaccgtcagttggctggagaagtgtaatgtcgacatggccagctcgctggtgtgttgttttcttggtctctcctctggtagtgtgtcgtctaacaaccaatcaacctgacaaaagataggtgtgtgactgccggtttccttctgcccgtcgtgaaccaagccgggcttcgtaatggtggattggatcgagtttaaaacctatggtgtggtcggttcgatgtatgagactactctagtcgagaaatatgaagggaaacaaggtcgtgggagacctcgggctgtgggcgtctttttcgggttcctctcctggttcagattggttttgct

SEQ ID NO: 15308 - DNA, 1913 bp, Zea Mays
acccacaggccacaaccacagcacagcagcacgagaagggcagaccgcagacgccagacgcctataaatacccccgccttcccacccagcattctccatcctcacatcgtccacagaatttcacgcatcgcacggggaacaccgatcgatcgatccctcgagaagcagagacaagtagcccgcccgcccgcccgcacacatagagacagagagaatcaagccgccgccgaccagtgacatggcgccctgggccattgccatccacggcggcgcgggcgtggacccgaacctcccggagcaccggcaggaggaggcgaagcgcgtgctggcgcggtgcctgcaggtgggcgtggacctgctgcgcgcgggcgcgcaggcgctggacgtcgtggaggccgtggtgcgcgagctggagacggaccccttcttcaactcggggcgcgggtccgcgctcacccgcgccggcaccgtggagatggaggccagcatcatggacggccgcggccgccgctgcggcgccgtgtccggcgtctccaccgtcaagaaccccgtgtccctggcgcgccgcgtcatggacaactcgccccactcgtacctcgccttcgacggcgccgaggagttcgcccgtgcgcagggcctggagaccgtggacaacagctacttcatcacggatgacaacgtcggcatgctcaagctcgccaaggaggccggcagcatcctgttcgactaccggatcccgctggcggggacggacacgtgcagcgcgctggcgggcgcggcggacagcaacggcggcggcgtgcacaaggcggggatggtcatgaacgggctgcccatcagcgtgtacgcgccggagacggtggggtgcgcggtggtggacgcgtcgggggcctgcgcggcggccacgtccacgggcgggctcatgaacaagatggccggccgcatcggggactcgccgctcatcggctccggcacctacgcgtgcggcgcctgcgccgtgtcgtgcacgggcgagggcgaggccatcatccgctgcacgctcgcgcgcgacgtggccgccgtcatggagtacaagggactgcccctgcagcaggccgtcgactactgcgtcaaggagcgcctcgaccagggattcgccggcctcatcgccgtctccggcaccggcgaggtggcgtacggattcaactgcaccggcatgttccggggctgcgccaccgaggacgggttcatggaggtcggcatctgggagtgagctggaggccccgccatctaaacacaaatcaaaatcagtgtgcgtgcagctgcatgtggccatcctgcgattgccatgtgtttaatctccgggtcacaggtgttgtcgatgatccaccactagtagtagcgattgcatggagattggtgctcgggtcaataatgatggtgattgtgacggagtgccctgcaaaataattaataattcgtgtgaaaaagttgattatatggttcctgacactatgatgttcggcctttttttttgtcttcatctgtctttcattcgattattaaacatgtcctcattgggttgatagaaatctgggctgatagttggcccaagcccaacccaagtttcggtaccccaaatggttcctagagttttgggccccaatactaacatgtccaaaaccgttttgtactcttcactgccttttggatgctaacccaaaatgttcctagagtgtgcaacgcaagacggagtatgtatttttctcggtttgtttacatatagagtagtatgtatttatgccagtgattataagattcgaaatgtagtacgtattatatatgctagtgattctaaggtttgcaagtgtcatgcactcatgacttaaaaaaaagtcatttttcatgctttctcataaacggattatagaata

SEQ ID NO: 15309 - DNA, 905 bp, Zea Mays
gggaaaaacaaagaaagaaagaaaagaagccgggcgcgcaggcagcgctctgctgatgctgcgtcgtggagtggaggagacactatcacggactagtgggcatcatgtcgcttcctctgttttctgctgcctgttggtgtgaggaggaagcaaagaagaagatctactcagtgtgcacttcaacatacacaggatttggtgcattaatttcagaggagttatcatacaaagttaaaggattgccgggagttctatgggtgttacctgattcgtatctggatgttcctaacaaggactacggaggtgatctattcgtagatggtaaggtcatacacagacctcagttccgattcaatgagaggcagcaggtaaggagcaggcctcgtcctcgttacgacagacgacgcgagattgcccaagtggagccgagggagacgatgcaaagaggcccttcgacgacgcagcaacagaggccgccatgtccacaggaggccgctacacagaatcaggagcagcactgaaaccatgctggcaggagtaggaaagcggcatcaatatgggaagacttgtatggtttttgccggcagttgcttatttatatataaactaaggccctgttcgttttttacggattggaggcccggaacggttcctagccggattgtttctctaatttatgtaagttttgataagttggaatgaatcctggtccaatactagacaaacgaacgggccctaagttggttcagaactatctgagctaaatctcgtgactatacatgtcctcttgggtctggagcgtgtaggttgaggttgacatgtaagctgtgtttcagcattgctgactgaatcattgctgtcctgaaatttcggcgaagtatggaagattcctcttcgcttgcaaa

SEQ ID NO: 15310 - DNA, 1845 bp, Zea Mays
agaccccctctcgcttcgcccctcctcatcctctctcctctctcccccgccccgttcgtctccggcgagctagggtttgcccccccgccttgccaccccacggttcccgccatccttggatctccagccatgtacggcggagacgaggtttcggcaatcgtcatagatgtgggctcttacagctgcaaggcgggctacgcaggcgacgacacccccaaggccgtcttcccatcggttgttggttcaattgaacaaactgaagacacagatgaccccaagccagagaaggaagctgactctgcatcagattctaagaacggtgccaagcccatggatgtggacaaagccaagacaaaacgcagactttatgtaggccaagagttagagttcaggagggatcacatggaggtgatttcatctatgaaagatggaacggtaactgactgggatattgttgataatatatggaatcatgctttcagacggaggttgttgatcaatcctgaagagcatcctatgctcattgctgaaccatctacaaacactgcacagcaaagagagaaagcagcggaacttatgtttgagaactacaaagtgccagcgctgtttctagccaaaaatgcagtgctcacatcttttgcgtctggacgagctacatctttggtggttgacagtggtggtgggtctactgtggtttctgctgtacacgatggttttgttttacagaagtctgtgtcgacttctccagttggcggtgaatttttaactgactgtatgatgaaaagcttggagagcaagggcatcgtcattaggcccagatattcatttaagaagaaggaaatcagtcctggagaatataagattgtagatcttgatcttccaaacacaactgagagttacaggttgtactgcatgagagctattgctagtgacgtcaaggagtctgtttgcagagttccagacactgcttttgatgaagtggcatatgcaaatgttcctacaacttcatatgagcttcctgatggacaaactattgaagttggtgctgatagattcaaggttcctgatattctatttaatccatctctatcccagactattcctgggattgatggatttgcagattcaataccagtccgtggccttcaacgaatggtcattgatagcgtaaataagtgcgacgttgacatacgaaaagagctattcagtaacatcttgctctctggtgggtcatcatcaattctgcagttaaaggagcgcctggagaaagaagtattggaggagtctcctcaagctgctcgtgtcaaggttatggcaagcggaaactcagtagagagacgtttcagtgtttggattggagggagcattctagcatctcttgggtcgttccagcagatgtggttctccaaagcagagtatgaagagcatggggtttcctatattcagagaaagtgcccttgaagcaggggaaggaatatgtacaaccaatattatgctttacgagccttattgttgccaaagggttccttgtgtacaacagcctggtgccttgccatgttggccaatgaatactcgagactcttttcaagtgacgtttgttgtcttcatggctagttaattttaggtgatgtaaggtgaacgtaagaactaggtcaactaaaatatttatcattgacagtatgctgaatctgtctccccttctgtagaatgagacgggaccccatcttgttctgtaccggggctaattctttgccagcacacaaagagccaagacgattgttgtaactcgggttatttaaatcccagctgcagagcaaatacacaactttaaacgtgtaaaaaaac

SEQ ID NO: 15311 - DNA, 925 bp, Zea Mays
caacagcagcgcagccagtagcccattactccttgctccacgccgccgctcgaaaccggcagaagtttagaagaacggggagggaagcacgcccccaaacgttccgaggtttcgcctctcggagcgcaccaacgccacccggagcgactcgccaccggcgcggagaaggagggcggaggctaggcgatggcggacgagaatgaggctgggaagaaagaggaagaggaatttagcacaggccctctgtcagtactaatgatgagtgttaagaacaacacccaggttctcatcaattgccgcaacaacaagaagctgcttggccgggttcgtgcttttgatcgccactgtaacatggtgctcgagaacgtgcgggagatgtggacagaggtccccaagactggcaagggcaaaaagaaggctctgcctgtgaacaaggatagattcatcagcaagatgttcctcaggggcgactcggtcatcatcgtgctgaggaaccccaagtgacagcccaaccggaagccagttccaacttacagcaaagggtttctattttgcttcaagccttcaatggcggtggcggatccatgagaaacctaacgttctttgatgggacgtgctcgcaacagacagtcagctatgactgatgtgatgcactaccgtctaccaaaatttaatatacatgtacagttaaagggagtttgggctgattgcattacgccacagaccacactcaacaagctctcatcgagtctgtaactctgtactcagtactgttccatccggcctgacctgagctatttgtatgctggcatggacggatagagtctggatattctcggacagtctagattgacgtaattatttttatttggtgaacttgtatttgttggatcaagttatcatttgttgcctgcgctgcgctgga

SEQ ID NO: 15312 - DNA, 2636 bp, Zea Mays
atggcgagccaaggggagccctcggcctctgcttccgatccgaaggagaagaaggacttctcgacggcgatcctggagaggaaaaagtcaccgaaccgccttgtcgtcgacgaggccaccaacgacgataactccgtcgtcgcgctgcaccctgacaccatggagaggctgcagctcttccgcggcgacaccgtgctcctcaagggtaagaagaggaaagacactatttgcattgtccttgcggacgaaacctgtgaggagccaaaggttcggatgaacaaggttgtccgccagaacctaagggtgaggcttggtgatgtggtttctgtccaccagtgccaggatgtgaaatatgggaagcgtgtccacattcttccaattgatgatacagttgaaggcattacagggaacctgtttgatgccttcttgaaaccatatttcctagaagcatacaggccgttgaggaaaggagaccttttccttgtcagaggaggaatgagaagtgtggaattcaaagtgatagagactgatcctgctgaatattgtatcgttgcgccagatactgaaatattttgtgatggggagcctattaagagggaggatgaggagcgtcttgatgaagttggttatgatgatgttggtggagttagaaagcaaatggcccaaatcagagagcttgttgagcttccactacgccatcctcaacttttcaaatctattggtgtgaagccaccaaagggcatattgctgtacgggccacctggttccggaaagactcttattgctcgtgctgttgcaaatgagactggagcctttttcttcctgatcaatggtccagagattatgtcaaagctggcaggggagagtgaaagcaatctcagaaaggcatttgaagaagcagagaagaatgctccatctatcattttcattgatgaaattgattccattgcacccaagagagagaagaccaatggagaagtagagcgtcgtattgtttcacagctactgactcttatggatggactgaaatctcgttcccatgttattgttatgggtgctacaaaccgaccaaacagcattgatcctgctcttcgaagatttggaaggtttgatcgggaaattgacattggagttcctgatgaagttggccgtctcgaggttctccgcattcacactaagaacatgaaactagctgaagatgttaatttggaactcatttcaaaagatacccatggatatgttggtgctgatcttgctgccctttgcactgaggctgctcttcagtgcattcgtgagaagatggacatcatagatcttgaggatgagacaatcgatgcagagatattgaactcaatggctgttacaaatgaccatttcaagactgcgcttggaacaagcaacccatctgctcttcgtgaaactgttgtcgaagtcccaaatgtctcttgggaggatattggtgggctggagaatgtcaagagggagctccaggagactgttcaatatcctgtggagcatccggagaagttcgagaagtttggcatgtctccatccaaaggagttttgttctatggtcctcctggttgtggtaagaccttgttggcaaaggcaattgccaacgagtgccaggctaacttcatcagtgtcaagggtcctgagttgcttaccatgtggtttggtgagagtgaagccaacgtccgtgaaatttttgacaaggctcgtcaatctgctccttgtgtcctcttctttgatgagcttgactcaattgctactcagtgtgggtgatgctggaggtgcggctgatagagtgcttaatcagctactgacagaaatggatggcatgaatgccaagaaaactgtgtttattattggagctacaaacaggcctgacatcattgaccctgctctgctgaggccagggcgtcttgaccagctgatctacattccactgcctgatgagcagtctaggctccagatcttcaaggcctgccttaggaagtcccctgtggcgaaggatgtggacttgaatgctcttgctaagtacactcaagggttcagtggagcagatatcacagaaatttgccagcgtgcgtgcaaatatgcaatcagagagaacattgagaaggatattgagagggaaaggcggagaaaggacaaccctgaggcgatggaggaagacgaagtggatgagatcgctgagatcagggcccctcacttcgaggagtcgatgaagtatgctcggcgtagtgtcagtgatgctgatatccgcaagtatcaggcgtttgcccagacattgcagcagtcccgggggttcggcagtgagttccgcttctcggatcagccggcgacagctggtgctgctgctgcagctgatccgtttgcttctgcgggtgctgcggctgatgatgacgatctatacagctagttgggttgttcaatatcagtcccgtcactcatctgtttaaaactgatcatactaaacacgcttgtcatgcaatgatatttatttgccgtacatttggacgtcgctgagatgatgcactctcggccttcggttaacttttcatgccatattctccatgtcattgtctgggccatgacattttattaattattgtgaaatctatcatctctca

SEQ ID NO: 15313 - DNA, 792 bp, Zea Mays
cgtaggggctccggctcactgccaacaaaggtgcaggcatcggagctggattccctggtttacaattggggtttggagctggagctggatgtggaataggaataggttttggttacggctttggaaaaggcgttgcatatgatgaaagtggaaggtattcgaacatcaggagaccgttccagagctccagaagcattgctttcgatgagaagttcgatatcatgtttgacgaactgatggagagcaccaggaagctggtcaaagcaacatcaaaggagatcgacaaatggaggcgaatgtagaagcgagcaggggcagcacttataggatgaactgcgtagcgagagaaagcgatgccatcagaatctaaggtattaatgtgtgattggataaagtggcctagaagcttctacttgtgtgtaagaaagaaagaaagactgataaaagcgagttctccagagtacgaagccaaaagttgtcgaggcactctacacgtgcttcttctgtgtccgtgggaaccaaactgactaaaaagcaagttgctcgcttgctgttacatggaatatttttcagcgattcatgaggatgagatactctggcctgccgatgctgatgctcaaaagcattagtttttccagccacgtgctcggtgctgtccatgtgatcgcgacggcgcctggaattgaaatatcacccacgacgtcgccgtcgaaacccttgtttttcgtatccaaatatttggcacttggcaggacatattttctagagtattgtcgtgcccatatgttgacc

SEQ ID NO: 15314 - DNA, 893 bp, Zea Mays
ctgcactgcttgtttggtgctcctgtatctatctggcactctcatattctatagagaacaagataccatttgtagcatttagtcaggatcattgttattcgatgtttgaccaccctttggtcgattctctccattacatataccatgaacctaaggctaaaatagtgccatctattggtcagcttttagaaacagctgagatacagaaagtattgttccttgaaactcctgagaggatttcgtctgcactgagaccgtactgggcaaaggcgatagagggaagggcccatgttgttcaggcacagcctgatatgcttgaacttgtaccacctgcaacttcgaaaggcaatggtgtgaaggttctgttgaaccacctttccattagtccagatgaggtaatggcaattggtgacggagaaaatgacattgaaatgttgcaactagcttcgtttggggttgctcttgcaaatggatctgacaagacaaaagcagcggcaaatgtaattggcgccacgaatgatgaagatggagttgcacaggctatttatgaatatgccttctaagagcaacgaatcattttggactgggttaatttcttctgatttcccatttttcgtggactcaacacagaacaattgtagtggttccaacttgcaagtacacaccgctccaccggagcgcaatctcgctctggtgttacagtttctgaactgtttgcaactgtaagacattttttagttggcatgaaccgaaatccagctaccagctcgacatactcttggctggatatgtaaccgctaaccgaattactatttttttctcatttttttatgcaaaagctttccttttttttacccactttgtctcttcgatccgaccacaaaatagacaag

SEQ ID NO: 15315 - DNA, 140 bp, Zea Mays
cagcagtgaggtcacgagaatctaaagatcatcctgtcacctggaatcttgagtctcaggcaagttgtgcccttgattacttatttttacctaataatgttcgttgttaatcactatggcatgctcaggttaatttgatg

SEQ ID NO: 15316 - DNA, 143 bp, Zea Mays
tgagtgctttcaccgttggtgttctttccgatctcaatgcatttcactgctccaccggaaattctcccctctgcccctaccatactgcagctttggtggtttccaccgcctatccagggttgagccctgggatttgacgacgg

SEQ ID NO: 15317 - DNA, 1162 bp, Zea Mays
agggacatcgttggaagtgcttattatgttgcgcctgaagtccttaagcggagctatggaaaagagatagatgtttggagcgcaggtgttattttgtacattcttctcagtggtgtgcctccattttgggctgaaactgaaaaggggatatttgatgctattctgcatgaggagattgactttgaaagtcaaccttggccatcaatttctgagagtgctaaagacttggttagaaagatgttgacacgagatccaaagaaaagactgacttcagctcaagttcttcaacattcatggctcagagaaggtggaggtgcatctgataagcctatcgacagtgctgttctttctagaatgaagcagttcagagcaatgaataagctgaaaaagatggccctaaaggttattgcctcaaaccttaacgaggaagagatcaaggggctaaagcaaatgttcatgaacatggacacagacaatagtggcacaatcacgtatgaagaactcaaagcaggactagccaaacttggatcaaagctgtcggaagctgaagtaaagcagttgatggaggctgctgatgttgatgggaatggatccatcgactatgttgagttcatcactgccacaatgcatagacacaagctcgaaagagacgagtatttgtttaaggcattccagtacttcgataaagataacagcggtttcatcacaagagatgagctggagtctgctttgatcgagcatgagatgggtgacacgagtacaataaaggagatcatatcagaagtggacacagacaatgatgggaggattaactatgaggagttctgcgcaatgatgagaggagggatgcagcagccaatgaggctcaagtagcctgttcccttagtagaaatggtgtaccgttagttactgttcttcactctttttcccccttccttacaatgggcgtcgctcttttgcattgtcaagagatgattgtgtatatctttttcttttgctcgtgtttgttgcattgtagtatcctgaacgtcccttccttttgtaagtttgtttatacacaagcacatccaatagaaagtgcaatttgtgtctcactctgtactagttgtgtaattggtgataggaaaaaggtctatttttaattacgtaacgaagattcctt

SEQ ID NO: 15318 - DNA, 2140 bp, Zea Mays
cctgtggacttggaccttggaaactatgagagatttctggacatcaagttgactcgtgacaacaacataaccacggggaagatataccagtctgttattgacaaggaacgtagaggagattacctaggaaaaactgttcaggtcgtgccacacatcacagatgaaatacaagattggattcaacgtgtggcaatgaatccagttgatgacaccgaagagccagctgatgtttgtgtcatagaacttggtgggactataggggacattgaatcaatgcctttcatagaagcactaggccaattttcataccgtgtagggcctggaaacttttgcttggtgcatgttagtcttgtaccagttctaaatgtagttggtgagcagaaaacaaagcccacccaacatagtgttcgcggacttcgaggacttggactcatgcctgatattttggcatgtcgcagtacacagccacttgaagaacacgtgaaagtgaagctcgcacaattttgtcatgtcccgataccaaatatcattaatctccatgatgtcaccaacatttggcacattcctttgttgctcagagatcagaaggcccatgaagctattttgaaggtgttagaccttcagtgcgcgagtaaagttgctcgagaaccccaattgtctgaatggactgaaagagtcagcagatgtgacagattgaaatctccggttaggattgcaatggttggaaagtatactggcctgtcagactcctacctatctgttataaaggctcttttgcatgcgtcggttgctttggacaggaaacttgtggtggactgggttccttcctgtgatcttgaagattctacagcaaaagagactcctgacgcctatgaaaaggcatgggagtcgttgaagggtgcagatggtgtgttggtgccaggaggttttggagacagaggagtccaagggaaaattctggctgcaaaatacgcgcgagaaaacaacgttccatatcttggcatttgcttgggcatgcaaattgcagtgattgagtttgcacgctctgtcatgaagttgcacggtgctaacagcacagagtttgatccaaccacaaaaacaccatgtgttgttttcatgccagaggggtccaaaactcatatgggagcaacaatgcgccttggttcaaggaggacctttttccaggccactaactgcaaatctgctaaactgtacggcaatgcttgctacgttgacgaaagacaccgccacagatacgaggtgaatcctgacatggtcccagaatttgagaaggcagggctttctttcgttggcagggatgagagtggcgaacgcatggagattatcgaactaccaactcataggtttttcgtcggagcacagtttcaccctgaattcaagtcaaggcccggcaagccatctccgcttttcttaggattggtagcagcgtcatcaggccagcttgaccacttgctccaacgtggccttaccagttcagcaggcagagacatctgcggcaaagggggagcgcagaaaccaaaagcttgccagaacgggcatgtcatgaagccactgaatggcctggtgcacgggcactattcagcgactcgctgcaatggcgtcattcccatctagcaggctgttttcgcttgttctttttctttccgttctacctacctgcagggcaaccaggaagagaagggctgtttgctctagcgacacggcagccgtttccgatgttttaacgaggaagcaattggcatgcaaagctgtcgcgcgcattaagaggcaaatctagcagcttattagctagggttcgattagtagtagtagtaatccgatgttgctggtttatttgttagtttgtttgctaagaaagattacaagggttagtgatgtgcagctagctccagtgtagcctgccgtctcgccccatttgtacattgtaaaaccactgctactctccatgattgactgaatggatgagtataaacgtattggaccaacatgctcggtgttataaaaatctaagttgcaatccaactgtagttgtctcggggatgttcggtaaagttgcgtgagctggtggcacgagctatgggtttggtaaaggcttagcagactcatatgtacatttgca

SEQ ID NO: 15319 - DNA, 271 bp, Zea Mays
acgccggggcggtgaggatcatcctgtgcaagggcaacccgcacttgatgtgcgacgcgcgcgtgctcgtgaagccctacaaggagaagggcaaggtccccgacaggttcaggaagctgcagcacccgcacctcggcgacttcgccggctgcacgtcgcccaccggattgctggattccagggaccccttcgatctgcagcagccacagatcgcatttcttctgctcaatctgccattgatgcagattaacaagctggtttgtttgtttgg

SEQ ID NO: 15320 - DNA, 1149 bp, Zea Mays
tacattaacgctgcgcaggatacctgcgaagcaatggaccagtgggcccagcaccctcaggcagagacagctctgagcagcatccttccgtgtgtggatgagagcacgaccaaccgaacgctgtaccagagcaaagaggtggtggtgaggcttgtggggatagtgaacagagctatctccgctctttcaaatcgaaggccgcatcacaagcacccaggacagttcatgccttacctgtgctcgccctacgactcaaacctcaacgaccgaccgtgcaagtatagggaggccacgtttgaaaacgcgacgacagcatggttgaactacacgtgcatggctcaagacacggacttgtgctcaggcaacaagaccttaacctacgacatctacggccaactcgtgctggctgcaaacgtgagctacgcgctgtaccactacgcccccttcctgctgaacctccaggactgcaagttcgtccgggccaccttcagcgccatcgcctcgcggtactgccctcctctggggcacgacctcgtgctggtctccgcgggtctggcgctcattgcctcggcctttgttctctgcctcgtctggatgctcttcgcggaccgcccccgaagggaggaggtgtccgatctggcgtcggggtcgaggatcgcgccggtagacagctctccgtcgtagaagcaagcaagcaagcaagcggcgcaacgggatgtctatgactatgagtgaggctgcttggtcgcatggtgaccagagtttagtacagttcccttccatggctatgtaaaatagtttcggtatagcgagttccgggagacgtcgttgaagtgcggagaggagggggagaaaccggaagcacttcgggtgggggacaaaaggccccattttgcagtggagagagttaggtggaaacgagtgctctgcttccttctatcgtatgtcagatcgatgcacccatggtgtatgttgctgcaaggacaaacggaataatcgatcagggttcccatgaccaatcacgcggcgaaagacagccgtgttcgatagttctgcatcctcaactaacttgaggacgacgtgctcgttgtcgttggcgtgtggaatgctgtcgactgtcgttatttccctgtttggagagaagtgaac

SEQ ID NO: 15321 - DNA, 1005 bp, Zea Mays
aagccctcagtctgccactctcatggcaacgcaagcagaagctacaatcctaaaaccatctgcttcagctagccccaagtttagtcggccgatcgatcactgaagtagtaatggcctccgccaacagctggaccctcgagatcgcgtcgccggtggctccgcagcgcctgttccgcgccgccgtgatggactggcacaccctggcgcccaaggtcgcctcccacgtcgtcgccagcgcgcagcccgtggagggcgacggcggcgttggcagcgtcaggcagttcaacttcacctcagtcatgccgttcagcttcatgaaggagaggctcgagttcctggacgcggacaagtgcgagtgcaagaacacgctcatcgagggcggcggcatcggcgtcgccatcgaaacggcgacgtcgcacatcaaggtggagcccgcggccggcggcgggagcgtggtgaaggtcgaatccacttacaagctgctgccgggcgtggaggtgaaggacgagatcgccaaggccaaggagtccgtcaccgccatcttcaagggtgccgaggcctacctcgtcgccaaccccgacgcctacaactaaaccattggactgggatgagcttcatttcccttccgtcttgtttggatatacaagggtattgtgtacggagattgggttttctttccccttcttttttgttttcatacaaaataaaataaagctgctctaaagcagcgtgcggtttttggactcgagatggtatgattatatatatgtacgtgctgtccttgtgttgtataccgtcatggttttctgtgtgggaagaaaaagggcattctgttttagaatcctatgtaggtttgactgaataaggaattttacttgctctcttcgttataaaaataattattcctatattattcgtgcttattaaaaaaagtttttaaagtttaactatatttatagaagatattagcaatgtttgtatctttaaataatttattatgatcga

SEQ ID NO: 15322 - DNA, 1655 bp, Zea Mays
ggcttattgattgtgtatatgcgaaattggactacctttttcggcgagaccaccctagtagaggatgatatacaccgcgattgacacgttctacctgacggaggagcagctgcgcaactcaccatcacggaaggatgggatcgacgaggccactgagactgtgctccgcgtctatggctgcgacctcatccaggagagcggcatcctcctcaggctaccacaagcagtgatggccacggcacaagtattgttccatcgcttttactgcaaaaaatcatttgttcgatttagtgcaaagagagttgctgctagttgtgtttggctggcagggaagttggaggagagtcccaggaaatcaaagcatattatatttgtcttccatagaatggaatgtaggagagagaacttgccaattgaattcttagatgtcttttcaaagaaatattcagaactgaggcgtgacctgatacggacagaacgacatctgttgaaggagatggggtttatttgccatgtcgagcacccccataagttcatatcaaactaccttgcaacacttgaagcccctcccgagcttactcaagaggcatggaaccttgccaatgatagcttaaggacaactctgtgtgtgcgatttaagagtgaagtagtagcatgtggagttgtgtatgctgcagctaggagacaccgggttccccttcctgaagatcctccgtggtggactgtctttgatgctgatgaagcaggaattcaggaagtttgcagtgttcttgctcacctctacagcctgcccaaggctcaatacattccagtgtataaagaatatgattcctttactgttaagagaatctctgatccacaggctttaaaggaaagtccagcaagggctgttgctagcgataagggtacccctataccctcaagttctaaccaggagaaggattcagtggctaagactataccgaatagggtgaaggaaaaaagtgatgacgaaggtagacacttgcctgctgaatttgatggaaaagaaaacctggtggtgaactcaaaaattgagaagtctgattctggtgttgactggagtcgagaaagagaaagagaaagagagagatcaagagggcgggaacgtgatgctaggggtagggattctgatcatgatagcaggggtcgtgactctgatcgcgagagggatcggagacgtcgctctagggatagaagttcaggacactcagacaaggagaaatcaaggcgccatccatcacacgaccgagttgactactacagttcgcattcatctcgtgaaaaagatcggcatagacaccattgatcaaggtgaggaggatcccgggtttgcagggctttgctgcatggagaccaccacatggcagtgccgacagaatcatgaaaacttgtagattgtcatctcattggcggttgcatttgcttcattgtgttttgcaccttggattgtaacttgcagagcaacatgaatttgtagaaccttcatctccactagttcccaaaattctcgagaattaatttagggtgttactaataaaaaatcatcctctaaccgttttttaaataggtttcaaatatacgaacttcgtaaatattcctatttactctctagacttggggggcctcttgtgaac

SEQ ID NO: 15323 - DNA, 136 bp, Zea Mays
ctgacctctcaaatcaaatcggcaccgggcggcctcctccctccctcccgaccccgaccccgaccccgaccccgactgccaaaccctaatacacggcggtgaccttgcggcctccgttccgctgcgctccgtctgg

SEQ ID NO: 15324 - DNA, 3144 bp, Zea Mays
attcccacgtcggggaagagcggggcaatgccgtcatttccgcgggcgaacgttgtggataagactagaggcccaagcccatgcgcccatgccgtcacacctcctactctgacctccgggtcgccccgtccgtgtccgttccttcttcctcgccgctcagacacgcacacgcatatccagcttgccatatttgtaccacctgtcctccttccgtgcccgagacccacctcggcgttcttatccccagaaacttcggcaaaagtgatcgatccgtctcccactcccaccccgaccgaccgaccgccgaacgaacccgacacacctcgtcgcgtcgcggcgcttctcttctcttcatgcgctatcgccgccgtttccacctctgcgacgcccacagataggcaggaggaggacgaggaggcgatgccttcgctctcctgccacaacctcctcgacctcgccgctgccgacgaggtgcccctgccgtcgccgacgccgctccgcctcccgcgcgtcatgtccgtcgcgtccccggcctcgcccacctcgccgtccccgcccgccccgccgcgccgcgtcatcgtctcccaccgtctgccgctccgcgcgtcgccggacccttccgcgcccttcggattcaggttctccgtcgacgccggcaccgtcgcgtaccagctccgctcggggctgcccaccaacgcgcccgtcctccacatcggcaccctcccagcgtccgcggcggaggccgcctcagatgagttgtccaactacctgctggctaatttctcgtgcctgccggtgtaccttcccaccgacctccaccaccgcttctaccacggattctgcaagcactacctctggccgctcctccactacctcctcccgctgacgccgtcctcgctcggtggcctccctttccagcgaacgctctaccactccttcctctcggccaacagggcgttcgccgaccgcctcaccgaggtgctgtcccccgacgaggacctcgtctggatccacgattaccacctcctcgcgctcccgaccttcctccgcaagcgcttcccgcgcgccaaggtcggattcttcctccactcacctttcccctcgtcggagatcttccgtacgatccccgtgcgggatgacctcgtccgcgcactcctcaacgccgacctcgtcggcttccacaccttcgactacgcgcgccacttcctgtccgcgtgctcgcggctgctcggcctcgactaccagtccaagcgcgggtacatcggcatcgagtattacggccgcaccgtgactgtcaagatactccccgttgggatcgacatggggcagctcagatcggtggtctcggcgccggagacggaggacgcggtgcggcgggtgacagaggcgtacaaggggaggcgcctcatggtaggcgtcgacgacgtcgatctgttcaaggggatcgggctcaagttcctggcgatggagcagctgctcgtggagcaccgggagctccgcggccgcgccgtgctggtgcagatcgccaaccctgcccgcagcgaagggcgcgacgtgcaaggcgtgcaggacgaggccagggccatcagcgcccgggtcaatgcgcgcttcggcacccccgggtacacgccgatcgtgctcatcgacggcccggtgacgccgcaggagaaggccgcctactacgcggccgccgagtgctgcgtgctgagcgccgtgcgcgacgggctcaaccggatcccgtacatctatacggtgtgccggcaggagagcaccgcgctcggagacgacgcgcccaagcggagcgccatcgtgctctctgagttcgtcggttgttccccgtccctcagcggcgcgatccgcgtgaacccgtggagcgtggagtccgtggcggaggccatgaacgccgcgctgcggatgccggaggccgagcagcggctgcggcacgagaagcactacaagtacgtgagcacccacgacgtcgcctactgggcgcggtccttcgactcggacctgcagcgcgcctgcaaggaccatttctcgcgccggcattgggggatcgggttcggcatgagcttcaaggtggtggcccttggcccgaacttccggcggctctccgtggagcacattgtcccttcgtatcggaggacggagaatcggctgattctcctggactacgacggcaccgtgatgccagagaattcgatcgaccggacgccgagcagtgaggtcatctctgtgctgaatcgtctgtgcgaggaccccaagaacagagtgttcatcgtgagcgggcgtgggaaggacgagctgagtaggtggttcgccccctgcgagaagctgggcatcgcggcggagcacggttacttcacaaggtggagcagggacgcgccatgggaggcctcagcattggccgccgacctggactggaagaacaccgcggagccggtgatgcggctgtacacggaggcaacggacggctcctacatcgagcacaaggagagcggcatggtctggcaccacgacgaggcggatccggacttcggttcctgccaggccaaggagctgctcgaccatctcgagaacgtgctggccaacgaacccgtggtggtgaagagaggccagcacatcgtggaggtgaacccccagggcatcagcaaaggcgtggtggtggacagcctgctgtcgtccatggtgaggacggggaagccgccggacttcgtgctgtgcatcggcgacgaccggtcggacgaggacatgttcgagagcatcgtgtgcccggcctccagcagcggcggcgtgaggctcccggccagcagcgaggtgttcgcgtgcacggtgggcaagaagccgagcatggccaagtactacctggacgacacggtggacgtggtcaagatgctggacggcctggccagcgcgccgtcgccgccacgacggcccgggccggcggcggcggtgcagctccgggtctcgttcgaaggctcgctctgagggggggaagggaagtaaaacacacagcgctagcggtaaacagcaaacgtcgagcaaagaaaaataaccagtgatgatgaacaggattcagacaggtgtggcgtaggattagctgcagttacaggatcgacagttttttttttgctgctgcagctg

SEQ ID NO: 15325 - DNA, 2225 bp, Zea Mays
cctaagatgttaaagtttccgctgtttttttaccacaattgtaacattttattctaagaagcatcatgccatcataaactaaactaatcattgatgttagatatatattcccatatatatcattattttataccttctgccataaattattagttacctacttcacaggattgttgattcatcaattgtatcacacagtagtaaattgtgaattcaagtctaagatgttgatctgtgacatgcattaggtgcactgtactgacaaaacaaataggactatataatttagattcttgtgtcttgcccaagtttgctctgtgagtgttacaaacaaggccatgaagtattgttctcctgttttagattcctgccatcataaacaaggccaacaaggcgccatcataaaaaaatgttattgttgcccttgatgtcttatttatgaatatgtcccttatcacctcgaatctaattcaggaagctctcctgttgttcccgttggaatgcaaaatgccctttggtaataatgataaaatttgcctctggcatggtctagaatgcacccctataatttgcctgattctatatatcatcagaaaagaaagggaggaggtagcatctgctactcttcctgggatcagctagctaggacttgccgacttggtattaacccccatgtgatcttttatagtttattggcctacatggcttacatgttaagcctttatggaagaaaagtgtgaatgactgaatgtggttatttgtggtgctatcttttttttttctaacactgctgcatccagattctcattcatgtagtagtgtttggatgttgaatgcaatgtacgatggtcagaacctggacaagcgaattcacaatatagagttgcagtacagttatctctacaactttgaaatggttaatcggccaattagtattttcttttccattgggcagcccaagattttgtaatggatacctttcttgcattgtgtaagttgagcaaactgtgcatttactgtatgagagtttggtcaatctgataaagcccagttgattatcagtggtaatatatcaaagctactattcacactatatggccaaatagtattttatttttcattgggcaatcctagattttggaatgaataccttgcactgtgtaacttgagctaccgtgcatttaccatgtgagagagtttggtcaatctgataaagccctgttgattcatcagtggtggcaagtgcaacagcaacattcgtgatgatgttctcctcctccctctctgtggtggagttttacttcctgcacagattccccctgccttttgctggctacctcatcttcatttccatattggctggattctggggccagtgtttggttaggaagatcgtgcatgtgctcaagagagcatcgcttattgtcttcatcctctcctctgttatcttcgtcagtgctcttacgatgggtgtcgttggaacccagaagagcatttcgatgatcaacaatcacgaatatatggggttcctcaacttctgcgagtaactcaaacaccatcagactgtcgatccgtccgggagaatccaggccaatgcctaattgacctcatctccctcaaaatctagaagaataaagtcgccgagtatgtgcacaagttagctcctcgccaacatgtgcgcatttagaccgacagagtcgctgtagtgaattcagctcgtgttagctcctggctaacgagctgaccatacggctttagttttgtgaagtgggcgcgatttcgtcatgtcatgcatgtgttagctcctggctaacctgcaaatgcgtgtgttggtgcaggtttttgtcacgtctgcgtcagctcctggctgaccagcagttgtttgtcgttcattctctgcgtcagctcctggctgaccagcagttatttgttgttcattcttgcgctagcaccaggctaggctgcaaaactgcaaatatttgttgcatggaacattgtaaatatcagtcaattcccattctgtttgtgcaagccgagtgcgtttcaagccgtatttccgtgaaaatcagaacatgttcgctgcggcttccaccgacttctgttttttctacagtatttttattatagctaaagcagtccaaacagctttaatctgtctctttgagtgaagatgctgttttggacctaaaatatgatggatcgaaatcatataaagcactggcaat

SEQ ID NO: 15326 - DNA, 1450 bp, Zea Mays
ctgagtgatgaaatgtttctttaaaagacccccagagacacagaaggcactaggggatacattagcagctggtctatctgacacccatcaggatgttcatgacagagcacttttttactacaggcttttgcaatacagtcctaatgtagcagaacgtgtagtaaaccctcccaagcaagctgtctctgtatttgcagacacacagagcagtgaaatcaaagatcggatattcgatgagttcaacagtctatcagttgtatatcagaagccatcgtacatgtttacagataaggagcatcgcggaccatttgagtactcagaggatcttacaggcttgactgaggatccagaaaatgtaatttctgcccaaagatatcaagaaaatgataatgatcttttgctaagtacttcagataaagaggacaatggtacaagagccagcaatggttcttccacctctacatacaatgctccttccgatttgattagtccttcattgataagctcgcaagcaccagctgaaacttcactagtaaatactggtgggacatattcctcacaatcaaacttcagtctcgatgaccttcttggccttagcgttactgaagctcctgctttaccacaaccaacactggcccttaactcaaagcctgtgctagatcctggtacgttccagaggaaatggggccagctagcattggcactgtctcaggaatgttctttgagtccacaaggggcagtagctttgatgaatccccaatcactcatccgtcatatgcaaagcaatcacatccaatgtattgcttcaggcggtcagcctccgaactacaagttctttttctatgctcaaaaagatggggctgctgctttcttccttgttgaatgtattgtcaacacagcatcagcgaaggcacagctcaaaatcaaggctgatgatggaactgctgctgaggcattctcgagtttgtttcagtcagccttgtccaaatttgggctttcttgatcctgagtaatttgtctgagcgattcaccggtccacagttttttatgggtttcacagtttgccccaactccactgtcttggcttgtccagtacttgtgatcatattattggagaatcagagtagaaggtgcaaaagggtactggagttttgcggagctaaaaatcctatttgtactatttgggtgaactgtgcatttgtacatgactacatgtcacccagataaatagctgggttatttaggactgtactgtttgatgttctgggttatttaggattgtgatagtttgatgccttgatctcttctgaagggtttcgtttccttgaaggatgtagaaacaacacgcaacaacccctttcatgtatgctatttaccatttcttgcacagatgatcaataagatgtttcgtcttccattttgattcgtattatttagtactattttgaca

SEQ ID NO: 15327 - DNA, 2301 bp, Zea Mays
tctggaaatcccttaccccttctctctccaaaaccctccctcgctcttaatgcagtccggtgtataaaaccgcgcaacctcatctctaaaacccgctcttgtcttcagaagtttcagatcctcgcatcgtccgcaccttatcctctagactttacagtacctgctctcagctcctccctatctcaatggcatccgcgaatgccatctccaccgcctccctcctccggcccctctctcagggcagggcgacgaggtcacagcggttcgtggtgcgtgcgaacgccaaagacattgcctttgaccagaaatccagggcagcgctgcaggccggcgtcgagaagctcgcaaacgccgtcggtgtcaccctcgggccacgagggaggaatgtggtgctcgatgagtacggaaaccctaaagttgtgaatgatggagtcactattgcccgtgctattgagctgtatgatccaatggaaaatgctggtgcagcattgattcgtgaggttgctagcaagaccaatgattcagctggtgatgggactacaactgcgtccgtccttgctcgtgaaatcatcaagctaggccttctgagtgtaacatctggtgcaaatcctgtatcactaaagaaaggaatagacaaaactgtgcagggcctaattcaggagcttgagaataagtctagaccagtcaagggtggtggtgatatcaaagctgttgcatctatctctgctggcaatgatgaatttatcggatccatgattgctgaagcaattgacaaagtggggcctgatggtgttctatcaattgaatcctcctcatcttttgagaccactgttgaagttgaagaaggaatggagattgaccgaggttatatttccccacaatttgtgacaaacctcgagaaatcaattgtggagtttgagaatgctaaggttcttattactgatcagaagatcacaagcataaaggaaattcttccaattttggagaagaccacacagctgagagcccctctgttcattattgctgaggacattactggtgaagctttggcaactcttgttgttaacaagcttcgaggaattctcaatgttgcagcgattaaggctccaagttttggtgagcggcggaaggctgtacttcaggacattgccatcgtcacaggtgctgagttcctagcaaaagatcttggtttgttggttgaaaatgctacagaggaacaacttggcacagcaaggaaagtcacgatacatcagactacaacaaccctcatagcagatgcagccagtaaagatgagatccaggcgaggattgcacaactgaagaaggagcttgctgagactgattcagtttatgatactgagaaattggccgagagaattgctaagcttgccggtggtgttgctgttatcaaggttggagctgcaactgagactgagcttgaggaccggcagctaagaattgaggatgcaaaaaatgccacttttgcagctatagaggagggcattgttccaggaggtggtgcggcatatgtgcacctatctacggttgtccctaagatcaaagaagcaattgaggaccctgatgagcggcttgcgctgatattattcaaaattagatggtatgaactgtatttgccagaggcattggtagcacctgcttcattgattgcacacaatgctggagtagagggtgaagtggttgtcgagaagatcaaggagagcgattgggaggtgggctacaatgcaatgactgacaagtacgagaacctgatggaggctggtgtgatcgaccctgccaaggtgaccaggtgtgcgctccagaatgcggcctcagtagctggaatggtcctaaccacgcaggccattgttgttgagaagccaaagccgaagcctcaagtggcagagccaccggagggagcccttaccgtttaaaacttaacgttcttgaggctgctgtccagacggttcagatctgttgagagggtagaactttggtttgagaattttggttcagatccactgggagttgtagagtaggattgctattttgcagacgaagagtaattttactctggtctgaacttatccgaattgaagacatttgcatcaccattttttaaaaataagctcatggcgatgctggattgtacgagcaagtacagtatgtttttagcctctcaatttttgcgtctgtctcagcttggtttttagtgttgcgtaatctcctttgactgcgtataggatcgttttacgtaagattgtgttaattgaatgattagtgccttcgttaaaccgattttcc

SEQ ID NO: 15328 - DNA, 601 bp, Zea Mays
cgccgttgtcccctcgatcctgccacggattactacaagatactggaagtagattactatgcgtctgaggagacgatcaggtccagctatatccgccttgcactgaaatggcaccctgacaagaagcaggggcagggcgaagagaattcaacctccaaatttcaggaaattaacgaggcataccaagttctgagtaatccagcaaaaaggcaagagtatgacaaaaaaggcattctatacgttcaagatcagaatgtagtggattacctgaaccggcacaaggggctaatacttacgtgcaatggtcttggtataaggtactcagtatggtgaacacgctcaagggcccacagtttgcactcatctgcagtcttggagaatctgtaatggaagcctttgatctgaaaatggtatagtgcagcagtgccatgtttgaaagccaaatattgaccacttgagttcatcctacaaggctacaacagagttgatttttatttgtcgatcagctgttgttgaatgaaagaggcagatatgttcctgctgctccttgtcaccgaggacacaacagaaacacgtacaatcttcagactggaggattcag

SEQ ID NO: 15329 - DNA, 774 bp, Zea Mays
cccctggccactggcccctgcgtttcctatcgtttcggttcggcgcaggcgccgctaccgcctcctctcgaccgctcgccttcccgttcgccatgtcgttgctcgccgcggccattcccagcacttcctcccacttctccgcacccttcctcccctcattccacatgccccgcaagaacctcaccgccccactccaccggatccgccgtccgcggccgttcaccgtcgtctcctccgtcccagaccccgcggcggggccggtggaatacacgccctggctcatcgccggcctcggcaacccaggcaacaagtactacggcacgcggcacaatgtggggtttgagatggtggatcgcatcgcggcggaggaggggattacgatgaacacaatccagtccaagtcgcttctgggaattggttcaattggcgaggtgccagtcttggtggtaaaaccgcaatcatacatgaactacagtggagaggcaattggacctcttgcagcctattatcaagtaccattacggcacatcctcttgatttatgatgatacaagtctgcccaatggtgtactgcggcttcaaaagaaaggtggtcatggtcgccacaacgggctacagaatgtgattgagcatttggatggtcgcagagaatttcctcgtttatctataggcattggtagcccacctggaaaaatggaccctcgggctttccttctgcagaagttcagttcagaggaacgagtccaggtttgtaatacacgcgggtaaatgggtg

SEQ ID NO: 15330 - DNA, 2212 bp, Zea Mays
gccagcgcgcgcatcagaagccctaaatccatggaccatggctcgcgaagcgacgaacgcgtggcctcggccgtcaccgtcagcgcggaaacgaagcaagggcaaacgagccgttctctcccccgcgccgccgacgcaagcagccgccacggagatggaggccgaggcgtccgtccccgccacggactacgtctacgacgcgctcccgggcctgcacctggccttctcaccggaggagacgctcgatgacgccgccgcggggcaggacgaggacgatgcgaccgcgacatacgccgtcttccgcaacgagataacggaggctggagatgtgctcgcggacatccctgctgcggacttcttctcactcgacgtctccacctctgcctccgtcgagcccgagcccgagcccgagccgccatccccggcgcccacagctgccgcggcaacgccctctatctcccgtgctttggaggaccagccgccgcagggctcggagcgcgcgtggttcaggggagggaggcggttcaggagccccatgcttcagctacacaaggagatcctggacttctgtgattttatctcaccttctactgaagagcaatcttcacgagcagctgctgtgcaagatgtctctgatgttgtcaaacatatatggccacagtgcaaggtggaagtttttggatctttcaggacaggtctctatctaccaacaagtgatatagatgttgtgatatttgaatccagagttaagactcctcaagttggtctatatgctcttgcaaaagcattatcccagaaaggtgttgctaaaaaaatacaggtaatagcaaaggcacgtgtgccaattgtgaagtttgtggaaagaaagagtggaatagcttttgacatcagctttgatatagatggtggcccacaggcagcagatttcatcaaggatgctgtgaagaagttgcctgctttaagacctttatgtatgattctgaaagtttttctgcatcagagagagctcaacgaggtctataccggtggaattggatcatatgctcttcttacgatgttgattacacatttacagttggtctggggaggaaaagatattctcgggtatcatcggtccaaggagcacaatctgggaattcttttggtcaggttttttgatttttatggacgcaagttgaacaactgggatgtcggagtatcatgcaattcttcaaggacctttttcttgaagagtgataaagactttatgaatcatgaccggccacatcttttagcgattcaggatcctatggcaccagataatgatatcggaaagaattcctttaactactttaaggtgaaatcagcattttccaaggcgtactctgtgttaactgatgcaaacttgtttattagtttgggacataataggagcattctgggtaccattgtgagaccagattcagttctccttgaccggaaaggctggaacaatgaagatatgttagcggaaccctgggagccgatcacccaacagtttgacaccgagaatgatgcagtatacaattggcatgtgatagacgaggatgaaccattgcccagaaatagtcaatccacatccgaggacactagttcgtcaccatctaaaaaacggaagtccccaaaatcaagacggaaatcgcgaaagaagtcgaaggctactgcctcaggcagtagtgatgttgcaaatgggttcagaaaggatagatcatccaagcgggaagcgggaagcagcaaacggaggaaagggccaaaggagtacgacagattcacgaatacactcccaaagtacacacatgttagcaagtggtaacttatagcatttatagtctggtcgcaaaggtccagcaatttgacagtgagaagagtatcatgtcacattatggcatgcgatgtgaatgacggaagtcatcagcagcaccagaagcgccatcgcatggtttgcttgttggtctgtttaattgctgtactttacgtaacagagatcacactagattaaatgatgttttggttattttatttatgctgcagcagttttggcgactagcttgtattctttttgtaacggtatgggttggtgacgatgagattatgtacgttcaaacatatttaattgatggtctgatggccttaatcactgaacaatgtgttcaaaacattatttttcaatcaaaaatgtagaactctgaaaaat

SEQ ID NO: 15331 - DNA, 1069 bp, Zea Mays
tcccctcatgtcctcttccaccacgttgcaaggtcattatggagatattgctatgaatccttctggctcattcttagtagagaagtgctttactgccagtaacttttctcataaagaggctatagtggcagagctgttggctgtgcaatctgatctatctaaaacaagacacgggttccacttgctaaagaagctggatgtcgatagatatgctaggcgacctgagcagtggagggctagtcgaacttcaaaagaaacaacccaaaaaaagtttgaggcagaatttggctcaaacagtcaatctactgggcagattgttaaagaaaagttctctcaaagtcgcacgaagaagcgtaagcagaaagagaaggttgacaaaattactgaggatgccaggagcaacaaaccagacttctctcagaaaggaaacagtaagaggccaaaatctggcaacgcaacttctgagaaccccctgagtgaaggtgctagtgctagcatggtgttcttgaagggctctgtcaagaggaagtccccaggtttcctttcagataaaccgagcttcaagaaacaaaaacctcacaaacccgattctggtagaccagacggcaaacgttttgttcgagatagtgatactagcgcaccgttcgtcaagaatgccggcaaacagaaacagtccattgctgagctcgcggacctggctggtaaggagaagctgactgcgtctgaagttcgcaaattgctgaagcctgaaatgtcaggcaagagctaatgagtttagggtgagcagaggcagcaattttgttggtcgtttttcctcgtatgttgcggaaagaaactgtggcacgtgatatgggtttgtttcagtagaaacgtattcgtgatacctgtcctgataccggtttctcttgctagcgaatctctttggctttgcatatgtttgtttgatccgctgcttgctgatatagtgcaaaacatgtagaaagatgcagccccgcccagggcaacattttccctgctaagaccaaatactcgtaataacatgttaatgcaggaaatgccaagagactat

SEQ ID NO: 15332 - DNA, 1237 bp, Zea Mays
cccgtttggatgctttcatttggttggaactggaatctgctccataaattggtcaagaagcttatcaaggagaagaaggatgatgctggaatttctgaatatattgatatggagaaggagcttcaagaggtcataacgttaaccgaagagattttggcaactgcaaagcaaactgagagtgcccagaatgttgcaggtctatcaccgccaagctattcagctggagtgcagtctgagggactggatgacctttcacattcccataagtttgccgttggtactagagttcaagctgtgtggagtgaagatggagaatggtataatgcaaccgttgaagctttgacaccaaatggatactatgtagcctacgatggctggggaaacagtgaagaggtggacccagataatgtgaggctgcttgaggaagaagcagctgatgccttgggacaagctgaaaaggaagctgaagctacaaaaatggcaataaagaggaaaattgaacaagcagcaacatctgattttcaggcgcgtagcttgccggccaaacttcgtatcgaaccaagtgaccctgaggatgttaaagctgcaaagcgtaagaaaatacatgctttcaaatcaaaatcccgctttgagcagcttgaatttgcccaaaacaaaaggcagaatgcatggcagcagtttcaaaccaaggggaaagccaaaaaggtggggttcttctccggtcgcaagaaggagagcatcttcaagtcaccggacgaccacagaggtaaggtgggtgtcactgggagtggcaagggcctgaccgacttccagaggagggagaagcatctgcaccttaaaggtgggtccggggatgcagcggatgatgacgaggagtaaactgaagaaccgagcctctgtttgtatcccgccgaacagacatttccatacctgttctttagcgccgacatggcctcgaggggactcttgacttaaaccagaaaatttcaatgtttgtcccattctcattgttgaatgtcgctgccgttttggagctgcattctggtggcgaggtcacgctgctagaggagggcgtcctgagcgtacagatcgacttgtcttgctagtctgtagtgaagtattaatccttaaacgtttactaaaattgtcaccggcctaagtacagatcctttgccccaaccaagtccattgaagaagatcaataaactcgctactgctgagtgtactctacaaaccg

SEQ ID NO: 15333 - DNA, 158 bp, Zea Mays
aaaaaacggaacgacaatcgacaatcaaccatatccccgcaatttctagctcgattccccaaccgccgtgcttccgctctcgcaccgcgtcttccttgtcgtgtgctccttcctcagacccaggctctcccccgagtccgaatccgagtctgagatca

SEQ ID NO: 15334 - DNA, 707 bp, Zea Mays
cctcgtatttgttctcatttgcaatcgtctgatcaagcacaagagaacaatatggactcagaagttttggatgaggatctggtggagattggctcctctggtgtcctagatcctagttttattgagaagctgagtgaagaaaacatcgctctgttttcaaggcgtgaagagcttcgacaacgagatacacaactgaagcagacgattggagacctggagcttgagctggaggaaacaaaaaagaagtgcggtcagcttgctgctcagctcaaggcatggaagaaccagcagcatctaccctaaatgtgaagggcatcattaagaccgaggacacggaggtacacgacaacgaccaatactgacagaaaaccgaaggttacaaggaagcacggatgcatataatgtctgtctagtgggctggctaactcatggttgagttgttaaaaagaagtttagcatgtaaatcttaggcgtgtgtgctacttagctactagacagaatggttgtcatgtgcaagcaaggaagatgacttgggtgattcctgctgttaatttgctatgcaaaatgtcacgtaaggcccttatgatccagccttgagcatcaaataaaactgtagaactcgaaatgaattgctcatggtcccctgcatttctgattaatagggtaccaactgacgacgaacaatgcagggttcaggtgtatgaaag

SEQ ID NO: 15335 - DNA, 92 bp, Zea Mays
aaaaaaaaaaaaaaaaaaaaaaaaaacaaaaaagaaaacaaaaaaaaaaaaaagcagaaaaaaaataaaaatagaaaaaaaaaaaaaaaaaa

SEQ ID NO: 15336 - DNA, 152 bp, Zea Mays
atgcggttatgagtacgaccgggcgtggacggaattcggtcctccggattttcaggggccgccgggggcgcaccggacaccgcgcgatgtgcggtgctcttccggccgctggaccctacctccggctgaaccgattccagggttgggcgggc

SEQ ID NO: 15337 - DNA, 3891 bp, Zea Mays
tcccctcgcgatttccacctcctcccccacccccacctccgtaacccacttccaggtgggccccccacatcgccgccggtgacacgcacctccctccctgcctcccccgctaccgaccaccacgtccacgcccccggtcatgacgacctcgccgccgcccgccgagcaggaacagcaggaggaagaggaggtgctggtgccgcatggcccgcaccaggagctgcccaatggagcgcagccaatggaagttgtgcctgctgagccagctgctaccgtggagaaccaacagatagaggatccaccaatctcgagatttacttggaccattgagaatttatcaagagttagcacaaagaagctctactctgaaatttttgttgttggaggctacaagtggcgaattttgattttccctcgggggaataatgttgaattcttatctatgtatttggatgtagctgattctggagtcttgccctatggatggactagatacgcacaattcagcctctctgtggttaatcagattcacaacaagttcacaataagaaaagaaacacaacatcagttctctgctcgagaaagtgattggggtttcacttcatttatgccgctgggtgaactctacaacccaagtaggggttatcttgtaaatgatacttgtatagtggaagctgaagttgctgtgtgtaaagttgttgagtattggagttatgactctaaaaaggaaactggctatgttggtcttaaaaatcagggtgctacctgctatatgaattctcttcttcagacactctaccacattccgtatttcagaaagatacagctaactacagatatctcttgccaggctgtttatcacatgcccaccaccgagaacgatatgccctcaggaagcatcccactagctctacagtcactcttttataagttgcagtataatgacagcagtgtctctacaaaggagctcacaaaatcgtttgggtgggatatgcatgattcatttatgcaacatgatgtacaagaattgaacagagttctttccgagaagttggaagataagatgaagggaactgttgtggagggaacgatacaacaattgtttgaagggcaccacatgaactacattgagtatctccagcttgatgtcaaaggttgtcaggatgtctatgcttcatttgataagtacgtagaagtggagcgtctggaaggtgacaacaagtatcatgccgacaaacatggcctgcaggatgcaaaaaaaggagttctttttatcgacttccctcctgttttgcaacttcagctaaaacgttttgagtatgatttcatgcgtgacacgatggtgaagataaacgatcgttatgaatttccactccaattggatcttgatagagataatggaaaatatttatctcctgatgctgacaggaatgtgcgtaatctttatacccttcacagtgttcttgtccatagtggtggtgttcatggtggacattactatgctttcatacgacctacactttctgatcaatggttcaagtttgatgatgagcgtgtgacaaaagaagatgcaaagagggcactagaagagcaatatggtggtgaggaggagctacctcagacaaatcctggcttaaacaacaccccattcaagtttactaaatattcaaatgcatacatgcttgtgtacattcgtgaaagtgacaaggacaaaattatatgtaatgtggatgagaaagatatagcggagcatcttcggattagattagaaaatgaccgtgaagagaaggaacgtcggaagaaggaaaaagcggaggcacacctctatactataatcaaggttgcaagggatgatgacttaaaagctcagatagggaaagacatatattttgatcttgttgatcatgataaagtcccaagcttccgtatccagaaacagatgacctttgctcaattcaaggaggaggtagcaaaagagtttggtattcctacacagtttcaacgattttggctgtgggccaagcgacaaaaccatacctaccgacctaacaggccattgtgtcctcaagacgaagcacatactgttgggcagctaaaggaactggtgaacaaggcccacaacgcagaactgaaactgttcttggaagttgaacttggactggaccttaaacctcttcctcttcccgacaagactagagaagatatatttcttttcttcaaactctatgaacctgaaaaggaacagctgcggtatgttggtaggctttttgtaaaggcttcaggaagaccacaggacattctgctgaagttaaggatgttggcaggtttttcacaggatgatgatattgaactttatgaggaaattaagttcgagcccaatgtgatgtgtgaatacattgacaacaggcttctgtttcgatcttgccagcttgaagacggggatataatttgttttcaaaagccttcaaaaccagatagtgcagaccgatatcgatttcctgacgtcccatcctttttgacgtatatacgtaaccggcaggtggtgcacttccgttcattggagaagcccaaggacgacgaattttgccttgagatgtcaaagattttcacatatgatcaagtcgtggaaaaagtagctgaaaaacttggcgtggatgacccatcgaaaattcgtcttacatcacataattgttattcgcaacagcctaagcctcaaccaataaagtacagaggcgttgaacgtctactggatatgctgattcattataaccagacttctgatattctgtactatgaagtattggacataccacttccagaattacaagcgctgaagacattaaaagttacctaccatcatgccacaaaagatgaggtgtcagttcacagtataagattaccaaaaaacagcactgttggcgatgtgctgaatgatatcaaaacgaaggttgagttgtctcataccaatgctgagctaagattacttgaggtcttttatcacaagatatacaaggtatttgcaccaaatgaaaagattgaaaacatcaatgatcagtactggacactgcgtgcagaggaggttccagaggaggagaaaaatcttggccccttcgatcgtttgattcatgtatatcattttacaaaagacactcaaaaccaaacgcaagttcagaactttggagaacctttttttatggttattcgtgaggatgagaccctatcttctatcaaagaacgtatacagaaaaagcttaaggttccagatgaggatttctcaaagtggaagtttgcatacatttcactcggtcgtcctgactattttgaagattcagatactgtagccctaaaattccagagaaacatgtatggagcttgggagcagtatcttggactggaacatccggacacggctcctaggaaggcacacacggctaatcagaaccggcattcattcgagagacctgtaaaaatttataactaggcatgttagaaattgagcgatgagctgccgctcaataccaagccaggctgaagttgctggcttgaaatagagagcatgttgctcaggtttttcgatggagctgtggaactagttcagaggagactgatcgggcgacttgtcatctttcctgtttgttttgctgccccggatatataaagttgtacagagatgaccccaccagacaattgtctttagtagataagataactttttacagtcgagtggccgatgttttagtcgatcactctgttctgcagttggtggtggtgctaggtggccttgagctgttgagggtacttgtctttcgactctttctgtatattattgacgcggcggatgtttgtaattccaatgatacatttcttacttgctggtttccggtgctttcc

SEQ ID NO: 15338 - DNA, 411 bp, Zea Mays
caaggagctgtgaactttgctcttatgatgtcacaaatggagggaggctgcccagtagattataatacaataactgatcttttccttcagttatgcttatattcataatcataggtaactgtcttgttgtctatttacattccttggttttatgagtccttatggatttttgctttatgcatctgttaacagagaaatatgatacgggaggcaacaacttttctgttggatgttctgaaaccaaacttgccagagcatgcttttcttcaaaccaaggttttggagataaacttagtgacttacccaaatgttgttgatgccattcttgctaatggtatgttcagtcattatgatcgccctcgtattgcttacctgtgtgaaaaggctgggttgtacttgcgagccctccag

SEQ ID NO: 15339 - DNA, 568 bp, Zea Mays
gacaacccgaccgtgttgcctctctcctcctttcgtgtcgtctctctcctctcctctcctctcgcgtctgcagcttcccttgccggctagggtttgcagatgacgacggtggcacccacattttcggcccctcccagaagtactcgtcccgcgacctcgccgcgcatacctcgctcaagcccagaaaagacggtcaatagacccaagaggagttacagaagaggaatctcagggaggaacttgaggaacgtgagcgcaagcactactcttccaaggataagtcctatgctaaagaaagagaccggcggaaaagctcaagccagctactcctagaaggttcaaagagagaggcagaggataagatagttccatgagaaattgatgcagatgactccgatgtggagcctaaaagtgatgatgacagagaagacaacacaacatctttcttgacattgtttaggcagaagtggagcaactgcgagaagaacttaggcgacatcaggattaattgaagcaacaagctgcgcaacatgaatattatgctacacagattcaacaacagcaaaca

SEQ ID NO: 15340 - DNA, 2805 bp, Zea Mays
agttagccaggagccagggcccaggaggccagaagccgcacacgcggtcacgcggaccgcggacgactgccgccgccgtcgtcgtcgattggctcttctgctctccatcccgacacatcgcgccgcttcaagctaaagtgccactgcgccaccatccatcccggcatctcgcgccgtttcagtctcaagagcagatacgcaggtatggagccacgcactgagggagatgcttccaggaacttgcgccaaggtcgattgctagagccgccaccggtacctgctgtgaggacttctccagaaggagtgcagaggcacacaggtcaggatgtgattgctagtagaagtcaaagtgcagcagcatctgagacgggctcttctttgccatgtgaagatggaaatgcaacggctgaaactattggcagcagcacccatcctgtgcacattggtgtgcaaaaccaagacattgaacaagagcaagttcatgagactggaaagagatacaagaggttgacatctgatgtatggaattactttaccaagaaaaaagagataatagaggagaatgggaagaagcgtgagcaaatttggggttattgcaacttcccaaattgtaagcggcgatatagagcagagggccgccaaggtacaactgcatttaagaatcatttgaggtccgcacacagcatagttcgaggccaacaacaacttaaatttgagaaggaccttggtaataacattacccatatccagcctttcatgtatgatcaagaagttagcgtgaagaaacttatcatggcaataattatgcatgattatcctttcaatatagtagagcatggatatttcgttgatttcattaaatcacttcatcctagctttccaatcaagagttgtaatgctgttggtaaagaagtaatggatacatatttggaagagaaggagaaattatatgcacatttaaaaactgtgcattgtcgctttagtgtaaccatggatatgtggacatcatgctcgaataaatcatacatgtgtgttactgttcattggataaatgatgattggtgtattcagaagaggattattggtttcttcaatgtcaaaggacgacacactggtaaaaagttgtcagagacctttactgaagctatggttagatggaatcttgataagaagctattttccttgaccttggataatgctagtgcgaatgaattggcagtcaaagatataatttcagatctaaaagatggccaggcttccttagtttgtgatggtctgttttttcatgtaagatgtgcatgtcatatactaaatttagttgctagagatggcctgaaagtaatttcgaaaacaattgacaagatcaaagctcttgtactagctgtgaagggatctccattgcagtggaaggaacttatgaagtgtgctagcgagtcagaattagatacaaagaggggcatctcacttgatgtttcagcaagatggaattcaacttatttaatgctgcgggatgccttgtactacaaggatgcttttgcaaggcttaagtcttcaaatcgtcatatgtatgtaaaaaattatccatctccggatgagtgggacatggcactaaaaatctttcaatgcttgaaaaaagtttatagtctcgctgaaattctctctggcacttcatatccaacagcaaacttgttctatagaggtttttgtgacataaaagtattgctagatgactggtgttctagtgatgatgccaccatcagtgaaatggcaattgccatgagtcaaaaaattgagaaatattgggaacattctaacttggctcttgctgtggcatgctttcttgatcctcgatacaagaaaaaagttatagagtattacatgaagaaattccacggtgatgggtaccatgtggaacttgaaaaaattgttaatgtggtaagagggctctattgtttttattctagctctacacctgcaccagcaaagagtacatcaccggaaccagctaatagtgcatcagatattttaatggcaagtgtatctgatgaactggacagttttctgtatggtacaaatgaacctactctagttcggtccaatgagttggaaaagtacatggcagatccacttttgcgtcttggtggtccatttgatggcccatttgatattttagcgtggtggaagagcaagagggaagtgtatcctattctttcacaaattgttcgagatgtgatggccatacaagtatcaacggttgcatctgaatctgtttttaatgctgctggccgttttgttgatccttatcgtaatcgtcttgagccggagatggtagaggcattgatatgcaccaaagattggatagctgcagaaagaaaagattctaagattgttggttcaattgtgagtgaccttgaaattgagactttatctaccgtcatggctaacaaaataagagctgtggatgacaaggacatagaatggaaggaccaggagcatgatggtgagaacgaatatattgatagtgatcttgatgttatggatgaccacaatgaactttgagctatagctgtaggcttctagtttcagcttaatgtctactgcctttgagttactatgttatgtgtcttgggacttttataaactattatcgtgattgtgcatttgtgggtgtctgcttaattaattagacattgatgttgacttgttatatactccgtccgtcccaaaatatagctgtttctagtctactttttttgtccatatttattcaaatgataataaatatagacatatatgcaaactgta

SEQ ID NO: 15341 - DNA, 1326 bp, Zea Mays
ggtgttgaatggtttcagcttcttggtcacaaagacgacatgccaaaggatgaggttaatatatcactaaatgctgctgctggacggctcaaacaaactagggaagagagggaccaatttgacgaagcaaacaatcaaatcatatttagcttgaaaaaaaaggaggatgacctctcaaaatccattgccttatgtaatgtggaatccaatgttgtcaagatctggatcggtttccttgaggactcgtggaagctgcagtcctcatacaatgaacagaaggataataaaacgtgtgatgagctggagaaatgtgtgagtgattttctaaagttgacaaaacatcatctttcagcattcaaggaagtcctaagccaattgattgagaatatcgaaacatatgtcggtaacttggctgtcttaacctcaagggaagaggaaaaagaacatggggatgatgaggcatctgagaggacagatccacgtaaatcccttgaagaggaatatctagaaacagaaaagaagattataattgcgttcagcatagttgatcacataaagaaattgttttattctggggaaggggctgattcaaggagagatgacccagaggtcaagagcttaattgaggagattgagaaaatgagggaatcgttcgagtctatagaaaggccaacactaagcatagaatctgagaaagcaaaaccactacctgttgagggatcgaaactgagtccttcacctcttcaggctcctgctaccccaaaagctgcacacgttgactcaccaaaatctcccatgaaacctgagcagcatttcgattcagatgcggagcttgcaaccctgggatcagagatcgggaaagaagacaaagagtactcagttgaggagataagcgggtgggagtttgacgagctcgaagaggaccttaagagctgacacaaagaatcgacaaacagaacacaattcgatttggttatcttcactgacatgtattatttgtctgggccttgcgtgggcaagaaatacacactggttgatatgtacatagtgctgtttgattgtgtattgtcgcgcactcgcgctgtcaatttgtcactgtcttaagatatacggactgagctggtgtaacttgggcgaggcatttgctatttgtttgctcttgccgcgaatatttttatcttacatgtataccgaaccctgttgtaacagttgtaaacgcggaaaacaaaattcgaacatttgacagaatttgctccgtagaacattggattgttgggtttgagttttacattgcattcctaatggatgaatctatcaggattcagg

SEQ ID NO: 15342 - DNA, 1098 bp, Zea Mays
tggagtcagagctttcatcggctagctagcttgttttacagatagtctccaactggttcatcaacgcccgtgtccggctatggaagcccatgatcgaagagatgtatcagcaggagtgcagggagctcgacggctcctcggccggcggcgggggccccgagtccgtcaacgacccctccggcgccgacgactcgcactccccgaccaccaccggcgcagcgcagctcccgcaacagcaacatcacctcggcacggtgcctggggtgatgccccacaagcccgacccgggcgccgccggtccctcggctgcggacgcggcgttcgtcgggatcgaccctgtggagctccttggcggtggcgcggacgacttgtacgggcggttcgagcccggggtgagggtgcgctacgggcccgctgcggcaggcgctgctgccggcgacgtgtcgctgacgctgggcctgcagcacgccggcgccggcaacgccgccgggcccgacagcaccgggcggttctccttgagagactacagcggttgttgatgcttacacatcgcttacatcacctttattcatggctcatgcatgcgcccatcatgcatttggaagagcaaggatcgacgaaagaaagagagagagagaaaagagtaaccagagaagagatagagggcgctagacaaagagagatgagcatctagaaagagaaaaaatgcatggtgcctggaggtgatgaatgggatgggatatatgaatatgagattatcacaaccaccttcgtcgtcttcttcccagatgattcttaatttacttagctagaagattaattccttttgctaggcattgttgttggggggttaaggataattaatttgtatacagcaaaggaagataggaagtgtataattgtttagtcacacttttttggttctttgttttgcatttgcccgtttttgttctggtgtaccaattttccttgtactcatttttcttccctctgtaaactaaacataagagacacatacatgcatacgtaaatacatatattggtaaatatggtcatacgtatagcatatatatgtaaggcctaaaaattgaacgtacg

SEQ ID NO: 15343 - DNA, 594 bp, Zea Mays
aaaaaaaggacgggaagataggctacgacgagttcgcggcgatgatgaaggccggcactgactggaggaaggcctcccggcagtactcgcggcagcggttcagcaacctgagcctgaagctccagaaggacgggtccctcggcgccgacacacggtaggccgccgagtgtagtggtggtgctggtgttcgtccgtctctttgcttgcttgcttgttttgctgtgcggggtttttgttggttggtcagacagtcagtcaggtcattagattccacctccacgttctgtttccattacacggtgaaccctcagctggagctgtgattcttgggcttgtgattgtagaagaaagatgcacgtacaacgtacgtattgtagatgggtgcagcagcgtgtgctgacaaagaatgctggagtagcacaagacacgagtagtcttgctttgcttgtaacttgtaagtagaatttgttttgtgtgcttgcaatgcatgacgatggtgattgccctgcaaaaccgtgtgaatgcctgcacgcaagctgctcgcgtcgcgaccctcgctcttgctggctgtaaagaaggacggtgtggttttag

SEQ ID NO: 15344 - DNA, 936 bp, Zea Mays
tcaatgattaatgtgtctcacataggacctgaggaatctgcggtcacagctgtactcagcggcagaatattttgaagtattttacaggaacaactcgcacaaatctactgtgatgacgagtttgaaagattacacagttgaggcccttgttagcacagtggaccatctgggttttgtgtcatacaaggtggataaccttgtcagcgagaaagctgtcgaggttaaggagactgaattcctagtgtcttcagttgaacagagggtacgaatttgccaacagacaactgaccaggaggcaagatcccagcaagctcttcttatcaaggcgccaaagtatcataggcgttacatattaccaggcctggatctactggaatcttccatccacccggtttcagaacctccacggtatagcaggcagtatacaggccgcaagatgcacaagtcccagtcttttcgtcggcaggctacgatgaggcgtgaaccatctcctacacctaacgatcggtcgcggtcgttatcgccttctcgtaaagcacgagctaaatctccatctcctcgaatcgtgaacacaaatactgcaagagaaacaagggcaggctccccgataccaaattccagcccgatggcacggtccgcctctacggttgcaagaagaccgccttcgaactcgaggcatttgagactagcttccatgcagttgcacagcgactgggagcagcaggagagaagctcaagcaaaggcaggaggggtttcctcaggtcgctgctcacgaggcgccggtggaggaacgacgagtcgtccttgtacagttacttggatgagtactgattgctggaatgttggaactgaaaaaagtctggtgttaactgaatcttctatagatggatgcgatgctctctgctttgccaaaaggttttggtttcccgtttcca

SEQ ID NO: 15345 - DNA, 2366 bp, Zea Mays
cacaaatcaggattggtagagcccatctctgcgccctgccttgctggctctgacctctccctcccttccccttcctcgattgttcctcccccttcttttattagggttttttttgtctccttagatttgcgcctgttctcacctgtgcgcatactagtctctgcatcagagagtagagacctcggagccgatcttcaacacgcagattgggcagagctgcctgccggagggagagtggagagagagagagagagagagagagagagagctcaaggggggcaaaaggagtttttttttatccagcttgttagcttgattctctttgatccgggagagcagccgccagtccaactaatcctagctattggtgtgccggggctttgattgttctccagatccgagccacctgctgggtggactccaggaatccgagcacgaagttgacaggggagttctcagggaaaagttgcgcaggggaggaaggaagagcctgaaagggcggtgcggagagaaagactataagagcgacctgggtcccttgaggatgccgtcaagaaaccgcgtggagaggagggcgatgagatgagggatgctggccgcggtgatggactatttcagctcctgctggggcccgcgatcgggtgacgggcacagggggaagggccccgacgccgccggccggcaggacggtctcctctggtacaaggacgccggtcagctcgtcactggggagttctccatggccgtggtgcaggccaaccagctgcttgaggaccagagccaagtggagtccggatcgctctccctggctgacccgggcccgcagggcaccttcgtcggcgtctatgatggccatggcggtcctgagacgtcccggttcatcaatgaccacctcttcaaccatctcagaaggtttgcaactgagcacaagtttatgtcagcggacgtgatccggaaagctttccaagcaactgaggagggctttctttctctagtcagcaaggaatggtctttgaagcctcagattgcttcagtgggctcctgctgccttgttggtgtaatctgtgctgggactctctatgttgcaaacctgggtgactcacgtgcagttcttggaaggcttgttaaggcaactggagaggtcgtggccatgcagttgtcatcggagcacaatgcgtgctatgaggaagttagacaagaactgcagtcatcacatcctgacgatccacatattgtggttctcaaacacaatgtttggcgagtgaagggtctcatccaggtagacaaaaatatgtactctggatcagatctcaagatctattggagatgtatatctaaagaaaccagagtacaacagagaaccacttcacagcaagtttcggcttcgagaaaccttccagaggccgatccttagttctgaacctcaaattactgaacatcgaatacagccaaatgatcaatttgttatatttgcttctgatggtctatgggagcacctcagcaataaggaagcagttgaccttgtccaaagtagtccacacaatggaattgctcggagactagtgaaagcggcgatgcaagaagctgccaagaagagggagatgagatactcagacctcaagaagatcgaccgtggtgtgagaaggcatttccacgacgatataacggtcgtcgtggtattccttgatttgaatgccatgagcaaagctagctggagcaaaagcccctcggtttctctccgagggggcggtgtcaccgtccctgcgaagtccctcgcacctttctcagctccggcacggctgaacagcacctactgaagttgctaccactcttgaaaggaagaacacggtgcagatctgcagtggtgagagaaaaaaaaacagcaatcaagtgtagcgttacagttacacctgctgtgttgttgctctttgcaaaactactgtctagactccgcctggtaattagtgtactgatagcgaggtaaaaaaaagttagattatttgttagcagcggcagtgatttgacatctaaggaacaacaacacggtgtccaccgattctgctatcctgatggctcgcggcagcctggctggtcggcacacgacacgaagtgaagctgttttactggcggcatctggctttgttatctcatgggacagtgatccacaagagtaagggatcagctcaatccaaagtcaatagatgttccttataaaacatagaggtacagatgttctcatcggctatgtgtatttggggaaaaaatcaatataaggggtgtttggtttttagggactaatttttagttcttctattttattatatttattccttaaactaccaaatacataaactaaaattctaatt

SEQ ID NO: 15346 - DNA, 1673 bp, Zea Mays
cctcaaagcgtgccgctcggtgccaccatccgtcctcgaagctgccaagatggtggcaaatagacttgaccaaacgggtctgtattgccggtggcaatcggctgctgattgaatctcctagtgaacctaaatggtcaccgaaaggagaactgttttttgttactgacagagggagtggattttggaatatttataaatgggttgaacaaaccaatgaaattgttccagtgtattcactagatgctgaatttacgagaccattgtgggtttttggcatcagctcgtatgattttcttggaaacagcgaccacattgttttcagttatagacagcaaggaaagtcacatcttggtgtgcttgattgtgattcaggttctatttcattgcttgacatccctttctctgatttatctgatgtggttgctgcagatgattacttctatattgaaggtgcttccgcgagtattccacggtcgattgctaaggtgacattaaatgaaagcaaaaccaaagtagtcaatttctcaatagcctggtcgtcctcaccagacctcgtacaatatagacctttcttcagcacaccagaacttgttgagttccctacatccaagtctggccagaaagcttatgcctatttctacccaccatcaaatcccaattttcaaggtttgcctgatgaaaagcctcctttgcttgtcaaaacacatggaggaccaactgctgaaacacgtgcaattctggacctcagtgtccagtattggacaagtagagggtgggcatatgtcgatgtcaactatggaggaagcactggttatggaagagagtatcgggagagactattgaacaaatggggtattgttgatgttgatgattgctgcggctgtgcgagattcctggtggagagtgggaaagtagatgggcagcgcctttgtattactggtagatcagcaggtggatacactactttagcttcacttgcattcagagacacgttcaaggctggagcttctctctatggtgttggggacttgactctgttgagagcggagacgcacaaatttgagtctcattatatggacaatcttgtaggaaatgaaagagcttactacgagagatcaccaatcaactttgtcaaccagtttacttgtccagtcattttgtttcaagggttggaggataaggttgtgccaccagatcaggcacgcaaaatatacagtgccttgaaagagaaaggtttgcctgttgctttggttgaatatgaaggagagcagcatgggttccgtaaggcggagaacatcaagttcaccttggagcagcagatgttgttctttgcaagattagttgggaagtttgaggtggcagatgatataactccaatcaagattgagaacttcgattgatctcttggagagtggtgtccggttcgaagttttgttcacgtaacccgattatatgttcagtacattagccgttgcagtaccttttaggaatacgacttcatcttatttttgagggttgatggaaatctcttttttgcgctgtaacgatgaagtcaccttgttttctgttcggttctagaatgaaatagaacggaatgacactatcctttatttggttgatgagtgaaaatagataatttcataactataatacattcatacaaccatatatat

SEQ ID NO: 15347 - DNA, 3210 bp, Zea Mays
agcccgatcgagttcccgtctaagccgcacgccgttccggccccgatccgccgcatcacgtcggcccgacatgtaccagtggcgcaagttcgagttctttgaggagaagtctgccggccgcggcggcggcgggggttcagccgccgccgtgccggccgagatcgcgggccgagtcacctgctgctcgggcggccggggccgcgtcgcggtggggtgcgacgacggcaccgtgggccttctcgaccgcgggttccgcctctcctatggcttccaggcctacgcctcctcggtcctcttcctccagcagctcaagcaaagaaatgttcttgtcacggttggagacgatgaccagtcatcttctcaggcatcagcaatctgtctaaaggtttttgacctcgataaagtacaagaagaaggatcaagcacaacaactcctttctgtgttcaaattttgcggatcttcactgatcaatttcctcaagcaaagattacatcatttatggttctagaagaagcaccacccatactgatgattgccattggactggacaatggtttcatttattgcatcaaaggtgacattgcacgtgagcgtattacacgtttcaagttgcaagttgaggctgcttcagatggcagcactagtttgcctattactggtcttggttttcgagttgaggggcaagcacaccagctcttttctgtaactcctggttctgtaaccttgttcagcttgcatattcaaccaccaaggaggcaaacacttgatcagattggttgtcagacgaatgctgtagcaatgagtgaccgtatggacttaattattggtagacctgaagctgtatatttctacgaagttgatggtagaggcccttgctgggcatttgatggtgagaaaaagtttgtaggttggtttcgaggctatttactctgcattattgaagatcagagaacacataaaagcacacttaatgtttatgatcttaagaatcggttgattgcacatagcatgcctgtgggggatgtttcacacttagtatgtgagtggggttatattattctcataatgtcagacaaaaagattctgtgcattggagagaaagacatggaaagtaagcttgatatgttgttcaagaaaaatctttatacagttgcaatcaatcttgtacaaagtcagcaggctgatcctgcttccactgctgaggtgctgcggaagtatggtgaccatctgtatggaaaacaggaatatgatgaggctatgtcccagtatatccacactattggtcatcttgaaccatcgtatgttatacagaagttccttgatgcaaagcgcatctacaacttgacaaattatttagagaagttacatgatcgagggttagcatctaaagaccacaccacccttctgttgaactgctataccaaattgaaagatgtggagaaacttaaccattttatcaaggatgaagatggggttggtgagatcaagtttgatgtggaaactgccataagagtatgccgagcagctggatatcatgaacatgctatgtttgtggcaaaaaaggctgggaggcatgagttgtacttgaagattttacttgaggatcttggtagatatgacgaggcactgcaatatatatctggcctcgaggcaaaccaggcaggtcttactgtaaaagaatatgggaaaattcttgtggaacataggcctgctgaaacagttgaaatactgttaaggctctgtacagatgttggagatcctacgtcgagaagaggttcaaacagtatgcacttgcttatgataccatccccaatggactttgtgaatatatttgtgcacagcccgcaatatctgatgggatttctggaaaattatatcaaaacagtaacggactcacctgcgcaaacagaaattcataacacccttctggagctctatatttcaaatgatttgagcttcccgtctatctctcaagaaaatgaatatgagaatcactatatcaaagaaataaaaggtaaagaaactgctaatgtctataggtcaggaataaaggaaaaaactggtcttggaaaagaagatcctaaagtagcaaagaatattgttgataggagaaggaaagggcttgcgttactcaaatctgcttggacatctgagatggaagatcctttgtatgatgttgatcttgctctcattctttgtaacactaatgcattcaaagatggtttgctatttctatatgagaaactaaaactttacaaagaggttattagttgttacaagcaagcacatgatcatcaaggtttaattgcatgttgcaagaagttgggggactcatctcaaggaggggatccttctctctggggggatctattgaagtattttggggatcttggggaagattgctctaaagaagttaaagaggtcttgacctacattgagaaagaggatgttgtacctcccatcgttgtgctacagacactatcaaaaaacccatgcttgacactctcagtcgtcaaagattacattgctcgcaagcttgaacaagaatcaaagctaattgaagatgatagaaaatccattgataagtatcaggcagagacagagttgatgaaaagggaaatacaagatctcaagacgaacgcgaaggttttccaactgagcaagtgtagcgcgtgcactttcacccttgatctacctgctgtccatttcctgtgcatgcactcgttccaccttcgctgccttggtgacaacgaaaaagaatgcccagaatgcgcgcctgaatacagatccgtcatggaggcaaagcagaagctagagcaaaacgccagggaccatgatctctttttcaggcagttgaggggttccaaggacggcttctctgtcattgcagactattttagcaagggcatagtgagcaagacaaccttacctcctgagaatggacggtagtgaaggaccactggtactccgttgccttgtacgacattatatggtgttatttccctttcatgcaccgggttatgcaatctggcctgtttcagccatgcagtgagggtttttttttctttttctttttggtttgacattgtagatactcattttccggcagtttctttctgaacccaagtgcatttgctttgacattgctgtgcagttttccagcattgggtttcgatgtttggctcgtgccctcctacttttgaaagaag

SEQ ID NO: 15348 - DNA, 1615 bp, Zea Mays
cggatttgtgtcatggtgagaagttaatccgaccaagctccaggggaccatcatttttgacacttaccctgaaaatttttgatggcgtttacgcacataaggagatagctgaaagtggaaaggatcataaagatatcacaagtttgcttcgcctggggaaaacactaacaattgataatgaaacttttgaagacctcgatgaggttattgaccgatatgtggacccattggtaggacacctgaagagcatgctgtcgtaccgtaaattcagaaagggtttaaaaaatgaggttgatgagatgttaagggcagagaaagcagagaaccctatgagaatagtatatagttttggcatatctcacgaacatcctggcacctttatattgtcatatattaggagtacaaacccacatcacgagtacattgggttgtacccgaagggcttcaggttcaggaagagagacttcgacaacattgaccgtcttgtgtcgtatttccagaagaatattgacaaaccaccacctgatgctggaccatcaatgcggaatgttgctgcaatggtacctatgaaaaactcagcttggggttctggtggtggtggggatgcaaatggtggttggaggggagatggtagtaatgatagggatcgacctttctctggcagatcaggagggaggtttgattcaaggaatagctctggtggtcgtggacgaggacgggggcgtggccggggtaactttggcgatgacgataatgctggtggaggttggagtggaggaggtggtggtggcaacagtggaaggtggaccgataacattggcacaggtggcagtggtggttcttcctggggtggtggtggcggtggtgatgacagcaaccgtggcggtggaggagggggttggggatcagctggtggtggtgctgacaatgctggtggcggaaatggagcctggggagcagctgctggtggctctgatgacccagggttgggtagcgccaaaaaggtcgtcccagcacaggatggtggaaccggctgggggtcagaaggtggcggcggcggtggtggcggaggctggtaactgggctgtgccctgcgttgtagtccagacaacagctactagatgaaaacagtttcctcgttttaactcctgtcctatcgtactgtggacgggagaaatctggcacttataagtcttgcagctgctgcacgtctgcagatgttgcattgcggacagcgttatgtttcagtgcatgtacataaatccaatatgtctggtcacactttcctgctacgaatttgatcctggtgcttcattgttgaggctatccgcaattaggccagtactctaccccatgttggtaagcttttgtgttgaaagtgtaacacgctacattttgtttccctagcttcacataaccccgcttacaagtgtttcaatgttttggcgacccatatgcctttcggtttgtgggcgtttcgatagagtcaggtctggatttcacaactagcatttatgacagcaaaagccggaaggtggcattcgattgtacttgagtcctacaaatgatcgattgaaagttacatgttattataaaaacgaccatggactaggaa

SEQ ID NO: 15349 - DNA, 3188 bp, Zea Mays
gcttggcttggcttgcattcacagttgcacgccggccgccgccaaccccgcccccacgtcgcgcgcgctgtctccctctcgcctctctcgtggagacgactgggcgacagccgacagccgctgtcgcccaacgcaagctgcccaggtcttcttcgggctcttcgccggcgacgagcacagccaggtttaggtcgagcaggggccgatgggggaagaggcggagagcaactgcaagcgcaaggcgccggactcgagcgtggaagagcagccgagcctcgcgccggcgccggcgcagtcgcaggcggacccggcggccaagcgcccgaacatctcccgctcttgcgtccacgaggtagccgtcccgaatgggtacgagtcggttaaggacgaggcggtgcacgggacgcttgccagcccggccttcaatggggagatggccaagcagtacccgttcaagcttgaccccttccagagcgtatccatcgcttgcctggagcggaacgagtccgtgcttgtctccgcgcacacttccgcggggaagaccgtcgttgcggagtacgccattgccatggcgttcagggacaagcagagggtcatctacacctccccgctcaaggccctgagcaaccagaagtacagggagctcagtcaggagttcacagatgtcgggctgatgactggcgacgtcacgctccatccgaacgccacatgcctggtcatgacgacagagatcctcagggcgatgctctacaggggctccgaggtgatcaaggaggttgcctgggttatattcgatgagatacattacatgaaggatcgtgagagaggggtcgtgtgggaggagagcatcattttcttgccccctgccatcaagatggttttcctttcggctaccatgtcgaatgcgaccgaatttgctgaatggatatgcagcctgcacaagcagccctgtcatgttgtgtatacggacttcaggcccacaccattgcagcactatatgtttccaataggtggttctggtctttaccttgtagtagatgaaaatggccagtttagagaagataactttgcgaagctacaagactcctttgctaagccaaataatcaactggatggaaggaaaggtggtggacctaaagcgagtggccgaattgcaaaaggtggaagcgcctctgggaattctgacatatacagaattgttaagatgattatggagcgcaagtttcaaccagtcataattttcagctttagtagaagagaatgtgagcatcatgccatgtctatgtcaaaacttgacttcagcactgaagaagaaaaggaatgcattgagcaggttttctgtaatgctattggttgtttagtggaggaagacagaagtttacctgctatagagttgatgttgccacttcttaaacgaggtattgcagtacaccattctggactacttccaataattaaggagctagtggaattgctctttcaagaaggtcttgtgaaagctctctttgctaccgagacatttgccatgggtcttaatatgcctgcgaaaacggttgttttcacgtctgtcaaaaaatgggatggcgatagtaaccgctatattggttctggagaatatatacagatgagtggaagagctggccggcgtggcaaggatgaacgtggtatctgtgttataatgatagatgagaagatggaaatgagtgttatcaaggacatggtgttaggcaaaccagcacctctagtcagtactttccgtctgagctactacactattctgaacttaatgagccgtgtggagggccaatttaccgctgagcatgtgattaggcattcattccatgaatttcagtatgagaaggcattgccagaaatagctcaaaagattacacggttggagaatgaagctaccttgcttgattcttctggcgagactgatcttgctgaatatcacaaattggggcttgatatatctgaactggagaagaaaatcatgtctgagatgattagaccagagagggctttgttgtatttggttcctggaaggctggttagagtgagggatggttcaacagactggggatggggtgtggttgtaaatgtagtgaagaaacctccagcatctgggactctccctcctgcattaagtgcatcgcgcagcaacaactatacagtcgataccttgcttcactgctcctctaattccagcgagaatggatcacgttcaaagccatgccctcctcgcccaggggaaaaaggtgaaatgcatgtggtgcctgtaccattgcctttagtatctggtctaagcagtgttagaatcaacattcctcctgatctacgaccacctgaagcaagacagaatatactttctgcagtgcaagaactaggaaagcgctacccccaaggtcttccgaaactacatccaatcaatgacatgggtattcaagaacctgaactagttgacttggtacataaacttgaagaccttgagcagaaacaatgctctcaccgacttcataagtccggtcaaagtgaacaggaactatcatggtaccaaaaaaaagcagatctgaatactgaaattcagcaactcaagtcaaagatgcgggattcacagctacaaaaatttagagatgaacttaggaaccggtcccgtgttctgaagatgctggggcatattgatgctgacggtgttctccagttaaaaggacgtgctgcctgtctaatagacacaggggatgaactgcttatcactgaacttatgttcaatggtacatttaatgatcttgaccatcatcaagttgcctcccttgctagctgctttgtaccttgtgataaatcaagtgagcagatacgcctaagaaatgaactttctaggccgatgatgcagcttcaggaggctgcaagaaaaatagctgaggtacaacgagaatgcaaactggaagtaaatgtggaggaatatgttgaatcaacctgcagaccctaccttatggatgtcatatactgttggtcaaggggagccacctttgcggaggtgatggaaatgaccgacatatttgaaggaagtgtcataagacttgctagaaggctggatgaatttctgaatcagttgagagctgctgctgaagccgtgggggaggttaaccttgagaagaagttcaagaatgcaagtgagagtttgcgtcggg

SEQ ID NO: 15350 - DNA, 1441 bp, Zea Mays
ttaatatcttgatattgctgttctaggaagtatatgaacaacaaaaggaacttattttactcggggaacgtgttgtgcttgtgacacttggttttgatttgaatgtgaaccatccttacaagcccttggttgaagcaataaaaatattcaaggttgctcaaaatgcacttgctcaagttgcctggaattttgtcaatgatgggctccgcacttcactttgcctgcaatttaaaccgcaccatattgcggctggtgcaatcttcctcgctgcgaagtttctcaaagtcaagcttccatcagatggcgagaaggtctggtggcaagagtttgatgtaactccgtggcagctggaagaggttagcaaccagatgttggaactgtatgagcaaaaccgtgttcaaccaccaccatcacaaggcaatgatactgaaggcagttctgcaagtgttgcgaatcaacgtgttcctggtaaagttccaggagtagctgatgaacctcctgcccatgaccataaccaagcacccagaccatcgagccagcagaacatgttagaccaccgtggttatgaccaccctcacccagataagcaaaactataggatacctccaaatgatgcaagggatggcactgctaatagcaacgaaggtcccaatgtgtcgtcttcaatgatggatgcgatgaagaaggtaaacaaggataaggtgaaagcggcactggagaagcgtaggaaatcgaaaggtgatttttcaagaaaggtcgatgtgatggatgacgatgacctcattgagagggagctggaacatggcgtggagttggctgccgaggatgagaaggtcaagcaggagagaaagcagagctggcctcatcttgcacaccaccagagcaccaaccgtgagaataccgaagagggtgagctgtccatggacagtcaagaataccgttctccggagcatgacaatcggaagagaaaggatgtgcgtgagtaccggaactacgatcgtgacgaaagggaccttaaaaggctaagatcatgagagttgcacttttgtcggagtctcatgttgttcgtgccataacatgatgtggaacctctatctttctgtcacaggtgtacttgatgcttatttggtatgctgggggatttgaactgttacatatataagtttataagatggtttccccacggtcatgtatgtgtttagccatgttggcaattgagatggcgctgtgccttgagtattccacaggtttatgctggaaacaacatttaaggaagctgcgtcctacgggtatctgaaatgtatgtattttgattccaaggtttcctcaactctaatggtagcctgcgtttttttatccgtctatctgggaacacgggtactggggatgaggtcgtgcacataatgttgttgattttgataccatgtaatgtgcatgttct

SEQ ID NO: 15351 - DNA, 1646 bp, Zea Mays
gattttttggtgccccgattttgtgttgaacaccctaaaaagtattggaattcaagagtgtgagataagctttcccagttacaagggaggaagccgagggtttgcttttcttaagttcacctcacattactatgctagagcagcacttcgtcgcttaatgaaatccgatgctatttttggtactgatagaagcgctaaagtatccttttatcgaacccccacaaaatcatccaagagacttatacaggcaaaaatagtatacctggaacatgtccctctttcttgggatgaaaataaagttaaggaatactgtgaagaatatggggagatcctgaaagctgatgttttccagatatcaaagaatatggaaaatgaaacaatttcttttgttgaattctcatccaggaagggtgcgttagcttgtgtgacaggaataaacaaagcaaatattgttgatggaagcttcaagttgtgtgcatatcttgcttggccaaaaagtgcttcaaaggtcaatagtgctgcaccttcaaatgctgccaccgcaaccgagaaggacaaaacccacacagagaagattcttgtagacatcgatttgcaacataaattccagaaaggcgacaagagcaaacttacatctcagacaaaggaggcaattatgaagaagaaaaaatcaagtaaattaccaaatgacaatgatacaaaactaacctcacaaggtgctgccgaagtaccacaaacctccaaatcttctgaaggcaagaggaaagttggaaaaaacaaacatgcctctgtataccaaaaaccattgaagaaagcaataaataatcgtaacgttgatgagagccagctaactcatcggagtgctgcagtactgcaaacgtctaacacttccaaagggaaaaggaaagccagtgagaacagaagtttatatttaaacgaaaaggctctcaagaaagcacgtggcaatagtaatttgggtggaagttcaagatctaaatcatatgcctctgatctggaacctcatgctggattcatttcgcctgcgattcgagataatggcagtgatgcatataatcgacagagaactgcacggtatgatatccatcctatagatgtccatccttatgctagagcgccaccatcagcctactctggttacaaaagccatgctggctatgaggctgcaaatacatatgaatacgcagggaaccgggcgcctacacctccaagtggatcttacatccctcgaagaggacattactaacaaaaaatggagtgctggctctgtgcatccattcgatcgcatggtaacaaggaatcaaggatctccgtatttagatgtttcatacatgttatgtagacgttaaaaagtaacttgtttaaggaaaataagaaccctctgcagctttccctttgactgaagtgcagcccggcacaccggttgcttgttgaagaatgctttttttattattattgtagttaagagtccagacgtcgttattaccacttatcttcgtattggaaaaaaaatgtctttttcttagtccagcaatccactaatagcttctatgtttttttgtgctcagcaatatcttatttgcttttttaagacaaacatgccgtgcgtctcaacaggagaaaaaaat

SEQ ID NO: 15352 - DNA, 792 bp, Zea Mays
tttatttatcttagcttttatttgttttattaaatttcttgttcgaaaaatccagtttaaaacaatattatttaccaattgtaccaaataacaatggtaggttctgacagtactagtcacgtttgccgctaaagctgcggcggcttattccgtagttacgaacaggaattatggatacaagcgggcatattattcctcaccactctcactcttgacaaaaataaatagatcgacggtacaagtctgcgagcatagttcgggaacagcactcctcagttcttgacggtggtgacatgccgcagaagcatctgaatgacatccggggagatgcttgcggcctgctgggtgagttgctcgatcttcgccgccgtttcttcctcgagacgcttgacgtttgcaccggagtcgccgctgctctctgcaaccttcctctgaaactcagcctccatctgggcacggtattcggctatttcccgctcagcctcctcttttgcttgcctgagcctcgctgacttggctctctagcggcattcacaatttgctgagcctcctgctccgcagccagcaactgctggatcccactctggcgcctgttcgcgtccatccctcagctcctgatctggatcggggcgggtcgattcggcagccggagtggaggacggtggagcggctgcggaggttggggaacagatcgcgttcgccgagccgagcgggagggcgacaggaaggcgattggtgaatggagatccgcatatacaacgtggctccacctatcgatttttttaattttag

SEQ ID NO: 15353 - DNA, 1416 bp, Zea Mays
aacgaaaataaacacgctctttggttgatgcttgcttgttcgtcctctaaaccacaccgcccggtgaaggcactaggcgcccaattctctcccgctctcccctctgctgcaagtctgcaaccgcagcagcacgtccatttcacgtgccctttcctccctccctttcccctgcccccacgccacctccgttcgccgccgcccgccgcgccggcgatggcgatgaccgaagggcttgtgcctattacgcggacctacctcgcgcgctactacgacaagtacccgctgcccccgctgcccgacgccactacggacctcgccgcccggctccgtgctctctccgccgacctcgctgccgttgctcccatcgccccagatgaggagctcttggaacaagaagcagctggcatacctgcccacaaaattgatgagaatttgtggaagaaccgagaacaaatggaagaaattcttttcttgattaacacatcccatcgtcctgtggctcttcaacagaagtccaccccagaagatgctgagatagtttgtacacttgatgatatagaagctaaattgaaggatatgttgaagaacttagaacaatttcagttgaaaaatgctgacaatgttttcaatacagttatgacatacatgccccaagattttcggggtactctaatcaggcaacagcgagaacgctcagagagaaataagcaagcagaggtagatgctctggttagtgctggtggaagcattcatgatcgatatgcattgttatggaaacagcaaatggaaaggagggtgcaattagcacagcttggttctgcaacaggtgtatataagactcttgttaggtatttggtcggtgttccacaggttttattggattttattcgacaaataaatgacgataatgggcctatggaagaacaaagagaacgttatggtccagccctttacacccttacaaaactggtgcttgcaattcggttgtatttgcatgtctctttggcacgatatggacaaaggaaaatagagaaggatgacgctgctgtgttgcagcaagctgtggttatctacaccaaggagtttttgaagttcactgaattcattggtgaggtctttgtgaatgcaccattctttatatctgctgaggatgcaggtgccgtggatgcaaggaaaagtgatgagtacaaagaaactattattccagctggaaagacacatgaggtcattttgagtgttgaagctgtaaactcatacatcgcatgggacttttccttgcaacaaggggccctcaacatggacattggctttcatgtggagtacattagcccttcaggggagaaaactttaattcttccataccgacgatatgaagctgaccaacggtgggccctgcagtggaggagggaagctcca

SEQ ID NO: 15354 - DNA, 1397 bp, Zea Mays
ctcttcttcccttcctgttggcactcccttcctctcggtgtgttaacaatatacaccagattgcattggatcagcatttaatgccaaaggggttatgcaatgccccaactgccgcaaaatcgagaaagggaattggctttatgcaaatggttctcgatctgcccatgatgttagcatggatgaatgggcccatgatgaagacctttatgatgttagctactcagatatgccatttcgcttccattggtgtccgtttgggcgcttaacccaacttccatctttatttgaggaaggagaatcatcacctccagttacatttcatgacttcatgggacaacatgtgtttacggagcaagtagctgtatctgctgcagcagggacaactaatccttgcccctatgtggcatacttgcatcctcttacaccattgacgtcattgtcaagctcccatgtccctgacagaactatggatcgtcctgcataccatgatcattggaaccccatggctgggccatcagatgttaggtccatgcaaacaatgcaacctgctgattttcatcatagccattgggcacatgtgccccattcttatggtcaacccaacagcaataacgagcagccaggaatcccttttggagcaagggctgtacgggtcgatgatctggttccagatctagacctcccaatgttcctcctctgatgcctcagttcatgagggctcatggcagcatcagcgaacagtaccaacagaattcatcatctagcttatttgctggggcccataggtcaggaggcatgcgacctgccccaacacctctaccagagaaccccacctttaccttgttcccgccaggttcatctggccatagctcgatggagactgatgatgctgggggaagccggttctacgcctgggagggtgaccggtttgccccatacccgttgatgccggtagactgcgagacaagctggcggacctcacagcagcagtcccaccagagcacatcagagcctacatctgctccaaggaggctgtttgggcaatggctcgctgtcggcaggccatccccatcacccgaggggtcttcgtatcgtcaattgcactcaccgcggatgtagaccctcgccgctgaaagaaacgatgggaagcccattgtattaagttaagccgggctgtgccgtgaaactttgggacgatgctcgaggggacagaaactggaaacgatccggctgaggatatttcgatttggtttatgtgaattccatctcgtacatatttgaaatcaagttgggatgctgggagcttcgaatgtaacgtgatttcttatgctgcaattctgttgattgacggattttcaaacgcgattgaatttccgttgcaatggtacctgttgaac

SEQ ID NO: 15355 - DNA, 191 bp, Zea Mays
gaaacccccacgcacgaatccaacccaagaacccatcaccaccctcgcgtcacatgcgcgcataggcccccggccgcaccgcagggtcgccatcacatcaccaccatgcccgcctccgctgcttgtttgtctcctcatcttttctcgcccccttgtcgcggccgtggtctgtcgccgccgaggccgagccg

SEQ ID NO: 15356 - DNA, 576 bp, Zea Mays
ttttcagcaaggagcctggtcttgatgagtgacaacaagagatatcgtccagtttttttcagaaaggaggacttggataactcactgcaccggacctcccgtgatcagcaaaaacctaatcctgctgttaggtttggtgacactcaggtttcttctttggaagatatcattaaatctatgaaggatagctcctcctcaaaatgggatgatgttgtatttattcctcctggatttgaccttgctactggctcgacaccatcacagctccgcaagtagttcattctttagaaggttgttaccagtgttattcctagcaacattatatttgactgtctggacactttgatagtagtacattatatatacacattatttcttagacagtgtatgtgcttttgtgccctgaactcgaattactgttagttcctgtgttagatgtatgtagtgtgacattagttagctggaaactgatgtagaatctcggtagcattcagttttgttatgccacttaaattaatacattttttgaggcgataattaatacctttcatctgttaacgaaagattgcacttctt

SEQ ID NO: 15357 - DNA, 1440 bp, Zea Mays
tttgaagtgcgaaaagttaaaacgacccattttaacaaattttacgactgtcgtgcatatgtccggatatcaacccctcccctcgtattaggccccacctccccgcgcgccctaaccctagcttctcgattcaactctgcgcgagacgaattctctcccgaattcgctcgccgaaagcacctgctacctcgcgcccgccttccgtcgcgcggattcggtgccgtgcgtggagatggacccgatggacatcgtggggaagtctaaggaggacgtttccctccccaaatcaacaatggttaagataattaaggagatgcttcctcctgatgtacgagtggcaagagatgcacaggatcttcttgttgaatgctgcgtagagttcatcaatctcctttcgtctgaatccaatgaagtgtgcagcagagaagagaagaaaacaattgctcctgagcatgttatcaaggctctaagtgatcttggcttcagagagtacattgaggaggtttatgctgcgtatgaacagcacaaactcgagactctggattctccaaaagctggcaagttcactaggattgagatgacagaggaagaagctgttgctgagcaacaaaggatgtttgctgaggctcgagcaaggatgaataacggagcccccaagccaaaggagccagaacaagaaccgccacagctaccacaagcacaaccccaacttcagctgcatactgaaccacagcaacccatgcaatctcaagttcagttgcattcgcaaacacaacactacctccaacctcaactgcagctccaccatcagccacaacagctcccacaagtgcagctgcactctcagccgcagctgcaaccccaagtgcatctgcaccctcagccgcagttgcccccacaattgcaggtccaccagcagcccgaagtgcagccccaagaagcgcagttgcaatcatcagcccagcaaacctcccaaccgcaacctcaggcacaactacaatcacaggggcactcacaagcgcagctgcaagccggactgctgggtcagttgcagacacaggcgcaaaccggacctgacatggatagttagagactattgtgtagcctgagtataagcaaaaaagggaaaaaaaaccaggcacttttgctgcatctactagaaacctgtatgcctgcttgtgactcattagatcctgatttaggtttccgtgcttcctgtagaatgtaaatgcagtgtgattgcagttgccttgttgctaataatgcgaagccgttagttactgatgatgtcattattgtgtggaatactgaattcgtgacaagtgtcatggcatggttttatgtgacgtgctgaaagatattccgttgccattgtaatagccgaacttcgacatttgtccatggtgatagcgactgatttgaatgagttcttgctgcata

SEQ ID NO: 15358 - DNA, 961 bp, Zea Mays
agcccgatgcgaaaatgcttgaagcctccaagaatctgggtgcaccgctgaggcgctgaccaccacgcaccacctcaccagatctttcttcctgttgcttcctcggctggtttccttctctcgccgcgtcgcctgcttcttcccccaaccaaagacacgaatcagccatggcgctcgcctccgccacgtcccgccccctcctcggtcgcccccgccggcaccgcgcggccccacctcgccgtttcctcatcctcccccgcctcctcgatccgcttcccccgcggcgccgacggcggcgccagcagagcggccgtctctctccgcgcccccacgcctccagcggcggcaacagcaacatctggtagcattgctccagcaatttcattgactgaaaaggccttgaaacatctgaaccaaatgagagctgaacggaatgaagttttgtgcttgagaattggagtgaaacagggtggatgctcaggcatgtcttacaccatggaatttgaaaatcgagagaatgccagccctgatgattctgttgtagagtatgatggttttgcaatagtctgtgaccccaaaagccttcttttcatgtttggaatggagctggactacagcgacgccctcattggtggcggcttcttgttccagaatccaaacgcaacaaaaacctgtgggtgcggcaaatctttcgcgactggaaaggagaccgaggccgcggcaaccacttgcaacaactagagtagagaaatattgttagctaaacgtgatgtggcatgttgtatagcttgctcatgttgaagccctgtggctacaccacagatacataaagaggcatagttcaaaggaattacaccattaccaatggcctaattcagattttcttgtttggtgatcattccgaagtccttaaacttgtggtatggtctctcaaaatgcattgtattttcaggtaaacaaa

SEQ ID NO: 15359 - DNA, 645 bp, Zea Mays
ggtgcgtgcctgatgactaacgatgtacgacggaacttctaccggcaggatgaagctaggaaagcactggaaaatgccctagggaagaaggctgagtttgacaaatggggtgtggaaattgaaaggaggcaaaggggctaccctagagatcctgctgcttgtggtggaggatggtcaggaggaggcagctggtttaggcggcttactggtggaggtttctgggatgcagcaaaacaaactgttcttacaatccttggcattatcgcggcgtttttcctgattgcaaacttcaatatactggtggcttctgttatcaattcgttgttgcttgtgctgcggcagattcggcgcatactctccttcatagcttactgtgttttccagggcgcattggttgaaaggtctggaccaaagtcaagtacccttggccttagcaatgtggctggagtgcctgtgaaagaaaaggctggaatgtctgcgaaagaaagagtagttgggaaatgggcaatggactgaagtagtgcacagttatgtcttgtgagcaactctctctgtttcaatgtatgtacgacagtagacatgttacaataatttctatgaaactatgaccttttaaatgaaatatgttgtgatgctagtcaagaa

SEQ ID NO: 15360 - DNA, 740 bp, Zea Mays
gccactcgtcagtaggcagcaaggcctctgcggttgtgggctgtgcccatgactccaggccaacatgtaattatatcgccgtgggtaacgaggtgagcgccggcgacgccgcggagatgctgctcgcctgctccgtatcatcctggctgctggccgagtgaggaggcacgggcgtgcatagaacaaagccacacttcgaatgtcgacgtgcgccgccctgacacagagcgcaaggagtccatcctcgctcccgtgtacgccatctatcttgtggtctgatggcacatcgcgggtactagagtccaccatgcgacaaccgtcgatgttttcttcatcgtgaacaaaggtaaaatgcagatccagtacaaattccataccatttgtttgattgcgtaggggaaatcgaagcctgtcgcgtaggacagttcggctaggccagagacctgccggtttaacgaagagttgatgcagatctgatcccgcggcaacgtcgatgtagagcgtgctgataacgtgttgagaactacgtcaccacagatcaccagatccgctcctttccctcccgtcagcagattaggcgcgagaagatgtggaagacccgtatccattcccagaagctcgacagagagcacacaagacacatgatgtagggttgggcctctggcctctttctcttctctgtcatatgaaggggtgtacaggttcctgttgagcaccaaattgagcgcggacggtccggc

SEQ ID NO: 15361 - DNA, 212 bp, Zea Mays
tctaaatggcccatgtggtccaacaaagccatgacagcccatcaggcccatcttagcaaagccatgagggggtggcggctagggttagaaaccctaaccggccacccaaaccaaccggcggccagggcgcggcccctggcgtcgcaactccgcgtgggcgcggcctccggcggctctgccaggcgtccatcgacaagggtgggcggccaggg

SEQ ID NO: 15362 - DNA, 186 bp, Zea Mays
ggtgaagcagagcgacttgcttgcctctgttgtttagctattgctatataaagagaatatacgcaactatacatggttactcaatcctggcataatcgtgctcgatgattgccatcccaatcacctggggtatgccgcaatctgggcagaccttcttctaatggcgctaggggccctttgccttct

SEQ ID NO: 15363 - DNA, 3897 bp, Zea Mays
atggcgacgccgctggccgggaagggcccgatcgcggcggcgatcccgcggtccccacccccactggccgagggcggcgcgggagggtcggcggccgaggcgcccgtgctcatcttcgtctacttccacaaggcgatccgcgcggagctggagcggatgcacgccgcggcggtgcgcctcgccatggggcgcgcgggcggggacgtggccacgctcgaggcgcgctgccggttcctcttcaccgtctacaggcaccactgcgacgccgaggacgcggttatttttccagcacttgacattcgagtgaaaaatgtcgcagggacatattctcttgaacataaaggagaaaatgatcttttcgcacatctattcactctgctacagttggatgtgcagaatgataatgctattaggagggaacttgcatcctgtactggagcaattcggacgtttgtatcccaacacatgtccaaggaagaagaacaggtcttcccgttactcatcaagaagttttcacacgaagagcaagcagatttagtatggcagttcttatgtagcatccctgtaaacatgatggcaaaatttcttccatggatttctgcttctgtttctacagatgagaatcaagatattcttgactgcctaagtaaaatagttcctgaagaaaaactcctccaagaggttgttttcacgtggtttggagggaaatcagaaagcagttctacatgtgagtctagctctggccaaacagataaacatgcacattcacttgaacacaccaaaattggaaagaggaagtctatagaatcaagtcagcttgtcactcatccaattgatgagattctgtattggcacaatgctgttctgagagaactgagtgatatagcagaggagactaaaaggatacatcagtctggagatttttctgacatagcaggatttaatatgaggctgcaatttattgcagatgtgtgcattttccacagtattgccgaggatcaagttatattccctgcagtggatggtgaattgtcctttgtgcaggagcatgctgaagaagaacggcgattgaataaatttaggagtttaattgaacaaattcaactagcaggagccaagtcaactgtagttgattttcattcagagttatgctcacaagctgatcaaataatgcagaaaattgagagtcacttcaatgatgaggaaataaaggtacttcctaaagctaggataaagttctcaccggagaaacagagggaacttttatatcagagtctatgtgtcatgccactaaagctgttggagcgtgttctaccatggtttatagtgaaactgaatgatgcagaggcagtgtcttttcttcagaatatgcggttggcagcaccttcctctgaaactgcattggttactcttctctctggctgggcgtgcaaaggtcgtctggaggacacatccaaccctggaaagttcgtatgcatggcatcaggagcggtcacttgtgcgtcagatgggaatggtttcaaaacatgccagtcactctgtccatgttatgtaagtagcaatggagctttttcaaaaccagttaagagagcaagtcaaggagaatctagcacaaatactgacagaaatcatagctcacacaatgctgctactgaagcatcgcaatgtaacaacagagcctgttacattcccaggttaagagtagaaagtagctaccttggtgttcattcatctacccctacaaaatcctttcgccctctgtctttcaattatgttgcaccttcattatattcaagccttttctcatgggacacagatacactagtatccggcccagataacatttctaagccaattgataccatattcaaattccacaaggcaattcgcaaggatttagagtttttggatttggaatctggaaagcttattgacgggaacgagtcttgccttagccaattcattggaaggtttcgtttactgtggggtctatatagagcacacagcaatgctgaagatgagattgtatttcctgctcttgaatcgaaggaggcattgcacaatgttagtcattcatacactcttgatcacaagcaggaagaaaaattgttccaagatatatccactgtactatctgaactttctcaactacatgatggtttgagctatcctcttgatgttgaagctggaacaaatgatatttcaagtaatgagattgattgggctagaaagcgtaatgaacttttgacaaagcttcaaggattatgcaaatctatccgggtcacgttgtcaaatcatgttcatagagaagaacttgagttgtggccattgttcgataaacatttttctgtagacgagcaggataagattatcggtcatataattggaactactggtgctgaggttctgcagtcaatgttaccttgggttacatcagcacttagtttagaggaacagaacatgatgctggatacatggaagcaagcaaccaaaaacaccatgtttgatgaatggctaaatgaatggtggaagggaccttcaacttcatctgacccatcagacaaggcttctactccttcagaagaaagtcattttcaggagaatcttgaacaaaatgaccagatgtttaggcctggttggaaggacattttccgaatgaatcagagtgagctcgaggctgagattcgaaaggtctctcgagattctactcttgatccaaggaggaaggcctatctgatccaaaatctcatgaccagaaatcaccacaaccaagcgtcgaaggacataatggatgtacacgacgacctggatgtgttgcttcgtaccgagacccagggaaacaaatatttggctgtgagcattacaaaagaaactgcaagcttgttgctgcatgctgcgataagttattcacttgcagattctgtcacgataaagttagtgaccatacaatggacaggaaatcagtgatggagatgatgtgcatgcaatgtctgaatgttcaacctgttggtccaaattgtcaatccccttcttgcaatggactgtccatggccaagtattattgtagcatatgcaagttcttcgatgatgaaaggagtgtctaccattgtcctttttgcaacttgtgtcgccttgggagcggattgggcactgatttttttcattgcatgaagtgcaattgttgccttggcataaagatgatagaacataaatgccgggaaaagatgctagagatgaactgtccaatctgctgcgactttttgtttacatcgagtgcaccagttaaaggccttccttgtggccacttcatgcattcggcttgttttcaggcatatacttgtacccactacacttgtccaatctgctgcaaatccttgggagatatgacggtgtattttggcatgcttgatggtttgctggctgcagaacagcttcctgaggaataccaggaccggtgccaggatatactgtgtaacgactgcgagagaaaaggcaggtcacggtttcattggctctaccacaagtgtggtttctgtggttcttacaacaccagagttatcaagactgatacggcagagtgttctcgccctctataatttcttttatgcaatccatttgtatatatatatcgacggggtagaaaccttgtgaccgtaggtgtgatagtttttttatagagtgaactgggggaggaaccccacctggatgtattatgaggaaaaagtgactgtgcacatgaggagtctgagaattactcgctcccgtcccaaactaactgtatttctacgatttgaaatatattcgctcatatatttcctgtgttgcccttcagctgtttcctgggaacatctcggtttgtatcagcgatacagttggagaccttctgaacactgtccc

SEQ ID NO: 15364 - DNA, 1509 bp, Zea Mays
gtagtgacttctgaggaatttgaaccatctcaattctagcgcgaaggtcctgaaacttgacccttccaagtgacttgaggttagcagtcaattgctggagttgtatgagcaaaaccgtacaacgcaggcacaatcatcacagggaagtgaagcggaggggagctctgctggtgtgtgtaatcaacgttcaactgtaaagtctgaagcgaactccaaggaaccatctgctcatggtcatcttcaggcatccagaccgccaaatttgcagcactcgtcctcaacaggtgcttcaggtcaccatgacgatgggcagtcaaattcagacaagcatatttctggccacaaaatgcttcaaaatgacaattttaaccatggtggtagcagagaaaagaacaaaagtggaaccaaaactggtactgttatggacaaattgcacaatgacaaaaagttctcgcctggacatcattattccaaggccagccatgagtctcataatccagtggaagaacatcaaccacatggatcagatgataattccaatgaaacaagagatggtgttggtggcaatgaagctcctgttgtgtcaacatccagaatggatgcgatgaataaaattgacaaggataaggtaaaagcagctttggagaagcgaaggaaatcgaaaggtggttttgccacgaaggtaaatgtgattgatgatgatgatctacttgagagagagctagaacaaggtgttgagttggctgttgagtttgagaagattaatcaagataagaagcagaactcgtccgatggtagcatgcatccaccagaccttgaaaacgctgacgaattaatggagaatggccaccatgtcaagcagagtctaccaacgacagctgaagacatgggctgtccgatggacagtaaagaacgacatcctccagcacttcataagcaaaatgatgtttctgagcacaagtcacagcagcttgatgacacattgaaacaccaaaagagctgtgatcatcctcaacctgtaggaagccctgagcaggatggaaaagactacaagaggcctaagcttgacggataggtttatatatatgattttggatgggttttctggaagctgacaagcaatttggtgccggattcattgtatgatgacgtatacatgttgatgagcacgtgtcttcttcgctggtgcctgaagaagtgaagatgccgcgccacaaaattgctgtgctgcggagagcaccaagatgatgcgccccacaactgattgcagcttacagtttgaggaaagtcgggcagcaattattgttaggttccaacaaacattggaatataatatatatatgaacgaaacatgctgtcgcgcttctggtatcagctgcattcgtttcttgtatgtaatgttctggttaaagcgatggaaaggttttatcaaggtcgcaaatattaatgcagctttccatttctgggtttacatattttccaaattaaacggcttccttttttatgtcc

SEQ ID NO: 15365 - DNA, 3685 bp, Zea Mays
acatttcgaagggggtgggtcgccatgcctcgccttaccaccttaaggacagaagcggcatctaactaaagtctttccattgcttacaaagaaattttcgtgtgaagaacaagctgatttagtgtggcaattcctatgcaacattcctgtcaatatggtggcagagttccttccatggctttcaacttctgtcacatctgatgagcaccaagatatccgtaactgcttatgcaaagtagttcctgatgagaaacttctccaacaggttgtattcacatggatggaagggaaagcaacaagagaagtggcagagagcattgctgctggtatttcagcaagaaataatagtgttgaggatgtcccagaccaagggaagattcatatttgtttacatcacaattctaaacttgggagtaaaaactgtggagaatctaatggtcctcaggctgacaagcatcctatagatgatattttatactggcacaatgctattcgtatggagttacgtgatataaaagaggagacaagaagggtgcagcaatctggggatttttctgatatatcagccttcaatgagaggcttcagttcattgcagatgtatgcatctaccacagtatcgctgaggatcaggttgtttttcctgcagtcgatagtgagctgtcctttgtgcaggagcatgctgaagaagaatgcaggtttaacaattttaggtgtttaattcagcaaatccaaatagcaggagccgaatcaactgcattggacttctactcaaaactgtgttcacatgctgataaaatattggaggcaatcgaaaaacacttctgcaatgaagaaaccaaggtgcttcctcaagctaggatgctcttctctcttgagaagcaaagggaactttcatacaaaagtttgtgtgttatgccattgaaattattggaacgtgttttgccgtggttggtgtcgaagctgagtgatgttcaggcaacttcatttcttcagaatatacgcttggcagcatcaccatctgaaactgcactggtcactcttatctctggttgggcatgcaaaggccgggataaatccaaagatggagaatatttatgcttaacatcaggtgcggcgagatgtctatcagatgatgtagatgatctgggaaaatgccgatcattctgtccatgtgcttcacccaacagctcagatctttctctgcagctacatactgagaatgattctaggccaggcaagcgaggaaaagatgcagtatctttttctcatactaatggaatctactgctctcaaactgctgacattgaagcaattccatgtagcaaaaaaccatgttgtattcctggtttgagagtagagagtagcaatcttggtattggttccttggcttctgcaaagtcttttcactctttatcatacaattcaactgctccttcactatattcgagcctcttttcatgggagacagatacatcattgtcttgttcggacagcatttcaaggccaatcgatacaatattcaaatttcataaggcaattcgcaaggatttagaatacttagatgttgaatctggcaagctcattgatggcaacgagtcctgccttcgccaattcattggaaggttccgtttgttatggggtctttacagggctcacagcaatgctgaggatgaaattgtgtttccagcattggaatccagagaaacattacacaatgtgagccattcatatactcttgaccacaagcaggaagaacagttgtttgaagatatctcaaatgttctctttcaactttcacaactacatgatagccagggccatgcccagactgaagttaatgaagtaaagaaaagctgtttccattcatctaatgatgtcgattttgctagaaagtataatgaacttgccacaaaacttcagggcatgtgcaagtctatccgggtcgccttgactaatcatgtccatagagaagaacttgaattatggccgttgtttgataaacatttttctgtggaggagcaagataaacttgtaggtcgtataattggttcaacaggtgctgaggttctccaatctatgttaccctgggttacatcagttctcactcaagaggagcagaacaaaatgcttgatatgtggaagcaagctacaaaaaatacaatgtttggggaatggctaaacgagtggtggaagggagctggaacagcatctgattcttcagcagaggcgtcctctgctccagaagatagtcatttacaagataagcttgaacaaaatgaccagatgttcaagcctggctggaaggacatatttcgaatgaatcagagtgaacttgaggctgaggtgcgaaaggtttcacgagattctacacttgacccaaggcggaaggcgtatctaattcaaaatctcatgacaagccgctggatagctgcacagcagaagttaccagaaccaaattctgaagaatgtaatcacgatgccagtatacctggatgtgcaccttcataccgagaccaggagaaacaaatttatggttgtgaacactacaaacggaactgcaaacttgttgctgcatgctgcaacaagctcttcacatgcaggttctgccatgataaagttagtgaccatacgatggaaaggaaagcaacacaggagatgatgtgcatggtatgcctaaagattcaacctgttggttcgttctgccaaaccccatcttgcaacagactatcgatggcaaagtactactgtaacatctgtaaattttttgatgatgaaaggactgtgtaccactgtccgttttgtaatttgtgtcgtcttgggaaaggtcttggtgttgatttcttccattgcatgaaatgcaactgctgccttggaatgaaattaactgagcacaaatgtcgggaaaaagggctagagacaaattgtccaatatgctgtgacttcctatttacatcaagtgccgcagtcagagccctcccttgtggccacttcatgcattcagcttgctttcaggcatacacttgtagtcactacacttgccctatctgctgcaaatccttgggagatatggcggtttattttggcatgcttgatgccttgttggcggctgaagagcttccggaggaataccgtgatcggtgtcaggatatactttgcaatgactgtgagaggaaaggtagatgtcgatttcattggttataccacaaatgcggctcctgtgggtcgtacaacacccgagttatcaagactgccacagcagattgctctacaccaaactagttggagggaacatttgtgcttaattagtcactgtattctttgtttctctttgtacatatcttctagagagaaggaaaaagagaagttgtgtagcatagttataccataatttcattcgtagccatttcagttttgtaagtgtagcagtttacaatttactaggtctagtgcgttatactgacaaaattgacggttctgatggaagaacataacctgaggaaattggcttgttagaagtactcgtgagcatgttctgcaatttggcggccacttagactatcttcaattatatcttctatattccttctctatatccctcttttatggactcttaaaagatttctttctttatatctatctcttctatacgttaattaacttacaagagatatattttgatctaga

SEQ ID NO: 15366 - DNA, 115 bp, Zea Mays
agaggctgaaggaacagagagaccgcgagagcttggccaaaaggaggtccaagctttctctaccaaggcttttgttatcacgtccgcttaagaatgttcgatgctttgagatgtt

SEQ ID NO: 15367 - DNA, 125 bp, Zea Mays
ggggtgagggccgggccgggagatggcgcagcgcggcgagggaatcgaccgtgggacggcggggtggccgcggggtaggggcggctgcggctgcagcacggccgaggtcgcgggcactgggcgtg

SEQ ID NO: 15368 - DNA, 1593 bp, Zea Mays
tacgggactggacccctagaacaaccaccacactctcctccctccctccccgcccacactccaccacccgcgccccgccgcccgccccgccgccgcctcctacttcgcctcggccgcctcggatccggaccgagcgccggccatggcgctcgccttcgacgagttcgggcgccccttcatcatcctgcgggagcaggagaagaagacgcgcctgcgggggctcgacgcgcagaaggccaacatcggcgcgggcaaggccgtcgcgcggatcctccgcacctcgctcggccccaagggcgcggacaagatgctccagtcccccgacggcgacgtcatcatcacaaatgatggggcgaccatcctggagcagatggatgttgacaaccagatcgcaaagctgatggtggagctgtcccgtagtcaagactacgaaatcggggatggtaccaccggtgtggtagtcatggcaggggcgctccttgagcaggccgagaagcttttagaacgtggtattcaccccattagggttgctgaaggctatgagatggcatcaaaggtagcttttgatcacctagaacgaatctccgaaaagtttgagttcagtgcagacaacattgagcccctggttcagacatgcatgacaactctatcctcaaagattgttaaccgttgcaagcgggcattggcagagattgctgtcaaagcagtacttgcggttgcagatttggagaggaaggatgttaacttggatttaattaaagtagaaggcaaggttggtgggaagctggaggacaccgagcttgtatatggaattattgttgacaaagatatgagccatccacaaatgccaaagagaattgaggatgctaagattgccatcctgacatgcccatttgagccaccgaagcctaagaccaagcataaggttgacattgatactgtcgagaaattccagacactgcgtgagcaagagcagaaatacttcgatgaaatggttcagaagtgcaaagatgctggtgcaaccctggttatttgtcagtggggttttgatgatgaagccaatcatttgttgatgcatagaaatctgccagctgtcagatgggttggtggtgttgaattggaattgattggacgaattgttccgagattccaagagttgagtcctgaaaagcttgggaaggctggattagtcagagagaaatcattcggaacaacaaaggataggatgctttacattgagcagtgtgccaattccagagctgtaactatcttcattcgtggtggaaataaaatgatgattgaggagaccaagcgcagtcttcatgatgctctttgtgtggcaaggaatctgatccggaacaactcaatcgtgtacggcggtggctcagcagagatatcttgctcaattgctgttgaaactgctgcagatcggcaccctggagttgagcagtacgctatcaggtcattcgctgatgcattagacgctgttccactggccttggctgaaaacagtggtttgtcgccaattgataccttgacggcggtaaaagctcagcaagttaagcacgtgatctattgtcgtctcgagctctc

SEQ ID NO: 15369 - DNA, 392 bp, Zea Mays
acaggagtttttgttgaggagaagtcattcacatatctgtatcaggaaggagatactgtgactcttatggagcctgaaacgtttgagcaacttgaagtttcgaaggaactgtttggcaaagctgctgcatacctaaaagatgaaatgaaagtgaatctacaatactttgatggccggccaatgtctgggacagttcctcaacgagtgacttgcactgttgttgaagcacaaccaaatacaaaagggctaactgctcaaccacagtataaaagggtcttgctggataatggtcttacagtgcttgcaccaccttttattgaagcgggtgagaatattgtaatcagtacagccgatgattcttatatgacgagtttacagatgtatcagcacat

SEQ ID NO: 15370 - DNA, 565 bp, Zea Mays
actgtatttgttcaaacaaatttaaatcgtgcctactaattcgacgtacgctttccatgtgtctgtcggttacaaatatcatcccaaatttggaagaccaggataaggtttcaggatatattgtcgaccagaacaggaagaagatagagaagtttgaattcgagaacaccacgccaccagttgagatatgcgacgagctctggaagaagatttagcgtgtttcagatcattcttgttgtaaggcggcggaaacctgtgcctgtagattgccgcggtgtggttgtcctcccaggatgcagtttgccatgttgtttgtatcgttagttcatgacgctgtactgttttgtaaggcggcggaaacctgtgtttgtatcgttagtttgccatgtcagattagctactacttcttgtgttttaaattattccaaattataagttattctaattttcctgagagtcaaaccatcttaggtttaaagcatctcaagtttaaccaaatttatatagaaaattgccaaaaaagcatgacatcaaattggtatattacaaaaatataattaataaa

SEQ ID NO: 15371 - DNA, 860 bp, Zea Mays
atatactaagaaatttgatagccaagcaataattggcataattcccgcctcgccagaggagtacccaattttgggactcaatcttctgaggctgttggttcagaatagaattgccgaattccacactgagctggagcttttacctgccaaggcactcgagcatccttgcatcaagcatgctgtagagcttgagcaatccttcatggagggtgcctacaaccgagtgttaagcgctcggcaggctgtgccacatgagacctacgtttacttcatcgaccttctcgccaaaacagttagagatgagatcgctgggtgcagcgaaaaggggtatgattctctatctgtgagtgatgcaaagcaaatgcttatgttcagttctgaccaagatctgcacgagtacatcactgaggagcacccggaatgggagattaagaacggtgctgtcttcttccagaaggcgaaggaatcacagccctgcaaggagatcccatccttgcagcttatcaaccagacgctcagctacgccagggagctggagcgtattgtatgatttaaaccaatccctggtggttctttccccccctgtggccgcttggcatggcttgtactgtcctttgcatttgggatgatctttgatcgcagctctcatctgactgaaacatcatgtgaatctctgaagggctcagtctctccggcattggtctgttaactccatttgtatttcaccacattaactgcattgcttgaaaaatgccggcattcactgctgctgtgaacttttgatgggcttgatattgaattactgcctcggaattccactgacctctgcaggcttctgacgtcacgttttcttctgcatc

SEQ ID NO: 15372 - DNA, 3029 bp, Zea Mays
tgttgttgcgcccgcgcctactcgacgtcgcgctcgcgccaccgccggtggtactgttgttctatatgatcgtaaagttgtccggaacttccgtaaagatggccataactggaagaaaaagaaagatggcaagactgtccaagaagcccatgaaaaactaaagattggtaatgaagaaaaggttcatgtgtattatgctcgaggagaggatgatccaaatttctttcgcagatgctactggctacttgacaaagagttggagcgcattgtcctcgtgcattatcgtcaaacatctgaggaaagtgccttaccaccttcgcatgtagaagctgaagttgcagaagtgcctcggatcaatatgattcattacacctcctcaacagattcagcctctgctcatactgagctatcttcttctgctgctgctgcaccagaagatatcaactcaaatggtggtggggcggtttctagtgaaaccgacaatcaaggttctagcctggaatcattttgggtagatctattggagtcatctatgaaaaatgatactcctgttgatgcttctgcttgcggtggatctttggtatcaaatcagcagactaataatgggatgggagattctggaaataatatcttgtatattaatgccacaagtaatgctatcttttctccaccaactaatgtggtttcagaagcttatgctaatcctggccttagtcaagtatcagagagttactttggatctctgaaagatcaagcaaaccatgctccatctcttttaacatcagatctggattcacaatcaaagcaacatacaaattctttgatgaaaactccggtgtctgataacatgccaaatgatgtacctgctaggcagaacagtcttgggttatggaaatacttggatgatgatattagtttagatgataatccaagctcgggcatactccccactgaacaggtgactggcgaaataccctttcagatcactgagatatcctcagaatgggcttattgtactgaggacacaaaggtccttgtggttggatgtttccatgagaactacagacatctggctgggaccaatctcttctgtgtcattggtgaccagtgtgttgatgcaaatattgttcaaactggcgtttaccgtttcattgctagaccacatgctcctggacgagtcaatctttatttgactttggatgggaaaacaccaatcagtgaggttttgagttttcactatcgtatggtgcctgacagtcaaaacttggctgaggatgagccccaaaagtcaaagcttcagatgcagatgagactagctcgattgttgttcaccacaaacaagaaaaagatagcacccaagttacttgtagaaggaagcaaggtttccaatctcttatcagcatcgacagagaaggaatggatggatctgtcaaaatttgttactgattctaaaggcacttatgttccggccactgagggattgcttgaactagtactgcgtaatagattgcaagagtggcttgttgaaaaattaattgaaggccacaagtcgactggccgcgatgatctaggacaagggcctatccatctgtgttcttgcttgggctatacttgggccattcacttattttctttgtcaggattctccttggatttccgtgattcttctggttggacagctttgcattgggccgcatactgtggaagggaaaaaatggttgctgctcttttgtctgctggagcaaatccaagcttggttacagatcctactcatgatgtccctggtggacaaactgctggtgatctggctgctggacaaggttatcatggcttagctgcatatctttctgagaaagggctgactgctcattttgaggctatgtcactgtccaagggtaagcgatcaacatcaaggacagagtcactaaaacggaataccaaggaatttgaaaaccttagtgaacaagaattgtgcttacgagaatctttagcagcctaccgcaatgctgctgatgctgctagcaacatacaagccgcactcagggagcgaactcttaagcttcaaacaaaagcaattcagttggccaatcccgagaatgatgcatctgcaatagttgctgctatgaggattcagcacgcataccggaactacaacagaaagaaaatgatgagagctgctgcaagaatacagagtcatttccgaacatggcagattaggaggaacttcatgaacatgcgaagacaagctatcaaaatacaagctgcatacagaggtcaccaagtgagaaggcagtaccgcaaggtattatggtccgttggagtagtggaaaaagctatcttgcggtggaggaagaagagaaaaggcctgcgtggcattgcaactggaatgccagtagcaatggccacagacgcagaagcagcaagcactgcagaggaggactactaccaggttggtcggcaacaagccgaggacaggttcaatagatcagtggtacgtgtccaagctttgttccgttctcatcgggcgcagcaggagtaccggaggatgaaggttgctcatgaggaggccaaggtggagttcggtcgaaagtagttaagacgggcatagattcaagatctgaagtgacttgttgttccttgtagggggttggctagttcttctagttctttgtatatccgaaggaacaggcgtagcttgcggatgacgtacattctaggaacatctgacgctcgtagtcagtctgccaactgccgttaggcttcttctgtggtgtgtatttggctgggttttagttgggcgaaaacggcattgtgctttattaggtttgatttgtatggacggacgcgagtacgaataaggttgtaaatgctgataataatttcacctgactataaatccaggtggattgcaggcaccatttgttttttttctttatttgatgttttttccttggcagtaccgctacgtacaaccattatacgtcttgcttttgtgataattcactccagcacatttgctagagttcttg

SEQ ID NO: 15373 - DNA, 107 bp, Zea Mays
atccagtgtttcttttgacactccgaagcccgaagcaactgtctctgttaagcggagaagggtgaagcgagaacttgaagtaaatgggcaacatcataaaaagcagg

SEQ ID NO: 15374 - DNA, 138 bp, Zea Mays
tttcaactgcttgcgctattttttctagcttggattttcttgctctgctagattctgattgatttgtgagcttcggcatttgcacaagtgctgactaaatggctgaagagaagaaggttgttgaccctgcactagctg

SEQ ID NO: 15375 - DNA, 2117 bp, Zea Mays
attttctcgtggttgtttgctcctctatatgtgggatggtttttccacataaatctttgtgtctattttattctctaacactccggtatatgaggtgggtaatggatcccttagatcaatttcctcacttgagaggcttgaggaattggcaatggtttgttgttcatgtattgatgatgaaggcctggaattgctgagcaaggggagtgattcgctgcagagtgttgatgtgtcaagatgtgatcatgtgacttcccatgggttagcttcactcatagacggtcgcaattttctccagaagttatatgctgcagattgtttgcatgagataggacagcgttttgtatccaagttggcaacactgaaggaaaccttgacaacattgaaactcgacggtcttgaagtctcggactctcttcttgaagccattggtgaaagctgtaacaaattggttgagattggacttagcaaatgcagtggtgttacagatgaaggaatctcatctcttgtagctcggtgtagtgacctaagaacaattgatctcacatgctgcaacctcagtaccaacaatgctcttgattcaatagctggcaactgtaagatgcttgaatgtttgcggttggaatcctgctctttgataaatgagaagggactaaaacgaattgcaacttgttgccccaatcttaaggagatagacctcactgactgcggagtggatgatgcagcattggagcacttggctaaatgctctgaattgagagtattgaaattaggcctatgctcaagtatttctgacaaaggcattgcgtttattagttcaaattgtggaaaacttgtggagcttgatctctaccggtaattcagatcttcttatttattcttttatcatgatttttatagccatatacatgaaataatatgtctgcaatgtcctttgcatcaggtgcagctctattaccgatgatgggttggcagctttagcaaatggatgcaagaggatcaagttactgaacttgtgttactgcaacaagatcactgatactggtttgggtcacttaggctccctggaggagctcacaaaccttgaactgaggtgcttggtccgcataacaggcattgggatttcctcagttgcaatcggatgcaagaacctgatagagctggacttgaaacgatgctattcggttgaagaagctgaagatgctctgtgggctgaagaccgtgctgtcccctgaactcatccagatgctgcaggcgtgtggctgccgaataagatgggtcaacaagcctcttgtctacaaggactagaccacctgttcctcatcgtttgtgaagtttcagcgctgccatggattgccaagagcccaagacctaccaggtttgccctgtgagccatgtgagatgttctgcaatagtccttgtgagatattccgcaataatcgttgggggcgtaacatatctagcggcgattatcggctctgctccagtgtatgtacactgaggcatcggttatgttcatgtgtatagcctgcagtgggatgatccacttcctgggattactttagtgtgtttgttacttcattccgcatggtttgggcctttgaagttaaaagaatcataagaccttgttcggttattgatattacatgtgtattggagtgtattaggtgggattaggatggattttgacttgttatggatttaaaccggctcaatcctattcaatacatgtggattatcaccaaaacgaacaagcccagggatatgatccatgctttggttctttcttacttttggctgacactaccttatctgataatatgtatatggtgttctgtttcatgttatgaggtgttcaaacagtgggtctatgaagacattgtagtctctgtcgaatggcccacttgtaccatttgcaagaatctgtcacaattgcctcgctatcttgattgatgattagatttggcacgagtcaggttcagccatccgtgcacacagtggctactggtattactttctgcatcgcgcttcgctttgactgaaacatacaacgaaagagttaccgctagtttggcaactcattttttataaggggttctcatttttcccaaaaaaaa

SEQ ID NO: 15376 - DNA, 942 bp, Zea Mays
cagcgacctatcatggaccgccctctatatcgcagagccgaaccatgattctgctgtccaagcctctagctctttgtcttggccatctcaagttcacaacagcagggctagtagtagtagttttgacggccaggctgggccgctggggccgtggttgggtaattgttttttttgagccaaggttgcttcggaggataattgaacttgtgccggagctgtgaatcatcgccagtctggggggaagaggctgccggaagatccgccatgagcagcgatcagcagaacgatgctcctggaagctacttcgtaggccgtccaaccaacccgggcgacaagacggaagaaccgcacgcccgcggggaccagaacccggcgaccgcgcaaactcccggcgagtacttcgttgggcgtccggcgagccatccccagcaggaacaggaagcagcacagcagcaaaccactaggcagagcacaccaagcttcttggccaaatgctgtccctgcctcgccggaggtggagctgcggaatagatcaagaactgcctcctgcagccctgctaagggcacccaacgaattgtgcgcatgagaaatggagttaatctgggatggtgatctatctttctgtatctgaattgaaacttgtgctctggaaactcctcttttttttttttcctcagtgttccacttttaatcgtttcttctgcatccttgtgcatccataccactgtcgcgtagtgcgaattggtccaaccagctgatttttgtttgtttgcccccacccccaaaaaaacgatatgtttcatttcaaaaatgtcaatgtgtatttatgtattattatttactttgcttgaggttattgtgaacttgtattaatcatgaattgtcataccgtttacaaatatatacatgcgtcaagttaaccttgaagctttttcaggtga

SEQ ID NO: 15377 - DNA, 2220 bp, Zea Mays
attggagggattataatcctctactattcaatttcaaatacgaggacacgactaagagaagggcctccaagagcaagagtttcaaagacgccgagaacttcgaagtcctcgtccttgagaagagctgcggttgcaagttcaagtctttgaggatcttgctcatagccatcatctccgcgacagtccttacccttgtaaccccgaccttatacgagcgccagttgcagtcagcctcccggtacgtggatgtcgggtggatgtgggacagagcgagttccgatccgcggtacgcatcttctgccgatgttgggtgggaggatgtgtacaaagcactgggaaacctaagaagcggtaaccgccagagtcatctcagagttgggctcttgaatttcaacagcaccgagtatggctcctggacgcagttgctcccagctgacagccacgttatctccactgtaaggctcgagcacgccaaggacagcgtcacctggcagacgctgtaccctgagtggatcgacgaggaggaagagacggagataccctcttgcccgtcgctgccggagccaaacgtgccaagaggtgcgcgctttgacgtcgtcgccgtgaagctcccatgcacccgtgtggcgggctggtcgagagacgtcgcgcggctccatctgcagctctcggcagccaaactggctgtggcgtcctcgaagcgcaaccacgacgtccatgttctcttcgtcactgactgcttcccgatcccgaacctcttcccttgcaagaaccttgtcacacgtgaaggcagcgcctggttgtacagtcctgactccaaggcgttgagggaaaagctcaggcttccagtcgggtcctgtgagcttgccgttccactcaaagccaaatcgaggcttttctcggtagatcgacgaagagaagcgtacgcgacgatactgcattcagcgagcgaatacgtctgcggcgcaatctcggcagcgcaaagcatccgccaggcaggatccaccagggacctggtcatccttgtggacgagaccataagcgaccaccaccggagaggcttggaggcggcggggtggaaggtcagagtgatccagaggatcaggaaccccaaggcggagcgcgacgcgtacaacgagtggaactacagcaagttcaggctgtggcagctcaccgactacgacaaggtcatcttcatagacgccgacctcctcatcctgaggaacgtcgacttcctgttcgccatgccggagatcgccgcgacgggcaacaacgccacgctcttcaactccggcgtcatggtcgtcgagccctccaactgcacgttccgcctgctcatggaccacatcgacgagatcacctcgtacaacggcggggaccaggggtacctcaacgagatattcacgtggtggcaccgcgtccccaggcacatgaacttcctcaagcacttctgggagggcgacagcgaggccatgaaggcgaagaagacccagctgttcggtgcggacccgccggtcctctacgtcctccactaccttggcctcaagccgtggctgtgcttcagagactacgactgcaactggaacaacgccgggatgcgcgagttcgccagcgacgtcgcgcatgcccggtggtggaaggtgcacgacaggatgccccggaagctccagtcctactgcctgctgaggtcgcggcagaaggccaggctggagtgggaccggaggcaggccgagaaggccaactctcaagatggccactggcgcctcaacgtcacggacaccaggctcaagacgtgctttgagaagttctgcttctgggagagcatgctctggcattggggcgagaacagtaacaggaccaagagcgtccccatggcagccacgacggcaaggtcgtgatctgtagatatacgaacaccccatccccatatggcaaccatacatgcatagcaatagcttgtataggtagctatgctttagttcttcgctatatatacagaatacaccactcgatccctgttgttgtcaaggctgcagctctatgtcgctgccggcctgccaccatggctaacgattcttttgggttggctgctgtaataagtttcaggtacatgtaaatttccctgctgaaattacgtgaccgcgtgtgagaaatgaatttgtacagggcgccaaataataattggttggtgcatacaacatatgaccagtcttttgcagt

SEQ ID NO: 15378 - DNA, 111 bp, Zea Mays
attaccttacccgttgccctatcatttttcactattattttgaatcaaacttaatatgttttgtaaaaggtgagattcgaactcgcaacctctctctcgcgcataccctcc

SEQ ID NO: 15379 - DNA, 1050 bp, Zea Mays
aggatggttagcattttttgctgccttttttcctgtccatttcctattgaaagggcaagacaagttgagaagtaaaattgagaggaagttggttgaaatgatgtgcagtgtttttgttgcttcatggactggagttatcaagtatcatggaccacgcccaagcacacgacctcatcaggtattcgttgcaaaccatacatcgatgatagatttcattattctggagcaaatgacagcatttgctgtcatcatgcagaagcatcctggatgggttggatttattcagaagactatcttggaaagtgtcggttgcatctggtttaatcgtaatgatctccgggaccgtgaagttacggcacggaagttacgtgatcatgttcaacaaccagacaacaatcctctgttgatttttccggaaggaacttgtgtgaacaaccagtacacggtcatgttcaagaagggtgcctttgagcttggctgcgctgtatgtccaatagctatcaagtacaataaaatatttgttgatgccttttggaacagtaagaagcaatcttttacaatgcacttggtccggctgatgacatcatgggctgttgtgtgtgatgtttggtacttacctcctcaatatctgagggagggagagacggcaattgcatttgctgagagagtaagggacatgatagctgctagagctggactaaagaaggttccttgggatggctatctgaaacacaaccgtcctagtcccaaacacactgaagagaaacaacgcatatttgccgaatctgtcttgatgagactggaggagaaatgaagggacgtaaagccgtacaagtgcacttcgttagggttttacatgcagctaccttgtaattcggttggcttccagaaaaaaaaaagtcagtgattaacaccgaagcattgtgctctcgtgagatgctgtgttggtcttaatatattgacggtactgtaccatggtttaaatgtgattattgaagcaatgtgaatggattagctggctaagaaaggaagtaaattgaattgtttgaa

SEQ ID NO: 15380 - DNA, 1309 bp, Zea Mays
gaaactgtcacctaggcagctaaaaggccaatttttgaaagtgcttctttacaaatacgctcattctgcctacaataaatggaccaacggagggcctgatgctgatctatgtatcacatttgtttacattttttactggcgctgaatggtgggcacaggattttcggaaatcactaccctttttcggttggattccacttccatttctttctgaaattgaaattcctttatatgttcttgtgctgattcttatgatcgtatgtgctgttatacctactgttagatccaatgtcagcaatgtccaagaggtagttgaggcacgaaaaggaagcatggcattagcattagccatgatccttccttttattgtactgttagctggagttgctatctggtgctatctttctccttcaagtataatgaggaaccagccacatttgctcgtgattggaactggctttaattttggatatttggtgggaagaatgatacttgctcatttgtgtgatgaacccaaaggtctaaaatctgggatgttcatgtctctggtgtttctttgttttccaattgcaaatgctctcattgcaaagatcaacgatgggagtcctttagttgatgagcttgttctgctgctgctttattgtgcatatacagtgggtctctacctgcacctcgctgtgtcggttgtgcatgaaatcaaggatgcccttggaatctattgcttcaggataactagaaaggaggcttgaactttgtagtgaagatatattattattacttcacaagtgctagcgaggagcaacacagttcgtcaccgtgcacgctgggagtgtgtgtgcccctctgaaatgccacagccatctgtttgttgagcagagggatctagggattgtattgcgcagttatcttggtcatataacaatatagcagtgtgatgtacactgtagtagggtcgttagaagatatactgtgaaaaacttgcttggagaaagtgatcgtagcatgtgattatcttgggatttttggccaagcctgagcctgacggctgaacgcgtcggccggcccctgccttctgatagctcgatagcagtcgacggcctcttctccgtctcgtggggcgtttgcgtcgaggaagaaacaacaatgcagcctttaagccttcaattctcaggcccagtttgctgctttgcatgcttgttcgtctctcaggctcttcacggtcacggcgcagcgacctggcatgttaaaaaaaatgggccgatatatatatcatgtgcaggttttctttaccacaaaacttttgcctagc

SEQ ID NO: 15381 - DNA, 2649 bp, Zea Mays
cactcgaacaattgctaagcgacagttccttcacaagctaaggtggatgtctcctacaaagagaagaggacttggtcgccgtggtcatggtcgtggaaggggtgccacggcagaaaaggatatggatcatctcgatatctctgtaccttcttcaccaagtactacctctgacagagaagatcagcctctgttgattccaagacaatccccagcttgctatgtaggaccgtcagaagtatccaccatgttactgaaccctaagatcaaccatcgttccgatgcgatttttggtgatcaggctgtggagcagctgaagttacgtcatcacaagcctctgaaatttcatgagagatatcgtccttacctgagagatgcaggtttgcttgggctctcacaaatttgccagaagatgcctcagttggacaaagcattgataactgcccttgttgagcgttggaggccagagacccatagcttccatttggcatctggggagataactgttacacttcaagatgttgcaatgttgtttgctcttcctattgatggtcgtccggtttgttctaccactgatcatgattatgcgcaagtggtccttgattgtttaggcctggatgcaaggggtccagcaatgcctggaaagtctttcctgcattacaaatggcttaagaaacacttttatgaattaccagaggaggtggatgatatgacagttgaaaggcatgttcgggcatatatactgagccttttatgtggggtgctctttccagatgggacaggaaggatgagtctgatatatcttcctctgatcgctgatctttcacgtgttagcacatacagctgggcttctgcagttctggcattcctgtaccgatctctttgctcggttgcctcctcccacaatatcaagaatattggtggttcattgcttctcttgcagctttggagttgggagcgctttcatgttggcagaccattggttcggtcacctttatgcacagagatgggcattgaacatgacttacctccaatcggcttccgttgggtggggtcacgcacacaaagtgagagtgctaatcgctgccttaagcagtacagagatgaactgaacgttcagcgagttgatcaggtgaagtgggaaccctacctgcaggtagagtcctcaaccttacccccactttgtacaagagacgcagacctgtggcttacacaagctccattaataaacttccctatagttgaaatgtatttgcccgagcgagtgatgcggcaatttgggcttcggcagtgcattccaccacctttccggcctacactacagtcgttacatcgtatcagtagacgtggcaaagaacgagagaactgggaagaaacacaccatgagtatatccaggaatgggaagcacgacgacagcgcatatttcgagatacagagcaatatgatccatcttcttatgaggagtatctgcgctggtactcaggagcaacacggcggtaccttgtcccagcaaccagtgacgacggtgaagcgggaccttcagctccaactgacgatttctcagatcttcagtaccaagccaaatctccaataatccgcaaagcagttgataaactggaaagcatggttaagaaagccaagagagccatgacaaccacagctgatacaaccactcaagccttggttgctgagtttctgcttggctttgaggatgtgttacaagatcttggcgagatccagaataatagtggttcaactgttccaccttttcacttggatagtccacattttgatgctgccgcaagtcaacagacacctcaacttttgcttgaagctgaggaaaatttaggtaccaaccaagaagcacaactagaggaagatgaagaacttaacacagtggagcgtgcttcattggcactggagactgtggaagaggaaaacgacttctccaacgacgtgctccctggaaatctttcactgggcgtggaggaagactgtgattcagccacaccagccaatgggatttgtgatgcagccactcccatgaccgatttggttgttcctcggtcagatgagggtctccatcaagatcaacatctagaagaccacaccgaaattgagccggctacattgatggtggagcctaagtgtgaggagggcgatggttccagcttcgtgctcccaccaagccctccagaactgatgctcgaggaacaggacgattcagggttaatagctctaggtactggatcatgtaccgaacagcagagccttggagtaggagaggctgaggatcaggaaaaccctcgcacaggcacagctcagcatggcatcatgatagtggagcgtacgggtgaggaaaacagcagttgcaatggcgtttattcttcctgcccaccgtcatctgtcattgttgaatcgagcagtgattatctgtgttagttatgtagggagtagaagctttttttatatttaaagatctgacatgagattgttagttcctttgttgctggtggcatggggtttgattctgtaacttgtttcgtcgtgattgtcttgataatatgagggtcttgaaaaccgggggccgttatacgccgacccagttggagtgtaatcctcagcgttccgttatacagcctcgtttgtct

SEQ ID NO: 15382 - DNA, 2177 bp, Zea Mays
aattacttgtataatatgtagcttttacttgcaaggggctgcagcagcagttgttcactatatgggctatacacctggccttttcattgttgggctgtttggaatattaattatgtggatgtatggctacttttggattacaggaatgcttctagttgctggaggttgtatgtgctctttgaaacatgctcgatatgtgatacctgttttgacttcatatggtgtttattctgtggctgttcgtgttgggtggcttggagtcttcttgacactaaacctttctttcttgacaaatgatcttcttaataagttagtgcaaggatacgaaggaagcactgaagaaagccagtttgaagacatgaaggattctgatccagttatggatgagttctatcgtagttgtgaattcccatcagttcctgacagtgaacctgagaccgtgtcttgcgcgaagccatactgctcagcacccatccaagatgtattacatgtacaaaaagaggaacctcctagtaaagtagtgaaatctgattctacttcattggatgagattaagaggataatggatggttcaaaccattatgaagttttgggtgtacctcgtaatagaagcattgatcagaagacactgaaaaaagaatatcacagaatggtactacagcaccccccccccccccaaaaaaaaatatatatatatataaattcatattactgtcctgtttctacagtcttgtgttttgtttctctaggtcctgcttgtacatcctgataaaaatatgggaaatcaattggcttgtgaatcattcaagaagcttcaaacagcttatgaggtcctctctgatttcacaaagaaaaacagctatgatgagcaactgaggaaagaagaatcacagaaaatgaccccaagatcatgtgttgtctctcaacagagtggtggtgtggagtttctctcagaagagtccaggcgaatacagtgcactaagtgtggtaatttccatatatggatatgcaccaagagaagcaaaacaagggcacgattctgtcagggctgtgatcagtttcatcaagccaaggatggagatggatgggttgaaaccagattttcgacctccatcaagatggaaataccacgggcttttgtctgtgctgagagcaaaatatttgatgtgtctgagtgggctacttgccagggaatggagtgcaagcctaacactcacggtccaacgtttatggtaaacatggttggcgcagataggatgcctcagagatcctacagttcccggtatcccttcagcttggacgcagagatgatcccggaagacgagttcgagctgtggcttcagcaggcgctggcgtcaggcgtcttcgctgacagccccaagcgcaggaaaagttggagcccattcaaactgcctcaaaagggaattaaaagttggcgaagatcgtcatgagggtgcagcaggcattacacagcgaggggtgtaggcgactacatcattggaaagaaggcaatggtgcagggcttcatgaatgtaaataaactgaccaacaatttgcccggatggacaagtgatttttgttcgaagggaaatttggatccataccattaaaagatcaccactttggatccataccattactatctcacttacatgtgggtccacatgagtcaatgacatgtggggtccatggtatatatctaaagtttggatcttttaatggtatagatccaattgttccttgttcgaaaggagaaagagggtggagaagaaacactcatgaataggtataacacataccactgctgaacttggttccctctgcagcaatcccacgagtttagccgtgaaccagtggtgctatcccccctacgatcaaagtaccggtggatctgtggtgtgttagtttcagtagtttagggatctgacatggaagaacgccaagacatcgttcctaagacggctgagatatggagcggtgttcattttaatcgtcaataatatttctgagaagcattgtctttgtgtagaagggaaggaaagaaggatgaaagtgatattggggactggctgtaaagtgtaaatacactaaaagctccctcctgtggaattactgcttgtaacattgtatacactgactgattaacctagtaaaaaacttccatgtttcaaattctc

SEQ ID NO: 15383 - DNA, 1752 bp, Zea Mays
gacgacgctcagaccaaagagcgagaagggggcaagcggcacgctgccggaaaagagaggctggcgtggtgaagggcagggcggagccttgcaccgcagaagagaagcgaggggagcgccaagcagtagtagaaagagagatagggaggaagagcgacgagagccgaggagctctcctccgcctaatccttggccgcgctgctagattcgccagaattaccgaggcgctgcaccccggatctacagggcggcggcggcgctcgtcggaatccggcgaggcggcggtgatttgccggggatcggcgccgcatgtctcagatctgagatggacaggatccgggacggcaggaggagcggggtgtccggcggagccgggccgccgcctccgagaaggcgcctcaggagcaacggcggagggggccccagagactcgccgcgctccgagcgccgacgtggcgagcgcctcatgctcaacggcggcggcgccggcgccgggagggacgacgccgacgacacctccgacgacagcctcggcgacgacgacgaagacgccgaggaggagctcgcgccgcggtaccagcagcagcggcggtcgccgagcacggcgccgccaccgccctcgccgccgcagcccggcggtggccaccaccacagcacatcgatgaaacagcagccattcccgcaaggccatttcttcatatccaacacctacgctcctccggctccgggagccggaggtgctgctgccctaggcctctaccagaagcgaccaggcgacaagacgcagcagcagcagcagcagcaggcatcgcaccagcagagcgccatgtcagctgccggcggcaataacgtgaaagcactccatccttcatccggcgggtttatgcatctcgcagcccagtctgcaggtggcatggcgcacacccacgtgtcggcggggcaactgactttcggaacaatgccgacgcctttaaaaccgtcaagcgaccagaagcctgctgccggaaaataaacagtccagacgaccatgcatcggagtggtaaacctgaactggtttttgcctgttcagcggaagcccaaatggcagaatcgcaacaacagtagcagcggcagctcaaaagaacccgcatggaagctcaaatggcccgcttggttgctggtgatgaggaaggaaggaggggtgccgtgcaccagttcgttccgagcaagaagcagatgtctcgttaacttaaaacagagtattcagattccggaatggttgatgggggagtggtacttcttttgtgtagttggggctggttatcctcccatggtgtaaaggccgcggaggaggaggtgcatagaatttgtctcttagcccgttttttattttatgcatggatggatggcccaaaagctggtttctccccctctctctttcttgtagctttgctgtttccgttttcccccctttctttcttttgggtggttctaagctttaactaactggaggaagaaagattcagttagaacgcagatcaggtgacttcgttatgctgtctgttgatacacactctgcttggattgttttggcagctagatctaggaggagcaaaatatctatcccaagtagaataggtaggatcttccggccatgattggtgggtgacatgcttctgggtttgttgttgtaagtagctttgggaggggggtgggggaaaggaaatgaatgaatgaattgaaagtgactgattatggatggatggtgtacc

SEQ ID NO: 15384 - DNA, 2217 bp, Zea Mays
acctcaaagtcgtctacccacatcataatcgacggcccacgcggccacgcgtacgtccccgattcatacaggctggccccaccttccgatcctaataagcccgctcccacactcctttcttcccctgcctgccgtctctcttccaccttccaccacaagcgccgccgcagccggtgcctgctccttcccgatccccgaggcaaagctgcgactccgcaaccgccgccatggcgttcgagaagatcaaggtctccaacccaatcgtcgagatggacggtgatgagatgaccagggtattctggcagtctatcaaggacaagcttatcctcccatttctggacctggacatcaagtactatgatttggggatactgcaccgtgaagcaactgatgacaaggtcacagtggaggctgcagaggctactctcaagtacaacgtggctattaagtgtgcgaccattactccagatgaaactcgggttaaggagttcaatctgaaacacatgtggaagagcccaaatggcacaattaggaacattataaatggcactgtgttcagagagcctattatatgcaaaaacgttccaagacttgttccaggatggactaagcccatctgcattggaaggcatgccttcggtgatcaataccgagctaccgatgcagttctgaaggggcctgggaagctgaagctagtttttgagggaaaagaagaacagattgatctggaggtattcaacttcactggtgctggaggagttgccttgtctatgtacaacaccgacgagtcaatccgagcttttgctgaggcttctatgacaactgcttatgagaagaaatggccactctaccttagcaccaaaaacacaatcctgaaaaaatatgatggcaggtttaaggacattttccaggaggtctatgaagctgactggaagtccaaatttgaggctgctggaatatggtatgagcatcgtcttattgatgacatggttgcgtacgcgcttaagagcgaaggaggctatgtgtgggcttgcaagaactacgatggagatgtgcagagtgatttcttagctcaaggttttggatctttgggtttgatgacatcagtgttggtgtgccctgatggaaaaaccatcgaagctgaagctgcccatggcacggttacccgtcatttccgtgtccaccagaaaggaggcgaaaccagcacgaacagcattgcttcgatctttgcatggacaagaggacttgcccacagggcaaagctcgacgacaacgctagactactcgacttcgctctcaaactcgaggctgcttgcgttgagaccgtggagtccgggaagatgactaaagatctggcgattcttgtccatggatcttccagcgtcacgagaagccattacctgaacaccgaggagttcatcgacgcagtcgctactgagctccgatcaagactgggagccaactgagcctacaagaaactttgcatggcgactttgaatgcttcgtcaccgtcaccgatctgctagtcgtcttttctgttatgaagaagtgaatgtgcgtcaccgcagtttcgatgcaagctaattatagatgtggtgtcactttacaaaatgccttccgttcaagccgcgtactaccgcgggatcacggaccactctctcagacggccaggtggttgtggtctcccaattccgcgctccagtggcaccacgtctccaggccacgcgttccaatttccacggcgctagtgacgtcgccaaaaaaggtgagaggaaaaggagggccgcgacgaggacgaccatgccggggcaaccgacaccgggactgccgcgtgatttgtgcccttgcgcacagtactacctatctatgcgtgtgtacgatatcttgtgtgcgctgcttggctgctctgtctacgcgcgcgtggactgcgactctgaaacctttcggcagcgtacgcaattgtcggatttcaataaaggaccgtctggtctgaatctctcaataaggacatgtataagtctaggttcttggttggctttttcagtataaaaacagctaagagatcagcatgatataactctaaactttaaatcagaaatgtatttcaaagacaatatgtatagaaagttgtgttgagatatgttttttatgaagagtctgtctcttgtaccttttttagttaatccttaaatacttctcaagagaccttatattaaa

SEQ ID NO: 15385 - DNA, 1977 bp, Zea Mays
ctgggagcgggccagtcgagggtagatttgccccgcccgctgccgccgctcccctcatgcctcgcctccctaccgcacacacggcctagcttcccagctcgttcgttgccaggcgccggccagccgcaggcggccaggctccgacgataaattacataatggaatccttggatctaattcgaagccattcgcgggcatcatactcaagaaacctcagcaggttggatccctgcccctccgtgcaaggggatccattttttcttcaccacgcaggcttttctcccctaaggcagcagcccctaaatcaggggattccatacgcattgcagtgctaggggccagcggttatactggagctgagattgttcggattctagcgaaccaccctcagtttcatataaaagtgatgactgcagatagaaaagctggcgagcaatttggatcagtatttcctcacttgataacacaggacctgccgagactggtcgcaataaaagacgctgacttttcagatgttgatgctgttttttgctgcttgccacatggtacaacccaggaaattatcaaaagcttaccccgacacttaaagattgttgatctctcagcggacttccgactacgcgacatcaatgagtatgctgagtggtatggacattcccacagggcaccggaacttcagggggaagctgtgtatggtttgaccgaacttaaacgagatgacataagaaatgcacgcctggtagcaaatccagggtgttatcccacatctattcaacttccgctcgttcctttggtaaaggcaaaactgatcaagctaaccaacattattattgatgcaaaatctggagtcagtggtgcaggacgtggggctaaggaagcaaatctttacactgaaatcgctgagggtatccatgcttatgggataacaagccatcggcatgtgcctgagattgagcaaggacttacagatgctgctgaatcaaaagttactatcagctttactccacatttgatgtgtatgaaacgtgggatgcaatctactgtgtatgttgaattggcatctggagtgactcccagggatttgtatgaacacctaaagtctacttacgagaatgaagaatttgtcaagctgttacatggtagcaatgttccttgcacaagccatgttgtgggatcaaattactgcttcatgaatgtctatgaggatagaatacctggaagggccatcatcatctctgtcatagataatcttgtgaagggagcatctggtcaggctttgcaaaatcttaatctgatgatgggactgcctgagaatatggggctgcaataccagcccctgttcccttgatcttttgtgtcattatctattattacattatttaggagtccagaaaccaaattatcattactgtcaagaggtggcaaggagcctgacatcagaattcagtcaagtcgaagttagacagttagtgtagcttggtctgtgttgttttagctttattaaaccattaagagaataatgatgatggcaatttagcagtacaatggtagtattatgtgggcagcttggttccaataaaatcataagcctatacacatcttgtgcccgcaatgttgtttgctattttgatcacgaaatcaatattgagcttgaattcagttctgaggcagctatccttggcatcactggataactttatggtatcttttttactatgttcaagcaaaaagtttagcccattacagttgtactttgagaagattgaaatgtctcttagtatagttcttaagtctcttagtatgattctcaagttttatcctatagcagtatagctgcatggactcatagcttgctactgtagctatcttatctgcagcgtttcttttaacaggattttcatctctgcagcgttgctgctgtgtaaacatctgtaatacagacaactacgaaacgaactttcttgtttatgtgtgaag

SEQ ID NO: 15386 - DNA, 3923 bp, Zea Mays
gacgttgttggagagtaaggagatatagagaacaaaatcttttagacaagactgtaaagaacggatataaagtacgttgctggagacagccttacccattaaagacatgtttaggttcttccggatggaaagctactgagcacattaaatctctttctatttaattttaactataaaagattaatcctcttaaattcactttcgatccacttttaaccaaacagacccttatccattgcagacacatgggtattattaatttttttttctgcaaggtttcagttgttttaaattttttttcccctgcaaagccaacatacatggccactaaccactttatttttttacaagaaaatagcacacacaaagttggttaactggtaataacataaattaaacttacacattctgaatttagcacaccaacactactttacagcgctgtgttcagcgcgcagctagcctcgtagtagtagtagttatactagcgcatcgacgttcagcagcctcgcaattacagtagtttattcaggcatgcatcggtgggcatttggtgcttgcattggcaaactggaaaaagaggtaggtagctagctctggacggaggtctcgtctcacggcctgaagaaggctgggtggggacggccggtgccctggaaggaggtgttcttgaggccgtgagacgtggccttcgtccagagctagctacctacctctttcagttcgatcgtcgtcagtgcaaagcaccaccaatgcctgaataaatttaactacgaggctagctgctgaacatcgatctgctactgctagtattactacggcgaggctgctgaacagcgctgtagagtagtattggtgctcagttcagaatgtataatgttacttctaccgattaaactgttaaaaaaccctagtacgcttatgtggtcaaataccacttatatctgtgagcagtgtcgcatctctatataaaggaatatgtatcttctcagaaagaggttagagacccaactctacatactgtttttttaatgtgttttctgagtgtgtggattgctagaaaagaaaacgtgcttctaccgacttttcgcgtctatactgctgacaggaggggaaatgagcaaatctgatgatccatgttaacattgatgatttgtgatagcgtggttctcagcgtaaccaaccttgtctgttattctcacgtagagagggagagagaaaaaacaataaagtagcactaccccaggagccagtgcgttttaaaaagggccgcacgcaccgttaccaaccatttgacacaagtgcaaaagcccatcacgcgtttttaaacgggccaaattctagttacgataggtttttttttctgtagcataaatcacctgtattgaaccgaaaacatcatacgccgccgcctgcctctcccgccggccgtgggctgccgcatcccggcctggtgccctccggcggccgcatccaaacccccccaccccctcgcgtagataagcctagtaatcagtctcggcggcgcgggacgctgtggcgggggagaccagtgcgagactgcgctgtcttgtccattggggggatttggggctgtgcgcgaggcagttaataatgcccgtcctctccccaagtcagagtccgctgccatggccgtcgccgtcgccgtcgacgtcccctcctgcatccagctcctccgctcctgcagcgcggtcgccggccggcagctccaccagctcctcctcaaatccggccacgtcccctcctcgctcccgcccactaactccgtcctcctcatgtacgcgcgcggctctccgctccactcccgcgacgcccgccgcctgttcgacgaaatgcccacgaagaactgcttctcctataactccatcatcaccgccctcttcaagtccggagaccaccgtgcggctctccgcgtgtttcgctccatgcctgacaggaacaccttctcctacaacgcggtgataactggcctcactggtgctggggatctcgacaccgcgagtgagttgctagatgagatgcccgtgaaggacgccgtggcttgcaacgctgtgttgcatagtggttggcgcctgtgctgatcggacgcagtatgagattgggaggcaagctcacacccggttggtggttgccaacaccgggattgattcgatattgggctgcgcgttgattgacatgtattgcaagtgtggggatttggactccgctcaccaagttcttgacaggttagaacatgtcgatgagatttcgctgtccgcattggtctatggctacgcatcttgcggacagttgcacaaggcgttatgtcttttcgacaagatggagagccccagcattgctctatggacgtctcttatcagtggttgtaaccctgcctatcatggagatggtgcttttgttctttttgtaaggatgttgcggtcagaaatgttgcctaattctactatttatgccattgttctgaacatgtgtggctttttaggcatgctgaagcctggtcagcagacgcaagcttgtgctttaaagagtggggctgtcaatgacttgatagcagcaagtgctctcattgacttctactcgaaatgcggcctctgggcagatgcctgccaagctttcagtgagcttaggcatcatgacaccattgtgctcaactcaatgatcactgtatactcaaactgtggccaaatagatgaggctagaagagtttttcgtttgatccctagcaagagtgtcatctcatggaattctatgattgttgggttcagtcaaaacgggcatgctcttgatgcattggagctgttctgtgagatgcaccggcttggtttgcagcttgacaatgtagctatatccagtgtccttagtgcatcaggcagcatctgctctgtaagttccggggagcagatttttggtcttgctattgcgcttggtctgcagtctgaccatattgtagcctcctcgctcattgacctatactgcaaatgtggtaacttggccaatggacgcaggatcttcagtggtattgctaatccagacgaagtcctgtggaactcaatgcttataggttatgcttctaacgggtatggactcgaggcactgaaacttctagatttaatgcaaagtaggggtctgaagccaagcgaacggacatttgttggtgtcctttctgcatgctgtcattctgggcttgtggaagagggattgagatggttttaccggatgaaggaagattttggcgtgagtccatcagctgagcattatgcatgtgtgactgacctgttggtccgagcaggtcgactggatgaagcagttgagttcatagagaacatgcctttcaaagctgatgcaattagttggacttctattattggaggatgcaaagcccagggcaatgaggttctgttggacaaggttgcaaacaaattgatggaaacaggattgtcaacacattcaagtttgtatgtgcagctgtcaagcacactcgcagctcatggggattgggacaaatcagctgagattaggagtatgatgcatgacagaagaatctcaaagaatgctgggcgcagttgggttgacagggcatagaggaaatgaccagtgtcacctcccacaggcgtctcggtccattttctcttgggccttccctattggctttggtttcttcgatgtgttcttccgctagttaggaagtggtaacaaacaacgatcctgctaaaatatgtgcttttgatcatttgcttagttgaaccatatgaggtgatttcttggatgtggattcctgaagcatgcacaggttaatgctaatgattcagtccatgatatcttcgacatcaaaattgaccataatgaaaatgtgtcaaccaccaaaaagcaatccctacagcggccaaatcattgcgtctctg

SEQ ID NO: 15387 - DNA, 1613 bp, Zea Mays
cgtagaccttctgtgacgaaccttgtaaagtcgagggatcgcctaaagaagcttaaatcagagcatgggaaggttcagcttggaaacataactgtggatatggtccttggtggaatgagagggatgattggaatgctttgggaaacatccctacttgacccagaggagggtattcgttttaggggtctctcgattccagagtgccaaaaagtgctgccaacagcagttaagggtggtgaacctttgcctgagggtctcctttggcttcttttgacagggaaggtcccaaccaaagagcaagttgatgcactatcaaaggaattgcttgcgcgctcaactgtcccagctcatgtctataaggcaatagatgctctcccagtaactgcacatcctatgacacagtttaccacgggagtaatggctcttcaggttgagagcgaatttcaaaaagcttatgacaatggattgccaaaatcaaagttttgggagcctacttatgaagactgcttaaacatgattgctcggcttccaccagtggcttcttatgtttaccggagaattttcaagggtgggaaatcaatagaaactgacaattctctggattatgcggcaaatttctcacacatgcttggttttgatgaccctaaaatgctggagctgatgcggctctatgtaacaattcacactgatcatgaaggcgggaatgtcagtgctcatactggtcatctggttggaagtgctctgtcagatccttatctttctttcgcagcggctctaaatgggttagctgggccactacatggccttgcaaatcaggaagtgcttctatggatcaaatctgtaattcaggaaactgggagtgatgttacaacggatcaactcaaagagtatgtctggaagacactaaagagtggaaaggttgttcctggatttggtcatggagttctgcgtaagacagacccacggtattcatgtcaaagggagtttgccctgaagcatttgcccgaggatccacttttccaactggtgtccaagttatatgaagtcgtacctccgatcctcactgagctaggaaaggtcaagaacccgtggccgaatgttgatgctcacagtggagttttgctgaaccactttggactatctgaagcacggtattacactgtcttgttcggtgtttcgagaagcatggggataggatcccagctcatctgggaccgtgcccttggcctgccacttgagaggccgaagagtgttaccatggagtggctggagaactactgcaataacaaggctgcctgaagattttaacagttgctgttttttcccaaccatggctgataataattaaacatgcgttatagagttttttcccccttttgactgttggataatacaagagcaacatgctctagaattttgtatcttccatcacttagtcggcatccagattgttgatctgcggcaacactgcagaagagattaggacatgctgattaatctttgcagagttaattggtaattacagaattgggcttttgcatgtatcatgtatgccaattatctcgttgtggcagttctgttttaagttgatccgcgacatggctggattgctg

SEQ ID NO: 15388 - DNA, 588 bp, Zea Mays
gcggtccagatcgatcggtatttgcagattggtgcgtccacacgagagtttacggcggcccaaaccccccaaatccagttccatcccaatcgccgagaaggggaagccaaatcgatggcggcggcggcggccggcggcgagaacagcggcgcgggcgcgggcgcgggcgagggcgagttctacctgcggtactacgtggggcacaagggcaagttcgggcacgagttcctcgagttcgagttccgccccgacggcaagctccgctacgccaacaactccaactacaagaacgacaccatgatccgcaaggaggtcttcgtctccccctccgtcctccgcgaggccaggaggatcatccaggagtccgatatcatgaaggaggacgacagcaactggcctgagcccgaccgcatcggccgacaggagctcgagatcgtcatgggcaacgaacacatttcattcaccacttccaagatcggctccctcgtcgatgtccagtccagcaaggacccggagggactccggatcttctactacctcgtccaggtcaagaaaacctctgaatccctgcctcaaccatacgcagcg

SEQ ID NO: 15389 - DNA, 989 bp, Zea Mays
caagtgcatatctactgaattttctgaacttggacagactacttgcgagaatgtgggaggagatgggcctagtgagggtgtatacaaagccacagggccagcagcctgatttcacagaccccgttgttctttccaccgacagaggtggctgcacggtggaggacttctgcaatcatatccatagaagtttgctcaaggacgtgaagtatgtgctcgtatggggaaccagcgcaaggcactatccacagcattgcggcctcggccatggccttaacgacgaggatgtcgtccagatagtaaagaagaaggaaaaggaggagggtgggcgaggccggttcaagtcgcacacgaacgcacctgaccggatatctgatagggtgaagaaagccccactgaagacataataacgggttccctgagcgcgtcgtgatcagcttctccaaaccagatggacaacacaagctcggtgggagatcataaaatctggaactagctgagccgcggcgtgctacttgttttgtagtaccagaacagaaggggccaccgccatgtttggagtactccaccttccacaatacctacaccaatgcggcaccaccatgaacactgctgcgtcttgctcgtatgatgtgggcttatcactgtgtgttacctgctatatatgatatgataaatacttgccaactcacggattctgcgtctgcttattagcagcagcctagcctttgttgtgggaaacatttgtgggtaccaacgcgagggcagtttgagaaaggtccgagccgacatcttgagtgtgatagattgaacatgagggtgaaggggattacaagttctagtatcacctttatgggagggcaagggataagagatgatctaaataatattgttcattggatttgagtgagtctagtgatctaaaccgttagttttgatgatgtgttaagtttggatataatttgttttgtggatatattgtgggttatggg

SEQ ID NO: 15390 - DNA, 443 bp, Zea Mays
cccctcttccccgcgaagaaactcccccggaaaacgcctctctaattccccggtgataaatcgagcggggtcaactgcgtagcgcgaccgaggccgcggaagatcgagatctctggtgctgcctccaagggggcgcggggagacaggggaacgccgaaaccctaggggtcgaacggagaaagcgatcagcgcgggaagcggtccgctcggatcagcggcgcacaacgcgaacgcggatgccgcggggcaggaaggggtaaacggctcctcgtcgcgctgccgtccggcgaacggcggcgggggaggaggatgacaggtggggccccctcgtcggagtcggcggcggaatgccgaggcgacgggggaacggggaagagagaaggttggagagggccagaggccagaggggttcgtgagagcgaaaataataaaaagggtcagag

SEQ ID NO: 15391 - DNA, 1582 bp, Zea Mays
gatgcctccaccaatctcatcctcaacccggacggcggtcacggcgcacgcgagcagggttgctcacgaatcgcaggatcgcgggcagacggcggaccgaaagaagaatgtcgcacgtggccatgtctcggccgcgccccgctcctccgtcacagcctcatagtcacaggctcccagcctcccgcgtccggagtccggatccggacacgcgctcgaggccacccgcgctgtcccgcctccggcagcgatggcggccgccgcgcgccccgcgtccgcccacctcctcctcctcgccccgctcccttctcctccccgcctttcgcatctcatccacacccgcagactctacgcactcgcccccgcccgccgccctgcggccgcgcgcgcgcgccgcgaatcctctcctccctccgcgccctcccctcctgccccggctgactcgctcgattgcgtcggaactggctcggatgtcgagtgcttcgtcgacgccggcgccgaagacgccgctcccctccttcccgcgctctccgcaggcgcgtcaaaggacgatgggaagagcgagggcgacgcggcggtttcggcttcccctacggggagggagctcttggagtgggcatctctggtgtcgcccttcttcttctggggcacggctatggtggccatgaagggggtcataccccgcacgggtcccttcttcgtcgccgcgatacgcctgctccccgcgggcgcactgctagttgccttcgccgccgcgcgcggcaggaagcagccctccggctgggaggcctggctcgccatcgctgcgttcggactcatcgacgcggcctgcttccagggctttctcgcggagggactgcagaagacatcggctgggctcgggagcgtcatcattgactcgcagccattgacggttgctatccttgcatcactgctctttggagagtcgattggcgcgataggagttggaggactcgtgttgggcgtcgtggggctcttgcttctggaggttccagcactgtcagttgaaggaaatgacacaacaatctggggaagcggggaatcgttgatgttcctctcagctcaaagcatggcagtcggaactatcatggtccgctgggtgtcaaagtactctgatccaattatggcaacaggatggcacatgattattggtgggcttcctttgctagtgatatctgttcttaatcatgatcctgctctgagtggccatattcaagatcttacatggagcgacatattagcacttggttatacatctatatttggcagtgctgtcagctacggtgtatacttttacaatgctactaggggtagcttaaccacacttagttctctcactttcttgacccccatgtttgcatccgttttcgggtacctgtacctgggtgagaccttctcaacagtacagattggtggtgcgcttctcacactggttgccatctacatggttaactacaaaagcattataggtatccaccattactagcagtgtttcaaaggcatcacctagtcgtccatgcgtgcccagcactatgcctagtcaccttttaaacacaggttacta

SEQ ID NO: 15392 - DNA, 247 bp, Zea Mays
gcggccggagcatcttggagacaggaagaaggggtggtagtaggtgaaaccggaggcggcaggatagggagagggagcgagagtagaggccacgcctgcttgacagcaaggcccgtgcgctcggcggcggcggcggcggatatgggcgactctggcggctctgttgtgtcggtggacgtcgagcgcatctccttcggcggcaagggaagggagatggcgcgcagggtagcttggattggacagccgg

SEQ ID NO: 15393 - DNA, 2248 bp, Zea Mays
gttccttcctctgctcggttgcttggcgttgggtcactgttggcaaggtgttgggtcgacgattggagctggcgtctacgtccttgttggcacagttgcgcgggagcattccgggccggcattgacgctttcatttctgatagccggaatagcagctgcgctttcagccttctgctatgcggagctggctagccgttgcccttcggcaggaagcgcctatcattattcgtacatctgcgttggcgaaggagttgcatggttgattggctgggctttgatacttgaatacacgattggtggatcagccgttgcccgtggcatttctcctaatctagccttattttttggaggacaggatagtctgccatggattttagcacgacatgagatcccatggcttgatgtcgttgtagatccttgtgcttctttcctcgttttcgtcgtcactggccttctctgtgtggggataaaagagagttcatttgtgcaaggagttgtgacggtcttaaattgctttgtgatgttatttgttatcatagccggtagctacatcggcttccaaacaggatgggttggctacaaggttgctggcggatttttcccttatggagcgaatggaatgcttgccgggtcagcaactgtcttcttcgcctacataggatttgattcagttgccagcacggctgaggaggtgaaaaatccacaacgagatctgccactgggaatcggaacagcattgtcgatttgctgttccttgtacatgttggtttcagttgttattgttggtctggtaccatactttgctatggacccagacacccctatttcatctgcttttgccaaacatgggatgcactgggcaatgtatcttgtaacaactggtgctgttcttgctctctgctcaaccttgatgggatctatattgccacagccaagaatattgatggccatggcacgagatggcctgctaccatcattcttctctgatgtccataagacgacacaagttccagtcaaaagcacagtagtgactggcatctgtgcagctgctcttgctttcttcatggatgtctctcaactggctggaatggttagtgtaggcacgctactcgcgttcactatagttgctgtgtccatcttgattcttagatacgttcctccagatgaggtacccctcccatcttccctgcaagcatcattccgcttgagccaagaaaatgacgaggaaaagctgaggggtacccttggagatgatgatcatgagcaaggctcagctgaaataagtgatgttgtagtagaaccaatcactgaccccctgatcgagaagcagctatacgcaagcaatttgagtgaggcaaaacggcgtaagaccgcggcatgcagcatcacatctgtttgcataggggttctgatcctcacgacgtcagcctcggcaacattcttgcccttcccggtgagatgctccgtttgtgttttgggtggcatgctcctcctagctggtctgggcatgctctgctggattgaccaagatgatgggaggcactcctttggccactccggaggattcatctgtccgtttgttcccttgctgccgtggcggcacgtggatgcgagtgggggtgtggctagtgatgggggtgttcgtctacattttctatggccgcacccacagctcgttgacggatgtcgtgtatgtccctgtggccgaggcgaatgagatatacgggtcatcctcttcgttagggtttgtggcgtaaagagagatggaaggagatgtttgttgaagcctatcttgagccagtcatggtacttctcacaaaaacctcaaagatcctgactggagcaggtacctgcttgagctattgtgttgcaggcatgggtttgaagaattcaatttgtacgtcatatttttaaaatgtgtaaattgtaacgcacggctaagcttgtgtgtctctgttggaggaatgtaaatattagtatattgcatagaactatatataggtggtgccaatatacaggtgtttaaaaaaaagggggggggtcattctaggaatctgtatgttttactacgaacttgttctaaattcctaggaattcaaacaggcatgtctgaggcgtattatgtggttaaggcctcaaaggtccaaacacattttatttcatgttgaaatgaagattacacgagcagaaatgctcacggaaaaaacaatagtacatcaataattcagattcactgcaccaggtttcc

SEQ ID NO: 15394 - DNA, 3423 bp, Zea Mays
ccgttccaaattcgccaacccacaccaccttcctctctctcgccgccgccctcagatcagatcaaagcggaacaccaactcctcctcttcctcctcctcgtagggtttggtgtgttcacctcacctctcgcggcgacagcgaagccttctcttctcttcccctccgctccgctccgctccgctccgctcggtgtttcagccatgatgtcgcggtcgtacaccaacctgctcgacctcgcggagggcaacttcgcggcgctgggcccggccgccggcgccggcggcggcgggcggcagaggcaggggtcgttcgggctgaggcggatgtcgcgggtgatgacggtgccggggacgctctcggagctcgacggcgaggacgagtcggagccggcggccaccagcagcgtcgcctccgacgcgccctcgtccgtggcggcggaccgcctcatagtggtctccaaccagctgcccatcgtcgcgcgccggaggcccgacggccgaggatggtccttcgtgtgggacgacgactcgcttctgctccagctccgcgacggcattcccgaggatatggaggtgctcttcgtcggctccctccgcgccgacgtccccgtagccgagcaggacgaggtgtcgcaggcgttgctcgaccggttccgctgcgcgccggtcttcctccctgaccgcctcaacgaccgcttctaccacggcttctgcaagcgccaactctggcctctgttccactacatgctccccttctcctcatccgcgtccgccgccggcaccacctcttcctcctccgccgccacttgcaacggtcgcttcgaccgcagcgcttgggaggcgtacgtgctcgccaacaagttcttcttcgagaaggtcgtcgaggcacttcctctcgtgctgcagtaggatgctgggaattgaataccagtcaaagcgtgggtacattgaattggattactttggccgcactgtcgggatcaaaatcatgccagtgggagttcatatgggtcaattggagttgggtctgcgcttgcctgatagggaatggaggctttctgagcttcaacggcagtttcaggggaaaactgtcttgcttggtgtggatgatatggatatctttaaggggatcaatttgaagcttctcgcctttgagaacatgttgaggacacatcccaagtggcaggggagagcagtgttagtgcagattgctaacccagcccgtggaaggggtaaagatctggaagccatccaggctgagattgaggagagctgccagcggatcaatggagactttggccagtcagggtatagccctgttgttttcatcggccgtgatgtgtcaagtgttgagaagatcgcctattatacgatagcggaatgtgtggtggtcactgctgtgagggatgggatgaacttgacaccgtatgaatacgttgtctgtaggcagggtgcaccaggatctcagtcggtatcagaggtgagtgggccaaagaagagcatgctggttgtgtcagagtttattggctgctcaccgtcactgagcggtgctattagggttaacccatggaatatagaggcaaccgcagaggcgatgaatgaggccatttcaatgccagaacaggaaaaacagttgaggcatgagaaacattaccgttatgtcaggagccatgacgtcgcttattggtcaaagagcttcatcatagacttggaaagggtttgtaaggatcacttcaagaggacttgttggggcatagggttgggttttggtttcagggtggtggccttggaccctcatttcacaaagcttaacatggattcaatcattaatgcttatgagctttcagagagcagggctatattgctcgattatgatggaactctggttccccaaacttccctcaacaaggaacctagtccacaggttttgagcatcatcaataccctttgctcagatagtagaaacatcgtttttcttgtcagtggtcgagacaaagataccttgggaaagtggttctcctcatgtccaagattggggattgcagctgaacatggttacttcttgaggtggtctagagaagaagagtggcaaacatgcactcaggcattggacttcggatggatgcaaatggcgaagccagtgatgaatttatatacagaagcaactgatggatcctacattgaggccaaggaaagtgccttggtgtggcaccatcaggatgctgacctaggctttggatcctcacaggcaaaggagatgcttgatcacctggaaagtgtactagcaaatgaaccagtctctgtcaagagtggccagttcattgttgaagtcaaaccacagggaataagcaagggaatagttgccgagaggatacttgcatcagtgaaggagagaggaaagcaggctgatttcttattgtgcatcggcgatgataggtctgatgaggacatgtttgaaaatattgctgatatcattgggaggaatttggttgctccaagaacagcactgtttgcgtgcactgtgggacaaaaaccaagcaaagccaaattctacctggatgatacattcgaagtggtcactatgctgagcgcactggcagatgccacaggtcctgaactggagactgattcggctgatgaatctgtcgcatatatctcatcacttgatattggtgacgaacaatcagaatccagtgataaaccagttgaagggtcttagccagttttctcttgcgttttcagaacatgatgattgtttcaatagtcaattctattctacacaattttctgatgggaactcaacgactaacaactggttctacgaatgctccagagtgaagcttctcaatctgctgtgctccaagttctccagttgggcaagatagtacagtctgttgctccaaggcgtagatccatatgttcatagctgacttacttggcacgttctttcactttctcattcctggttgaattaaaatgaaaacctcacagaagacaaagggagcgctgtttggctcattggctgaagtaatctggggggaggtataggagtggcgtatgtgaaaggagcctgtgcgcaggttgtgatatgattccttattaacacgacgttacaaagtggtgtcacttcttgaactaccagtagtaacaatcccaagagtgaggttcgaattgattaattaattgcttcaaagccggatctcggatggttttgctccaacgttttcccctcgtgcggttttttttaataaattttctgggtttacgttgaaagatgccttggaagatagcatatttttaggcctgtctatcagttctgatgaccactgccaatcagcgctggatgcttggcgattgtgtaccttaacacgctaagagcatctccaataatattaatccaaataagagggtattggtgatttc

SEQ ID NO: 15395 - DNA, 986 bp, Zea Mays
ggagcccaggtcttctaaaccctttttcaaggttcaaaggctttcttccaccttcacgcaggcgttctctttttactttggcaacttcaatgctcgtgtttttttcgaaagcttttaacgttcttgcgctcattccagttgtgaagcaagtgttgacagaaagtacagttgatccatttctttgtttaatagaagactgtagattgcaggctcttgatagtgctaatgagtcctgcacgaaactctatggttcaaaagaagatgatgagctagctctgaaatcactgtcgaacattgacatgaatgaaaatcagtcaaaagaaacatcagtgcctcttatacttgacagcttggaagatatgtcggagtcagaattgtctgctattaggaaacagttgcttgaggaattttcagcagatgacagctgtctgggatctcattttactgaaacaccttcacagtatccagcacaaaatgggaaactgcaccataagtctatggaggttattccattgggatttgtttttgaagatgatactctcgctgaagcatctgacagctcagtagaacctcacttgcaacatccgccatgtaacaacattcttgatgtcaatcggcttcttgattcagttttggaaacatctcagcatgttggaaggtcgtcagtgtcaacaaaccaggatctgcctttcaaggacgtagccaaccaatgtgaagcacttctgattgggaagcagcaaaagctatctgcgtgcatgagtgtctgtgaaaaagaggctggtgaatcttccgtcgagcagtcatctcggcaggatcctcaagcagatacgtttctctgcacagctgatgaacaatggcaccccaattcctggcctgcctgcaggtgcgttttcaatcctaaacccggtgtaatgaaggtttcatggaccgaactgaaaaatagtctttacaagcctgaagacctcgttatgtctcaccagggatga

SEQ ID NO: 15396 - DNA, 161 bp, Zea Mays
cacggaacaatgacgagatcgataacgcatacgtgtgataaggcagggtctgcggagatgtgcgcaagggaaggtgagctcgtggtgccgagagtcggcggcgtggtttgagacggctgggcacataggcgagctactaatagtcccagcgcacagcacga

SEQ ID NO: 15397 - DNA, 1458 bp, Zea Mays
gccgtgctgtcgcacggctgggcacaatgagagttctcataaatcattgtcctcataacttgtaatgggtggaagccagtatgatgatgactgggtgttgcccagtgccgatatcactcttgttctggttgggaaacttggctatggcaagagtgcaactggaaatagcatccttggacgggaagcatttgtatcagaatattcacatgccagtgttactaatacttgtcagttgggaagcactaccctgaaggacggccgcaccatcaatgttattgatacaccagggttatttgatatgagcattacatcggacgaggctggtaaagagattgttaaatgcatgaacatggctaaagatgggatacatgcagttctgatggttttttctgccacatctcggttttctcgagaggacgcaagtacagttgagaccattaaagtcttctttggtgaaaggattgtcgaccacatgattttagtcttcacttatggagatttagttggtgaatctaagttgaagaaaatgttaaataatgcgccagagtatttgcagaatgttgttgagctatgccaaaacagagtggttgtcttcgataacgtgactgaagaccgaaggctccaagcgcagcaacttgacaaattgctcgatgtagtggattcagtttgtgcaaaaaatggaggaaaaccattttcagatcaaatgttcactagcatcaaggaggtgcatgatagagaaaaagaggtgcatacctcgggatattcagatgagcagatatctgaattgaaaaaggagattcatagaactagggatgaacagcttgcgcacataaccaacatggtcgaggaaaagttaaactgcactgtggagaagttgcaacagcagctcatggaagaacagaacgcaaggctggaagctgagaaggtggcgtacgaagctaggctgaaatcagaagcggagatccagaagctcaaggagagcctcaagaaagctcaaatggaaaatgatgagttccggaggatggcgcagagccagggcagtaaatgtgctatcctataggcattagtacttgctagaaattggtggagctatcgtgctgacgcgtctcttgtacgtagtactttctctgttccaaaaatatatagttcaatacaccttagtagagatgactacgagagtatccaaacaagacctcgtcggacatgttagcctgaagcttgcttatggacatattggatatagtttttgggtgagaacttttgaacaacttccttgtttttttctctcatgttctaatgcatcttttctctagctgtatgcgcacaacattggagttgttccccaccaaatagaagcattagggatcatccgacaaagaaaacgagtatcctctttctcactagaattatcatgacgaacagcaaaaggatgaataacaccgtcttcgtcttcattgc

SEQ ID NO: 15398 - DNA, 2586 bp, Zea Mays
ctagctagctccggcggacctcagcggccgggatcagatcggaatcggatgggcagcgtgggcgtggaggcggatgacgacggcagcatcgtcaaggagttcctgcagcggtgcgagccctccggcgacgccgcctacggcgagctcagggctctgctggcgcgcctccacgacccggccaccaggcgcgacgcgcgcctcttcctcgccgcgctccaccgccaccagcagcgcagctcgtcggccgccggcggactaacgcacgagcaattctttcgacgcttcggcttccgcatgcaggagctgctgctccaggataccgccaccgacataaccgcctccagcttcatcgccaccaagcccgccgcagccgcaggtttccaacaaatgaagaagttgacaatgatggagataccaagcatcttcattcctgaagattggtcattcactttctatgagggcctcaaccgtcatccagactccattttcagggataagacagtagctgagctgggatgtggcaacggttggatatctattgctcttgcagagaagtggtgcccttcaaaggtctatggcctggatataaacccaagagctgtgaagattgcatggataaacctgtacttgaacgcattagatgacgacggtctcccgatctatgacggggaggggaaaacattgctcgatagagttgaattctatgaatctgatctcctttcttactgtagagacaacaagatagagctcgatcgtattgttggatgcataccacagattctcaacccaaatccagaggcgatgtcaaagattgtaacagagaattcaagtgaggagttcttgtacgccttgagtaactactgtgctcttcagggttttgtcgaggaccaatttggccttgggttgattgctcgtgcggtggaagaagggatatctgtcataaagccttcagctgaatccagcattattcatatggatttagatcgcagcttcctgccagtaccttcagcagtgaatgcgtctgtttttgaaagttttgtcaggcagaacatcactgattctgaaaccgatgtccgttccagcatccaacagctggtgaaagacagctatggtttatccgcagctggttgtgcagaaattatctacggaaacacctccgtagcactcttcaacaagctcgtcctttgttgcatgcaagaacagggcaccttgcttttccccttgggcaccaatggccactacgtctccgcagcaaagtttgtgaacgctagcaccgtgactataccgacaaatcccagttcagggttcaggatcgagcccaaggttctagctgacactcttaagaatgtatctcggccgtgggtgtatgtttgcggccccacgatcaaccctactggctttctgtacagtgacagtgacatccgagagctgctctccgtatgcgctgaatatggagccagggtagtgatagatacatccttctctggcctggagtacgagaccgatggatggaggcagtggaatctggcaggatgcctttcctctttgaagcgttcagagccatcgttctctgtggtcctgctcggagagctgtcctttgcgctgactgcaggtgggcatgactttgggtttgtgatattgggtgactcgtcgttggctgagacgttccatagtttttctagcttgagtcgaccgcacaccacattgaagtacactttcaagaagctgctggggcttaagaaccagaaggaccagcatttctcggatctgatagtggagcagaaggaggagctgaagaatcgcgccaaccagttgatacagacactggagagctgtggctgggaagctgccatcggttgcggtggcatctcgatgctggcgaagcccaccgcgtacatggggaaggccttcaaagctgctggcttcgacggcgagctggacgcgagcaacatccgggaagccatcctgagggccactgggctgtgcataaacagcagctcctggacggggatccctggctactgccggttcagctttgctctggagaggggggaattcgagcgtgcgatgggatgcatagctcggttcaaggagctggttctgggaggcgctcagatgaatggtgcctgatggagcaatccatgttatacgtaaccttggtgctgtgtagtagcgatgatattgttccaggtgatggagatatcaaggaataacaagagcctacctgctgtgaagtcaatgtactactaggatggatagggcgcttcgatgcgccctttctgtcttcgaattgctgtgctgtgcacggagaataaacatatactattatatatatacatacaatttgctaagatatactcctatttgttgtcgttccatgcataaccgtaacccattaattccaaagaaacctggggggtcatgatcttgtgaaccgttgggatcatgattagagggaaatttttgtttttagaatggattgcgcagcttgatttaactggaaatactgatttgatggatggaatggaacaagtgtacataaattgttggaggttacaatgtaggcctgcatcaggccttaggtgc

SEQ ID NO: 15399 - DNA, 2487 bp, Zea Mays
tgccattattattactactattgtattttattcaatctccatctggatgcgtgtgtgtgaccggtgagcgagacagattccacagcaatttgctcctcttccacgcacaggcaagactgctccccagaaaagattgtagttttcatcgatttagccggtttctgcccggggggatcgctgctggagatctcagagaaccgggaggctccgagcttttgctccgtttgcgtcgaatctgcctcgggagcggagaaaggagcggccttccgagctcgtaggggccgtccctgagaaggcgagaggggacgcggcggcggcggagtcagctctagggcgctcgtggaagtcggtgatgccggtggtttgaggacgaggcggcctcggtggttttgaggaagccagcctctgccgcggcaaggatggactccagcggggaggaactcctgaagaagatccgggaactggaggttgggcaggcgcagctcaagcaggagatgtctaagctaatacccggcgctggggagcgtcggcgctcgcaatccgtctcgccgcggcgcggcgtgccggtgccgccgccaccgccggccaaggcgaaggcgggggcgccaggtaggcggctgtccggggggtttgagggcgggcagcgcgcgtgggcccgtgggtcggcgtctttcccgcactcatcaccgctgcagcgggagggccgcgcaggcgctggagacgctagcaccagcgctaggctgccggagaggcagtactccagggtgcttcagtcaatggggcagtccgtccacattcttgacctcgacgggaggatcatatactggaatcagtctgcggagaatctgtttggctatcctgcatcagaagcccttggtcaggatgccctcatgcttctggttgattcccatgaccacaatgcggtaaataacatcttccaacgtatttctatgggtgaaagttggactgggaagtttccagttaagaacaagcaaggacatagattttcagctgttgccaccaatacacctttctatgatgaagatggcagtttgatgggtttcatttgtgtttcaagtgattcccgccaattggagcagatattttgtaagcctccgacctctgcaaggtcccagtcagaatcatctatgacatcttgtgatgggagttgcagcaacactagtcacagaatcaattcgttgaatagaagttcttttgattctaatctacccctgcaaagcactttagcatccaagataacgaatttggctaccaaggtcacaaataaagttcgttctcgggtcaggacagacgagaatgacgatggtggcagtggtgagagccattgcttggatcgtggtgcaaaggaagagccaacatctagcggaacaagcacaccaagaggggatgcaccacatggtccctttgctacagaagagaactcacctgggaaatcaacgaacccaaacagcgacgaatcagaaggaaaagtaggtctgcacaagattttgggttctaaggcagaggcactattgaacaagaaagggatatcatggccttggaaagggcgcgagaatgagggacctgatgaaagaaaccatgtgatattgccgtggttgcatggtggccaagagaatggtgtgaatcatcagaaggtttctgattctagtatatctccagacgcccaaggcgctgaacacaaccaacctagcaaaaatgaggcatcaggttcctggtcctctttcaacaataacagcacaggcagtgcaagcagcacgggaagcactaatagcagtgctctctacaaagtagatcatgaagcagattgtctggattatgagatcctgtgggaagaccttgtcattggagaacaaataggtcaaggctcttgtgggacagtatatcatgctttgtggtatggttcggatgtggctgttaaagttttctccaagcaagaatattcagaagaagtgatactgacctttcgacaagaggtatcccttatgaagaaattgcgccatcctaacatactgctcttcatgggtgcggttatgtctccacaacgcctttgtattgtatcagagtttctcccccgtggaagcttgtttcgcttacttcaaaggagcgctaccaagttggatgtgagacggcgtgtccacatggctttagatattgtaaggggcatgaattatcttcaccattccagcccgcctatcattcatcgagatttaaaatcatctaaccttttggtcgacaagaactggattgtgaaggtggcagactttggtctttcacgtctcaagcgtgaaactttcttgacaacaaaaacaggaaaaggaacaccccaatggatggcgcccgaggtgttgcgcaatgaaccttccgatgagaagtctgatgtgtacagttacggggttatcctgtgggaacttgttactcagaagataccctgggaaaatctgaactcaatgcagttttgacaatttc

SEQ ID NO: 15400 - DNA, 2121 bp, Zea Mays
cgcatcgtgccgtacatttcctagcttcctgctctggctgcctcctcctccgccctgcaggatcgtcgagcgcgaggcggctgccccgccggccggttcgttcgctctatagcttgagaccgatcctagctaggccaagacgatatcggcggcgatgatgatggacgcggcgaggatcgtagagtacttcaagggcaagtgcatcctcgtcaccggctcaacagggtttcttggaaagatccttgtggagaagatactgcgggtgcagcctgacgtgcgcaagatttacctgcttgtacgcgcggtcgacgagccatcagcgaagcagcgcgtccaacaagaggtgatagacacggagctgttcggcctgctgagagagaaacacggcaagggcttccagcagttcgtagaggccaaggtcgtcgctttggccggagacatcgtatacgacggcctggggctggaggcagccgtgctggacgcgctggccaaggacgtcgacgtcatcgtcaacatcgcagcaaccaccaacttctacgaaagatacgatgtttcgctggacgtgaacgtgctgggagtgaagcacctgtgcatgttcgccaagcagtgcgcgaggctcaggatgctcatgcacgtctccactgccttcgtctcgggcttcagggagggcctcatcctggagaagcccatcaagcccggcgagtcgctgcgggagggcacgtacctggacgtggacgcggagctgcgcctcgtcaaggaggtgaagaagtcgctggcggcgaacggcgatggcgacggcgacagcacggagcggaaggccatgaaggagctgggcctccggcgggcgcggcacttcgggtggtccaacacgtacgtgttcaccaaggccatgggggaggccgtgctgggccagcagctccggggcggcgacgtccccgtggcggtgatgcggcccagcatcatcaccagcgtccggcgcgacccgctgcccgggtggatgcagggcacccgcaccatcgacagcatcatcatcggctacgccaagcagaacctgtcctgcttcctcgccgacctccgcctcgtcatggacgtcatccccggggacatggtggtcaacgccatgatggcggccgtggtggcgcactcggaggcgttcgcgccgccgctgccgcaggtggtggtgtaccacgccacctcgtcgctgcgcaacccggccacctacgacgtgctctaccagtccggacgccgccatttctacgagaacccgcgcgtcggcaaggacggcagggtcatccccaccagggagatgtacttcttcaccagcatcgccaggttccacctctacatgactctcatctacaaggtgccattagagattctgcaccttgtgaatctgctgctctgtggccttctctcgcggctctacaacgacctcaaccgcaagtacaagtttgtgatgcatctggttgacgtctacggcccattcgccttcttcaaaggatgcttcgatgacataaacctggagcggctaaggctggcaatggcgatgaagacccctgaggatcaaatgttcaatttcgaccctaagaccatcgactgggacgattacttcaccagaatccacatccctggtattctcaagtatgtgtgcaagtgaagccttctttcttcagtctatttgcagcatgcacatgcttcttcttcgccttcttactatcgaaagttaatggctcatattctttatgaaagaaatttataccactctgtttggttgtacctgttctatggatcgaccgggtgttaccaagaaacaaaaataattcgatctctgctagattgatatagttctgtatgggagagactgaggcccctcatatcgtaaatcaatagtgatcgtcaaacgagtgtatgctgtgttaggtggcagccaatatgtatcttgattaattgagaacttgtaatctgtgtcatatgtacgcgtgtcactgtcagtgacaatgaaaagcaaatgtaatatctatttataatggcagtgaaattcaggaaagagaactagttaatcagaaagtagggttttctgatatggatggagatgtatatatatatacacacactctattt

SEQ ID NO: 15401 - DNA, 1146 bp, Zea Mays
gttaaatcatgctacgtcttgtccggacttaaaagtatgctgtcaagcgtcctatttgcaagagataaatggcttacgcccgaggggcttattcttccttatcatggtcggtcgtgactttggttatccactgaaaagatatgcttggtggtgctttcttgtgttgaagaacaagtatcccacggaaccacaaccgtttgtattatctggtgatttcctacattattagctggcctaactaaaccatgcgctcagaccctaaaccagctgtaagtctgtaacttaaaagcacagtgcactagcggaatggggttccttgctttttggagcgtttccccagtcagatcggcggcagggcaggtcacgtggacggggctccttgttgctggaactaaataccgtggagagtttgaagtgagactaaagaaacttatggaggaaattaagcaaaatgaagacattattctctttattgattaagtgcacacactgattggagcaggtgcagcagaagtgcattggtgccacaacactggatgagtataggaagcatatagagaaagatcctgccttggaaagaaggtttcaaccagttaaggttccagagcctactatggatgaaacaatacagatcttaagaggacttcgtgagagatatgaacttcatcacaaactgagatacacagatgatgctttaattgctgctgcacagctgtcttatcagtatatcagcgatcgttttctgcctgacaaagccattgacttgattgatgaagctggatctcgtgttaggctgaggcatgcgcagctccctgatgaagccaaagagctggacaaagagctgcggcagataagcaagcagaaaaatgaggctgtacgtggccaagattttgagaaggtatactgttgtttggcacagcggtgacaaagccgatccgctcccacctctctagcaacgtcgatatggttaataccaagcattatgttgtttccttttgagataaatattttgttactgattttaccttttgtctcctcttcttgttttttgttctagaatctgtagcaaatggctaacgatgaggatatccattactttgtttatgacaataaaactgatatgttcaagattccgtagcaacgcac

SEQ ID NO: 15402 - DNA, 234 bp, Zea Mays
gattccgatccggcccacactccacaagaccacaacaccgtgattacacgatgccactggtggcgagccggccatttcagccaaagcggtgggccgcgcttccttcctcagtcctcactactcactcgtccccttccagttccgcttccgatctgcgcttcgatctccctcttcgcagagttgtagagcaatgcttatgaattttgacgagtccatatgtaagttgacaaaatt

SEQ ID NO: 15403 - DNA, 1107 bp, Zea Mays
gtcagcgaagggttcctctgaccgggcgaggctctcatggcggcggctgaccccgagacggcggcggcgctgcggggggaggtcgccgcgctgcggatgcgcgtacaggagctggaggcagagaatcagaggctggcaaggattgcttcgacctgtacctgcggattcaaggagggcagtgttggatccattactgcacatcataatgtgaaatttcatcaaaatagcactatggagaaagatttgagctctccatttgatcacacagtaatatccaatgcaaatgaaatgcagtgcaacagaaatgcagatgacaatggtttacctgaggattcaagcaagcatactaaaagaacaggtcgcaaggtgggcattttaagtcactgcccaaagcgactagttgctctcaaagtcatgtatttcggccagagattctatggtttttcttctgaaggtaacattgaaccaacagttgagtctgagatatttaaagcactggaaagagcaaaactgatggttgccaataggaaagaatcatgctactcgaggtgtggaagaactgacaaaggagtttctgctactggacaggtgatttctttatatctgcgatcgaacataaaggatgttgggggggacatgttagatgaaagatccgaattcttccaagagatatacgtgtactgggttggtgtcctgttccagcagattttcatgcaagattcacctgtttgagccgggaatataaatacttattttggaaaggggacctggatatattggaaatgcagaaagctgcatccaaattcattggagaacacgactttaggaatttttgtaagatggatgcagcaaatgtccaacaatgatgagctgtgttccatgacgatcaagggtagcgcttttctgtggcaccaagttcgctgcatggtagctgtgttatttctaataggtcaaggccttgagtcaccatccgtagttgattcactattggatattatgaaaacatctaggaaacctcaatataaaatggcgccagagcttccattgattttgcaatcttgtctatttgataaagccaactttatgtgttcagcaggacgagacggg

SEQ ID NO: 15404 - DNA, 448 bp, Zea Mays
ctgcaatgcatcaattcatcatatccacgtttgcttggctgatttattaggcagccctgttgtcagaccagctgacatagagaccacagccctcggagctgcatatgctgctgggttggctgcaggagtttggaccaaggagaaggtttttgcaggtttgcacaaggagaacacgacagtcttccgcccgaaactggatgaggcgcacaggaaaaagagggcggattcatggtacaaggcggtttcaagatcattcgatctggctgatctttctctgtaaatttatcctgccagcgctcctctatctggttttggaagctgcaaatgaataaattggtcttcgctgggactaatcttaactgcttgttatttatatataacatcacgatgtttataaaagtgagtacatgaatatcctcagattttcagcaggaagtgtttttctaga

SEQ ID NO: 15405 - DNA, 2210 bp, Zea Mays
attcgagccctgaaatcccaaaagcccaaaccaaatccaagcgcaagagggggcaaagccgcaaagggggaggcaccaggcaccggcagccattacttactggtcctcactcccacaccaaccaaccaacctcctctgcctgccgcttctcctgctgcgggcgggcactgctgcaagtactagaggaggacatccgcttccattactgcgcctgcggaggatcggaggaaccagtagcggaggcttcgattttcggcgggcgcaataaatttcccgcatggctcggagggccgcgtcctcgctcgtctcccgctgcctcctggcgagggcccctgccggcgcgccgcccgctgccccctctgcgccgcgcaggacagatgggatgcacaggctgttgccaggtgtccttcagaggttcagcactgcagcagcagtagaggagcccatcacgccgtcagtccatgtgaactacacaaagctcctcattaatgggaactttgttgattccgcatccggcaagaccttcccaactctggaccctcgtacaggggaggtgattgctcatgtggctgagggtgacgcagaggacattaaccgtgcagtagctgcggctcgcaaggcttttgatgaagggccatggccgaagatgactgcctatgagaggtcccgtatcctactgcggtttgctgatttgatagagaagcacaatgacgagcttgctgctttggagacatgggacaacgggaagccatatgagcaagcagcccagattgaagtacccatggtggcccgtcttatgcgttactatgctggttgggctgataagatccatgggctcattgtgccggctgatggcccacaccatgtacagatcttgcatgagccaattggtgttgcaggtcagatcatcccatggaactttcctcttctgatgtatgcctggaaagttggccctgctttggcatgtggaaatactctcgtgctcaagactgctgaacaaacccctctatcggctttgtatatctccaaattgttgcatgaggctggactacctgagggtgttgtgaatgtcgtttctggttttggccctactgctggtgctgctcttgctagtcacatggatgttgataagatcgcatttactggatctaccgatactggaaaaattattctcgagttggctgcaaagagcaaccttaagacagtgacactggagttaggaggcaagtcccctttcatcataatggacgatgctgatgttgaccatgctgttgagcttgcgcactttgccctgttctttaaccagggacaatgctgctgcgctggatctcgcacgtttgtacatgagcgtgtttatgatgagtttgtggagaaggccaaggctcgtgcattgaagcgcgtcgttggtgatccgttcaggaaaggtgttgaacagggcccgcagattgacgacgagcaattcaacaagatcttgcgctacattaggtatggtgttgacggtggagctacccttgtgacgggtggtgataggttgggtgacaagggtttctacatccagccaacgattttctcagatgtccaggacggcatgaagattgctcaggaggagatatttgggcctgtgcagtcgatcctcaagttcaaagacctcaatgaggttatcaagagggcaaacgcgagccagtatggattggccgccggcgtgttcaccaacagcctggacacggccaacaccctgacgcgcgcgctcagggccgggaccgtctgggtgaactgcttcgacgtcttcgatgctgcgattccgtttggtgggtacaagatgagcggcatcgggagggagaagggcgttgacagcctgaagaactacctgcaggtgaaggcggtcgtcaccccaatcaagaacgccgcgtggttgtagacgctgcaagtgtggccttgtgcacgagaaccacgtatattcatttcctggtcacatccccgaacaatgtgaaggcgttaatcagatagatgacgatgaagaagaacaactataataagatttgccctagcctgggttctcagttatctctaataagttttatggttggtgcctatatattgtgcaatttggttgctcccttttattttgtttctttttgataagactgttctagcaacggatatgcagagttcattatgaaaatgcatttgttagtgtctttgatggttaa

SEQ ID NO: 15406 - DNA, 1021 bp, Zea Mays
gttcttccatggccatggcgggagcgggaggatgtccgcaaacatacaagtgcgtgtggccaacgagctcggcgcgggcaacggggagggcgccaggttcgcgaccatcgtgtcgacggtgacgtcgctggtgatcgggctcttcttctgggtgctcatcatgggcctgcacgacaagtacgcgctcatcttcacctccagccccgtcgtcctcgacgccgtcgaccacctctcggttcttctcgccttcaccatcctcctcaacagcatccagcccatcctctcaggtgtggccgtcggctccggctggcaatccatggtggcctacgtcaacatcggctgctactacctcatcggaatccccatgggcatcctgctcggatggctcttcaaccttggcgtgctggggatctgggcggggatgatcggcgggaccgccgtccagacgctcgtcctggccatcatgacagtccgctgcgactgggaaaaggaggccttgatcgcgagcacgcgcatgggcaaactgtcggaagttcggtgatggcaggatctggtgctgcacatctgaacgagcgcccgtgatttttaagctctggcgggatcgtgtgttcccgcatgttagtttcgccaaattttgcctcgtggaaaagcaacgcaaggtgctcaggaatcagggacacaggtcgccggggcagctcttgaagacgacggaggaggggcttggtgtggctatgatggttttggtgcttttgcttatgggctttatggtggtaacttcaaatcaaatagcttgactgtggaccgttgatctggatgtgttttatcatatattacttcatagaaggtaataataaaatttaattgttttaaattttggaaaaaacgaagttttcaaatatgttgtgtatttctttttggaaacctggtagatcatatctaatccttttgtccgacgtgacggataattagcagtgttattttaacgtgccatgtgtgtgtacacctgtatatatgctgcata

SEQ ID NO: 15407 - DNA, 1752 bp, Zea Mays
ccttgaatgacaggacaaagaaatgtttgttggaaacccttaatgagaatttgcgtcatcccaattctcaaatacagtgtgctgctgttgaggcattaaagcattttattccaacatacctggtatcttctggtgaaaagattgctagtgatattatctcaaaatatgtggcacttctagatgacccaaatgtggctgcaagacgaggagctgcactggcccttggaatattaccattcaaattcttgatgttgaaatggatgcctgtcatgagtaaactctgtagctcatgcaccattgaggataagcctgatgaccctgatgctgaagcacgtgtgaactctgttagggggctaatttcggtttgcgaaacactaacagcatcttttgatcagctctcaaatggagattctctatatgcatacataaaagattatgtcatgcgagctttatttagagcactcgatgattatgctgtggacaacagaggagatgtgggttcttgggtacgtgaagcagcaatggatgcgctagtacgatgcatgttcatcctctgcaagagagatattgttgctttgagagcagtgtcagccactggccatgactctgaactgggtgatatggaagtaaatgcaagtagtactgcataccggctatttgattctggtattgcacaggatctggtagcaggcattgcaaaacaagcagttgagaaaatagataagataagagaaatagctatcaaaaccctgcagagaattctgtaccaccaggaacacctcatcccatttatacctcacagggagttgcttgaagaaattattcccaacagcagagatttggagtgggcggtggtttgcaggagtctttgaagaaagcttcaatgtcagctttggtagggtatctccaagattcagacatcaatactaattgtgaagggaaaagtagagagtatctattgagttgtgatcttctatggggcctccagcactaccagaaatgtgaccgtgtaattactcccatgttcaagactattgaggctctcttcagtaaaaaggttttcttgaacaaggaggggtacagtgagttctacagtggactggtagattccgtgagctctgaactgaagggatccaaggattttacaaagttatgtgcaggtctctcgatccttgggtacatttcttccgagtcagatggaacttgcaccaaggcattttcccaactcctcacattcctaggccacagataccccaagatccgaaaagctgcagccgaccaggtgtaccttgtgctgctgcaaaatgatgaccttattgtgtcggagaatatggataaagcccaggaattacttgcggagacgtgctgggaaggggatgtggaggaagcaaggcgtaggaggtcagaaatcaacgagatggctggttttagggtcaccacttcacagaagtctggaaagcaagaaactagaacggtcgccgcttcgacggatgagaacagatcttattcgtcattggtcgatttcagcggatactaaagatcgccttacatcctattttcgacgaaaggtgtcgattgtactagtgcacaatgccgaatatcactaaacgtttgaatgagcggggttgcttgtggattttcttttttttttttttgtggtgggtgttttctttcttttcttctttttgtgtgtgagtagaagagttaggctgttttcagcaacgtcctctaaatttcatcctctaaagaaat

SEQ ID NO: 15408 - DNA, 550 bp, Zea Mays
caatgcttggcaagtttctacaaggcattcacagatatgtgtgcagaaagatacacagttactgaagatttgctgaagctttctgggcggcttcggttaataacagcacaggtcgacaaggctgctagtaacatgtctgagccgacatcaggggagatgcaggatgctgctttccagtctgacgaagaggaggaagatgaagatgttgatgaaacagtattcggtcaagattcagattcgtcacaaaatagcggcaccgacgacgatgcaaagtagactcactgctggtattcatcattatggtgattgtattgtttttaattaaattgccaagcttgatttttgtcaaggcgacgttggaaggttgcacagaattttgacagtgtctctggtttcattttgaaagcactcgaagttgtctcctcctttacccctttttccttatatacgacggcaattggttaaagttacatacccgaaggttgtccttgcacataattttgacagtgtctctggtttcattttgaaggcactcgaagttgtctccctt

SEQ ID NO: 15409 - DNA, 2087 bp, Zea Mays
ttctgcttttgcttttgcctcactcagcctgctgcaagcttttgctttggtttaggtgcttcttttgcattcctttactgttccccccccactttcgctcgctttgccacgcacacgaaaagctcctgcctttaccttctcggaccttatctccgccccgtagtgggatttggtgggagctgcgctgcagctgcttgccccctcgcgtttctttgctcaattgggggggtcacagcccgcgggtgtcgcgcgtgctcgtgggcggaattcggtgttcttgcttgcgcgcgccggagatggactgcgggccgcccgaccagctgccgccgtcgtcggcgccggcgtgcttcctcaacctcaactgggaccagtccatggccgccgccacggctggcgaccacctcgacctggtctcctccccggcgtccaactcgacggcggctgacggcctcgctctccacgggatctcgccgcagccgcagtacggaggcactccgctcagctcgccccgcaagctgaacctctccatgatgggccagttccaccactacccgccgatgggccatctagaccagttcctcgccgacccaggcttcgccgcgcgcgcggcgaggctctccggcttcgacggccgccccggtgggagtggctacggcggcgccgtcccgggacagtttggcctccccgacgccggccccatcggcggcgcattgagggagctggagctcgggaacggccgggacgagtcatcggtgtccgatccggcgtccgccagcgccgagatggcgctcaaggcgccttccgatggcaatgcgaagaaacggaaggctagcgggaaggggaaaggcaaggacggccccgggtccaccgccgccaccaaggaggagtccagtgggaaacggtgcaaatcggcggaggagagcaatggcgcggaggagaactccggcaagggtaaggccgccgcgcagagcaacagcgacaacggtgggaagaagcaggggaaggacggcgcgtccaagcctccggagccgcccaaggactacatccacgtccgggcgaggcgcggcgaggcgacagacagccacagcctcgctgagagggtgagaagggagaagatcagccagcggatgaagcttctgcaggatctcgtcccgggctgcaacaaggtggtcggcaaggcggtgatgctggatgaaatcataaactacgtgcagtccttgcaacggcaagtcgagttcctgtccatgaaactggccaccgtgaatccccagctggacttcaacaacctgcctaacctccttcctaaagatatgcaccagtcctgcggcccgctgcagaactcgcatttcccgctggagacctcaggcgcgccgctgccatacctcaaccaggggaaccctctaataggctgcggcctacccaacggcatggacaacagccagagctccatgcacccgctcgacccggcgttttgccggccgatgagctcgcagcagcaccctttcctcaacggtgtcagcgacgcagcgtccaaggtcgggactttctggcaagatgaccttcagagcgtagtccacatggatatggggcagcagagccagcaggagatggctcccacctcctccaacagctacaacgacggttcgttgcaaacagtgcacatgaaaatggagctttgacgtagctagctgaagaagtccagcccaaagcttcgacgcctcctccccccctgtatatacagaacagagagggagagagaggaggaccagcctgcagcggaaaaaagcactcttgagattccccaccccactggtgtgatgattctttggacagagatgtgaaagatcaatcgccacgccggcggccggtcgatcgcaccacccccgccgcctgttgttagccgcaagatcgccggcgaccaaacgcggtgcatcgcatcccccggtatattctcagatcagacctgaattcgtcttcctctcaagcgagagggggaaaaaaagacctgtaatatcatttgtatcgccattatatttgtagctgattatatataaatatataaaatatcatccctcgtattcctgtca

SEQ ID NO: 15410 - DNA, 2185 bp, Zea Mays
ctttcaccgttaccttcccagttccgttccctcccaaaccctaactcccgaatcccctcgctctcctctaatggccgccgatgccgacgcagccgaggtggagcggctttacgagctcggcgagcgcctctcttccgccaaggacaagtccgagcttgcggcggactacgaggcgattattgcagcagtgaaggggcagagtgtcaaggcgaagcagctcgcagcgcagctcatcccgaggttcttccggagcttccctgcactcgccacccgcgccatgtcggccatgttcgacctcgttgatatggaggagctcgcgatcagaatacaagctattcggggttttccacttcttggtaaagatactgaatttgtgtcaaaaattgcagatgttttgggacaactccttacaagcgaggaaaatgtggaacgtgatgctgttcataaagcactcatgtcccttatacgagaagatgttaaaaattctttacaacctttatttaagcatgtggagcaaggatcagagattcgtgagaagattatttgttttcttcgagacaaggtttttcctcttaaagcagagctactgaaacctcaagcagaaatggagagatttataacggatttggtaaagaaaagtgtgcaagatgtaactggttcagaatttgaactattcatggggtttctgcgaagcttgagcatatttggggattctgctcctagagagtcctttcaagaactaattgaaattattcaagcacaggctgatctcaactcacaattcaatgtttcggacattgaccacattgaaaggtggatttcatgcatgtatatggctcttcctatcttcatgagaggagcatcagcaagcaagttcctcaattacttcgttaagcaaattgttccagcattcgagaagattcctgaagaaaagaaactggatttgctcaagactattgcttcaagttcaccgtacgcgacagctcaagattcacgtcagctgcttccatctgttgttcagttactcaacaaatatatgcctgggaagaaggtggacgatatcaaccataattatgttgaatgcttgctgtacacttatcatcatttggctcataagactccaaacacaacgaacagtctatgtggttacaagattgttactgggcaaccatcggatagacttggagaggacttcacagagcattacaaagattttacagagaggttaactggaacagaagagacggtaagagcagcctcaaagcgactaactcagggaatggcagatttcagcaaggcaatatcttcagcaaaaaccgaagaggaaaaaactaaaattaaaggcgatcaacaaacttcaacaaggacaatgaggtcatataacaatatattggcaatggcacagccattgcattcaaaatcccctttatttatcggtgataagaaaatcgctctatcatggatggagcatcccaagaaaccaacagctacgacagcaggggggaagaggtcacaacctgctactacaaatgggaatggccctgcaaacaagaaagggagaggaggaatgcacaaccagcttgtgaacagagcttttgaaggactgtctcgtggtggtagaggcactggaagggggcgtggcaggggtggccgaggacgaagagggtggggtggctaccgctgagatgacctggaaactctgttcaaacctgacatgggatgagctttctgcttccacttgagagtaaatgcaaaggtcgatatttatttgtgtgcctcagcgcaacaagtttaaattggaaggcacacaacagcagaatgcgtacagaaagagtaaaaaagaatgcttgagaaatgtccgcaagatctgtgcatctttcctattcatttgccatcaagccgtgttctttgccaccctccgtcgcttcacctgagttggctgtttgatgaaatgttggcaagatctgtgcatcatctttcatattcacttaccatctcaccgtgttctttgaaccctaacagtcgtttcacctgtgttggctgttagaactcaacagtaagatatcgttcatttattttatttgattttaccagtgtttgaagaggcgaccgagcttttgtgttggacttcgtttaagttcgttttatgatccgttttaccggcacagaggtatagtgatgttta

SEQ ID NO: 15411 - DNA, 948 bp, Zea Mays
cttccaggcagctttaaacgcaggaaccaaaaggccacggcgggagacggagaacggcgacgccggcggcgaggaggaggagggatacaacggcgagggagaagctgtctctctccacgcgtgggagcgctaaccctagctgccaacctcgcggaaacaccgggttgtgagcgtcgaagagagaggtgcaacgaggcttctcgaggaggctgggacgggatgacggcgctggggaagggaggggtggcgcggtttgcggccgcgctctttgtcctactgaatctctccgcggcgatcgccgggaagagctactacgacgtgctgcaagtgcccaagggcgcgtccgaggatcagattaagaggtcgtaccgcaagctcgcgctgaagtaccaccccgacaagaaccccgacaacgaggaggccaacaagcgcttcgccgagatcaataacgcttatgaggtgctgacggaccaggagaagaggaagatctatgaccagtatggcgaggagggcttgaagcagttccaaggcgggggaggcggtggcggtggaatgaacattcaggacatctttaggaacttttttggtggtggtggtggtgggatggaagaggaggaagaacaaattttgaaaggtgatgaggtgattgttgaactcgatgcttcattagaggacttgtacatgggcggttcagtaaaggtttggagagagaaaaacgtcataaagccagcaccaggaaagaggcgctgcaactgtaggaacgaagtttaccatcgacaaataggtcctggaatgtatcaacagatgactgagcaggtctgtgaccaatgtccaaatgtgaaattcgtacgagaaggtgaattcttgactgttgatattgagaagggaatgaaagatgcacagacaaactagctggttttctgctttgctagtgtcaacactgctgct

SEQ ID NO: 15412 - DNA, 1228 bp, Zea Mays
cggaatccggggagagacgtctcaaaaggccattagcagtctaccttttcaacaccaaagcttctaagttgatgaataatgaggccaggcaagcaaagattgtcaagttctcagagtccatttggaaacttacctactatgcttctgttcaagcatgggtcctcatgataataaagcaggaaccatggtcattggatatgatgcaatactttgatggctggccgaaccaacccatcgtgtcttcattgatgcttttctatatgtgccagtgtggattttatatctatagcatcggtgctcttgttgcttgggaaacccgcagaaaagattttgctgtaatgatgtctcatcatgtaataacatctactctaattggagtttcatatctgactggatttttccgaattgggaccatcattctcgctcttcatgatgcaagtgatgtgtttcttgagactgccaaattgtgcaaatacacagaaaaagagctgggtgctagcttgttttttggtctcttcgctatctcctggcttctattgcgtctgatttacttcccattttggataatcaaagcctctagctatcattccatcacattcttgaggaagctggatgaattcccaacaactttgtactacatcttgaacacaatgcttctcacattgcttgtattccatatgtactggtggaaactcatatgtttgatgataatgagacagctgaataataaaggacaagttacagacgatgtccgatctgattctgaggatgaggagtaatgggagattcattctttgacatctgcaacgtggcatttcctcgtcaatacttttctatgcctgcttccagaattgattgcttttaatcttggcaagtctcgggaacgtataggaaagtttaatctctgtatattgccttatgatatcaaacatggctagaccgggaatggatctatacatgatgacgggcatagctagcaagcttacttcaaggttccttaaaaaattttggttcacctttatttgatatggggaaagacatgagagggtgtacagctttttcctgaagcttgcagaacccccctctgtaccatgatcaatatacttcacttgtgagtagatttagttctaattgatgataataaattgattcttttgattgggaatgaatctcacctgaaccttaatgatctcatctgatgtgtattgagcattatgatgctatataa

SEQ ID NO: 15413 - DNA, 1430 bp, Zea Mays
atgggctccaccgccggcgacgtggccgcggtggtggacgaggaggcgtgcatgtacgcgatgcagctggcgtcgtcgtccatcctgcccatgacgctgaagaacgccatcgagctgggcctgctggaggtgctgcagaaggaggccggcggcggcaaggcggcgctggcgcccgaggaggtggtggcgcggatgcccgcggcgcccggcgaccccgccgccgcggcggccatggtggaccgcatgctccgcctgctcgcctcctacgacgtcgtccggtgccagatggaggaccgggacggccggtacgagcgccgctactccgccgcgcccgtctgcaagtggctcacccccaacgaggacggcgtgtccatggccgccctcgcgctcatgaaccaggacaaggtcctcatggagagctggtactatctcaaggacgcggtgctggacggcggcatcccgttcaacaaggcgtacgggatgacggcgttcgagtaccacggcacggactcgcgcttcaaccgcgtgttcaacgagggcatgaagaaccactcggtgatcatcaccaagaagctgctggacttctacacgggcttcgagggcgtgtcgacgctggtggacgtgggcggcggcgtgggcgccacgctgcacgccatcacgtcccgccacccgcacatctccggggtcaacttcgacctgccgcacgtcatctccgaggcgccgccgttccccggcgtgcgccacgtgggcggggacatgttcgcgtccgtgcccgccggcgacgccatcctcatgaagtggatcctccacgactggagcgacgcgcagggcgtcttccacgtcgacatgatcatgctcgcgcacaaccccggcggcaaggagcggtacgagcgcgagttccgcgagctcgcaaagggcgccggcttctccgggttcaaggccacctacatctacgccaacgcctgggccatcgagttcatcaagtgaaccaccgtcgccgcgatgagatggcatggctgccacatgctttgcttgcttggtcctcgtatcgtacgtcgccgtcgtcgtcttcttctggttattgcgctgctacctcgctgctctcgcgtatgcatgtacttttgcttaattttctttcttcatatcatgcactctggctggcctagactgcccccgatccatggtggccggtacgtcttgtcgagctcttgcatgtcgtggattctaaattcttcttctgcgtcgaattgtctctgccatgtgcgagtaataacaatcaaggttatacttacgatacaattacatggcggtttaattgctctctattaatttggtgaatcgaatcgattctactgaattcttctctgtcgtttaatgaaatttcctttgtcttttggattatataatataacacagacactcgatcacaa

SEQ ID NO: 15414 - DNA, 1181 bp, Zea Mays
ggacaggtcctttgactgaactagatgagatcaacctaacacttgttaactgtgtaactgaacgatgtaaaatgggcctgacttccacagctgtgaagaaaggaggtctttattctcttgatgtcagttcagtttacaagtacaagaataccaccgttgatgttaaactggacacagaatcaaatatctctactacattgactgtgttggacgctttgccatccacaaagcttgtcacttctgtgaagctgcctgactacaattctggaaaggtggagctgcaatacttccatgagaatgcaacttttgctactgttgttggcacgaagccgactcctgtgattgatctttctgggacagtaggtgctcaaggagttgcatttggtgcagaagctgggtatgacactgctacaggaaaatttaccaagtacactgctgcaattggtgtaaccaagccagactaccatgctgcattcattctggcggacaaaggtgacaccattaaagtgtcaggtgtttatcaccttgatgagaaacagaaggcctcagctgtggctgagctaacccggaggctctcaacaaatcagaacacactcacagtcggtggactgtacacagttgatccccagacagctgtgaaggcaagactcaataacactggaacgcttgccgcgcttcttcagcatgagcttaaacccaagtcgctcttgacaatctctggtgaattcgacacaaaggccctggacagatccccaaagtttgggttggcgcttgcactgaagccctgatcagatcatcccatgttgattggtggtgaatcttgaattcattttttttttttgcaaagctgtagccaataattcgttccacgaaccttttctgttaatccggcaaatgtttggagcactgtgggtaggatccggatgggtcgcctacatgaaattttacctgtctgcccttattgttgaaagcatctggccgttggtaaatgtacattgtgcttgtttctttagcacctaggcctctctgccactgctactgagggcttgaggagccgctacagtaaccttttccatgtagaaattgcatgctgatcgtttgatttactgctcacctaaggtttaccacttgtttggagctcatttattctgtgtatatgcatgcacggtgttgctttgttg

SEQ ID NO: 15415 - DNA, 1502 bp, Zea Mays
attccctactcaaacgcagccgccgagcgcctctcgcctctcgccctacaggaggcaccctacagaacccaaccaaaaagcgccggcggcaaacagaacccaacccaaagcgccggcggcaagcgaagagaaagcgccggcactaatccgacgatggacgcgtcggccggcggcggcggcaactccctgccgaccactggcgcggacgggtcgaagcgccgcgtctgctacttctacgacgcggaggtgggcaactactactacgggcagggccacccgatgaagccgcaccgcatccgcatgacccacgcgctgctcggccgctacggcctcctcgaccagatgcaagtgttccgccctcaccctgcccgcgaccgcgacctctgccgcttccacgccgacgattacgtctccttcctccggtccgtcacccccgaaacgcagcaggaccagatccgcgcgctcaagcgcttcaacgtcggcgaggactgccccgtcttcgacggtctctacagtttctgtcagacgtacgcggggggctctgttggcggcgccgtcaagctcaaccatggccatgatatcgccatcaactgggccggcggactccaccacgccaagaagtgcgaggcctccgggttttgctatgttaatgacattgtcctcgccatcctcgagctcctcaagtaccaccagcgcgttctgtacgtggacattgatatccaccacggggacggcgtggaggaggctttttataccacagaccgggtgatgacagtctcattccacaagtttggagattatttccctgggacaggggacattcgtgatgttgggcactcaaagggtaaatattactccctgaatgttcccctggacgatggtattgatgatgagagctaccagtcgttgttcaagccaataatgggcaaggtgatggaggtcttcaaccctggtgcagtcgtgctccagtgtggtgcggattcattgtcgggtgacaggttgggctgtttcaacctctctattaagggtcacgcagaatgtgtaagatttatgaggtccttcaacgtcccgctgttgctgcttggtggtggtgggtataccataagaaacgttgcacggtgttggtgctacgagacaggagttgcccttggtcatgagctcactgacaagatgccacctaatgagtactatgagtattttggtccagattacactctacatgtcgctccaagtaacatggagaataaaaacacacggcatcaattggatgacataaaatcaaaacttctagataatctttcaaaactccgacatgctcctagtgttcagtttcaagagcgacctcctgaggctgagttacctgagcaagatgaagacaaagagaatcctgatgaaagacatgatgctgattctgatgtggagatgaatgatgccaaacctttgcaggactctggaagagctcctgccattgcgcttaaaaaaaggacgtggcttctatcgtc

SEQ ID NO: 15416 - DNA, 1393 bp, Zea Mays
atttttttaaataaaaaaaaacatgaggtgttttcccccaaacaccgctccacctccttcctcctcgttgcgctccggatccatccccattccccagtcgccgcccaagtcaaaaggagggaagcttcttccactacagtccttgaggccgcccatcaacgactagacgctggtcaagctgcaccaaccctagccccataaccctaggtccctcctccacgcccccttccagagaggcgaggaaggaggcgaaaggaaccatggattcctccggcggcggcggtggagcgcagatcaagggtatggcgacgcacgggggccgctacgtgctgtacaacgtgtacggaaacctcttcgaggtctcctccaagtacgccccacccatccgccccatcggtcgcggcgcctacggcattgtctgcgcggctgtcaactcgcagtcaggggaggaggttgcgatcaagaaggttggcaatgcgttcgacaaccacatcgacgccaagcggacgctcagggaaatcaagctgctgcgccacatggaccatgagaacatccttgccttaaaggatgtaattcggcccccaactagagagaactttaatgacgtgtacattgttactgagttaatggatacagatctccatcagatcgtacgctcaaatcagccattgactgatgatcattgccagtacttcttgtatcagttgttacgagggctaaaatatgtgcactcagcaaatatattgcaccgcgatctgaagccgagcaatttgttcctaaatgcaaattgtgacctcaagattgcagactttgggcttgcaaggaccacttcagagacagatctcatgacagagtatgtggtcactcgttggtaccgggcaccagagctgctgttgaactgttcacagtatactgctgccattgatgtctggtcagttggatgcatactaggtgaaatcgttactcgtcaacccctgtttcctggacgggattacatccagcaattaaaattgatcactgagctcataggctctccagatgatgcaagcctgggatttcttcgaagtgataatgcaaaaagatacatgaaacaactaccacagtttccaagacaggacttccgcctgcgtttccgcaacatgtctcctggcgcagtcgatttgttggaaaggatgcttgtgtttgatccaagcagacggattacagttgatgaggctctgcatcatccatacttggcttcacttcatgagatcaatgatgaacctacctgccctgcacctttcagctttgattttgagcaaccatcctttacagaagcgcatataaaagaactcatctggagggaatctttagcatttaacccagagcctccctactaatatcaaaagcgcag

SEQ ID NO: 15417 - DNA, 1595 bp, Zea Mays
atacgtcgaattttaggacggcctgcggtaactcctcacggcacgtcgagcccactcagcagtcagcagcgacccgcaccttccggaggtaagccatggcagagttgcctttggcagcggggctgatggaccttcgcaactgcaagctctctccgaagccagcgccgcccttgccactccccgcgctccgccgcatgcacacaagcgccacggctacgacggccccgtccccgcgccatgcggtccccgaactccactccactaccgagctggcggacgggagcatcgtcttccgtttcggccatcctaagtccaaggcgctggagccggagccggcgagcgtaaagaccagcccttactccagagttgcccctgcctcgggcgctgtgcccggcagccagatggagccggagattgactctgaacatggattagacggcgtgcgaataggcaccacggctggggttgagaagccgagcccgaatgccgcagccgaggcctggccgacacctccacctcctgacgccggcgcggtaaccggtgccacttccgctgcgctagaggaggcgccggagcaggaggcgggttccaatgctgccgttgaggaggtggacaccaggccatcatccgcagagtctcttgtcccgtcgagatcagaggatgggccaaagggcgacggcgtcgctgttgaggctggcatgccgaccagtggtgctgccatggatacgattgagactgctttggaggggcgcggggcaagcgaggatgactcagcagttgatgtgagtggtggcttggatgaggcggcgacttccggtttggaggactccgaagccgcatcggaaggctccactgcacaggatttctacaccgacgttgaaacggagtccagcggctccagcagcgacgagcagagagctgagttcggcttttccttaccaccaccggaacaagttagcaacaaggcggattggaaaaatgacacttcagaggtgaagagttctgataggatgattccaatagctcaacggacacgtgtgttatcgtcaggtgctgcaatattgcctcatccgtcaaaggtagcaacaggtggagaagatgcatatttcattgcagccaatggctggtttggtgtagcagatggagttggccagtggtcatttgaaggaatcaacgcagggctttatgcaagagaactaatggatggctgcaaaaagttcgttaccgagaatcaaggggatccagatcttagaccagagcagatcctttccaaagcagtagatgaagcatgttcacctggttcttgcactgtattagttgctcattttgatggccaggcccttcaagcatcaaatattggggactctgggtttatagtgataagaaatggagaagtgttcaaaaagtctaaacctacgctttatggtttcaatttcccactacaaattcagaagggagatgacccctcaaagtttgtacagaattatgctattgatctagaggacggcgatgcaattgtgacagcaaccgatggcctttttgataatgtatacgagcatgaaatagctggaattgtctccaaatcgttacaggag

SEQ ID NO: 15418 - DNA, 3246 bp, Zea Mays
gtgtgattctgtttagaggaaatatgatctgttcgagacatggcttggtagatacagacctgggattgccttttcctagttcagcatggagggcactctagttcagtctgcggttgttccaaccgtttacagaagcagctcaggtcggttccgtgtgcgtgcaagggccagaaccaatgctacaatggtgcgaaatatgccaacaaggactcttactcttggtggtttccaaggattgcgtcagacaaactttttagacacgaggtccgtgatcaagcgtgactttggatcgatcgtggcaagtcagattgcaagaccgcgtggatcagcctcaagaggggtggttcgtgccatgtttgagcgcttcactgagaaagcaatcaaggtgattatgcttgcacaggaggaggcaaggcgcctgggacataactttgttgggacagagcagattttgctggggcttattggtgagggcacgggtattgcggcgaaggttctgaagtctatgggaatcaatcttaaggatgcccgagttgaagtcgagaagataattggacgtggcagtgggtttgtggctgttgaaatcccattcacacctcgtgcaaaacgtgtattggaattgtcccttgaagaagctcgtcaacttgggcataactatgtaggatctgaacacttgctccttgggctacttcgtgagggtgaaggtgttgctgctcgtgtgcttgaaagccttggcgctgatccaaacaacatccgcacccaggtcataagaatggttggggaaagcacagaagctgttggggctggagttggtggaggaagcagtggccagaagatgcccacacttgaagaatacggtactaatttgacaaaattagcagaagagggcaaattggacccagtcgtttggtagacaagatcagattgagcgtgttactcagattttgggcaggcggacaaagaaacaacccctgcctaattggagagcctggtgttggaaaagactgctattgctgaggggcttgctcagcgtattgccaatggggatgttcctgaaacaatttgaaggaaagaaggttattactcttgacatggggctccttgttgctggaactaaataccgaggagagtttgaagagagactaaagaaacttatggaggaaattaagcaaaatgaagacattattctctttattgatgaagtgcacacactgattggagcaggtgcagcagaaggtgcgattgatgctgctaatattttgaagccagctcttgctagaggtgaacttcagtgcattggtgccacaacactggatgagtataggaagcatatagagaaagatcctgccttggaaagaaggtttcaaccagttaaggttccagagcctactgtggatgaaacaatacagatcttaagaggacttcgtgagagatatgaacttcatcacaaactgagatacacagatgatgctttaattgctgctgcacagctgtcttatcagtatatcagcgatcgtttcctgcctgacaaagccattgacttgattgatgaagctggatctcgtgttaggctgaggcatgcgcagctccctgatgaagccaaagagctggacaaagagctgcggcagataaccaagcagaaaaatgaggctgctggcgaattaagggaccgagaaatggagcttaaggctcaaattacagccattattgacaagagcaaggaaatgattaaagcagagactgaatctggtgaagtcggtccgcttgttactgaggcagacattcaacatattgtctcctcttggactggaattcctgtggagaaagtgtcatcggatgagtctgaccgcctcctaaagatggaagagacgctgcatacacgtatcattggacaggatgaggctgtcaaagctattagccgtgctatccgccgtgctcgtgttggcctcaagaatccaaataggccaattgccagcttcatattctctggaccgactggagttggcaaatcagagcttgcaaaggccctggcggcctactactttggctcggaggaggctatgatcaggcttgacatgagtgagttcatggagcggcatactgtctccaaactcattggatcacctccaggttatgttgggtacactgagggaggccaactaactgaagcagtccgtcgccgcccgtacacagttgttctctttgatgagattgagaaggcacatccagatgttttcaacatgatgcttcagatcttagaagatgggcggttaactgatagcaaggggcgcactgttgatttcaagaacacactattgatcatgacatctaatgtcgggagcagtgtcattgagaagggaggtcgcaagattgggttcgaccttgattatgatgagaaagacacaagctataacaggatcaagagccttgtgactgaggagttgaagcagtacttccggccagagttcttgaacagattggatgagatgattgtattccggcagctgactaaattggaggtgaaagagattgcagacattatgctgaaagaagtgtttgacaggctgaaggccaaggacattaatctccaggtgacggagaagttccgagatagagttgttgacgaaggttataacccgagctatggtgccagacctttgcggcgtgctatcatgaggcttctggaggatagtctggcagagaagatgctggctggtgaggtgaaagaaggtgactctgccatcgttgatgtggattcagatggcaaggtaatagtcctgaatggtggtagcggtgttgctgagccactggaacctgctctcagtacctaaccgaggttaaaatctttgggccgaaatggccttctttacaagtcagctgggctcttcgtgatggtaaagtagactgttattacttggccgctccattagttgctttatctttcattgatttttttttgttggaagtgaggcagtagggtcactatggaaacgaatagacggagaggcattagccgaaatgaatgtttttcagtttgatgcacttgtattattaggccttgctagcaacaaggtgcagatgcctctccgtttgctgttgtactttagtgtaacttaccttccgaatgtattattaggcgttgctagcaacaagatacggaggttatacatttgattttcagtaaaaaggtagactctttgttgcgccgcagctgttttattgtctgcgcactgcagtgttcgttca

SEQ ID NO: 15419 - DNA, 1435 bp, Zea Mays
cgccaccctccgcggctccccctacaaaccgtaaccgcgacgcgaaccggccccaccgcaaccaccccccaatttctgagaaaatggcgagaagtgcgggaactaggaggcgtgtggctcgccagctcaagtccacacatcccattccttcataccgatggaagtcaaagcccatgaaaaagccgatgaaaaaatccaaccgaaagcaagtgttgccaaccttgcaaaagatggactgggaagatgccaattgctctgtgtgcatggaatacccacataatgctgtgctcatcctttgctcatcccatgataagggttgtcgtccttatatgtgtggaactagctaccgccactctaattgcttggatcagttcaagaaagcttacaccaagggggcattgcttgaggaagttcctgcaaatagtgttggctctaatctggattcggcgccattggctgcagaaaaaactgactccattgaccttgcatgtccattgtgtcgtggcaaggtgaaagggtggacggtggtggaaccagctcgaagctacctcaatggaaaacgaagaacatgcatgcaggatggttgctcatttgtggggacctacaaggagctccgcaagcatgtcaagttggaacaccctcttgcaaagccaagggaagttgatcctgtccttgagcaaaaatggagattgctcgagattgaaagagagcggcaagatgcgctcagcacgatcacggcaacaatgggcagagccgttgtttttggtgattatgtgctagacttggaggatggaatggactccgaggatgttgacagtgatgctgataatgatggccgtgggacagaaaacactcgtaggatgctactatttattatgcgccaagttgctcaacatcaccaaaaccaaaggctccagaatgcgactggtgcatctgacaatgctgaggacaattatgtggtgagcagtggtgccaatggaaccacaccatactcttaccccttggagggggaggacgagaatggtatggttgtggccggaggcagaagcactgatgtgctgagaccagagaggaggcgccgtcgtcgccgcaggaaccgtgggagattgtttttaggtgctaattgagaggacaggtggccaggtagggtttagccgccagaggagtacatacagaaatgcttccctggtgcctggcattcatcaattcctgtctcaatttacttgatcatgatcatgtaccaagtagttatcttaacatcagctcattgtcataaatttatggtatctcacattcttcgttgaaaaaggaaaacaccgcatccatctcttgcggtttgtgtagcatctatttctgtctattgcttttgttaaagcatttgtttggagatcgtattagattttttaagtgaaacatatctcgttcgatcaggttt

SEQ ID NO: 15420 - DNA, 1029 bp, Zea Mays
gttgacatcggttcaccgtccgcccgggtacattccgtacgtacaagaggcggtcgcgacgctctagcttgcattgcaccagcgcgcagagcggaaggaggtggaaagcgcccagagagatctcgagagagagagagaggctggtcggcacatactagttcattccgtttggatagagacgcacgcaacgcaggccaccacaacgtgaggagcgggaggaggagggagagggaggatgcaggcgcatcaccgtcagtcgtactacgcggtgctcggcgtgcagccgggcgccaccgccgccgagatccgcgccgcctaccaccgcctcgccatgaggtggcacccggacaagatcgccagcggcggcggcggcgccgatccggcgcgcgcggaggaggccaagagcaggttccagcagatacacgaggcgtaccaagtgctgtcggatgacaagaggagggcgctgtacgacgccggcatgtacgacccgctggacgacgacgacgaccaggaggacgtcgagggattccacgacttcgtgcaggagatggtctcgctcatggccagagaggagcccgtgtacagcttggccgagctgcaatccatgctggacgggatgatcaaggatttcaccgcgccacagccttggcctagcggcttctacactggtggcggtggcggtggggcgtcgtcgccgtcgccgctcggcaaaccaagcagccaagagcagagtacggcttcgtcacgcttgcatccctacgggttcggggacgcgccgtgcttcagccgcacggcgttctcacaatgatggcgatgatgaataaataaatttatacatggatcgagcttttatccttctggcagcaatgggggttttctcgctcgtggaggtggagggagagtaagaacccgtgaaagccatcgtccgccagggtcagactctgattggcagttgcaattgctttggactgcggctgcagggatgaaagaaggctcaagcaaataagggaagggcgctgacaagatttc

SEQ ID NO: 15421 - DNA, 960 bp, Zea Mays
ctggcacttccaactgtgtgaattcttccatttgatgtagcggaggagagaccgagctccctgaagttgatgcacatggtgtggaccaagagctgaagcaccatctcctgaagaaatacagtggctatctaagctcgctcaagcaagaactgtcaaagaagaagaagaaagggaagctccccaaggaggctcgccagcagctccttagctggtgggatcagcactacaaatggccttacccctcagagactcagaaggtggcactggctgagtctaccgggcttgacctgaagcagatcaacaactggttcatcaaccagcggaagcggcactggaagccatccgaggagatgcaccacctgatgatggacgggtaccacaccaccaatgccttctacatggacggccacttcatcaacgacggcgggctgtaccggctcggctagccaccggtatctcgcttccatttcacaccccacggcctagctataaagactaatggttccaggtgtctgaagtactgaagacaggggggctagctatctaatgtttgtgccgcacgcatgagctgtaaggaggccatgcttaattattctgttgccgttgctactctatctatatgcgcctatgcctccgtgcatgaactatgctttaggtggttgctgctccacactgtggtggtgtgcttttgcttttgtgtggtcgtattgtatgcgtaacctgacagatggatccctgattgctacatgtttgaataatttgcatgatctagctagtttctgcctaatctaatggtacggctcatgtcttgtcaggtggatttgttatgtgttttttttttcaaattgaggcttgtttgttttgctctcaatccatccatgtgaattgggtggaattaaatgagtttaaattccaaagtcagtcaaaatctgttataattcttccaatccataaccgaag

SEQ ID NO: 15422 - DNA, 475 bp, Zea Mays
taaggtaatggcaggatctggaaatttgcagactttccgcttactgcgctatcttagaggaagaatttctgcagaaggccaagtgaattatggattgcagatggcagtaagcttggcaataggattcttattccttggaggtggaacacacacattttcaactcagaatagtgcaattgctgcattactaatctcactttacccacgtttacccactggaccaaatgacaatcgctgccatctccaggcattcaggcacctatatgtaatagctacagagcctcgatggattcagacagtggacattgacacagaacttccagtgtattgtccattggaagtgacagttgctgaaacggattattatgatgagaccaactattgtgaggtgacaccttgtcttctgccagaacgctcagtgaattttgggaagtatgtggaaagtgcataggtttaaaccaggtggaacagccga

SEQ ID NO: 15423 - DNA, 960 bp, Zea Mays
ttctgctattgctaaagtggcactatgagtacaaggtgcatggatttgtgcaagataatagaacagggcaaaaagtagctatgttaattggaaaatgggatgaagctatgtattatgtgcttggggatccaagtgttaaacccaagggatatgacccaatgtcagaagcagttcttttatgggagagggacaagtctcttaatcagacacgttacaacctttctccttttgcaatttctctaaatgaattgacaccacatttgttgaacaagttggctcctactgattctcgtttgagaccagaccaaaggcatctggaaaatggtgaatatgagatggcaaattcagagaaacttaggcttgaacaactgcaacggcaggcacgacaactgcaagaaaaaggatggagaccaaggtggtttaagaaggatgatggcgacagttaccgctatatgggtggatactgggaagcgagggagacggggaactgggacggtattccggacatctttcgccagaatagtttgtctccaggactgcactaactacccttcttccctatgttatacttgtgtatctccaccaaacatttaacgaagttatggtggcaacaaggcagagccaaagcatagcgtttcttcgtgggcatggtcaacctcgtgtcggctggggttggacaagtggttggaaacgtaggtttcatttttgaatttcaggactaattttgtcttggaatgcggttagtttagatttgttttttatgccttggcggctaatccacggatggtaggctttgccgcgcgctctagtgtcttgggccatgtatggagtattatctatggacatcgggtgatttcaatcgtcgtcacaatacttcttgactgttacaatcgaatttacacaacataagatgtgatatctggctcaatttggattgaatctataattgtccttgtgtca

SEQ ID NO: 15424 - DNA, 2651 bp, Zea Mays
ccggccgcgacgcggcccgcagccacggccttccgtaatgtcataactccccttctcgagtccatctccaacctcatccctcccaccccaataatacatccagccggcgccatcaggcccggcaacgcgcaagcggggctgaccatcgaaccctagtccccggccgagccgccctccgccgagccttgcggccgctctgcgtcatccctcttagtctccctccgttcgacacggcttggatccgagatggaatcaccgcccctcacagctgaagcaattgcttatacagagaaaaagatggacatggctttggaggatataattaaaatgtcaaagaaaaagaatcctggaggcaagaaacccccgaggcagccgggtgttcttgcacagagaaggtcaaatcttggtggaaatcagttccctgctacaaagcaggctgcgaagaaggctgctgttatgccaatgcacaagggggctatccgttggaacaagccaaggtaaacaatgatgttcttttattgcttatgagaaagtttactgcattcaaggggttgttcaatttattgagtcatgcaccttggattatattggctgagaatgattgtgatgctggtgtttacatggaactgccttaacttctctggttatacacacacaagcttataaagaacaatcgatttcatattcttgtggcacaaggcctgttttcttggttgaactgctacaaatatatggtgaatatagcatatgagccttgaagcttcattgaaagttatggccttctcctttatctgctgttgcctgacatttttctatgcagtttcatggtgtaatttatagctgctggatgagtgttattttggacaccagcattaactgtctgtgagggtttcattagtgttatttgtcaactattgttggaaggactgaaggagatgtgataatggttagcgtctcatgccactggtgacggatcatccatatacagggacgttacatgcctgagtttgaattggttttgactactggctccttggcagtgttcagtgtttatttgttgaatgatgaatgcagtgtaaatctagggtagtgctgctaattggacaattgttgtatgcctccaagggagtatattttgctactgcctcatattcaagttggctgtatccgtaacatcatgccagttttgagcatcctatcataatctgctatatgctccccttgttcactgcgtcccacagagataatgcttgcctgcatttctactggataagagtaaatcatggtatcttacgatttatctcagtatgctgggctgtatggatgctatcttttcaaggtcaactgttgggatttattttcatgattccttatgtgaccttgtttgttctggatcagtggtcactatttacatggcttgagttttatcagtttaatcaatcaataagttgtgtcaacttgggacattgttgaaccatgtgcattgaaatttgggtggaactaaacagtctagactccaaaatgtgagggccttggaaaccaagaggatgcactagatattttcaatgaacactttattgtttctgtttcattttatttcaaaacatggtatgtactccctgacttcacttgagaagcgagaattgtatccttgttttgatgggggtatggtgagtttgctcagaaaacaatatggctcttggttctccgttgcttatgattcttggtactcgagcactcctgctcatgtgagatactaatgttttgattttgatacagtgcaagtaccttagtgcagaggaggcctgtaggtggtgcttttcagaatgccaaggtcaaggagtccaaccaggcagcaccaaggacgatggatgcactctttgcacagatgaaggcgcaacgcttgaggacggtacctcaacagcaggcaaattcttccccctggagtcatttcaaccagcatcgacgtgttcagcagcagcagaggcgaggcagagggtatggtggccgtaatgttggcaaccaatgaatccaactagacatatctactgcatcggagccctttctcttcactggtcttttggaccttggaagaaaggacgccccttggaaaatcaaacttggctttgtttattggaggggtgacaatgggctctaacttggctttgtttattggaggggtgacatcgggctctaaattttacactaagatttaaggatctgattaagatcaggccctatttctattcatttttaaactaaaatttatttagtgtcctactattttgtgaagcgtttggatcgtgatccattaccacctcacctttggacgtggacaggatatgaagcgaagtttgtttgagttttctagttgtgtgcagtctgcttccgtttcagcatgtataatgacatggaaattatttggtcagagattatgatgtcttgtttcttggcttgattagcttcatccccaactaagagtaattcaccttacctagggatgacaacaggtcaggtttagatagggtagaataaatatccgtccgctataatatttgcgaagattatttatatctgtctatgactatactcgcggataacttgtaccggtatccgtagctattcgtttgattggttatctgtactatttc

SEQ ID NO: 15425 - DNA, 619 bp, Zea Mays
ctctacattacatttctcttcttttgatcctgactcccatcccttttgcaacaccaatgcatgtgattgttggaaggccaattgaggttgtaaagaatcctcaacctaccattgatgagataaaccaagtccacggacagttcgttgttgcgatgcaagatctgttcgagaaatacaagagcagaactggataccctgatcttcagttaagagttctttgatggcgtgctgttccaatgaaaagctcttatcagctaggtttaagggataaaatggctgttcagacccatcgactcaattgatcgtagcatttgggctataatgtttttgagcacaggtccattattgaaattctgtaccccattccaaattagaagacgtttttttaatatgtagcttttctatgcagttgcatacatactatgtctaaaaatataaaaaaatatatgtctagaaagggaatatatcatctgtaaagcaagcagtcatgataattttttaaaacaacccttctatcgtacatcagctttcaaaacgatggtgcttgtgtgatgtgcccctatcatttttcatcttttttgggctcatcctcgaggggtggaatgcaaacatatgcatt

SEQ ID NO: 15426 - DNA, 2454 bp, Zea Mays
cacaaatccatgtccatccaaagggttgcaccaactgtagatgctgttcttttgtcacatcctgacatgatgcatctaggagctttgccttacgctatgaaacaccttgggctgtctgcaccagtttatgcaacagaacccgtgtttaggcttggccttttgaccatgtatgaccatttcctgtctcgatggcaagtttcagactttgacttgtttactctagatgatgttgatgctgcattccaaaatgttgtgagactgaagtactcacaaaattaccttctgaatgataaaggtgaaggagttgttattgctccacatgtggctgggcatcttttgggggggacagtttggaagattacaaaagatggggaggatgttgtgtatgctgttgacttcaaccatcggaaagagaggcatttgaatggcaccgttcttggatctttcgtgcggccagctgttctgataactgatgcttacaatgctttgaacaaccaaggctatagaaaaaagcaggatcaagatttcattgaatcattaattaaagttctggcaactggtggaagtgtgctacttcctgttgacacggctggtagagtgttggaacttcttttgttattggatatgtactgggatgaaaggcgattgcagtaccctatctacttcctgacaaatgtgtcgacaagtaccgttgattatgtcaagagttttcttgaatggatgggtgatcaaattgcaaaatcttttgaaagcagtagagccaatgccttcttgttaaaaaaggtcacgctgataattaacaaagaagagcttgagaaattgggagatgctccaaaggtggttctggcatccatggcaagtttggaggttggcttttctcatgacatatttgtggagatggcaaatgaagcaagaaatctagtgctctttactgagaagggacagtttgggacactggctcgaatgctccaagtggacccaccccctaaagctttaaaggtcactatgagcaagaggattcctttggtgggtaatgaactaaaggcttatgaagaagagcaagaacggataaaaaaagagaaatcgctaaaggctagccttgtcaaagaagaggagctaaaggcttctcatggatcaaacacaaaggcttctgagccaatggtcattgatgcaagctcatctcgaaaatctgtgaatgcttcacattttggtgggaacaatgatattctcatagatggatttgtccctcctttaaccagtgttgctccaatgtttcccttctttgaaaacactgctgaatgggacgactttggtgaggtcatcaaccctgatgattatatgatgaaacaagaagaaatggataatactctgatgcttggccctggagatggattagatggtaggatcgatgatggctcagcacgcctgcttcttgattcaacgccctcaaaagtcatttccaacgagatgactgttcaagtgaaatgctcattggtttatatggactttgaaggtcgctctgatgggcgttctgtaaaatcaattattgctcacgtggctccactgaaacttatcctggtgcatggatcagctgaagcaactgaacatttgaaaatgcactgcgcaaagaatttagatttgcatgtttatgctccacagattgaggaaactattgatgtaacatcagacttatgtgcttataaggtacaactttcggagaagttaatgagtaacatcatttctaagaagttgggtgagcatgaaattgcttgggtggatgcagaagttggaaaagaagatgagaagcttattttgcttcccccatcgtcaacaccaccaccccataagcctgttcttgtgggtgatctaaagttgtctgattttaaacaatttttggaaaacaaaggctggcaggttgaatttgccggaggtgctttacggtgtggcgaatacatcatggtgcgcaaagttggtgattctatcctaaagggcagcacagggtcccagcagatcgtcatcgagggccccctctgcgaggactattacaagatcagggagcttctgtactcgcagttctacttgctgtgaggcaacgcttgtgttgtccgaaatttggcgtgggatgaccgtgacaaagttttggcatcagtttccggatgaccgtgctgactaccaagtggtccaagaacgatgacaatgcatccatccaaagaagaacaaaaacaacgacgacaaagcgtccacctattttccacctaggggtgcaatcaatcagatcggagatgggtaatgcttgtatcatattttctctttagatttagattagatatattttctttttagatttagatcagatacgaatattattggtctatgaccgtaagatttgaatggatatcaatatatcttaaatacctatactctatgcggctatgtttttgttttttatgttcc

SEQ ID NO: 15427 - DNA, 1040 bp, Zea Mays
taaaaaacaggctggataaccgaccgaacccacatcctgcttactgcccacaagaaagaagctagggaaacccgggggatcggaggactgaggagaggcagaaaacagaaggcccggctgcggctgcggctgcggctgcctttggtttcgtcgtcgtctccgcctgttttcccctctttccatggcaggctgatgctcttcaacacacacagtccactgtcgctcctcagttataagtagctagggcatctggctgctggaaaatcaagcacgcatccaccacacacacagctagctagcagatcgtttcgagtgaagatccaaagaggtagagagatggaaaggatgagttcgtcgctgcagtactgggtggaggagcacaagctctcaaccatcggagccgtgtgggcgacggcggtgggcgcgtcggtggcgtacagccggcggcgggcgccggcgcgggcgacgggcatgcgcctcatccacgccaggatgcacgcgcaggcgctcacgctcgccgtcctcgggggagccgcgctcgcgcaccactaccacggcaagagcaccaacgccgggaagaggcagcagcaggaggacctggactacggcttctactcgcagctgccgccggccaccgacgccgacggcaacgagaacgagcgctggagctggtagagcatgctgcatcgggacaagaacaagacagcagcgagaagaaagaaaaaacaataaattagtagcaataattggtgggtggtttggcatttggcaatgatgcgtgacgtggcgcctgcaggctttcttggtcctaatcctaatcctaatcctaatcccaatccatccagctaagacgtccacgcccgtggttttgtcctgttgatttgccaccggagacgacgatgcagcgcttgctctttgatttccatggcttattatcgatcagcctccgattcttctcctgcactactactacttgtaccatttcatctattgattgaatgaatggtcacgatgatgacgataattataaaaaaaaaaaa

SEQ ID NO: 15428 - DNA, 1445 bp, Zea Mays
gaatatattgacacaacaccaatatttatgttgaatcttatacagcaggaagggaggtgagcacctattgtaggtgtgggattaatctggacttggataaatgaagtataatgcaagaaatgtgggcaaataataccttgggaatcccattaagtttactgctgctaccatttaaagggcagaactgccggtcttcaagctctttgttactcctgatcatctgtggcacaattgtcatcgggcaaaatgccatcagtttatctctacatccctaacattatcgggtattttaggatcatcataaatttcattgcatttgcggtttgctattccaacaaggctctctttgctgtcttgtacttcttcagctttgtccttgatggtgtggatggttggtttgcacggaagtttaatcaagcatcaacatttggagcagtgttggacatggttacagatagggttagcactgcttgtttattggcccttctttcccagttttacagacctggtttagtcttcttgatattgctcgggttggatattacgagccactggtttcagatgtacagttctttcttgtcaggtaagactagccacaaggatgtaaaacacacaggcaattggcttctgaaattatattatgggtacaggccattcatggccttctgctgtgtttcttgtgaggttttgtatattatcctctttctctttgctgatgagaagtcaacaagcttgcttagtgcatgcaaaggtctcctgaaccaaagccccatcattatcttggtgtttatttccacattagttggctgggcagtgaaacaagtcaccaatgtcatccagatgaaaacggctgcggatgcatgtgttgtgtacgacctgaagcgcagcaaatgaaaagcatgaagggaaaactctacggtttaactcagtcctgtgtggacgtatccaaagggaaaaactctccgaggggatacgtcttacgttccttgacatctttctgatgatgccttacgtggggccagaggatgacatgccgtgggaagagcagcatgtcataaagagaaccaacgcaaacaattgttttgtgaaggcggctattgatttgttgtcaagagtgttttattatgtcatacaaatgatgaattgatgatggtacctttgttacctgggctagccctttgtgtcaacatgaaagatgcttacgagccacatgttcccttctgaaatgaaggttttgagttgcaaaaatttacatattcccttctgaaagccagcaactgcacctcgagagggtttaatggttacttttaccccccaaaataggcactagctattattcggatgatttcccttttgctccttattaaacatcctttggttcagttttattgatagttttaatttttttacatgatctcccttagttcaaaaaaataaaattaaaa

SEQ ID NO: 15429 - DNA, 2115 bp, Zea Mays
agaattaaaatggcaagttttcaattagggttttgctgtccccaaagaatcacagggcaaagttgcagaattttcgttccatgggactcctgcaaagataaagcatggtgatgttgtaattgcagcaattaccagttgcacaaacacatcaaatcctaatgtaatgctgggagctgctttggttgccaagaaggcttgtgagttgggcctggaggtaaagccatggattaagacgagccttgcacctggttccggtgttgtgaagaagtacttggataagagtggtttgcagaaatatctcgaccagcttggctttcatattgttggctatggttgcacaacctgcattggaaattctggagagcttgatgaatctgtgtctgctgcaattactgagaatgatattgttgctgctgctgtgttgtctggaaacagaaattttgaaggacgtgtgcatcctttaaccagagcaaattaccttgcttcccctcctttagttgtggcttatgcattggctggcacagttaatattgattttgagaaagaacctattggcatctcgaaagatggaaaagaggtttacttccgggatgtttggccatccacagaagagatagccgaggttgtcaagtcaagtgtgctccctgacatgttcaagagcacatatgagtcaatcaccaaaggaaatcctatgtggaatgagctgccagtctcaacaagcactctctacccctgggatccatcatctacatacatccatgagccaccttacttcaaggatatgaaaatgagtcctcctggcccgcggcctgtgaaggatgcatattgccttttgaattttggtgacagcatcacaaccgatcacatctcacctgccggaaacattcacccagacagcccagctgcaaaatatctgaaggagcgtggcgttgaaaggaaggacttcaactcatatggtagccgaagaggaaatgatgagatcatggctaggggaacctttgccaacattcgtcttgtgaataagttcttgaagggtgaggttggacccaagacaatccatgttccatctggggagaagcttgcagtttttgatgctgctatgaaatacaagaatgaagggcatgacactattatcctggctggtgccgagtacgggagtggaagctctcgggattgggctgcaaagggcccaatgctgcagggagtgaaggctgtgatagcaaagagcttcgagaggattcaccgcagcaatcttgctggcatgggaatcatccctctatgctacaaagcaggggaggatgcagacaccctgggcctaaccggccatgagcgctacacggtccaccttccaaccaatgtgagtgagatcaagcctggccaagatgttaccgtgacaactgataatggaaagtcgttcacttgcacactcagattcgacactgaggtatgattgttcttttcaatgcataaatcgctgatgctgtctattgatgttttcgttactgatcaccttcacctccaggtggagcttgcttactacgatcatggtggcattctaccatatgtcgctagaaagatagcggaacaatagattgtaccgtcgagatggttgcgatgcttgcggtgaatcgtaattggtgtaaacggtttgtttagtagtacaacccatttttgcggactacttataataacctctgagtatctcagagtgagctgtctgaaatttgatgaactgctacaattctggtgcgccatgaggatgggatccttttgccttctatgttaataatatgctaacttctgcaataccagatatacatttggcagaagattttgcacgctgtaaatgacactagtattaacactgatgcggttcaaagctgtccttgttttgttatctgccaacaattgatgagcagattttgtttcagatttgtattacgaaccttttaccacgttgccatgtgcgactggtaatgactctgaagcaaccgatgggtgtaaaactgtcatgtaagccagaatctgaagctgctctttgcaaaaaaaataataaaagggaaatactgggggcaataaagctcgtgctgaagctagagcaacttgaaagagaac

SEQ ID NO: 15430 - DNA, 1664 bp, Zea Mays
ggcctaaattcaaagaagacctttgagtattcgatgcagctgtcaaaattggagctaccatgaaagaagccaagccccagggatttgcagagagatacccagctcttgtcacaggtttcttcttcttcttgtggtattttctgaatgtaatatttaacatcctcaacaagaagatcttcgactacttcccctatccatattttgtgtcagtgagccatctttttattggagtactatactgccttattggctggagcttcggcatcccaaagcgcgcgccaatcaactcaacacttctgaagcagcttgttccagttgcggtttgccatgccattggccatgtaacaagcactgtgtcatttgctgctgtagctgtgtcatttgcccacactattaaagctctcgagccattcttcaatgcggctgcttcccagtttatccttggacaaccagttccattgacactctggctgtctcttgttccagtggtgattggtgtctcggtagcatccctcactgaactctcatttaattggactggcttcattaatgccatgatctcaaatatttctttcacctaccgaagcatctattctaagaaggctatgactgacatggatagtaccaacttgtatgcatacatatcaataattgctctctttgtctgcatcccccctgcaattattattgaaggacctcaattagtgcagcatggttttaaagatgcaattgccaaagttggattaacaaagttgatttctaatttttttgtggtgggcttattctatcacctttataaccaggttgctacaaacacattggagcgggtagcccctttaacacatgccatcggcaatgtgttgaaacgtgttttcgtcattggcttttccatcatcgcattcggcaacaagatcaccacacagactggaattggcacttccattgctgtttctggtgttgccctctactcatttataaaggctaagattgaggagaaaaagcaaataaagagtgcataaggtgttggctgatgtggatgcggttggtttgtcgctttgatggacctctattctctcggtgaacgaacaaacttgcaagatggataaaatcttgctatctcctagtacatttgattgttattcccagtctggtactgaggtgtgcggttgttgttggctaacttgtttatttgaagcaaatttgagcaatgctcagtggcatggaatttccatttctgttttccttcgctcatttattctgacttgacatggtgctattgtaatcttaagcagtagtgtctctagaatgttttccccaaggagatttcagtaccaaatttgaacaatcctcaaactagaaattttgatttccatgcaccccactcagcaattctgacatacaatggtgttcatgtaatcttaagcagtagtgtctcctgatctttccaaggagattttcagtatcgttgatagtacattacgataaaaagcaaaatgcagtgagagcaatgttgccaatcgtgtgatataacctatttgtactaaggtatcattgttgacaggagcaaattaattgtaccaggttgcaaacatgtagcatgcagtttaaatgttacacttatgacatgggtcacatgtgtagatagacaggctaaggtggaattt

SEQ ID NO: 15431 - DNA, 1234 bp, Zea Mays
cgcttccaccatcgcacccacccggagcgcctcctcttctccagcgtccgatccccattccccacctctcctccctccgccgccagctcccgcccccttctctcccctcctcgcctccccgcgcgcgcgtttttataagggtttcggcggaggcgcccggtcgctggcgatggccgacgacggcgggagccacgagggcagcggcggcggcggaggcgtccgggagcaggaccggttcctgcccatcgccaacatcagccggatcatgaagaaggccgtcccggccaacggcaagatcgccaaggacgctaaggagaccctgcaggagtgcgtctccgagttcatatcattcgtgaccagcgaggccagcgacaaatgccagaaggagaaacgaaagacaatcaacggggacgatttgctctgggcgatggccactttaggattcgaggagtacgtcgagcctctcaagatttacctacaaaagtacaaagagatggagggtgatagcaagctgtctacaaaggctggcgagggctctgtaaagaaggatgcaattagtccccatggtggcaccagtagctcaagtaatcagttggttcagcatggagtctacaaccaagggatgggctatatgcagccacagtaccacaatggggaaacctaataaagggctaatacagcagcaatttatgctagggaagtctctgcattgcttaccatgtgtattggcagaaaacaggaggcacttacaaagggtgttaatctctgcgatggctgcctctcaggtgtaaattggcttcggtttagcgctgcttttgtccgtatatttaggatgatttgactgttgctacttttggcaaccttttacatttacagatatgtattattcagcataaatataatatagtagtcctaggcctaaataatggtgattaacataccaagtcttttatcaggctactcgttttctggaacaggattcatgcttagctttccctcctgtctgaatgtgatggttgcctgaatcctaatttgcctgtctgtggtgtgagaccatctccaaccattcccctcatatttctcctcctatctgtactttctattatattttactactttacctcaaaagatactcctacatttagaaggtttccaaccattcaccgctccctttgtatactataattcaattatatttgatatattttttatcagtttttaaagtttgaaaaat

SEQ ID NO: 15432 - DNA, 2110 bp, Zea Mays
attccactcggtgctttgcccgaggcccggagaagccttatcgcctcctccttgcacgccgaccgatcgccacaatcccccaccgctcgcctgcctggtgcccgccatgccggagatcaagtgcggcgcggccgagaaggtgaagccggcggcgagcccggaggcggagaagcccgcggacatcgctggcaacatctcctaccacgcgcagtacagcccccacttctcaccgttcgcgttcgggccggagcaggccttctacgccaccgccgagagcgtccgcgaccacctcatccagagatggaacgagacgtacttgcatttccacaagacggatccgaagcagacgtactacctgtccatggagtacctgcagggccgcgcgctcaccaacgccgtcggcaacctcggcatcaccggggcatatgcggaggccgtgaagaagttcggctacgagctcgaggccctcgcggggcaggaaaaagatgcagctctagggaatggcggcttgggtaggcttgcatcttgctttttggattcaatggcaacattgaatttgcctgcttggggctatggcctgcgttaccgatatggactgttcaaacaacacattgccaaggagggccaggaagaagttgcagaagattggcttgataaattcagcccttgggagattcccaggcatgatgtggtgttccctgtcagattttttggccatgttgagattttgcctgatggctctcggaaattggtcggaggagaagtcctgaaggctttagcatatgatgtgccaatccctggatacaagacaaaaaatgcaatcagtcttcgtctttgggaagcaaaagctactgctgaagatttcaacttatttcaattcaatgatggtcaatatgagtcagctgcccaacttcatgctagggctcaacagatatgtgccgttctttatcccggtgatgctacagaagaaggaaagcttctaaggctgaagcagcagtttttcctttgcagcgcatcacttcagggaatgagtgcagaagagaagcagaaggtcacaccgcgcactgtcatgataggagggaaagcgtttgcaacatacactaatgccaaaagaatagtgaaattggtgaatgatgttggtgctgttgtgaacaatgatcccgaagttaacaaatatctgaaggttgtctttatcccaaattacaatgtatcagtggctgaagtgcttattcctggtagcgaattgtcacagcatattagtactgctggtatggaagcaagtggaacaagcaacatgaaattctctctgaatggttgtgttatcattggcacccttgatggagctaatgttgaaataagagaggaggttggagaagataatttcttccttttcggtgccaaagccgatgaagttgctgggctgaggaaggatagagaaaatggtctgttcaaaccagacccacgttttgaagaagccaagcagtttataaggagtggcgcttttggcagctatgactatgaacctctcttggattcccttgaagggaattctggatttgggcgtggtgattatttccttgttggctatgacttcccaagctacatcgatgcacaggatcgggtggatgcagcctacaaggataagaagaagtggaccaagatgtccatcttgaacacagctgggagtggcaaattcagtagcgatcgcaccatcgcccagtatgccaaggagatatgggacatcaaggctagccctgtcgtgtgaacgagggggttgcgattcaacaccaaacgtagtttcttggggtgctataatagtaaggaagaataatgacccacggtgcttgacgcccacttgcgttgtaggcatggaacgggggcacctagcttgttctacagcgctgtctattttgaattggtgcgactttgttgctcttttttcctcccccttatatcttatgaaacaagatccttttgatctgtgctctgaaataaaataattcagttatgatattcgtcgccataatgtgcttgagaaatggatgtcccttcctccaaggtcagcagtgcccaaactccacaagactgtttgatctaagcatattgatat

SEQ ID NO: 15433 - DNA, 1005 bp, Zea Mays
atcgactacaccgtgatccggctcctgttgcgccaaataagcagataagtaaaatggtggaagaggccgctaggctctctaagctgttctgtgatagaaacctgccgatctttgcattcctggatacccattatccagataagccggagccaccgtatcctcctcactgtatcattggtactggggaggagaacttcgttccagacctggagtggttggaaaaggagccaaatgtgactataaagaggaaaagttgtattgacggttacatcagctgcatagaggaggacgggtctagtgtttttgttgactgggtgggaaaatatcagatcaaaactgtcttggtactcgggatatgcacggacatctgtgttttggattttgcaagctcaactctggctgctcgaaatattgaccgagtgcctccattacgagatgtcgtgatttattcagaggggtgtgctacatatgaccttcctgttgagatcgctatgaatatcaaaggagctcttgcccatcctcaggacctgatgcatcatattggactctatatggccaaaggaaggggtgcaaaggttgttgacagggtggttattgaaccttgaataaaaaaaacttccctcatcgtagtgatgttgctagagtttcctgtcttctcatccttccattgtaacaatcagatatatatgcgtcttagcataaagttgttgagatactaatgctagcgacaactatgttgacttgtcgagtatgtagagatgggctcatcattttgtggtgagcttgtacatatttcctgagattactttgtcctgccaaacatgcgccagttctccattggttgctaatgttcggctctgggattgtatattcgtatttaataaaagtactccctcctattccaattcgaattataggatattttgattttttttaatatatgacttttgctatctacagtattcgatatctaaatacataacaaaatatatcaaaaaggcaaaa

SEQ ID NO: 15434 - DNA, 1976 bp, Zea Mays
gttcccttctcccgcggccgcacgcatcgctcgctcggcgctgccggtgtcgtcgtcgcgctcgccctcgcacgcactcactgaccgccaggccgaggccaatccagacaaacgcacggacggcatcagctgctgcgtgcgttcgctttccccgaaacgttacccaagctacagagagagaaaggacaagggaggagaagccgccatgaagcagcggcagcagcagcagcctcctagtcgtccccgttaaatccctgctcgcccccggtccgcgaccccgacccaacccgtttgtgtcgtaggcggtttgcactagcgtttccgtgaggtgggcgaaggcgtccgtgaccgaccgaccgaccggagcttcatgcgccaggggcggcggcttcaccccgtcgtttgatgggcaacgcatgcagcggcgcccttagatccaagtacctgcacagcttcaagcacgccgcgtcgcagcgccacgactccgagtacagcgccagcgccgacgactcgcccaggaagcccacaccgcccgccaccacggacgcccacgcgccggcgccgcccgccgccgccatgaggcgcggcgcggctggcgcgacgccggacctcgggtccgtgctcggccacccaacccccaacctccgcgacctctacgcgctcggcaggaagctcgggcaggggcagttcggcaccacctacctctgcaccgagctcgccacggggatcgactacgcctgcaagtccatctccaagcgcaagctcatcaccaaggaggacgtcgacgacgtgcgccgcgagatccagatcatgcaccacctatccggccacaagaacgtcgtcgctatcaagggcgcgtacgaggaccaggtctacgtccacatcgtcatggagctctgtgccgggggcgagctcttcgaccggatcatacagcgcggacactacagcgagcgcaaggccgccgcgctcacaaggatcatcgtcggggtcgtcgaggcctgccactcgctcggggtcatgcaccgggacctcaagcccgagaacttcctgctcgccaacagggacgatgacctctcgctcaaggccatcgatttcggtctctctgtcttcttcaagcctggtcaagttttcaccgatgtagttggtagcccatattatgtagctccagaagttctgttgaaaagttatggacccgcagctgatgtatggacagccggtgtcattctttacattctactgagtggtgtgcctccattttgggcagaaacacaacaaggaatatttgatgctgtattgaagggtgccattgattttgattctgatccgtggcctgtcatatctgatagtgcaaaagatcttatcagacgaatgctgaatcctcgctctgccgagcgcttaacagcacatgaagttctatgccatccatggattcgtgatcatggagtagctcctgaccgtccactggatccagctgtcttatctcgcattaagcaattctctgcaatgaataagttgaagaaaatggctttacgagtaatagctgagagcctatcagaagaggaaattgcggggttgaaggaaatgttccagatcatggacactgacaacagtggcgcaatcacttatgatgagctaaaagaaggattgagaaaatatggctccacactaaaggacactgagattcgtgatcttatggaagcagctgatattgacaacagtggaacaattgactacatagaattcattgctgcaactttgcatctcaataagctggagcgtgaggaacatctcgtggcagccttttcatatttcgacaaagatggtagtggctatatcacagtggacgaactacagcaagcttgcaaagagcataacatgccggatgcttttcttgatgatgtcatcaacgaagctgatcaggacaatgtgagagcagccggccagggatcaaacaccagtggcacaaaaaaaaacgc

SEQ ID NO: 15435 - DNA, 2954 bp, Zea Mays
tcgctgctaatgtaggatttacttatctctctcataattttttttttggttttttgtgtctaaactctaaacccgttaagtttgtaaccgcctccctccttcaactgtctcagcagattgtgcagcaccgtgttctccctcccttcccaatcccctatcccgttactttccccggctccaccccaaaccctaatacgtcatggcgctcactacacggggcggcgccggcggcggggatcccgcgaaggcgccgtccgcctccgaccccagcctcggcttcctcaccaagcgcgataccgaggtcaagctaccccgcgcaacgcgggtcaagaacaagacccccgcgccgatccagattacggccgagcagatcctccgggaggccagggagaggcaggagcctgagatccgcccgcccaaacagaagatcacagacccccacgagctctccgattaccgcctccgtaagcggaaggagttcgaggacgtcatccgccgcgtgcgctggagcgtctcggcatgggtcaagtacgcgcggtgggaggagcagcagcgagacttcgcgcgcgcgcgctccgtctacgagcgcgcgctcgacgtcgcccaccgcgaccacacgctctggctcaaatatgctgaattcgagatgcggaaccggtttgtcaaccatgcccggaatgtctgggaccgcgcggtgtcgctcctcccccgggtggatcagctctggtacaagtacatccacatggaggagctgcttggtgcagttgccaatgcgcgccaggtgttcgagcgctggatgtcttggcgacccgacacagccggctggaattcttacatcaagtttgagctgcggtacggggaggtcgagcgtgccagggctatctatgagcgagtttgaggagaggtgccgcgaggtcgagcgagcacgtgcaatatacaagtatgctctagacagggtgcccaagggtcgtgctgaggaactgtataggaagtttcttgcatttgagaaacagtttggtgaccgtgagggaatagaagatgccattgtgggcaagaggagatttcagtacgaggatgaggttaggaagaatccactaaactacgactcatggtttgattatatcaggctggaggagagtgttgggaataaggacaggatcagggaggtgtacgagagggccattgccaacgtgccccctgcagaggagaagcgatactggcagaggtacatatacctctggattaactatgcactctatgaggagctagacgcacaagacagagaacggacaagagaggtttacaaggaatgcctgaggttgattcctcacaagaaattcacgtttgcaaagatgtggctcatggcggcccagtttgagatacggcagagaaatctaaaggctgcaagacaaattcttggaaatgcaattggaatggccccaaagggcaagatattcaagaaatatattgaaattgagctttatctgggcaactttgaccgttgtaggactctttatgagaaatatattgaatggtccccagcaaactgttatgcctggaggaagtatgccgaattggagaagaaccttagtgagactgatcgtgctcgatcaatatatgaacttgctattgcacaaccagcccttgatacaccagaggttctgtggaaggagtacttgcagtttgaaattgatgaaaatgaatttgagaggacaaggcaactatatgagagactgcttgataggacaaaacatttgaaggtatggatcagttatgctgagtttgaggcctctgctggcttgggcggtgaagacggtgaagacaaggagaaaaagaatgaagttagttatcaggagcagcagatggagcgggttcaaaaatgtagagctgtctttgaaagggcatttgattacttcagaaccagtgccccagagttgaaggaggaaagagctatgcttcttgaagaatggcttaataaggaggtgaactttggtgatcttggagatgtcagcttagtgcaaaagaaggcaccaagaaaagtcaagcggaagagaccaatccctacagaagatggctccactatagcatatgaggagtatatagattacattttccctgatgaagttgctctagcaccaaacctgaagatcctagaagctgcttacaaatggaagaagcaaaaaactggagatggcgatgagtgatcctggcatcttagtatggcattgtcgtggttcgtgagcattttgccacagccaaaatcagatgccctgcaacactctggccagagctatcggaatgagaatagtcattttttcatgtcacaaaggatgttgttgctgttgaaaagaatcctgcgaattacatttaacttgtaactgtatgggctgtagtttggtggccatgagttgcttccatgcgtcggaacaatgagggctacacaagtcgagatggtgtatgggagtttgtcttgcaattgcaaaggtatctctccagtctatgctttttatgaagtcagtaaactgggcgtcttcgacttcaatcgctggccatgccggtcacgctggtgtccagggttcagttggagggcttgcagttgcagaagatcctaccagcaaaacgtcatcttcagtgcctagcagctctgtttattagccagtgaggcttttggttcctaatagtctgttgccaagtttggttcttggcagagctaatttattagaaagaaaaacaagaaaagtacaagacaaccaaaaaaagcaaaaggaaagggaagggggacagctatagtaaagcgaagaaatcatgttcttttatgtgtgtcttgtgattttggcaagcctagacttgccatgaattgtcttattaggccattctcagttgtagttttatcacatcatttttaatgttaccacgtcaataatgtttaatgaaataaaaaaaataaaatatgc

SEQ ID NO: 15436 - DNA, 738 bp, Zea Mays
attagataccttgatttgatgttgcttgctaccctgagagaaaaaaaacgagtagtatcaataagccgattaaaactgaaacatgagaattttgtgatggttagtgcacataagtgctttaaatcttcaaatttgttgagcctattgttttatagaatactaggctattggacaatattttgggtgtagagttagaggtgtctagtgtttatgcatacaagtgttttaggcctttaagttaagataatttttattccatggaattctatgcttgttaataatgagttgttcattaatactaagagtcgtgttaatccttcgataggatactctagttcatgagattaagatttatgtgcagccttttgaggcttgatgcttgagttaaagaagcaagattatggtgtttagccatttatcgatgtctagcgtttacttatgggtgttgtatgcgcctcaccattaagtgtttagctttctactgtagcattgtttatcttgtgctacctgctcataatcattcatgtgcattatgcatatcattcaggttcgttacacgtgatgcgaaggacaagagccgagttgatcccaaaatgatgctagtgaacgaacctaaggatggatgatctgatagagtgccagaatgggagatgctcaccaagtggtcgtcaattaacaacactaacttagtgttatcccaggttataattttgttctgttatggatgctgctaagtgc

SEQ ID NO: 15437 - DNA, 4851 bp, Zea Mays
gcgtgcctgactgcccgtgcgcgccctcgctcagtcgctctcgcgcgcggcgacaactgagccaccgccgacggtccaactcttcgtcggaccctttgccggcgacgagcacccaccaggggtttcatggtagcgtgacctgtctcggcctagaaaatgtatataaagaaggcaagatgttctgccctgggtacaatttggtgatatttttctccccatgtaagcttgttggcttattggccatctgtctggttcaggtcgtaatcgaagggtttaagagctacaaggaggagatatcaacagagcccttcagtcccaaagttaacgtagttgttggtgcaaatggatctggcaaatcaaatttctttcatgctatacgatttgtcctgagtgacatgtttcagaacctgcgaagtgaagataggggtgcccttctccatgaaggtgctggacactcggttgtatctgcttttgttgagatagtgtttgacaattcagacaatcgtattccagttgataaagaagaggtacgcttgcgcaggacaattgcttcaaagaaggatgaatactacttggatgggaagcatgtcagtaaaactgaagtcatgaatctgctagagagtgctggtttctctcgttctaatccatactacgttgtgcagcaaggaaagattgcatcccttaccttgatgaaagattctgaacgactggatcttctcaaagagattggtggtacacgtgtttatgaggatagacggaaggagagcttgaaaataatgaccgaaacagccaacaaaaggaagcagattgatcaagttgtccactacttagaggaaagactgagagaactcgatgaagagaaagaagaactaaagaagtaccagcagctggacaaacagagaagatcacttgagtatactatattggaccatgagcttaatgacgcaaggaatgaattagcttcgatggatgataaccgaagaaaaatttctgaaagtatgtcccttgcggacaatgaagtggtggatgtccgagagatgatcaagagttttgataaagaaataaaagtctcaactaaagggataaatgataccaaggcgcaaaaggaaggtgttgagaagaggcgtactgaagctctgaaggtagttgctaagattgaacttgatttgagagatataaaagataggattgtgaatgagaagcgagcaaaggatgaggcagcgagggatttgcagagtgtgaggagagagagtgaaaagtcaaagtctgaattggctgaaattagtaaggtgcatcaggccaaactaaaggaagaggaggatatatcgaagagcattatggatcgtgagaagcggctaagtatattgtaccaaaagcagggaagggcgacccaattcgcaaacaaagctgctagagataagtggcttcaaaaggaaattgaagatctcaagcctgtacttttatcaaataaaaagcaggaaggtttacttcaagaagaaatccagaagcttaaagatgaaatcaatgatttaactaactacatcgagtctcggaaaagcgaatcaagtaagttagaggaaacacttgcgaaaagacataatgactataacgatttgaggaagcagagagatgtgcttcaagaagaaaggaagtcatattggaaggaggaatctgaggtgacagctgaacttgataggctacaagaagatcttataaaggcacagaaaagcttggaccaagcaactcctggggatatcaggagaggcctgaattctgttagcagaatcattaaggaccatggtattactggtgtttttggtcctgtattagaactggttgattgtgaagagaagttctttacagctgttgaggtcactgctgcaaatagcttgttccatgtggttgtcgagaatgatgacatatcaacaaagatcattcaaatattaactagagaaaaaggtggaagggtgacatttataccattgaacagagtgaaagttccagatctcagctgtccgcaaagtcctgattttgttccattgttgaaaaaattgaaatatcgatctgaccatcgtcgtgctttcgaacaggtttttggcaggacagtcatatgccgagatctggaaactgcgactaaagttgcacgtagcaatggtctagattgcatcacacttgatggtgatcaggtagggaaaaaaggtgctatgacaggaggcttctatgattctagacgctcaaaactaaagtttgtgaagataataagggataacaagacagcaattgatagaaagacgggtcatctagagagtgtcgtaaacaagctaaaagatatagataagaaaattacagatttagttaccaaacagcagcaaatggatgctgaacgtgatcatgcgaagtcagagttggaacaatttaaggctgacattgccagggctatgaagcaaagggggtcacttgagaaagcccttgtcaagaaggaaaaatcacttaacaacatctgcaaccaaattgagcaagtccagtctagcattgcaatgaagaatgatgaaatgggcacagagcttattgatcagctaacttcagaagaaagagatctcctttcacgattgaatcctgaaattactgatttgaaggagagatttctaatgtgtaaaaacagtcggattgagatcgaagcacgaaaggaagaattggagaccaatttatcaacaaatcttatcaggcgtcagaaagagctagaagcgataatttcatctgcagattctagaaccttgcctttggaagctgaggcaaaggagcaagaactgaaaagttccaagagaaaccttgatgaactaacttcattattaaaggctaatgtcgatgccataaataatttcaccagaaagatggatgatctgaaaagaaaaagggatgatctgaaggctcgtgaagctattttagagcagactgtacaagatggtgccaaagacttagaacagttgatgaacagcaggaacacttatctagccaagcaagaagagtgcacgaagaagatccgagatttgggcttgttgcctgctgatgcttttgaagcgtacaagaggaaaaacaagaaacagctacataagatactctatgactgtaatgagcagttgaagcagtttagtcatgtgaaccaaaaggctcttgaccaatatgtgaacttcacagaacaacgcgaacaactgcagagaaggcgagctgaacttgatgccggtgatgtgaaaatcatggaactcatatcggttttagaccaaaggaaggatgaatccattgagcgcacatttaaaggggttgcaaggcacttccgtgaagtgttttctgagctggtgcaaggtggtcatggatatttggttatgatgaagaaaaaggatggggatgcagttgatgatgatgaggaggaggatggacctcgtgatccaggccctgatgggagaatagaaaagtatatcggtgtgaaagtcaaggtatcatttactggcaagggagaaactcagtctatgaaacaattgtcaggcggacagaagacggtggtcgcactaacactgattttcgctatccaacgatgtgacccagctccattttatctgttcgacgagatcgatgctgctctggatccacaataccgaacagcagttggaaatatgatccgccgtctagctgacatggctgacactcagttcattgcgaccacattccggccagagattgctaaagtggctgataagatatatgccgtgagacacaagaatagggtgagcaacatcgacgtggtgtccaaggaggaggccctggacttcatcgagcgtgatcagacgtacaatgctagctgaggctgctgctgctgctgctgctgctgtgtattgattgatctgcaggcagatgctaacgcagacaggatagttcttgttgtgttatggatattctggcctattgttgtagctgtgtatatgtgtgatgcagttaggtagctattggaccagcttgtttggcgcatcaacgttgtgaatgtagcagctaccaccttggtttggtaccagctttaattaagtttgggaagcgctgattagactagacgtacgttacatgttgccccatgattgttgtatggcacgcccagcccaaaatggcagtaatcagttcatttcgacaattaacgtaagtgtaagtgtacgagtagtggtattcaaatgttttttaactgtatttttctagtacatttattttttgtacccataaatcatgttacacgtagtttcattggagggagcataaacatgttcctttgacagaaagcctaataaggctataaaacaaaaattactacacgtagtttcagcaacgcaaacaaaaaaccccgtgcctgcctaatgaattggtcattaggcatgggcttctgcttctctataaggcgactacgagctcccagctgctcagtagctagggtacatgcccatccttcctatggtgctcctgcagccgaagttgacagagcctcgaggctttctgctgccatttgccttcgtggtggatttcgcaatcctcttttccttgcccgtgaacttatcactgtctcgagctctttctttcgaccgtgccacttttgtcattgacgagagagagctttaagtcagtaccaggtcatggcaaaatcaaatggaaactaaatagtatagcaggttatctgaacacaaacaactctatttggaagatctgtgaaactagagtcataataatctggggctgtaggcattaccttagctagcctctccttaagctttggccttgcagatactaccactcttgctggttgacggtccgcgtttt

SEQ ID NO: 15438 - DNA, 363 bp, Zea Mays
  misc_feature (1)..(1): n is a, c, g, or t
nggccgcagcactcggagagcacgagccgcgccattgccggcagcggggcggggcggggctacgggtggatggccctggattggctcctagtctagagtccacacaccgtcgccgccgccgccgttggttggcacgggatcttctgcgttcggggggatgggatggggtttgggtgtacggtggtggccgggcttgccaggacaggctaatccaagaatatacattttataccgcggcgcgcgagccggagtggcgatggggggcgggaccgggagggacgcggtgcggtggactcggacctggaccagcactgtggtggaatgctggaatgtgggtgggtcccatcggtcggacgcgagtcg

SEQ ID NO: 15439 - DNA, 147 bp, Zea Mays
ccctatcatagaccggtatgccttttgatcaacggacttacctcttttgttgaggtcggtgtgtccgtcagttcccatcggagtctttgcgggcttggcgtccttcatcccaaacctcttgatcaaatcttgtgtgtacttcatttg

SEQ ID NO: 15440 - DNA, 4220 bp, Zea Mays
gagactgaatcattttcacagcaacattcaatgagatgtacaaacacatgggatcacaatttcatgaagagttgcagcgccataatctgccttcatatatgctaaaagaaataaattcgagattggataaaatagaaccaaaggttcgatcatctgatacagcaatgcagtataaggctgtagagtctagatctgttagtgccaatcccaaaagaggcagtccaaggacaaaaagcacaccaagggaaagtacactatatggaggtgacaccgatgttacagaaaaccctgtggaaccagtaaaagttcattctgagaaagaattacttcgggaatttgagaagatcgcagctaccctttctccagaaaaggattggtctttacgtattgctgccttgcaaaggattgaagccctggtttatggaggtgccattgattatccatcatttcttatgctcttgaagcaactggttcctccattgtctaatcagctgtgtgatcgacgttctagtattgtcaaacaggcatgccacctacttaatatactatccaaagaactgctcggtgattttgagccatgtgctgaactattcatcccgatgctttttaagcttgttgtcataaccgtgcttgtgatcgctgaatctgcagatacatgcataaaaactattctgcggaattgcaaggttgctaggattcttcctcgcatagttgacacagcaaagaatgaccggagtgcaatcctccgtgcaaggtgctgtgagtatgcacttctgatactggagtattgggctgatgcctcagaaatacaacgttcagctgatttatatgaggatatgataaaatgctgtgtcgcagatgcgatgagcgaggttagggcaactgcaagaacttgctatagaatgtttgcaaagacatggcctgagcgttcacgccgtctttttatgttatttgatcctgcgatacagaggataataaacgatgaagatggtggtgtgcataaaagatatgcttctccctcattgcgtgatagggttgtgcaaccttcacgtgcttcctctcattcaagtggtacatatgtacctggatatggcacttcagctattgttgcaatggacaagagtgcagctatttcttcagattcatcttttccatcaaccaatcttcggttatcacagtcaaagacgattggcagaagttctgagagaagcctggagagcgtgcttagctccagtaaagaaaaagtttctgccattgaaagtttgctgaaaggtgtcagcatgtcagggcaaaatttctctgctgcacgctcaacaagtttggatcttggagttgatcctccatcatctcgtgatcctcctgtgctgcttgcagcaccagcatcaaatgttctatcattgcagaactcagcactgttggactcatcccttcctaccatcccacctagttcgcgaaatggaggttcccgcttattggaaacgatgacaacacacttgcccaccaaagaaagatcaaggtcaccatacttgagtaatatgtcatctgagtccatgtctggcttatcactgccttactcaagaagatcttcggagaggcttcaagaaggaggccgcatggatgagagctatgatatccgttcaactaggcgaatgcctcaaatgcacttcgacagaaactatgttgatatgccttacagggatgccagccacagagattcacataacaacaatgtcccaaattttcagagacctcttctaaggaaacaagtaatgtcaagggcttctgcaagtggcagacacagctttgatgatagtcatgtaccatcaggtgacgtgcctagctatacagattctctggcttctctaaatgatgcactttctgagggtctcagccctagttctgactgggtagcaagagtttcagctttcgagtttattagaaatttattgaaacaaggccagaaaggcattcaagaaattactcagaattttgagaaggttatgaagctgtttttccgtcatttggatgatcctcaccataaggttgcacaggcagctttctctacacttgcagagattatcccagcttccaagaagccatttgaaagttatgtagagcgaattctaccttatgtattttcacggcttattgatccaaaagagttggtgaaaaaaccatgctccataacattggaggttgttggtcgaacatatgctattgatatgttactacctgcactagtacgctcattagatgaacagagatctccaaaggcaaaattggccgttcttgagtttgcaaataaatcattcagcaagtacactgtggactctgatggttatagtaacagtggcttccttaaactatggctttcaaaattggcacctttggtaaatgaaaagaatgcaaaattaaaggaggcatctatttctggtatcatatccgtttattctcattttgattcaacagcagtgctaaattttattctcagtttgtcagttgaagatcaaaacctcttgaggagagctctgaagatcaaaacccctcgtatcgaggttgatctggtgaactacttgcagagcaagaaagaacgtccacgccccaaatcttatgaccaggtggattttggaacttcggaggatggctatgcactgacatccaagaagagctatccatttggacggttttcttctagttcccttgatgctgaagggggaaagatgatcagttcgatgcacgaaccagtgctgcataatgtttctataggtcgaacaacttctgatatgagcatggatcatgctattcaaagtttggagtcatctacaggagctgaagttcatttaactaggagtagggaaccaaagaataacattaactcagttgtggaagctgctcgctcttggacaaactacactgaaaaaactgatgcctctttagatggtgaaactgctaccagtactcctcggttagatgtcagccggtttgtaacttctgatgggcataatactgttggctcaaccactgaagaaagtgttcaagagggtgatatgattgtgaatcttagttctataaagaccagccttcaaatggacaacggtctgagcgtaccacaacttctctatcagataagcaatgacactgaagtttcaagctcagaaaagcgggaagcactacaacaattggtcgatgcttccctcgataacaacagctccatttgggcaaagtacttcaatcaaatcttaaaggttgtgcttgaagtattagatgactctgattcatccatgagggagcttgctttatctttgattactgagatgctcaactaccagaaagatgcaattgaagactctatggagattgtttttgaaaaactcctgcatgtgaccaaagatgctgtggccaagatttcaaatgaggcaaaccaatgcttaaatgttctattggcaaaatacaaccctttcacatgtcttgctattactgtacctttattggtcagtgatgatgagaagatgcttgttgtgtgtatcaactgcttgacaaagcttgttggacgcctttctcaagaggaattgattgttcaattgcctacatttctgccagcattatttgatgcttttaacaaccaaagtccagatgtccgaaagactgttgtgttctgtctggtggatatctacatcatgcttgggaaagcatttgctccatacttggaagggcttagcagcacgcagctccgcctagtaaccatctacgctaaccggatttcacaggcgaggtccggcaagccaatcgattctaaccaatgaggttgtaacattgttattatttgtggtctatatgagcatttctccggtagggtggttttcttgtcatttgtttgtgtatgtgtatagtataaacaagcgcctcccatctgttaagagctcctggtttttgccctgtgtgattatgcattccctctttacgccttttcctctcttttccccctttggtagcttgtggagagtgctaatgagtgtggcttcatttgtactacttggtacatactctgtacaaagaaaggaaagtgtagtttcgtggagaacagttatgcaagtgatttttttgacgccattttccttggcgggatgacagtttgccggcctgtttgtggtgaaatatggcaaaactgttatgtattctcttcttcagctcgatcacttctcttcgtattacgtctgtta

SEQ ID NO: 15441 - DNA, 2011 bp, Zea Mays
cttgtgatcttatattcctatactccgtatataccactcagtcgacttcaaattgtgctcgatgatgagggctatactcctcggtgctctttcccatctgtgtcatcatgcaaagaaattgaagttacaccttctagttctgtctatcactgtaaaattggtgctgttgatgctgctgcaaagatacgatatctggatactcgtagggtctcaaatgatgaagttaaactttttgaatacaagcttctgggggaagtaaggatgctgggtgcgctaaggaagcacagatccatagtggacatatatggacaccaactttcatctaaatgggttcaagtcgatggtgataaagaatataggatattgcagtctataattttaatggaatatgtaaatggaggttctcttaagggatatttgacaaagctactgaaggagggcaagaagtgtgtccccattgatctgtcagtttacattgctcgggaagttgcttgtgcattgttggagatgcacaagaagctagttattcacagggacataaaaagtgagaatgttttgattgatttggaccccaagaggaatgctggtgcacccattgtcaaactatctgattttgacagatccgttcctttgtattctttgtcccatacatgctgtatatctcagcttggtacacacccacctgatgtttgtgttggaacaccttgttggatggctccagaggttgttaaggccatgcatgaaaaacaccactatggactggaaatagatatctggtcatttggatgttttttattggagatgcttacgcttcagatgccttaccagggactttctgacactgaaatatatgatctgatactgaggaagaaacagaggccaaggctaactcaggaactagaagcattctggacaatggatgagccagctacgagactcaagttagggatcacatctgatgctcatgcagataaattgagacacctgatagatctcttctaccagtgtaccagaggacatgcatccaggcggcccaaagctgtgcaaatttacaactcactgtgctccttgcccacatgttacgacatgaggtgaacgttctgatactgtatgaacgcgaaacttgatgcagaagtgcaggggaaggtcaaggcaggacatctagccagcctcagagggtttggtgctctaacccgaacatttcaccgtgagttggccttcaggtgctgccaggcagaacatgagaagtgggaccaaggctagcggctgtggtcgccagagctcctcctgagttggtcagttttgtagcggcacggcatctgcgtccacttgtagtcatcatcagttggtcagttttgtagtggcacggcatctgcgtccacctgtagtcatcatcatgtatgtgttatcacatccattgtttccccttttcatggttgctgccatcacaatggggtttaagttatcaaattaggtcattggtgccccaggggcatttgtctgctagaccgctgcatttacttctctatgtgtattgtattgtttatatctgtttagaaaaaaatgactgttgtccatgtaacaattgatgacatctgctatgtgttattgcgaggttatttgtttatgctgattttaccagccattttcgggcatgagctcttgggaaacctgtatcgtgtacagtctcgacagacaagaatatactgatgaatcttgatttatgtgtcagtcttttcaccatttattatatatatgctcgcctacatttaaaacttagtttgttactttcttttttattaaggtcgacacaaattgattaaattcgttaagatgcgcttgaatacatataacttccggcatacgaatagtataagacgttatttgagacagagcttattagtaagactcttggtcatatataacttcttttttttccacaattttaccgcagactttatattcattacttcacgcaaaacatcaaaagataaacggatctgtaatgtgg

SEQ ID NO: 15442 - DNA, 1167 bp, Zea Mays
aggctcgtgcaccatttcccctggttcccctcaatccaaatagtgccgtcccggcgtcccccccatcggctacctttcctcatcccacgcgacgcccatgccagccacacctgttcgaccacctgacccgcgcgcgccctgatggctcccgcgctcacctccaacccgccctccttccgtcccctcacgtccccactccgccgtcgtgccgccaccgtcccatgccgcgtcggtaagcccggcaaggactcctccgctgcggatgacgctaccggccccaacaagaggcccaacctcttcgcggacttcgggaatgccaagtcgctcatacaggcgttcccgtcgcagtcgctgttcgcgggcggtggcaggggcaggaaggacccgcagacggtgttcgtcgcaggcgccacagggcaggccggggtccgcatcgcgcagaccctgctgcggcaggggtttgccgtgcgcgctggtgtcccggacctagcgtcggcgcaggagctagcgcggctggcggcggcataccggctcatctcccccgcggaagcgcggcggctgaacgcggtagaggcgggcttcggtgaccccgacgcgatagccaagtccatcggccccgccgcgaaggtggtggtcaccgtcggctcggccgagaaagggccagaaggcggaggcgtcaccaccgacgacgcgctccgagtggtgcgggccgcagatctcgccagcgtggcgcacgtggttgtcgtgtatgacgagggggcggccagcggcggccttggcggcgggggctccacttacaatgtgctcgacggcttcacgtccttcttctccaacctcttctcgcgagagcagcaggcgctgacgctgagccagttcttggccaaggtggcggagaccgatgtcaggtatacactggtgaaggcttcactcaccgacgactatacccctgagagctactacgcccagctggtactcacgaaggagggagtatcgcctagcgacacaggcaaagtgtcaaggtcacagattgcagcccttgtagctgatgtcttctccaatgtggcagtcgctgagaacaaagtcgtcgaagtttcaacttcctcgtcagcaacagcaaagaacatagccgaggctttcacgtgttcgaaattcatgattacatgaaac

SEQ ID NO: 15443 - DNA, 1032 bp, Zea Mays
cgtccgcccaggccagccccgcccccgcccgcccactctcccgagatgggttccgaggggccttctcccgtcaccgtccacgtcaccggattcaagaggttccatggagtcgccgagaacccgacggagaggatcgtgcgcggtctccagccattcatggagacgagagggttgcccaagggccttgttctcgggagctgcaccgtccttgaggccgccgggcagggcgcgcttggcccgctgtatgaactgctggagtcgaccgtctccggccgggaacgtcaggagcgagtaattctgctccattttggcgccaacagtggttcacataggtttgctcttgagaatcaagctgttaatgaagctactttccgttgccctgatgagctaggatggaaaccacagaggacacctatcatatcgtcagatggaagcatcttacacgcaagacagactacactgccagtggaggagataagcaagtctctccaacagatgggatacgacgtggtgccttcagacgacgctggtcgatttgtgtgcaactacgtctactaccactcactcaagtttgcagagaagcatgggatcgggtctctgtttgtccatttccccctcttcctggcaatcgacgaggaagtccagatgcagtttgtcgcttcccttctagaggtcctcgcttccttgaacttccagtgaacctagtggtagatctaccacttcccggtggtgtattgttcccagattatttgggaaaggtttaagttgttcccaacttacctgtggagaataagatcgaggaatcattcgtggaattatgtgtgtggttcaaaatgtgtaggggaacaaaaacaagtcttctcaaagaacatgtacatgcagtccagatgttaatatcccaagcggtttatatgacaggtgctgttgcagcgttgttctcagagatgctgcttatggatatactgttcgctttagattaaaaccggttgtttagactgatacaactgtaatttataaaaacaaaaacactgt

SEQ ID NO: 15444 - DNA, 1494 bp, Zea Mays
gtctgcttttatctgtcggtatggtcctgatagggttcttgacacgcctatcacagaggctggttttactggcattggtgttggtgcagcttatcatggtcttcggcctattatagagtttatgacatttaatttctcgatgcaggctattgatcatatcatcaattcagctgccaagtcaaattatatgtcagctggtcagatatctgttcctattgtttttagaggaccaaacggagctgctgctggagttggtgctcaacactcacagtgttatgcagcttggtttgcacatgttccaggacttaaggttctcacaccatactcttcagaagatgcccgaggcttgctcaaagctgctatcagggaccctgatcctgttattttcctggaaaatgaattgctttatggagaatctttcccagtttctgctgaagtgcttgattctagtttttgcctaccgattggcaaagctaagatagaacgtgagggtaaagatgttaccattactgcgttctccaagatggttggctatgctctccaggctgcagagatactgtccaaggaaggaatcagtgctgaggtgatcaaccttcgatcaatcagaccacttgatagagctgctattaatgcatctgtcaggaaaaccaaccgattggtgactgttgaagaagggttcccccaacatgggattggtgccgagatatgcatgtctgttgtagaagaaagcttcgcgtaccttgatgcaccagttgagaggattgctggagctgatgtacctatgccctatgctgccaaccttgagagaatggctgttccgcaggtcgatgacattgtgcgggcggcaaagcgggcctgctacagggcagtaccaatggcagcagctgcctgattggtggacaagcctttctgttttccttccatcggttttcgctctctagccagaaacatgtagtattcataaggcgcaggcaaattggccggaacccagactccaagcgagctaattttgtagatctgccatggtgtgctttgtcccgttagtcgatatatgtggcgttatttctagattcaagtccatttgcttctctatgatttttgtacaccgctaaataatcttcttaagcccctgaatgaatgcaaaatatttaagatgttttaggaaaatactatggttttgtgaaataccttggtttaggagtaacatgaaggcgctcaaagtgaaatcactaagctaatagatgacttgataattttaaacttcttgacacataataaaccttagagaacaaatgcgtaaaaatggaccaaggccgatttaaaataagattttgttgtttgctgatcaatatgaccatttagagatattatttgccagtaattttttttctatagtttaaaggcacaagtgaacttcgactaagataaagggatgattcggatggttaatacctcaaccaagacatcataagacatgtgaagaccaactagtac

SEQ ID NO: 15445 - DNA, 202 bp, Zea Mays
cgcagcgccccgaggggcgcgccagaggcgcgcggataccgtccgcgccgacgacggctgccgggggcgcctagggcccccgggcttgggccgccggcgcgggcgacaacggtccacgccccgagccgatcggcggaccagcaggagccgttccgcatacggccggggcacgtcgccagcccccatccgcttccctcccggc

SEQ ID NO: 15446 - DNA, 866 bp, Zea Mays
ctcaccctttctctttctccctcgaccgccccggatctatctcgccgcgccggcgcgcagctgagccgccgaagcgaggaggcaatcgaggcggacgaagcgccgcaccaaattcgacgggggatcgagcaccagaggcgtagcgcaaaatgttcaagttcctcaaggaggtggtcgcgggatccggatcgggactcaaggacttcccctacaccatcggcgagccctacgcatcggcttggggctcatggaaacaccaccgcggtacctccaaggatgatgggtcgcctgtgtcaattttttctctgtcagggagcaaccctcaggacagacacatggttgctggtcgcaacggtgttaagagattacgaacagtgcggcatccaaatatcttatcctttttacacagtactgaagcagaagctgcggatggacctgccatgaaatacacaatttatattgtaacagagcctgttatgccactttctgaaaagctcaaggaactgaatcttggtggtacacagagagatgagtactttgcatgggggcttcatcagatatccaaagctgtgagctttctcaataatgactgcaaacttgttcatggtaatgtatgcttggccagtgttgttgttacacaaaccctggattggaagcttcatgcttttgatgttctgtcagaatttgatgctaataatgaagcctctggtagccccatgttgcaatttgaatggttagttggaacacagtacaagccaatggagctgtcaaagtcagattgggcttcaattagaaaatcacccccatgggccattgattcttggggactaggaatcacgagccttttgttggagaagtcggaggct

SEQ ID NO: 15447 - DNA, 221 bp, Zea Mays
attctttcactcactctccagatccggtgcttgtgggagcctaacacgccccccgcctccctctccgccgtcgccgagtccctcgccggcttaccccgtcgctggcgaaggcactccggcgtggacgcctcgccgccccgcgggcggcgtcgacggtcggttttaggcctcccggaggctgcatcccgtgtcgattcgagtcaggatcctgggccaaatgc

SEQ ID NO: 15448 - DNA, 1548 bp, Zea Mays
gaaaaagaaaagaagcgttaaacatcatattatgaatggatggagtaacttctgaattcaagagctatcgctcctgatgtcctggactctgattttcttggacttcaaactttgcgccatttgatgcgtatgacccgaacatgggattcaacaatgtcaatgcttcctaaaggtggtgatacaatttggggaaatctggattggtctccagaagatggccttgaatgtaaagctaagaagcataaaaccaatgataccgaggtttctaaggatagcaatggggaaaatatcgaagttcaacctgaacctataaactacggaaggctggtatccttcggtaaagatgtagcagaggcaccttcttcagagattgaacagatagaatttcgtgatgctgttaaaggtaacgatatcgtccattcaaatgcatcatgccgggagatctggacagagtaccatgaattaggatggggtggaataaaggcagtcgcagactacaaagtttacactgccagttctgttatagaccttcttcactttgttgctccaaggatgatgcagcgtggaaatgtccacttttcatatggaattgctgataacttggatgatccgaaatatcaacattacaaatattggtcaaaccccttggaaacaaagctaccgaatgctcctgacatggaaataatttccatgtacggagtaggcattcctactgaaagggcatatgtctacaagttggctccacaggcagagtgctatataccattccggattgacgcctcggctgatggcggggaggaaaacaaatgcttgaaagggggtgtttacttagctgacggcgacgaaactgttccagttcttagcgcgggctacatgtgtgcaaaagggtggcgtggcaaaactcgtttcaaccctgccggcagcaagacttacgtgagagagtacagccattcaccaccctcaactctcctggaaggcaggggcactcagagcggtgcacatgttgatataatggggaacttcgctttgatcgaggacatcatcaggatagctgccggggcaaccggtgaggaaattggtggcgaccaggtttattcagatatattcaaatggtcagagaaaatcaaattgaaattgtaacccatgggaagttaaaagaagtgccccaacccgttcattgcgttcctaaatgcttgcctgagcgcaactctggattttgcttaaatatcgtatttttttcacgcctcattcgtccctctagtaaatttacattgacaggaccccggtgcgacgcggatgttgtaccgtatttttggcattgtatattaaaatgtacaggcgtaagttacatttgctagctgaaattattgcagtagcttgccttttcttttgagcacggaagtgtgctctccattacgtgataacctgtgccaaatctttgacaatcatatcctgaatataagatggaacattatttcgttgtgtgaccatattacaagagcggggaatgtaattgactatccttgacacaaaattacataacagcaa

SEQ ID NO: 15449 - DNA, 2045 bp, Zea Mays
atgcgacccgcttccgtggttctgctagggatttaatcctttccggattagatccatacttgaacacagatgctggtacaatgtccccctttgagcatggcgaggtgtttgttcttgatgatggtggagaggttgacttggatttggggaattatgagcgtttcatagatgttactctgacaagggataacaacattaccactggaaagatataccagtctgtcattgagaaggagagaaggggtgattatcttggaaagactgtacaggttattcctcatgtcactgatgaaataaaacagtggatacagtcagtgtcttcggttcctgtggatgggcagactcgtccagctgatgtttgtgttattgaattgggaggcactgtaggtgatattgagtcgatgccattcattgaagctttgcgccaattatccttttctcttggcaaggaaaatttctgcctcatacacgttagccttgttccagtattgggtgtagttggtgagcagaaaactaaaccaacacaacatagtgtacgagaactgagagccttgggtctgactcctgatcttctagcatgccggtcagcacagccactaataggatctgttaaagagaagctttcacaattttgccatgtcccggtcgagaacatacttaacatccatgatgttccaaatttatggcatgtcccacttattcttagaaaccaaaaggctcatgaagctataatcaaacaactaaaccttgctagatctgctggaccacctgaattacgagattggacagatatggctgagtcgtatgacaacctcaataactctgttaaagttgctttggttgggaagtatactaatctgacagattcttacctatcagtggtgaaggctctcctacatgccagtgttgcctgttcgttaaagccatctatccagtggattgcagcttcggatcttgaagatgcaactgcaatatctgcaccagatgcccatgctgaagcctgggaaactcttaaaggttcatcatgcattttgatacctggaggatttggggatcgtggaatttcagggatgatattggctgcaaaatatgctcgtgagaatagagttccatatcttggtatttgcttgggcatgcagatatcagtgattgagatttccagacatgtcctgggcctggaagatgcagacagtgaggagtttaacaaggatacaccgaatcatgttgttatgtacatgcctgaggtttcaaaaacacatatgggaaacacgatgaggttgggctgcaggagaacattcttcagcaaacctgattgtcttacatcaaaattgtacggaagtcctccacatgtagatgagcgtcatcgtcatagatacgaggtcaatccctcttttgttcccatgcttgaaagtgctggtcttcattttgttggttgtgacgaaagtcgaaaccggatggagattgtggagctacaagatcatcccttctatgtaggtgttcagttccacccggagttcaaatcaaggcctcgaagaccttcacctccttttacaggtctaataatggcggccactaaacaactgggagcaaattcgaatagctcgaatggcttcgttggagcttctgactaatgtaaggtaaagcgttccgaaacttggtgattccccaaagatggggatctcccgttgctgcagacacccaagttatttcttgtgcacattagatgtacaggaaaacaatctaagcctgaagcagagtgtttctctctctcgaccacctgagtggcgtaagctaacggtcttacagtgtattggggccgaaccgtcatggttttgttgactgtcatttcaattgagcttaacagcagtcagtgctcccatccttgtgattccaattgagattaacagtagtaagtgattatgatctctcttgccgtttgagtggaagtgaaagacactaccatccagtttttggttgttatttgttctgatttttttgtgtttgttttctatacaaatgtgaaaaacatagaatataaaaaacaa

SEQ ID NO: 15450 - DNA, 122 bp, Zea Mays
tcccatgtctgtatacccatacacatccatggggtactgaattcccagaaaagtaaatactccatatcgcagctttcatatatacatatgtggaacatgtatataatcaagcgcaacaatca

SEQ ID NO: 15451 - DNA, 2394 bp, Zea Mays
aaaaataataaaagtacaattacagtaataacgagtgaacagccatgtcttcactgcatcatctgttcgaaaccagagctatcaacctttgagtgcaggttaacggttttcttttgggtgattccctgtttatccttgcaggatataatgcacatgggcccatggatccggctgcttttgcgagggaaagaaatatgccttctgattcagataggatcttaaatgaagacaagtgtttcatgtcttgtagtatgccacgggagcatcagaagttctttgatgttcctgcggctagtgttagagaacttcatttgcaaagtgatgcaccttcaacgagtgaagccaattgttcacgtggaagaatgatatctggagatctttttgctccaagaacaaggagtctctctcctatcccaaaaggccatgcattcgctgtgagcaatggaaattctagagaatttggtttcagcccgaggtcaccagtaagaaagatggatggtttgaggagcccaccacatcccttgcctcttcctccagcttctggtgcatgctcgcctcttcatccagcttctggtgcatgctcgcctcttcatccagcttctggtgcttgctcacctcttcttccaacccacagtttttgctcgcctcttccttcgtctcccagttcctgcccacctcttcctgcatctcccactaactgctcacagtcccagtcacaatggaagaaagggaaattgctagggagtggtacatttggtcaggtttaccttggatttaacagtgaaaatgggcagttttgtgcgattaaggaggttcaagttattatggatgatccacattcgaaggaacgactcaaacaattaaaccaggaaatagatatgcttagacaactctcccacccaaacatagtgcagtaccatggaagtgagctgagtgatgaatcactttccatttgtcttgagtatgtttcggggggttcaatccacaaattattaagagaatatggctcttttaaggaacctgtgattcgtaattacactgggcaaattcttgctggccttgcctacttacatgggcggaacactgtccacagagatatcaaaggagcaaacatactcgtgggtcctaatggtgaagtcaagctggctgactttggcatggctaagcatatatcatcttttgctgaaatacgttctttcaaaggaagtccttactggatggctcctgaggttataatgaactgtaaaggctacagtttatcagtggacatatggagtctgggctgtaccattattgaaatggcgacggcaagacctccttggcaccaatacgagggggtagcagcaatatttaagatcgcaaacagtaaagatatacctgaaatcccagacagtttctcagaggaagggaaaagtttcttgcagctttgcttgaaacgtaaccctgcatctcgtgcttctgcagtccagctgatggatcatccttttgttcaggatcaccctgcagtgagagctgcaaaatccagtgtattgagaaacacaccatcttctccagcagatggcagacacacaatgtccaacagggagttgccatctcggaaaattataactcctctgaaggatattggactgggcatgagagattttactggattttccactactgttccttcaccacacagtcctattcctggaagagcaaacatgtctacgccagtttcaccatgctcaagcccgctgcggcagtttaagcaatccaatgtgaggggcatgcgttctccacctcatccaatgctctcccctggtcttggcaacacagtaagttacacccaaaatcagacaagacgcaatccagctcctgccatttcagatccttggatggatgttggccagatgaaactccaaagccccaatatttcccccagaaggttctgagaacgatttaaatataaaaaaagagaatcatgggcgcaatatatccatgacaagttagttattaagagatgttcagtaaggaacttgtttgtgtagttactacaatacgacactcaccagagattcagtacagcgaaatggggctcttgagaatttgtaacaggaagttctgtatatccttaggttttaaggtttgttgtcgcccttgctatatgtagttatacgtgtacacgtcctgatgtaaaggttcacaaaaaatcttacagatgaccacgggatgtaaattcgaaagtttgtgcaaactggtatttctgtgtagtagttaggacttccatggcagaagtaactatgcacttccgattgaatcgagtacaatgtccagtttcatttccatttcatcactggaatcaagcatgtaactaaaaagagagtaagagagcggggtgcagattatattttg

SEQ ID NO: 15452 - DNA, 727 bp, Zea Mays
ctacgttatcttgaaagttcctgggaggcagctgaggaaccccagccgattgattgggagtactacagaaaaggaattggatcaaaagtggtggatatgtacaaagaggcttttgaaagcatcgagatcccgaagtacgtcgacacagttactccccagtacaagccaaagtttgatgctgtgattgctgaattaaaggaggctgagaaagagcatcagaaggagtcagaaaggatagagaaggaacttgctgaaatggaggaaatgaggaaaaagatcagtacaatgacagcagatgattactttgagaagtaccctgaactcaggaagaagtttgacgatgaaatccgtaacgataactggggatattgaagagattggagagaactcttatgatgccatttccatgtccgtgaagaaccaataattttcctgtgccctgaattgggtggtttccatagcatgtgcacggggtttgggtggaatgcctacagaatcgactgtgtcaagctttcttgattccgtagaaacatgttttgtttgacctcatcatagaggatctccgcttttatcgtacaaagattgtgatatgttcttagcttctttctacctgaataagaggatttctgcagacccttttccaactgactttctgtgacgcattggtctggatgcttaatttttttgttcggtgcaagtgtggcacttgtcctacgttatgacctgt

SEQ ID NO: 15453 - DNA, 665 bp, Zea Mays
agattacagtgctggccccctggcaggtcatgctgaagcaggctgatggttcctatgcatgtgtcgctgagagcgaagctcggttcactttgggacaggcgaaagaagaactattgagagttattggtttacaagaagaagagggaagctcccttgaatttctcagaagaggatacaagaatgctacctggtgggaagagaacgttgatcaggagacgtcgtctgcctggcgaacttgagatgctatacttgctggatggatgcttttctaacctggaactgggaatggataatttggccaacgagtgtccatgtcttgttgtatggaactaaaaaatctgaaattacagaaagagaagtccatgtacagcgtaataacattgcctgtgatgatcgtattattattattgttgttattattatgcgagtacacagagcttgtgagcactaagaatgtttttttacaatggtgatttgtacatttgttctgtttgtggccttgggcacttcagcttgaatgcgcagttgtaaaaaaaagcattggattggtttgagtattagaaattgttgaagtgtataagtggattgactaccttcttccatcagcttgagcttttgggtcgtccactttaacatggtattaaagccagaggtctcgagttcga

SEQ ID NO: 15454 - DNA, 1984 bp, Zea Mays
gtgccgcacatcacggatgagatacaggactggatcgaacgcgtcgcggtggtcccagtggacggcaaggaagggcctcctgacgtctgcgtcatcgagctcgggggcactataggggatatcgagtcaatgcctttcattgaagcgttaggtcaattctcgtaccgtgttggacctggaaacttctgtctcgttcatgtcagtcttgttccggttctaaatgtagtcggtgaacagaaaactaagcctacacagcacagtgttcgagggcttagagggcttgggttagcgccggatgttttagcatgtcgcagtactgagccattggaggaacatgtgaaggccaagctttcacagttttgccatgtcccggtctcaaatatagtgaacctccatgacgtgacaaacatctggcacatccccttgctgctaagggaccagaaggcccatgaagcgattctgaaggttttagacctccagtatgatggaaaggtgcctcgggaacctgagctaacaaagtggactaaaagagccaccaagtttgacaagttgaagactccggtcaagattgccatggttggaaaatacactggcctgtcggattcctacctgtctgtcataaaggctcttttgcatgcatcggttgctatggaaagaaaacttgtagtcgagtgggttccttcctgcgacctggaagattcttcagctaaagagacccctgaagcccataaaaaagcatggaaattgctgaagggcgcagatggcgtactcgtccctggagggtttggggacaggggagtccagggcaaaatcctcgccgcgaaatacgcacgcgagaacaacgttccttatcttggcatctgcctgggaatgcaaatcgcggtgatcgagtttgcccgctcggtgatgaagctacgaggtgccaatagcacggagttcgatccagctacgacgtcaccctgtgtcatcttcatgccagagggctcaaaaacccaaatgggagccacgatgaggcttgggtcgaggaggacctatttccatgtcagtggctgcaaatctgcgaagctgtacggcaacgccagctctgtagatgaaagacatcgccacagatacgaggtgaaccctgacatggtcccagactttgagaaggccgggcttcagttcgtgggcaaagatgagagtgggaaacgcatggggatcgttgagcttccctctcacaagttcttcatcggtgcacagttccatcctgaattcaagtcgagaccagggaagccatctccgcttttcttagggctgatagccgcggcgtctgggcagctagaaccattgcttcagcgcagcaatccgacaacgaaagcatgttcgatcagtaaagtcccgaaactgaaactgtaccccactgggcctgtgaataatccactgaacagcttggtgaacgggtactacccaaatggcactgggatccacacctagaagcgtagcgcttagcgatggtttggttggtatttgctgctatggtttttttgcttgtacccctcctttttcatgtgttcctttttttcagtttgttatttgtctctgatcaactgagagaagagaaggctaagattcagcaagcccccagctccagcgacacatggttccgacatttttaacgaggaacgccttccagtccgttgaagcgagctagccatagggtggtgaggtctagtgtgatgttgttgttgtttttttctctttcctttttttttggcctggaactaaggcgcgaagtgttttgagtagcgctagtagagcctggaagaagttatctaaactatttgtacattatggaagaacttatctaaggactgaatacacaaatgcttggccatgattgctttgttgccacaatatgaacaaccacgctcagatgaagagtattggtgttgttaaaaaatgccagtgaaattgttgttgttaatgtttgtgcctgtgttgccct

SEQ ID NO: 15455 - DNA, 1293 bp, Zea Mays
ggttaaatttgtgcatgaatcatgatcagatggatggagactatcggaatgctgtcaaattggtcattgaatttaaggagaccggtctcaaacctgaggtgtatagctatctcattggcttgactgccttggttaaagagcaaaaagaattctcaaaggctctgcgaagattaaatgcatcggtgaaggatggctcaatttctaaactggatgctgagagcatgcatagtatcaacaagtatcaatcggatttgttaagtgatggtgttcttttatcgaactgggtagtacaagagggcagcagcgaagttctaggacttgtgcgtgagaggctcctatcattgtatacttgtgctggttgtggcttggaagctgagcaccaactttgggaaatgaagcttcttggccgagaacctgatacacagctctatgatgttgtattggcaatttgtgcttctcaaggggaagctgctgctgttcgccgcttgcttgcaggagtcgagtcaaccagcgccggaagaaggaagaagtctatgtcatggctactgcgaggctatgtcaaaggtggcttcattctagacgcctcagaaacactcattcagatgctggacatgggcttgcttcctgattacctggatagagctgctgtactgactgcactgcggaggaacatacaggaatccggcagcctagagtcctacttgaagctttgcaagcgactatctgagacagatctgattggaccatgtattgtgtatctatatgtccgcaaattcaaattgtggatggcacacatgctttagagttctgatgaaccctttcgtcatatatccactcatggcaggtacaaaatggagatctctaaaaaatgtgtgtggctcaaacgcttgtccctgatgaacaagacatagaagcttcaatttcggtgaaccggttggtacataataatggttccttgtatatttttgaccgaagtagaggtatcaactggttgtttgttgtaaacagcgctgttgtagtactctgaacagagtccatatcgtacatgtaaattctctgtgtcactgttctcatatgcagttgctgttgaaatctgtgcgttactgcagcctgtaggggataggcaaaatggaaacttttgttgatataaatataatgtacagttctgtcgtgactgaacttctaaagttgtaccgagatgaacttctaaagttgtaccgagattacacgatacatctctgtttttctgtttgtggtgtggtttgtggcagtaactgaatgtaacttggtttg

SEQ ID NO: 15456 - DNA, 1563 bp, Zea Mays
cagctgtagtcagtacagtagcagctgtaaactcaatcaattctttcatgattgttctcccaaagctcgggaggttacggacttctctttcgaccatcagattacgccggttctgtttgacagcctgactcgagatgattcggaagaagagcagccgaagcagcctgcgctggaaaagaggggtggttatgtctcccagtcagcagtggctctgcgttgccgggtgatgcctccgccatgcgtcaagaatccatacctcaataccgatccatgcatagatgctgctgtttacggtgggaggcagtgcaactcagcagtattttctccttcaattggtggtaatggtctttcacgctatcgaactgatttccatgaaatagagaaaattggttatggcaacttcagtgttgtgttcaaagttctgaataggatagacgggtgcttgtatgctgttaaacggagcatcaagcaattgcataatgatatggaaaggaggcaagcagtgaaagaagtccaagctatggcagccttaggttctcacgagaacatagttcgatatttcacctcttggtttgagaatgagcaactttatattcagatggaactctgcgaccgctgtctatctatgaatcggaaccagccagtgaagcgtggggaagccctggaactgttgtatcagatctgcaaaggcttggatttcatgcacgaacgtggcatagcacaccttgatgtgaagcctgataacatatatgtcagaaatggtatttataagctcggggattttggctgtgctacacttgttaaccggagtctagcaattgaagatggagattcacgctatatgcctccggaaatgctgaatgataagtatgagcatcttgacaaggttgatatcttttctcttggggcagccgtctatgagctaataagaggcaccccgcttcctgagtctggatctcactttacaagcattagagagggtaagatcgcattgcttccagggtgcccgatgcagtttcaaagtttaatcaagtctatgatggaccctgatccggtgaggcggccttcagcaaaggagatcctgagacacccttcgtttgacaagctccacaaggcctcatcgaagtagaagtgctgccgcgcccccgtcagatcagagcagccggcaaagggaattccgcagctgcgtcacattcaccatcagctgctcccaatttttgtgtatctatctatctatatgcgtgtgccatgtgccctgttctgatactgtagaagatggttggaaacgaagcagggatctgattttaactccaggaactggagcacgagcagcgtctgtaaaggactaaaaggctgttgctgctgttgtgttaaggttgtgcctctttttggtttctgatgcacgcttgaaaccatcaaccctgtgcctttttttggggtgcttgttatcagttgcatctggacagcgaatgctaatttggaatttttctctccagttagaccttatttgtttgtgcggattacaactggaaagtccatataaattagagaaaactatttcag

SEQ ID NO: 15457 - DNA, 648 bp, Zea Mays
cagacgggtgacaatccgagcttcccacccagcaacaatcagtccggggatggtctcagttttcatgaaaggttctatggatcacgcggaagggacgagagcagatcaaacaatgatggattccgtgctaggagcagaagtcctggcaagcctgtggaagtttccaactggtgattgcatccactaggtgcaatccaatttttgcgatggtgacgaaaccaagtaaaagatggtacctcgacaagttatattttcctcttatcctgcttaaatctaaggatgtcctggaacatcactaacttaggatatgggtgatggtctgatcccaatggacaatggtctcctactttcttgatttgacgcctgagagacgcctgattccataccatatgcctgtggttgtagtttgtaaaatgttaaaaacttgactttgctagtatatttcctaatgctataacccaatcctgggtaaacagacgcatggggatgaattttggacggaaccatggacatttgatgtatgtgtttaatgttgtgtacaatctatgtcgaattctgttgtaagtgccgtccgcatcgttttatatctttgtgcccgttattacaggtcttaaagaatcatgctgcccgtatgtgactcttctcatg

SEQ ID NO: 15458 - DNA, 1372 bp, Zea Mays
ccagtagcatatttacggttaggggtgggtaacagcactctaaactttcggaccaaaccatgcatcgggatggcattagcgtggaaaaacaggacccagcaaccacggcgtctgaacaaggtactctgcatgtctgttcaacaagcaagcagaagcaaggttgctgtcgtgcccatcgagttggagaaggcaaaggagccaccgctccacctgtacaaaccaaaggagccttacacggccacgatcgtctctgtcgagaggcttgtaggacccagagctcctggcgaaacatgccacgttgtcattgatcatggcggcaatgttccgtactgggaaggacagagttacggcgtcattcctcctggagagaatccaaaaaaacctggatctcccaatactgttaggctctattcaattgcttctactaggtatggtgattcttttgatggaaagacagcaagcttatgtgttcgccgtgctgtttattatgatcctgaaactggagaggaagacccctcaaagagaggtgtctgcagtaacttcctgtgtggctcaaaaccaggggacaaagttcagatcacaggcccctcgggcaaaataatgcttcttcctgaggatgatccaaatgccactcatatcatgattgccacggggaccggtgttgctccctaccgtggctacctacgtcgcatgttcatggaagatgtcccaactttcaaatttggtggtctggcttggctcttccttggtgttgcgaactctgacagccttctctatgacgaagagttcacaaactaccttcagcagtatccagacaatttcaggtacgacaaagcgctaagcagggagcagaagaacaagagcggcgggaagatgtacgtgcaggacaagatcgaggagtacagcgacgaaatcttcagactgctagatggcggtgcgcacatctacttctgtggtttgaaggggatgatgccggggatccaggacacgctcaagaaggtggctgagcaaagaggcgagagctgggaccagaagctgtcacagctgaaaaagaacaagcagtggcacgtcgaggtttactaggctataagatggcaaggattgtgattgtttagctactgagctgagaaactggacgtatgattgaacgactgtggctgctgcgatgtaatgtaacattgtagacttggattcataagcttctgctccaaatggtgaataaaatgaagcacgcggtttgtagctgctactaccagtatcaggacagtttctttttgctcgtttcgtataggttgattaagctatttttaagggtacatctccttgctttatgttattctgaattttcttatctgagatgcattattgaatt

SEQ ID NO: 15459 - DNA, 481 bp, Zea Mays
atatcatgaattgctagtgattcagctggaagaacaaagaagcagctgatgatccaagtagcagagctagttcccaagcatcacggaaggacaaagaagcaggagccagcgcccaatcccggtggcagttcaaagaacacaaaaggcgggaaaaagaaaaagtgatgcagtatcattgtgttgttttttattctgttcgtcatcatacactaagcttctgtgaaaaaggaaaagtcttggacgttgttgttatgttgccattatgccattttttcatgtataagaacttactaagaatcttccattgactcggtaaaatgcaacttaaaaaaatttggcgtcgctagattaaagggccctttgacaaggcttcaccttctatggctattttgtaattcgtttgacaaaataggttctcctatgttttgcaagttgcaagttgtagacggtggcaaggaccataatttcaaaaaaaaaaata

SEQ ID NO: 15460 - DNA, 1360 bp, Zea Mays
aagcagaatgcagtgaaaggctgccattttaaaaccttgctctccggtataaaaaaaccttgctctccttctccgctcgatccccaacccacccgcacggcaccaccaccaatccatccatccttacgcattagctacactccccggcgtcgagcccccgcgaaccctagaccgccgccctcgcatctccgctcgtcgccgcggggtactccctccacccgtctagtgggagtcgcggcgggacgtccccgatccgagctctctccgccttagggtttttggggccggccatggactccatggagcagccggagcccaaaaccgcgggccactactacgcccttcaggttggctccgttttcctgacgggctactacaacgtcctgacgaaccagccgcacctggcgaaccagttctacacggacaacagcagtgttgttagactggactgcgagacgggtcggtggtcgtttggagagacggtggaggttatcaatgatatgatgatgtccatgaaactaagcaaggttgaggttaaaacagcgaatttcttagagtcatgggctggggcgattacgctgttggttactggcctagtgaaattgaagcactaccctgttcgcaagcgatttgctcagaatattgttcttgctccaaaggaagatggatattttatattcagtgacatctttaagctcatttgtgatgagtatgatgatcagtacccttttgctgattacaattgtgctgacaacatgccccaagtggaagcgtcttacacaatggctgaaatagggtctgattatttggatggagaacctgaggcacaggagactgttgatcctgctgaaaatcatgtgcagcaccaagattatttggaatataaggctggcaatgtgattgatgatgaaactcatttggaagagcatattcccccattccccagttcaacggatgttaaaagggattcacctcttgctcttccccaccctccatcacctaccctcgaagaacctgtggaagaagcacccaagacatatgcttcagtgttgcgaacgaaatcaaaggcaacgctggcgattacagagtcacagcaggctcaacagctggcccagcagccacagtctgcctcagtgcatgaaaagtctaacctggacaaccaccgggatgttagcgtccctgaggatgaagaagagtttctttcggtttatgttgggaatctttcgccatctacttcggtctttgatcttgagaaagtgttccaggcttttggaagaattaaacctgatggagttgctatccgaagccgaggctggagtattctttggctttgttgagttcgaagacatgtctggtattc

SEQ ID NO: 15461 - DNA, 607 bp, Zea Mays
gtcttactgaccaaggcaccaagcaatttgcttatacaatggagttagaagccgaagttcagaaactcagagagcagaatcaggaactggagaggaaacaggcagaaattatggaaatgcagaacaacgaggtatcagaaatgttgaaggatccattcggacggaagaaacggctgtgcttgcgaagaacgttgacggccccctggtgacgattgcctagaacagcacatgacttgcacttgctacgtacctgcaggggcgtttgggatctgtagataatttctctcctatagtgtagcgatgaacccatgaacatgaacataatctaaatgattgtactgttagctcccttctgccgcttacgtagtactggagtaccgtattggtggagtcgaaaactgacatgtaaattatgtacgtagtagagaacaaaatggagtgaagccggtcgcaagagttgtggcttcagtcatcctccagagcttgtgcagagttgcctaggttttgcatcttgctggcacatccagactccagagcttgtgcagagttgtctaggttttgccatcttccagagcttgtgcagagaatgaatgattttaaaagatcc

SEQ ID NO: 15462 - DNA, 2455 bp, Zea Mays
caagcatgctgtagttataacgtgtcttctgtacaagagttcctggagagtacttttgtggtcttgatgctagtggcagaaggtacgatactgatcaaagacctgaactctctaagggaactgtagagtttgttgctccaacagaatatatggtgcggccaccgatgccgccttcctatttctttattattgatgtgtctgtatccgcagtacagagtggattgcttgaggttgttgcaaagaccatcaaatcatgccttgatgaacttccaggctttccacgaacacagattggattcttaacctttgacagcaccttgcattttcataacttcaagtcttctttgtcacagcctcaaatgatggtggttactgatttggatgatgtttttctgccattgcctgatgacctcttggttaatttggtcgactcaagacatgttgtggaatcatttcttgatagcttgccaaatatgtttcatgacaatgtaaatgtggagtctgctcttggtccagcacttaaagcagctttcatggttatgagtcaaattggggggaagttgcttgtcttccagagtactttgccatctcttggtattggtcgtttgaggttacgaggagacgatgtccgtgcatatggaacggataaggagcatactctgagggtaccagaagattccttctacaaacagatggctgctgaattcacaaaatatcagattgcagtggacatattttctttcagcgataagtactcagatatagcgtctttaggatctttggcgaagtatactggtggtcaggtgtaccactatgcatcattccagacacctacacatggtgacaaacttaaacttgagcttagtagggaccttacacgagagactgcatgggaatctgttatgcgtatcagatgtggaaaaggagtacggttcacaacctatcatggtcatttcatgctacggtccacagacctgttagcccttccagctgttgactctgataaagcttttgcaatgcaactgtcgctagaggagacattaatgaccacccagactgtatacttccaagtggcgttgctatatacatcatcctctggtgaaaggcgtatcagggtccacacagcagctgcacctgtggtcacagatcttagtgaaatgtatcgtcaagcagatactggtgccattgtgtcattgttgggtagaattgcgattgaaaattcactgtctgataagctggacagtgtccggcagcagttacagttgaagctcgttaaaagtttgaaggaataccgcaatttatatgttgtacaacaccggataggcgggagactgatttttcccgaatctctaaggtttttgccattgtacatcctggctatctgcaaatctcttgctcttcgtggaggttatgcagatgtttctcttgacgaacgatgcgctgctggtttctgcatgatgatattgcctgtaaaaaggctgctcaattttatctatccttctctgtacagagttgatgaagtactcacaatggaaccaaacaaggttgatgatgtttcattgaagcgattgccattaacgtttcagtgtttagatactggaggtttgtacctccttgatgatggcttcactttcctagtgtggttaggtaggatgctcccgcctgaacttgtgaacaacattcttggagtgagcttggcaaacttccctgacctatcaaagattgtattgagagagtgtgacaatgaattgtcaagaaatttcatgaaaatactaagatccctgcgggagaaggatccttcctatcaccagctatgccgtgtggtgcgacagggtgaacagccaagagaaggctatctgcttctatctaaccttgttgaggaccagatggctggaacaagtagttacgttgattggatacagcaaattcaccgtcaaacgcaaagctaatgacgaagaaccaacaggaagtgatgcttggaatttttgccttagtgtaaactgctgcaggatgtagattcagctgctgccggttccaaatcaatctcgcaaccccgtggcagatcttgttcagaagccagcggcccaacatgccggcttgtaagcagcatttgtctggcaaaaaaaatgctgttaatatctgtccatgtgattattctatttttgcacagtgagaatacagctgttgtatcggaataagtaggcaacaataccgtgggtattatacaactgggttcgtgtagtggcctgtgcgtttattaatcgcgttctttcctcatctggattcagttacttgccatttgggttataaatagttcatcgtgtaaactaactttttggctactttagtctgtttgtaatgggatatctcatttaatttaactgacattccattattcggacgttcctttatccgtggtttatttgtataaccactaaaacttgtagctttagag

SEQ ID NO: 15463 - DNA, 784 bp, Zea Mays
cacttcttttcaagtttcacagtggagagctacctttggaggttgggcggttcaaagaagaactgttgttaggactccatgatatcagcaggaagactgaccttgttattgcggtgcataacctagcacaccgaattccacagtatcaacggtccaatacttctcagcctcagcctgctctttcacttctcttggatgaagctaaggcgctaagcattccttggattcttgcaataaccaacaaattctctgttagtgcgcatgagcagaacagattgatcagctcagctatggaagcatatcaagtttctcctgagatgacaaaagttgttaactcttccccatttctgatgccaagtgctagaaacagtttgcagcagatcagatcagctactgggaagttgaagaaggatccagcaaatagatctggttatcttcctgtaaactttggattgtcatcatttcagaggaaggacattgttatgcatgtggagggtgttagttcccttcgtcaacttgtacatcaagtagtcctcaacaatgaagaaacagcatttgaggaacttgctcgtgagagattgttgaaggagctagcgtcagagaaagcagcgtccctgcaagtgaagcagaagccccggaaaagagatggctctgttacagctgctgctgtaggtgcatctctgggcgcgggcctgggaattgtaatggctgtgataatgggggcagcatcagcccttcgaaagccgtgattcatgtttctgaagaatgcgtctatattgagggc

SEQ ID NO: 15464 - DNA, 1492 bp, Zea Mays
ttttcctaaagcaggggccgggcaaaccgtattgttggctccgcctagggttttagcacctgccgccgcaacctcccttctacttctactgccgccgcaacctccccatccttcgaatcccatccgacctaaccccgcaacccgccggacgacgagtggcgaggcccccggccgagatggaccggtaccagagggtggagcggccgcggaacgagtcaaccatcgaggagaacgagatccgcatcaccgcgcagggcctcatccgcaactatgtctcctacgctacctccctcctccaggaaaggagaattaaagagattgttctaaaagccatgggacaggcaatcagtaaatctgtagctgttgcagagattatcaaggatccctgggttacaccaggataccaacatcagttctgttagcatcactgatgtctgggaacccatagaagaaggccttgtcccattggagatgactcggcatgtttcgatgatttcaattactttgtcccccagagagctggacaagcacactcctgggtaccaagctccagtgtacattgaacaaccaaggcaacagcaggtgccaccaccacagcgccaaccacgcagaccaccagcacaattccagcagctggagtatgaagattcttatgcacggggtcgaggaagagggcgtgggcgtggaaggggctggggtagaggtggctacggtggctatggtggatatggaaacaaccaaggtggctatcatcagggtggtgggtattatgacaatcaaggtggatataatggctatgataatcaaggtggatatagtggctatgataatcaaggtgggtatggtggtggatatggctataaccaaggcagatatgggaactatcaagaaaatggtggatataaccgaggaagaggaagtggtatgcgaggaagaggcaattggggttaccgaggaggttatgaaggtggcaggggcggtggctatggaggtggcaggggcggtggatacgaaggaggcaggggaggcggctatgaaggaggcaggggtggcagtgctcagggtggaaggggttacggtggccgtggaaggggtagaatgggtggtcgcggacgagggaactagtgcagttctggcgtttccttcaaaatgcatgcctcacctataccaggggaaacgacaagttatctgagcattttatgtttgaagccatgtgactgtgaggtctgttattttttcccctgagcgcgaggtttggttgtgagcataatgcatttgcaaagttttatcttgtacgtcatccttcaacgtttcaaattttatcatgtacgtcatccttcaatgtttctgctgccagaggttttcccagtgatcgttgagtgctgagcatgttgtccaatgttcatgcctgcagtattaacagatggccactcttttcctgtgaaattgttaattgcatttgagcaacaccaaaaataccaaaaaaggaaat

SEQ ID NO: 15465 - DNA, 1360 bp, Zea Mays
gcgttcgttacggtcccggggggttttattaatctgcttctggttcttcggttttgtctaccggccgctctgcttcatgaggagtgtgccgtgagacaactctgcgagtcaagaacaactggtgaggcgaagcgaagaaagccgagaggggagaccaaatggcaactgattcctcagctctgcaggcttcctctgagtcgattgcgcaaaagatggggttcttcagagtccctgaccttcttgtaaaactgagcgccaaatgtttgagcgatctggatgtggttcgcagcccaacatcgcccttggacctcaagtttttcactggccttggcaacaaatcacccggtgacgccagccagaaccagaagatcttgcttggtgacagggttgggcttggacttgtggattccctcactgatgacaaccccgcaccactaggtggtagaaaggttctttttcttggatctgagatgaggattattgataacctgtctcgcaagaacagctccaccgctcctgatcaagctggggaagttgaacagaaggatgataatatgtctgacggactgatgggcagtgccatgtcccttggtgacatcatcaactcagaggattacactcgtgttgtctcccgtggccctaatcctaggactacccacttttttggagatcgtgtttttgagcttcaagctgagcagctgatgcctgttgagagtaaggtcgatcagagtacgtctcctgtggaagacggtctgatgagcttctgttatttttgcagtgagaagctcaaagaagcggaagacatctacatctatcagggtgacaaatccttttgcagcgtggagtgcagggaaaatttcatggtagattatgagatggaagaagcatatcatcctgcgtctcctaggagcccaccctctgacggtggtcggattttccaactgatccgttgagtcagcatcagtaacaactcgatatggtcatatctgaagtgctgtctgaggttaataagttgcagccatggatgtgatcatgtttgcagtagttgttgcccggagattttgtttgtcgcggcactgatgaatttacctcacctattgatttcttttgttttgcgtacttggatcctcgaatttttggaggagtccaaaaaatgactacctccggtcataatattatcttgatcggagatgagtgtgtgtgtgtgtcctcgcgtctcaacttgagttgtttgcttcgaccgcattttcagtggctcactcatatgtggacgcctcttattaatatcatgtatctgaacctatgttttgatattttctgaaatgaaatggtaaagaataaagttttatgttacttgttg

SEQ ID NO: 15466 - DNA, 114 bp, Zea Mays
aatctgaaacccaaggaactctaaagcgcttcttaaggaaaactcaaaatgaatttgagctaaaggtgaaaaagacaaggagcgataatggatctgagttcaagaaccttcaag

SEQ ID NO: 15467 - DNA, 2842 bp, Zea Mays
atttgataccagtacaccgtctcgccaacttgtccccatgctggcatgctgcgctgctacatggcttcactggcataagatccttcaggtaatggtgctgggcatcgagtcgttggagacacatctgctgaagattgcctcatcagtggcagtagcgttctttctgaaatcacatctgagtccagcaggactgatgatggtactctgactacagtggctacacagtactctgaaaaaggatcatctactgaggatggggatccatctgatccagcagttggttctgaacagatccaggacgttcctacgtctgttgttccagcagagcctgaagaccgtgctaaattcagttctgaaatctctgaatctgaaatacagaacccgagtattgtgcgtccggaatcagacgcagctggaggtggaacttctgaactgacggatgatgtagccagacagcaggatgaggttgccgtgactggggaagatgctgtgttcgacgccatagatggaagcaaatctagtgaaaggaattctgtgcaaggtgatgagcttaatctctcctgtcaagatatactacaaacggagactggtggggggcacagtagcactgtagtggaggaagattcaggtagcaaggatcctactgcaagtgacggccaagaaatcctgatcgaagaaactgaaccaaatcagcagagcaagcatgcgttaactggctcatttgagaaagtccctgacattgagtctgttgggtcttctgctgagaaatctgtcggtacagatcatccggcaatctccaaaggggcagacaattttgaaggacaacattatcatacaacagatgaaagcatcggagcaataccaagtacatttgaacctgctgttggtgccaaagaaaatgtgacaagtggtactattgtaccatctcaagttgatatactggattcgagtccttccgctacagcacatgaagtcaacattgtcggtagcataaacgatgatgacgaaaagagtcaggatggaaaaagcagtgcagatcttgcttcatacgaggtaaaagagatggttgtcaaggataactttgaagaaaagcagcagaccaaagaggtcattgtagatcccactccacatgaagccaacaactttcccagtaccgataatcacgaggaaaatgagcagaacaaagaaattgttgcagacaccacttcacacaagataagtgctgtacaaagcatgggtagtactgaagaaaaggaacatattgaagatttcattgcgaaactggcttctgaagagatcatttttacaagtaacagagatattgtcgagcagcaggatgagactgatatgaaaacaaactatgaaatagacagggcacgcaacttagaagctactgaagaaattgctgctggtggtgagagtaacacgggaaccatcacagatgttgttgaagacaaattccctaatgaagaaattactttaggcactatctctcttaacatggcagacagcagcgttaaggaggaaaagatgcatgacgaagaagtgaacgaggatctagattctcgtgatgatattatggtacatggtcctgataatgtcaaagagaagatgtgtgaggagaccatgtcaggtcccaccttagacaagttcagtttgcctacatctactgacagtcctgaagagggtaataaggacgaaagcacgcgtgcagaccctatgtcgcacgagaccaatgtggcgcaaaccagcgatggtgctgatgaagagaagaagatcagggagcttgctgttgaccctacttccagcattggtaccatgggcaacataggcaacgctgaagacaagaagccgagtgaagaaactacaacagatcctagacctgttgagaacaccacaacacaaggcacagaagacgcggatagcagcaagcagaatgaaaacactgcgagcgtaggtggcgttgaaggcaagaagcagggtgaagaaactacagcggatcctagatccgtcgaaaacaccacagttgaaggcaagaagcagggtgaagaaactacagcggatcctagatccgtcgaaaacaccacagcacagggcacagaggatgcagaaagcagcaagcagaatgagaacacaaatgtcatggaagaagaaagggtgacggtggaagatacaacctcaagggagatcagcgccatagaaagcacagatgacctgaagggcaaggctaccaacgagaacgaagagatagccgacaaggaaatggtcaccgactcagacaagaaccatgtctcgctgaaggtcctcctcgcggacaagaacgtggaagcgaaagagaaggagaagaaggcgactagcgccaaggaccgggtgctgtcgttcaggcgccgggtatccaaggacaacgtgtcgccgccggtgaagccaggctcgccaaccaaagacaaagatggctcagggcagcaggactggaactccccggccaggttgcccgtcgagaagaaacccaaggggaggaaacagcaatgggtaccgtttatttgctgctcgtcggtacagtaatccgtttgccagcatcagcttggggcatccattgttgtgtttgtacttgtacgctgatggtagtagattgagtaggaccttcgttccaggattggaccttggcagctttgctactctacttggattgtgaacccggctctgccgtttttgtatgttataaatatctgccttgatggaggggaggagggtatgccccaaactctggtaaagtaggaaggttatgataggactgacgagttaacttttaaacctagctattttaattaaaatgaaacccgaa

SEQ ID NO: 15468 - DNA, 3745 bp, Zea Mays
atatggagtaagataaggagtataataaaaaaaatctggtgtagatattattagtccaccacagctgtcagccgggttccctgagcgcgcagcgcagcctgtggaccatacactttcacccgccccgacccgtcagtaatcgtgccatgattgcttttcgacctgttcccagggccgatccaagccgtccgtctcctcaccaagcggcccggatccctcctctccggccaccccaaaacacgcccgacgccagcgccaccgaaatcccccaacccatgcagcgcaagcattaccataacctcctcgcatatcggcccgcgctgctgccggaagcagatcggagcagcctcttcggctcttggcgacggatgttgctcgcttcgtttaccacgaccagatctgcgatggcttctgctcgcctcgctcgctacccaccagatcccggcgcctcccccctcgtcgctcaattctgctccgccgcgctgcgatcgatccgctcccagacgacgatcgcccggcgcggatcagcagccgccggggctgctccggcgtcgcgaatggccgcgctcgccgggccgacaagcagcgcagatcgtggggctcgccggcggcaccggcttcggcctcgtcttccgtggggacggcaggcgcgaggcggtgccctgcccgccgcggactgcctctgggagttcgcttccgttacggcacctgccatcctggccgtcggtcgggggctggcgttctcgtgaatcccgtggtgggccgggggcagaagcggtaactcgccgggccagctgggaatttaagtacattctcaactccggaaatgtcagatgttgcaagaaagttgttttcagaatctcaaattaagcgctgcagaaactacttgaaaatgcctgcactgattattgatgagaaagagaaggaacacctgaggtttctgaccaagaatggactggttgtggatcctgttttagttgagaaggaacggatcatgataaatccgtggactcaagacgaaaaggaaatttttatggagatgcttgctaaatttggcaaggatttctccaaaatttccagtttcatcacacataaaactactgcagactgtgtggagttctactacaagcatcataaatcagacagcttccgagaagtgaagaaactgttggaccttcatcaacagctgcctgccagcaattaccttggagcgaaatcaggacagaaatggaatcctgagtcaaatgctgcttctcttgatatgcttggggtagcatcagctgaagcagcccatgaccttgaatatgcaaacaaagtggagaaaatttctgtgaaatccctcatccggactgcatatgggtccaatgtttcatttgtgaccaaaaaatcttctgataaggagtgcattgacaatgtgcctttgcatgagagagaatctgtagcagctgatgtactagcaggcatatgcggcactccttctcctgatggaatgggctcatgcattactagttctgctgatcctggcctgaagatcagcatgaaaagagtggagcatgtcttatcccaagaaaatgacaaaaatgttaatgaggaagaatctctctctgatcaagagtgtgaatttgatccagttgattggaatgatgatgagaagtcaattttcattgaggcaatgaataactacggaaaggatttttctcggatctcgtcttgtgtgaagagcaagtcatatgaacaatgcaaagtgttctttagtaaggctcggaaatcacttggtttggatttgatccatcaaggggcagccgatgttagtatgccagctagtgataccaatggagggaggagcgatactgacgaggcctgtgctgtggaaatggattcagctatctgtaggaagcagtcttgttcaaagattgtgcaagatgtttgtcctactgaaggagccattttagggcctgactctgttttaatctctaagcagacagaaggagatatatcaaataggtgcattgttgatgttaaaattgaggaagatgataaggaagctgataaaaattgcagcaatgttgatgataagaggtccagtgatagtactcatcaagctggccctatcaacatcaattgcccagaaagtacagataagctgcaaggaactgatgatgccgttgaccaagtaaacatgcatagtagtgtcctcaactcttcaaatgagcatgcaatggccatgcactcagaagtgagatccagtttacactctgtagatgtacttcaaacagacaaagctgaaggtactggtactgatcctagccaggtggaagaatgttcacatcatgctgtctacacaccgatgacagctgggaattctggttcctcagctttcttaacttcagatagtggtatcaaggacaatgttcacatctcaaacatgtctggtgcctccactgttagtcctgcattcacttcaaactatcaacattctctgccaggagatatgcccctgtcgaaaccaaagccactagtaacctcccttaccccaaaggatttaatgcctgtgcagttcagttcagttcttcctgatcccactgcatttcgttttgagggcataaagcccaactttgaggacagcagtggcaacaaagtcagcagtgccctaggagctaaagacatttgcaagtacccagcttttaaagacccatctgataatgagcatgacacattgtttcgtaatattgatggttatatgaataatcatctgacaactgaattgccagttttttctcaaagaactgcaagtggcactgtgagtacttcgcagacaaaattccagaatggcaggtccagcagcgtgtgccttccaaacagttctgaggggattcaatggcccaggaaacctgaagaagtaccggaagattctttgaggccttgcgctcgcaatgcaaaaactgagggtggtgagaaacaaaagcgacctggtgatgtcaagttatttgggcagattctcagccatcagccaaccttgccaagttctggctcgttgtgtaatggtagccagagcaagcctccctcaccaaagattgacaaaacatctgtgagattgaccaacaatccaagggatcttgtagttttttcttccaggcctggtgtcagtccacatgtgggtctggaggaaagatcagtgaggagctacggccatctggatggaagcacgatacagcctgagcctctgctggtgatggcgaagtgccagagatccttggccagtgtaccattttactcggctaagaacagcacggttggcgtgtttccagattatcaacaaccttcaatgcagccacatcaattagatcccaagccgctggaaatgttttctgattcgcagaagaggaatgggctggaactcgtctcgggtttcggcggtgctggtatccttgttagcaacgtctcagaccatgtggctgctctcaaggctcggtatggtcccggttctaagataatgggcagtgacgcggatccttggaaagacataggaagcagcaccataccctttggtagcttgacatgtcaacagcggcccagcgccaccgtgggctcgttagaggtgattaccaggtgttttgtcagcagggtttgatgttgtcagtctatggaaattccttattctcagtatcctagtatgatggatggagttttggttgagatttgtccttgcattggccgttgtttcaacttcttctgtcagcatttc

SEQ ID NO: 15469 - DNA, 1679 bp, Zea Mays
ccatgcttaaacactgaatgatgtgcggctgacacactgattcgtcgttcgtccgcatctggcgagatctcgcgtggactacctcacgaaggatggagaagtttggacatttagcgttagatcttctgacacgtcgctcccagatcgaatcattcatgtgaactatgatggctttgctgaagatgtcaaagctggtgatgaactatttgcggacggtggaatggccaggtttgaggtgattgaaaagttagggccagatgtgaagtgccgctgcactgatcctggtctgttgctgccacgggctaatcttactatatggcgcgatggcagtgtagtgcgagagaggaacgctatgcttcctacaatttcgtcgaaggattggattgacatagattttggaattgctgaaggtgttgatttcatcgccgtgtcatttgtcaagtctgctgaagtaattaatcatttgaagagttacattgctgcgaggagccgtggaagtgatataggggtcattgcaaagattgagagcatcgatgctttgaagaacctggaggagattatccgtgcatcagatggagtaatggtagccagaggggacttgggggcacaaatccccctggaacaggtcccttccatacagcaaagaatagttagaatgtgcagacagctcaacaagccagtcattgttgcttctcagcttctggaatcaatgatcgagtatcctacacctactagggctgaggttgctgatgtttctgaggcagtccgccagcgtgcagatgctctcatgctttctggtgagtcggccatggggaggtacccagagaaggctctcagcgtccttaggagtgttagcctgaggatcgaaaggtggtggagagaggagaagcgccaagaggcactggagcttcaaggtgtctcgtcttccttttctgacaagatatcagaggaaatatgcaattcagcagctaaaatggccaacaacttaggagtcgacgccgttttcgtttacacgaaggatggctacatgggctccctgctctcacgatgccgccccgactgcccgatcttcgccttcacgtcttcgacgtctgtcaggagacggctgaacctccagtggggcctcatcccgttccggctgagcgagtccgacgacatggagagcaacctcaaccgcaccttctccctgctgaaggccaggggcatggtgcagtctggagacctggtgatcgcgctctccgacatgctgcagtccatccaagtggtgaatgtgccctaggaatacgatccccatgtccagctggttccttgacctggaatgtagcatacaattaggaggggcttctttttttgtttgtttgtttgtcatttgagtgtatcccagttcgtagcatgtttctgcctcatgttgaggctctctggatgtcgatattgatttgcgtcagtgtggtttaggttcggactcgaatgctcgatttgaaaattcgaacagaactcggtttgcatcagtgtcatgattaactcaaaccattgttctgtactatatcagaacgtgttactacttatcttagtgtcattcctcagtttcacttggttttttttaaaaaaaatattgggaaaaatgtgcccagtaatctgggaacatatatcatgtgctgatgtgcagtcagtcctgttga

SEQ ID NO: 15470 - DNA, 3691 bp, Zea Mays
acggaagcagcagcagccggcaggcacgcgcacgccgtcctcgtctacaactaggccccaggcaccccgctcctcctctccctcaaaaccccaccaaaaagcctcctctcccccctacactgtttccatcggcagacggctcccatggaggcggccgagtgaagcagccgcctgccagccagccatcgtctctgcgctgcttccgtggcccggatctgggagcgcggcgctgacagtggagtacagtggactacgtcgtcagctgcaatacttcttgatccagatccaggcgtccttccaactcttccttctgcattcgtgtggagtggggattcttctggcctttcgagtgacttcttttctttagtattgtgagatacaacatcagctgatccaatggcgacatataagctgggtgtggaggtcgcaagtgctcatgacctgatgcccaaggatgggcaaggttctgcaagcgcttgtgttgagctcacctttgatgggcagcgcttccgaactgctgtcaaggagaaggacctgaaccctgtctggaatgagcgcttctacttcaatgtatcagatccttctaatcttcctgagctggcccttgaagcatatgtctacaatgtcaacaaaactcttgaaagttccaggtccttccttgggaaggtcaggattgctggcacctcatttgtgccctttcctgacgcggtggtcatgcattatccattagagaagcgtgggatgttttctcgcgtcaaaggagaactgggtatgaaagtatacatcaccaatgaccccgccatcaaagcttcaaaccctcttcctgcaatggatcctgtctccaataatcctcttccagccccaagtccagcagagcagattgcagctgatataactggtactaatctgcacacatctcaggagcataggtctgaggcaaagaccttacataccatcgctaaggaggtacatcatcatcataaccatggccatcttccagctacgtttggtgagcagccttccaagtactccattgaccagatgaaacctcaatctcaaccaccgaggattgtgagaatgtattcagcagcgtcccagcagcccatggactatgcacttaaagaaactagtccatttcttggtggtgggcaggttgttggtggccgggtcatacgtggcgaaaagaatgctagcacttatgaccttgtggagcgaatgcagtatctgtttgtacgtgtggttaaggcacgagacttgcccgacatggatgtcactggaggcctggatccttatgttgaagtgagagtaggcaactatagggggataacaaagcactttgaaaagcaaaagaacccagagtggaatgcagtctttgctttttccagggaccgtatgcaggcatctgtgcttgaagttgtggtcaaagacaaagatttgattaaggatgactttgttggctttgtgcgatttgatttgaatgatgtccctattcgtgtgcccccggacagccctctggctccagaatggtacaggcttgttagtaagagcggggataagtccatgggtgagctcatgcttgcagtttgggttggcacccaagctgatgaagcatttcctgatgcctggcattcagatgctgcaacacttgaagatccatctgcagtaacacacatgaagtccaaagtttaccatgctcccagattgtggtacctgcgagttaatataattgaggcccaagatgttgctatattagataagacccgctatccagatgtatttgtgagagcacaggtggggcatcaacttgggaggacaaaacctgtgcaggctagaaattttaaccctttctggaatgaagacattatgtttgtggctgctgaaccatttgaggatcaccttgttctgactcttgaggatcgtgtaggtcctaataaagatgaaatgcttggtcgtgtaatcatacctttggcaatgattgatagacgtgccgatgaccgcattgtccatgggaagtggttcaatctcgagaagcctgttcttgttgatgttgaccaactgaagaaggagaagttctctactcggcttcatctccgtctctgtcttgatggaggttaccatgttcttgacgagtctacaaactacagcagtgacctgagaccaactgccaagcaactctggaagccgtctattggtttgcttgaacttggtgtccttggtgctcaagggattgttcccatgaaaactcgagatggaaaaggttcatcagacacctattgtgttgctaagtatgggtcgaaatgggtaaggacacggaccatcatgaacaacccaaatcccagattcaatgaacagtacacttgggaagtctatgatcctgcaactgtgctgactgttggtgtttttgacaatggacaacttggagagaagactggggagaagacatctagtggcaaagatgggaagataggcaaggttcggatacgcctttccacactcgaaactggtcgtgtgtacacccactcgtatcctcttctggttctacattcgtcgggggtcaaaaagatgggcgaactgcacctggcaattcgattttcctcaacatctctggttgatatgctacgccatcaagctgtccagattgtggctgcccgacttagccggatggagccacctttgagaaaggaagttgttgaatacatgacagattttgattctcacttgtggagcatgaggaaaagcaaagccaacttcttcagactcatgacagttttctcaggcttgtttgcagttagcaagtggttcagcggtgtctgttcatggaggaaccccattaccactgtgctagtgcacattctctttataatgctggtgtgctttcctgagctcatacttccaacagtgttcctgtacatgttccttatagggatttggaacttccgctatcgacctcgttatcctccacacatgaataccaagatctctcatgcggaggctgttcatcctgatgaacttgacgaggagttcgatacattccctaccagccgcaaccctgaggttgtaaggatgaggtatgacagactcaggagtgttgctggaaggatacaaacagtggttggtgatatcgctacacaaggggagagggttcaagcattgcttagctggagggaccctcgtgccacagcagtctttgtcctgttctgtctggtagcagcaattgtcttctatgttacaccgcttcaagttattgctgcattaggagggttctatgtgatgaggcacccaaggttcagacataggttgccctcagtaccagtaaacttcttcagacggttgccagcaaggactgactctatgctataaataagccactacctggtggtcttatcgttgtaatccctagagatgctttctctgttactgtagtttgctcgccttcgttgctatttgtaactgtgtctgttcagaacttgagagcctgttaattgtatcagttgttgaattctgggaataattgcgagacatggttctgtgttgatcctttctaaaatatcaagctatcaatgtttagtagcttgcttttttggctgtctcctcgtctgcaatcacaaaatgcatgtagctatgtccgttcctctatagcagttactgatcatttcataccctgttttctgtggttagtttcttttttatt

SEQ ID NO: 15471 - DNA, 168 bp, Zea Mays
gcagggtgaggtcaccaactcaccatgcaaatttgtgggattgtcaagttggtgcagagggaagggtccaagcagcaggcatctctccaatttccatcagactgcagtgagctacccattgcagagaaaccgtggagactgtcttgtgaagcggagtctcatctcaac

SEQ ID NO: 15472 - DNA, 816 bp, Zea Mays
atttggatatattttatcctttaaggctaaatctttggactgatgaatattcagattggtgaggcatcaaggaggacttggcttggcgaggaagctgatccacagtactcagatcgactgttgagagcatacaagagacctgtggaggttgacgcggaccaatcaaggtggtttatatccaaggatgcaattgtatctggccttggtcttctaggtatcaagcagggtggacctgaggcaacattttctaagtctcgtcgaaagagagtcatccgcaaaaaggtcacttcaggttgagtttagtggatttggatagcaatgctggaacaattttgcttctgttccactatgccagagggaggtctacccaaattatggtaaatgagaaaaaggtatcaagtcaaccagcacgtggtctgtcggcgaagggatcaaagggtttgttactgggaagggttagttaaaaggtgccaattactattttataatttaattgcagttatttaaggtaagaaaatatgttgttttcttgtattgctgtgaggcaaatagacacgtttagtggtagttttgtaagattgttaatgtactgactttacatgagaaatggattctgcatttttatatagatcaagtagctgccacatgcttgtatctatcttttgaggtcaattaggtcagggtcctgctttgttgctggttaggactacgcttttataaaaacttattttaagtacgaaggccgatctctgtggaagtttcatcgtgctatttccaagactactacattttctaaagaggaatgaacctcaatgg

SEQ ID NO: 15473 - DNA, 2326 bp, Zea Mays
tttcaatcccgtccataattcattcgccattttttctttggttcctcgcgttcatttcgcccttcccattcctctccactgcgctgccatcgtctcgcgccggccccccgtggggaactagaactgactccctcgatcccagcggcagcggcggaagcgaacggtgaccgcgacctcccctgaggctgcatatactcggatcgggtttcacatctccggttttggattggttggttgcccgcggcgatgggaggagagctgtggtggtatccataggggatcctcggttgcgtccttgtgcgatggcttcgacctccgttcctgagttaaccgcggacaagaaatgcgacaaagccatcgcggatacggcggcaccacttacttctcagggacactccgaagaaccgactgggaaagtcagcacactagtgcctgctttgccggttgtaattgcagcaggcgatggggctgcatccagtggggtgatagaaaacagaaatggcatggacaattctgctgatggttctttgaagcgggatgacagtgaaggtgctgagaagagctcgctgcgggggagcgtcaaggatagctcggtgtcggctaaatgcagtgacagggcgagcagcctgtcgaaagccagtgggagcgccaagatcagcggtcaacctgctgacatgatcgagagtggcaagagtagtctctatcgggccagtggtggaagtgatctgagtgatgagagcacctgcagtagcatatgcagcagtgtcagcaagcctcacaagtcaaacgactcaaagtgggaagcgattcaggttgtccgaaccaaagaaggttctgtaggtctaggtcatttcaggctgctcaagaggctcggttgtggtgatattggcagtgtgtacttatcagaacttagtggcactaaatgctattttgccatgaagatcatggacaaggcgtcattagcaacccgcaaaaagctgcttagagcgcagactgaaagggagatattgcaatgcctggatcatccttttcttccaacattgtacactcactttgagacggataagttctcatgcttggtgatggagttctgccctggaggtgacctacataccctaaggcaaaagcagcctggcaagtatttccctgaacaagctgccaagttttatgtagcagaggtgcttcttgctctggaatacctgcacatgcttggtatcatataccgtgacttaaagccagagaatgttcttgtgagggaagatggacatatcatgctgtcggatttcgatttatccctccgatgtgctgtgagccctactcttctcagatcttctaaccccagtggggataaccaaaagggcaacccagcttactgtgtgcagcctgtgtgcattgagcctgcctgtatgcagccttcttgtgtcacgacaaccacatgcttctctcctcgctttttctcttccaaatccaaggagaaaaaagataaaaaggcaaaggcagacttggcaaatcaggtcagaccacttcctgagcttgttgcagagccgacagatgcaaggtctatgtcttttgttggcacccatgagtacttggcacctgaaattataaagggcgaggggcatggaagtgctgtagactggtggacatttggcatattcttgtatgagcttctcttcggcaagacaccattcaaaggttctgggaatagggcgacattgttcaacgtagttggacaacccttaaggttcccagaatcacctgtagtgagttttgctgcaagggatcttattaggggattgctcatcaaggaacctcagcatcgattagcgtataagcgtggagccacagaaataaaacagcacccgttctttgaaggtgttaattgggcattaatcaggtgtgccactccacctgatatccccaagccagttgagatccctcgttctgtagcttcatcaagccagaaggctacatcagccgctgagaaaggctcagattatcttgaattggagtttttttagtggtcacgcatgatctcccatgtgcaagttgtaaagctctaccttttccacttagacttcttttttttatgggttttaataactttatatgtagatgcatattgtcgtacgtagtgctgttctcttcagttgatttctcagttcattcctttagatgggatcctcaatctggtggagtctgtaatcctttattggctgccgttcactagattctctcaataacatggaaacattttcgttcaatcggttttgcaatttgtatggtgcactgcatagctgaacacaccttgatagcatggtaaatg

SEQ ID NO: 15474 - DNA, 981 bp, Zea Mays
gggccgtacgagctcaccacgaggtggaccatggtgatgaagtttatgctccttccctggaagccggagctggtcttcactggcctgtcgatcatgggcgtcaacccgaagaatctcaagttcaacagccatgtggatctttgggattcgatacaaaacaacgagtacttctcttctgaaggactatgggatgttttcaaacagctacggatttacaagacccctgacatagaaacaccaaattaccttattctaaagaggactgcacattatgaggttaggagttatgcgccattcttagtggttgaagcaaaaggtgataaactgacaggatcgtcgggcttcaacaatgtaaccggatatatatttggcaataatgcttcatctgaaaagattccgatgactacacctgtcttcactcaagcttctgacaacacactttcagatgtatccatccagatagttctgccaatgaacaaagacttggacagttaccagctccaaatacagcagttactttgcggaaggtagaaggaggcattgctgcagtgaaaaaattcagtggacgaccaaaagaagaaattgtgctccagaaggagaaggatctgcgctcccagttacttaacgatggattgaagcctcatccaggctgtttgcttgcacgttacaatgatcccaggacaaagagcttcttaatgaggaacgaggtgcttatacggctaattgacttcacactggagttgtaatcgtcaatactggcatcagatcgatgtaacacactgggcttggagcttccagtgagtcattagaaaggagaaatgttgtagatgtcagatttgctttatgtaaatgtaaactctaaaaggtaataagctacatgctaaaacgacaggtcattttgattcgtttatcgaccaaaaatattgattaaaatataggaaaacattaaaatgaaaatacatgagaagtgcccttttactt

SEQ ID NO: 15475 - DNA, 442 bp, Zea Mays
ctgggcatggccgcatggcccatctcttgtcacactggcttctatgagcccaagagccgcttcggccttccgctctccgtgttgccgagctgcggcgggcgttgcgcctccctcgcctcgccagtcccctcgcctctttctcgtttgcggcggcgtccacagcatctgcggctcctgccaccacgtttcggctgcgaccccttcgcccgaaatacgaatgatgagagcaggataagataagcaaagcaaattatgcgctgcagaagtcctttgcattgcagttttccactggaaggttgtgatgcaaggtgaaagatcccgcgccatttcagcagagcagatgttcccaagagcacacaatgcaaggcccacgatgaactggttcgtgtggttgagatctctgcccccaaattaagcactaaacattactcaaaactcagca

SEQ ID NO: 15476 - DNA, 2113 bp, Zea Mays
tggttgtaggtggtcactgtatgcgaagaaaatgcttggttgtgaatcattcatggtggtttctattggccctaaacatgattgcgcaagcactagcaaggtgacaggaaaggaagcttctgcagcttggattgccaatagagtgaagcctatgttgattaaagagccagggcttggtgcaagagaaatgcagtataggttggaggatcagttcacagtcactttgtcatataacaaggtctgggaagggagaaagttggcactaaaggaacttcatggtacatgggaggatagcttcaagttgctatggaattggaaagcagccgttgaggcaacttgtcctggaagtctcattgagattgattgcaagaaggtaaagggacagatgcacttctcaaagatgtttgtggctttacggccttgtgtcaatggatttcttatgggatgtcggccttatcttggagtagactcaactcatttgactggaaagtaccttggacagcttgcttcagcgacagccatagatggacataactggatgtatccagtagcatatgccatatttgacaaagaaacaaatttgaattggaaatggtttatgacactcctgaagagggctattggaacacccccaggtttgaccatacacactgatgcatgcaagggtcttgcatatggggtgtcacaagtgtttggtgatgcagctgaacatagggagtgttttagacacctcatggctaatttcaggaggaagtacaatggtgaggtgctgaaatacatgtggccttgcgcatgggcatgcacacatgagagacatcaagtacttatggataaaatttcagaaacttgtccaaatgctgtcgcatatcttagatatgaccacccacacttatggacaagagccaaattcaataaaatctgcaaggtggattacgttaataacaacatttcagaatgtttcaacaattggattaaaaatgtgaaggagttgcctgcagttgatctcatggacatgctcagggtgatgataatggagaagattgctacaagacagtccatagccaataaaatgcaaggccacatcctacctagtgtagttaatgatctgcatgagaagagtaggaatcttcgatataccatcactaaaagtgggtacatgaagggtgaggtttctggtgctagtagagatggtgttgcttggagatatggagtaaaccttgttactcaggcttgttcatgtggacagtgggatgtaactggaaaaccatgcactcatgccatagcattcataacttctcaacgaaatttgagaatcgaggactatgttggagaatgttattcggttcaaaggtttaaagatgcataccaatttgaggtgtatccaatgggagacaggttacagtggccgaaattggacccaggattcgaaatgaggccaccaaaacttgagggcaggcctgctggcagaccaagaaagaaaagaatcaagagtgctggagagccaggtaagagagggccatatcaatgcaagaggtgcttccagtatggccacattgaaaaaggatgcaaaaatccagtggtggagccacatgaagaccttccagacaaccatttgcagagaaagacaaaaaaaggcaccaaaaaaaggaagaaaagtgagccagaacagacttcaacttcacttgttcaaatatcgccatctagttctggaccaatgacaaggagaagggtggcgatgtccccaacctgcagctcaccttcagccagcaagcaaggagaagcaccggcttcaagcaaaaggagattaattatctagctgactgtgatggattgtatgtcatttgcatgtgtttgctacttatgcgatggacgtgtaagccatatattgtattttattgttagaatcaggcacccctgaattatattgttgcaaagtatcgattgggagagaggagggcaagagtgtcttttcccatgggctgctgggttaaaaaaaagaaaataattcaaaacagcctccgaactggttttgtggtagatttctaaataatcgagtctttgcatggtattaaagtgtaccaggaaagttagatggtagatttctaaagacgag

SEQ ID NO: 15477 - DNA, 2980 bp, Zea Mays
cgcgcaccaggtgttcgacgggagttttcgccaccgcggaagatgtacgtggtcaagcgggacggccgccaggagacagtgcacttcgacaagatcacggcgcgcctcaagaagctcagctacggccttagccaggaccactgcgacccggtgctcgtcgcgcagaaggtctgcgcgggggtctacaagggcgtcaccaccagccagctcgacgagctcgccgccgagaccgcggcggccatgactgcgtcccaccccgactacgcctcgttggcggcgaggattgctgtgtctaacctgcacaagaacacaaagaagtccttctcggagacgattaaggacatgtacaggcactttaacgagaggtctgggctgatggcccctctggtcgctgaagatgtttatgaaatcatcatgaataatgctgctcgcttggacagtgaaataatttatgatagggatttcgactatgactactttggcttcaaaactctggagaggtcttacctcttgaagcttggtgggaaggtcgttgaaaggcctcagcacatgctgatgagggtttcagtgggaatacacaaggaagacattgagtctgccattaggacgtaccatctgatgtcccagcgctggtttacacatgcatcaccaacacttttcaacgctggcacaccgaggccccaattaagcagctgttttcttatatgcatgaaagatgacagcattgagggaatctatgaaaccctgaaggagtgtgctgtaataagcaaatcagctggaggaattggtgtctcagttcataatattcgtgctactgggagttacatacgaggaacaaatggaacatcaaatggaattgtgcctatgttacgagtctttaatgatactgctcgttatgttgatcagggtggtgggaaaagaaagggtgcatttgctgtatacttggagccttggcatgctgatattttcgagttccttgatctaagaaagaaccatgggaaggaggaaaatcgtgcaagggatcttttctatgcgctatgggttcctgatctattcatgcaaagagtccagagtaatggagaatggtcattgttttgccctaatgaagctccagggttggctgattgctggggtgaggagtttgataatttgtacaagaaatatgagagccaaggcaaggcaaagaaagttgttcctgcacagaccctctggtttgacattttgaaggcacaaatagagactggtacaccttatatgctttacaaggatacttgcaataggaaaagtaaccagcagaatctgggcacaattaaatcgtcaaacttgtgcactgagataattgagtttacaagccctactgaaactgctgtctgcaacctagcatctattgctttacctcgttttgttcgggaaaagggtgttccattagagtcccatccatctaagcttgtgggtagcagtgattcgaaaaatagatattttgattttgagaagctggctgaggttacctcaactgttacttacaatcttaacaaaattatcgatattaattactatcctgttgagacagcaaagagatcaaatatgcgtcacaggccaattggcataggtgttcaaggcctggccgatactttcatattattgggcatgccatttgattcactagaggctcatcagttgaataaggatatatttgaaactatctactatcatgctctgaaatcttctgctgaacttgctgttaaagaaggtccctatgaaacatatgaagggagccctgttagcaagggcattcttcaacctgacatgtggaatgtagtgccatctaccaggtggaattggccatctctaagggagaccatttctaaagctgggataagaaattctcttcttgttgctccaatgcccactgcttccactagtcagattcttggcaacaatgagtgctttgaaccctacacatctaatatttacagtcgacgggttctaagtggggaatttgttgtggttaacaagcatcttcttcatgatttgactgaaatgggcatttggactcctactctgaaaaaccagataatatatgatgatggttctgtccaaaagatagcagaaatcccagatgatctgaaagcaatctacaagactgtttgggagatcaagcagaaaactttagttgatatggcggttgaccgtggatgctatattgaccagagccagagcctcaacgtccacatggagcaagcaaactttgggaagctaacatcacttcacttccatgcttggtccaagggcctgaaaactggaatgtactatctacgcacacgagctgctgctgatgcaatcaagtttaccgtcgataccacacttctaaaggagaatgggaatgggatgaatgatggaaagcccacagaggaagacgtagaagctaaaatggcacaaatggtctgttcttttaacaaccgggaagagtgcctggcgtgtggaagctagattggagctccatctggacactgcaattatttgtgacctcaggccacagcattatatgccgccggctgatgactggagcccaataatcagaacgaaatctgatgtaggatgaggtagaaactccattcccttcccataatgggaacaataccttgcctctgaaatactgttaggactagtttggtaactctattttttcaagagattcatattttttcaagtgaaaatgaattaattttcttttgagaaaatagaaagaaatcccttgaaaaaaatgagattctctaggagccataaaaccggagtaaattggaggagctaaattcatcctttttattcaattttgaataagaggaatttagctcctctggttttgtggcttccaaactaaggttgtattctctaagatatttgtgctgctgctgctgccaatgtactgtaaatatctactaccatcaaagttattgatgttctctaagctattttttaa

SEQ ID NO: 15478 - DNA, 1677 bp, Zea Mays
ctatagcgcacagaggcaagagcaagggctgttgctgctgcaagaatgaagggagaatatcctcaaagaattgggcagcctgaatgtcaatactatctgaagactggcacgtgcaagtttggagcaacttgcaagtttcatcatccccgagaaaaggctgcaatggcaactcgagttcagttgaatgaactgggctacccactccgcccgaatgaaaaagagtgtgcttattatttaagaacagggcagtgcaagtttggaagcacatgtaagtttcaccattcacaaccatccaccatgatggttgctgtacgtggctctgtttattcacctggacagtctgcaacttctcctggccagcatgcttaccaaggggctgtaacaagctggcccttgtcgagatctgcttctttcattgcaagtccaaggtggccaggtcattcaagttatgcacaagtgattgttcctcccgggcttgttcaggtcccagggtggagtccttatactgcgcaaattggttcttcatcctcggaggaccaacaacggacacctggagctgctcaatactatactggctcacgccaaagtggtactagtataggcgatcaaggaatgttttcatcctaccaagcaggttctgttcctgttggactttatgcagtacagagggagaatttatttccagagagacctgaccaacctgaatgtcagttctatatgaagaccggagactgtaagtttggtgctgtatgcaagttccatcatcccagggagcgaataattcctactcccaattgtgcactgagtccattaggcctacctttgcgcccgggagagccaatatgcagtttctacaatcgctacggcatgtgcaagttcggtccaaattgcaaattcgatcacccaatgggaaatgccatgtacggccaggctccatcgccagctagcgaggccccagctcctcggcgcatgctggcacatgtaccgccgtcgcacccagaagcatcgcctgatggtggttccggaaggtctaggaggattgcccactctgattcccagcaaataccctctggtgaaaggagcgctgagagagaggcgtcctaggccatcctcggtgtcttcgttccccattcttgactggagtaaccatctgcaaccaacaacattcgaggatccgaagctgtacaggtcttttgccccacctctgagctttacataccggagcttgcttcaacgtgtattgcattcaggcaggaaaaagttcttgcctgttcgggatgctcatttgctcccccactgaaacgggaacaaacctaccttatttaaaacatatgtatggatggaacctactcacctctggacattcaaacccattcgagtcatgtgcactggtcccggtgctgtagttatagagctgtctttgcatggacaaagctgttgcgaaactgactggggatgcgcaagcataacctcttttgttaattattgtctcgttttttttttctcggcatttatctctttttcataagggcagccccgcactctgaaagtgtgcgttttgaagattgggaaaataataggttgccatcgtatgctctgtattacccaccatgctttaaactcagttatttgagagtcgtttttatcttggtggtcctgacagggactgtttatttt

SEQ ID NO: 15479 - DNA, 210 bp, Zea Mays
tccacatcaaagcaattcacacacgattggaaaggtaaaaatatattacaaggtatggacaaatttacagagtaatgtttgattcctaaattacaatatcttttacaaagatacttcaaatatttctaagccttgtttagcagcttcagtaatcttcgagaagagcttcggactactgaccttcggcatcgtcatcttgtacacggcaac

SEQ ID NO: 15480 - DNA, 1957 bp, Zea Mays
ttttctcttttttttagtttttaaattaggaggggctgtgctctcaacggccaacggctccttggtgcggcgggcggtcaacgtctctctcgccggggcgctctccatgactccatcttaaaacccacagctttcttcccgtcttggcgtcttcccacatatgagtatatgacatatccccactctagccaagtagccagtcctctctccactctcctctcgcaccaccaaaaaaaccggccccaccgttcgccatgagctccgaagcagaatgcgcagctccagccgccgccgcgccggatggggcgggcggcggcagggtggagatcgacacgtccgcgccgttcgagtccgtgcgggaggccgtcgaccggttcggtggcagcgccgtctggagctccgacctcgtcaggcgcatgttcgcgccctccaagaaacatgaacagtctgaccaagctgcagaggccatcaacgccgaggagcaggctgcacagctagagaacgagctggcagttaaagaaagggagactcttgatgtgctcaaggagctggaggcaaccaagaagatcatagcagacctgaaactgaagatacggaaggaagccactgaaacatcccctgaagaggctgctgaccaggtttctgaggcgggagctcaacagcagaaacctgaaaacaccaacattgatgtggtggtggacatggaaggtgtagaggagaaccattcaggttcggttccggtggatctcgagcaggcgaaggcaaacctgaacagagctacatgtgatctggctgcggtgcgggctgcagtcgagctactgcgaaacagcatagcgaaagagaaagtgttgcttgaaagagcccgagagaagctctcctctgatacttcgtcggtttcttctttggaggatgacctggatcagacagcgcaaaagatggaaacgctgaaggatctgcagaggagacgcaaagacccctcagatatttttgtagagatcaagaaaatgaccaccgaggtgcagcagctcaggagcatggcagacgattcgaaatctgaggcaatggtgttggctgcagaaatcgagcaggtaaaggccagcatttgcacggctgaggtcaggtgcattgcagccaggaagatggaagacgccgctagagcagcagaggccctcgcgctggccgagatcaaagcgctagtgagcagcggaagttctttcgaaggagacaccgcttccgatggaggaggggtaactctctcgatggaggagtatttcaagctgtgctcccgagctctggaagctgacgaaagctccaggaggaaagtggagaacgcaatgctgcaggtagacgcagctgacgattcagagtccgagtctgtcaagaggctcgaggatgccagagtggaggtcgaggagtgcaagaaggcgctgcaagaggccctgaggagggtagaggctgcaaaccatgggaagtttgcggtggaagagattcttcgtagatggaaatctgagagcgggcacaagaggcggtctcttggtggctccccaagattcaaaagggcggcagctcaccgtcgcgaagattcgcacgccacggatatgatctctgatgcttcagacagaccacccaaaccaacattgtcgatcgggcagatactgagcatgaagctaatgggacctgatgggtacgacaagagtgtttgggatgacaaaacaggcgagataccggagatctcgctcggtcagattataaacaggagtggtgttctgtgcagagaggatgtggctgctcgcagaagaatttcggggaagaggaagaagtttgcattgactgggctttctgttctcctggccaagcaatcgaagaacaagaagaagagagaatccttttaagctgccatagaaaaaacaaacagctgacggcgctttcagctggagcaagcagccggacttcataa

SEQ ID NO: 15481 - DNA, 403 bp, Zea Mays
gttactctgtaagcccaaagctccgaaacagagcccaaaagactacgagctcgcggggaagacggggacttccggagagagagagagagagagagagagagagagagcaggaagcaggggctagacgcggatcggcgagcatgaggggcggcggcggcggcgggatgatggacgatgaagagagggtgggccatgcggagatcccgaccagtttcggtcccgagctgcgcgcctgcctccgatgccgcctcgtcaagacctacgaccagttcagggagaacggctgcgaaaactgcccgtttctagagatggacagagagcacgacaacgtcgtcaactgcaccacccccaacttcactggttctagttgcagaggggatgaaagaggcgaatttaatgaaag

SEQ ID NO: 15482 - DNA, 1159 bp, Zea Mays
ctgtcctggacatagtcccgcgatattaaaaaagctaaggagagagagaattgcagaaaggatgagggcattgcaggaattagtccccaacacaaacaagacagatagggcagccatgctagatgagatccttgattatgtgaagtttcttaggcttcaagtaaaggttctgagtatgagcagactgggcggtgctggcgcggttgcgcagctggttgctgatattccactctcagttaagggcgaggcaggcgacggcgggggggcgccgcagcagcagcagcagcagcacgtgtgggagaagtggtcgacggacggcacggagaagcaggtggcgaagctgatggaggaggacatcggggcggcaatgcagttcctccagtccaaggcgctgtgcatgatgccggtctcgctcgcgatggcgatctacgacacccagcaccccctggacggccacggccactcgctgaagcccgagcccaacgcgtcatcctagtacagtaacgtcgtccttagcgtgccttccaattccaacacccaccccccttctccctaaaaagtactgttaggcgccgatattatccggaagaaaaaaagaagtgtatgatataccgagcgtgcgtttccagtgtgctgacccgtgggataggaaaggaccgaaaattgttggtatatgatgattatgtagcctcctgtttgcctgttctgtttcaaatcaaagcaatgctcatgcatccaggtttcaatgtgcctatgagtgcaagtgatgggcagcagagagtctggcactgctctcatgctgcctgtttccctttgggcggtgtagtgcactggccatagacttgggtgggtggtggtagggccgcccgccggtcgccccttttggtagtgggtgtttggaccaatggaaagaggctgctgatgtatgtgctggtaattctgagcgagcaaacggttgacgaaatctgaaagaatgtggtggtggtggtggtgggtggtgatagcttgtctttttattttattttaaaaaaaatagagtgggagcggaggtctgggtcaatggaggcccgagcgtgcgatgatcggctgggcgctagtggggagcgtgctcctccgggtcttggcttttctgcctacaagtcgccgtcttgataagaac

SEQ ID NO: 15483 - DNA, 197 bp, Zea Mays
cgcgcatgaatggattaacgagattcccactgtccctgtctactatccagcgaaaccacagccaagggaatgggcttggcggaatcagcggggaaagaagaccctgttgagcttgactctagttcgactttgtgaattgacttgagaggtgtaaggataagtgggagcctccgggcgcaagtgaaataccactactt

SEQ ID NO: 15484 - DNA, 188 bp, Zea Mays
aacatgaaaactcaaccttttcaaagaatcttgaagcagctcaattgtcttattggcatctgcaaatttcttctgcagtacttggatgtcctgttgtgcttcagttaattgtgaaatgattgcagtactctgttgtttctcagataacaatgaagtctccaatgtagctgcagtttcttcaagtctat

SEQ ID NO: 15485 - DNA, 1322 bp, Zea Mays
cgtgccccaccggcggcagcagcaccggtgacgccggcacgcctaaatgcgtcgtcccctcgcctctgcggccctccgcctccgcttcttctcttccacctcccctgcccgccttctctcgccctgcccattccttctatcccgccgtgacgacgacggcggccgcgaggcctcctcgtcgccgctgcccccgctcccgccttctggctcggctttctccccacgcccgctcctcttctctgcatcagctgccgcgggcctcttcagcctccatggcgggtggtggaggcaggctcttcctcctgcagcgtcgcggcccctcggctccgtctctgacgcagctcccgtccggctcaccatctcccgcagttattctctgcgtgtggccaagggcaagaagaaagcacattttgacgatgaacacagccatcgagcggttaacatggcactatggtgcaacttcctcgttttctccctaaagtttggagtgtggatttcaacttcaagtcatgttatgctagctgagcttgtgcattctgttgcagactttgctaaccaggctcttcttgcttatggtttgagcagctcaagacgtgctccagatgctctacacccctatggttattctaaggaaagatttgtatggtctctcatatctgcagttggaatattttgcttgggttccggtgctacaattgtgcatggagttcaaaatttatggaattctcatcctccagagaatattcactgggctgcattagtgattggtgggtccttcctaattgaaggtgcttcactgcttgttgctataaaggctgttaggaaaggtgcagaagcagagggaatgagtatctgggactatatctggcgtggtcatgatccaacttccgttgctgttatgactgaagatggtgctgctgttacaggccttgctattgctgcagcatctttggtagctgttcaaatgacaggaaatgctatgtatgatccaattggctcaatcattgttggcaatttactggggatggttgctatttttctcattcagaggaataggcatgctttaattggccgggccattgatgatcatgacatgcaacgagtccttgaatttctgaagtctgatccggttgtagatgctctttatgattgcaaaagtgaggtgattgggccaggtttttttagattcaaggctgaaattgatttcaatggagttgttctggtacaaaattatttggaaaggactggacgtgggagttgggcaaaacaggccctcaatccccttacaaacaagccataagagagctgttccaacacattag

SEQ ID NO: 15486 - DNA, 118 bp, Zea Mays
gtctagaatagatagatttaacaggaaaaaatgctagcgtctagtggctagggggccttctgtttttgggagcccggtgcggctgcaccctcggcaacccctcaggaacggccctgtg

SEQ ID NO: 15487 - DNA, 1688 bp, Zea Mays
gtctctgtcagccatcaactctccagtgagctgcgagcctacaaggctgtgggcagtgccagcctcaacctcgacctcccccagtcccccaccgaccaccggcctcctttcccgcaggcacgggtgcacggcacgcggtttccactcgcttcgtccgcgttcggatcgccctcagagtaacagtctagcagagcaagcatgtcgtcgtcggcggagaacgaccccacggtgacggtgaccgagcgcggaggcaaggacaagcacgaggacggcggcgacaaggagcagggcggcggcggcttcatcgacaaggtgaaggacttcatccacgacatcggcgagaagatcgaggaggtcgtcgggttcggcaagcccacggccgacgtgtgcggcatccacatcccgcacatcagcctccaccgcgccgacctcgtcgtggacgtgctcatcaagaacccgaacccggtcccgatcccgctcgtggacatcgactacctcatcgacagcgacggccgcaagctggtgtcgggcctcatcccggacgccggcaccatccacgcgcacggccaggagaccgtcaagatcccggtgtcgctcgtcttcgacgacatcaagagcacctacaaggacatccagccgggcagcatcatcccctacctcgtccgcgtcgtgctcctcgtcgacgtccccatcatcggccgcgtcaagatcccgatccagaaggacggcgagatccccatcccttacaagcccgacgtcgacgtggagaagatcaagttccaccacttctccttcgaggagaccaccgccacgctccacctcaagctcgagaacaagaacgacttcgacctcggcctcaacctgctcgagtacgagatgtggctcggcgacgacagcatcgcctccgccgagctcacacagaccgccaagatcgagaagcaggggatcaccaggatgcaggtgcccttcagcttcaggcccaaggacttcggatccgctgtctgggacatgatcagggggaggggcacgggatacaccatcaagggaaagatcgatgtcgacactcccttcggcaacatgaagctgcccataagcaaagagggtggaaccacccgcctcaagaaggaggaggaggaggacgacgacgatgacaactgaagtgaggactgctggggggcgctgctgttacctttcacgaaacgcagcgaagcagaagatgcggggatcgtcgtcgacctgatacccacacccttagcgctgattccagaagctcacggcctcgcgggctcaacctcaaaccaagagtgtaatccgcctgttgcatcacatcaacaagttaacacattggatgtcattagatttgtatatgaactgtaggtcattttacctcgcatatctatccaatagaggggcatatgctaggctccatccttctgttgtctaaaccaaaggaagcagcacacaacaactacagctagggatgttgctcgacgacgactgccaaaatcattctccatggtctatcagaaggtagcaaaatagttgtgttaataacatggtcttgctcttcaattaggtgcattttatgttattagtaccacatgttgttgcatcgtgagatgatcctccagtggtaaaatatgcctgttatgtgatcattgaccaagatatgttgctcagaaaatgtt

SEQ ID NO: 15488 - DNA, 144 bp, Zea Mays
ccgcctctaacaaggatgtggcggctattaataaagactctggggttatgcaaaccctggacacgcctctaatgggctcaacgaagatacacggcccaaaagcccaaaagacgacgtcacagcgccggaacagattctgaacgt

SEQ ID NO: 15489 - DNA, 222 bp, Zea Mays
tcgtcttgaaggccatgaacacaatcatgatttctgatttcgccattacttcgggcacctcgcgagagacacatgagctttcttctcctttccaccaaaacgtcctagaatctttctctccgacagcaaatggcggtgcagtggtgagaaagtaaagcgtccgtgcttaacgacgaggtcgacggttgatggcacggaggaaactgagttcagccgtgacag

SEQ ID NO: 15490 - DNA, 1698 bp, Zea Mays
aataagctgggtttgaaccttggatgttagcaagttcagggatgtgaaactgcaaattaatagttccaggacttacatgcatctctggacaagctcaaagatgctgatgttctctacccactctggaagaattaaaatgtttcctgaaagaaataacaccagaggacaattgggctcctctcaagagaatgcccgcaagatctatccttaaaaggacaatcagtcaaaggaagatcaaaagtaatgctacattaagcaccatcaatgaagaaaacatagatgatgctgccaccatggattctgttgcatcaggaaagaggattataaactcgaagtttgcatcagagaactcactggaagttagtggtggaacagaaattactttggatgctttggctgcttacctaaaatatcttgaaggcacaggaaatgctagttggcaagagttgcatgataaagtgcgtttagctgaaaccagatatggtgcttcattctacatcttgtttggtcctgcaattcaacttggagtcatatctaggaggaaagcttacactgagactatccaatatgaaaaagatcgcaatgcaggttttctatcaccatttgggtactcaacacctacagtaacatcagcagtagatgctatatgttcaatggagtggtattggctcttggcatcaaaatcccaagtatgcatcgaggggaaatattctataagaatttggagatggaagggttatcttgtacagtacacctttcttggcaacgaaggtccacctgttcttcttgtgcatggttttggagctttcctggagcattttcgtgacaatatagacaagattgctgctacgggccaccgagtttgggcaattactcttgttggctttgggaaatcagagaaaccaaatgtcaactattcagaacttttctggtctgaactactgagggattttattgttgaaattgtgagggagcctgttcatcttcttggcaactctattggaggttatctctgtgctattgctgctggtttatggccttctcttgcaaagtctctggttcttttaaactcagctggttcagttgttccaaattactccttcatcccactgagtgaagaaagacgaacatcatggatttccaggttgcaggcacagctccttttgctcttcttgaggtcaagggcagaaggcattcttaaagaatattatcctacaagaactgaacgggtggacaagccacttctggaccagattgtaagagcttcatatgatcctggtgctgcaaaagtccttgagagtgtattcaacttcaatctttcaattcctcttaacttcttatttgattcttttggagggaagatattagttatccagggtatgaaagacccccttacaaaatctgaggcatttgtcaccatgctccgagaacattgcagcaaggttcaaatcagagagttaaatgcaggtcatgctccacatgatgaagttccagatgaagtaaataccatactatgtaaatgggtggagcagattgaagttaagccagccctggagaagaccaaggcaatataggatcagagcagacccggacgcctggtttcaatatcagcacatgccatcataggctcacgacgacgaagagctgtcactttggccaccttcccccagcaaaaagaacgcgagcattacctctagg

SEQ ID NO: 15491 - DNA, 3468 bp, Zea Mays
cttctttctaccacaatcttccactaggtgaagatgtcccaccactgcaattgaaagaaggtgtcttcaggtgcatcatgcagctctttgattgccttctaactgaggttcatgagcgttgtaaaaagggtttaagcttggcaaaacgcttgaacagcacacttgctttcttttgctatgatcttttatcaattattgagcctcgccaagtttttgagctggtttcgttgtacatggacaagtttgcaggagtttgtcaatcagtccttcatgactgcaaattgacattcctgcagataatatgcgaccatgatctattcgttgagatgcctgggcgggatccttctgatagaaactatctctcgtcagttctcatccaagagatctttctgaccttagaccatgatgatttatctcaacgagcgaaggctgctcggattttggttgtccttatatgcaaacatgaatttgatgcacgctatcaaaaaagcgaagacaaattgtacattgctcagctgtattttcctcttatagggcagatccttgatgagatgcctgttttctataatctgaatgccattgaaaagcgtgaagtgctagttgtcattttgcaaattgtgaggaacttggatgatgcaactcttatcaaagcatggcaacaaagcattgctagaaccagattgttcttcaagcttcttgaagaatgtataatccatttcgagcacaacaaaacaggagacaacatgctacttggtgctagttctcggagcccagatgtcgagcatcctgcatccccaaagtactctgaacgattgtccccatcggtcaacacatatttgtcggaggcttcgaggcatgaaataaggcctcagggaacaccagaaaatggatacatgtggaacagggttagccctcaattaagttcccctaatcagccctattcattgagagaagcacttgctcaagcacaatcttcaagaatcgggtcaaccgccagggcattgagagagtctctacatccagtgctgagacaaaaaatggaactttgggaagaaaatctcagtactgccgtgagcctcgaagtgttgggaataactgagaagttttcagttgctgcaggcgctcgaagcatcactactgattacgcgaagctagattgtgtaacatcaatcttaatgggtcttttatctaggaaccaatccttggctttttggaaggctttccttcctgtggtctacaatatatttaatgttcatggtgcaacactaatggcaagggagaatgaccgcttcttgaagcaaattgcttttcatcttttgcggcttgctgttttccgaaacgattcgattagaaaaagagctgttgttgggctgcagattcttgttaggaactcattcaactatttcaaaaacactacaaggttaagggtcatgttgacaattactttgtccgagttgatgtccgacgtgcaagtaactcaaatgaaattcgatggttctcttgaagaaagtggtgaagctcggcgccttaggaaatcactggaggaaatggctgatgtgagaagcaaggatctgttaaaagattgtggcctccctgttactgcattggaggcggcccctgaaggctcctctgataataggtggtcttgggtagaggtgaaacatttgtctaaatgtctagtccaggcccttgatgctggtctggaacacgccctcctgggttctgtagtgactgtagacaggtatgcagctgccgagggtttctataaactagctatggcctatgcacccgttccagatcttcacattatgtggttgcttcatctgtgtgatgcacaccaggagatgcaatcatgggctgaagcagcacaatgtgcagttgctgtagctggcgtgatcatgcaggcacttgttggaaggaatgatgctgtgtggagcaaggagcatgttgcttcgctgcgcaagatttgccctattgtcaacactgatgtgagtgcagaagcatctgcagctgaagtcgagggatatggtgcatccaaattaacagtggactcagcggtcaaatatcttcaactagccaataaacttttcacacaagctgaactctaccatttttgtgcaagcattcaggaactcataattcctgtgtataaaagcagaagggcttatggacagctggccaaatgccacacatcgctcacaaacatctatgagtcaattcttgaacaggaggctagccctataccattcattgatgccacatactaccgagttggtttctatggtgagcgttttggcaagctcaataaaaaggagtatgtatttagagaaccacgggatgtacgtcttggtgatattatggagaagcttagtcatatatatgaggctaaaatagatggaagtcacactttacacataattccagactctagacaagtcaacgctgatgagttgcagcctggcttctgctatttacagatcactgctgttgatcctgtgatggaggatgaggacttgggtagcaggagggaaagaatattttctttatctactggtactgttcgtgcacgtgtttttgaccgttttcttttcgatacaccattcacaaaaaatggaaaaacacaaggtggtctagaagaccagtggaagaggcgcacagtgctccaaacagagggttcctttcccgctttggtgaaccgtctgccagttatcaaatctgaatctctggagttctctcctgtcgagaatgcgattggaatgatcgaaacaaggacagctgcattgagaaatgagctagaagaaccacggagttctgaaggtgatcaactcccaaggcttcagagcttgcaaaggatactccaaggaagtgtggctgtgcaggtcaacagtggggtattaagtgtgtgcactgcattcttatctggtgagccagcgactaggctcagatcccaagaactgcagcagctcatcgctgcattgcttgaattcatggctgtctgcaagcgtgcaatccgtgtgcatttcagattgataggggaagaagaccaggaattccacacccaacttgtcaatgggttccagtcactcaccgctgagctatctcactatatccctgctatactctccgagctatgatagaactgtagcaagccagaaattaggtagcatgtgaatggttgttcattcattcagttgcaggttcccaccaaatgtccatatttccattagctttggttgtatagttctaggaaccggaaattaactagtcttcgaagttctgtaccgtattgcagaaccgattcctgattttggagtgtaaagtctgtataatacctagtgttatctgttatgcaccagttatatgctgagttccttcttttttgcagtttgctactatgtcacaactagcggacattttgcacttgtattgtgatacatagtgcatatatatatatatatatatatatat

SEQ ID NO: 15492 - DNA, 445 bp, Zea Mays
gttctggctcttgcgagcatactctgaacacattgagatatgctgacagagtttgtcaaaaggaagcaacgccaagaaagacgtgtctttggcagtgcctttaagagagtcgaactcttccccactgccttcagttgtaccctcattctctgcatctgaggtgatgaacgatatcaccgggagaagcaatttcggttggcccaagcagcagtatgttaaagaacagcctgctccaacatttgttgaacgaatgcccaaggcaaaggatgcggtggagttcacatcatcaaatatagctgaagtaccagatataatgtaccagctgggaaggcagccatcaaggaaagatgtcactttggcgaacaatatgagaaattccgttgcttacccaactagaagggttgaaccagatgatgatgatgagcatctaaataatcttctccag

SEQ ID NO: 15493 - DNA, 939 bp, Zea Mays
cacagaattactaaggatactactggccatagtgcagatggtaaagctctcacttcagaaccgcatataggggaaacacatgtcaactcagcttcagaatccataccaaatgacgcagctcccccaacccagagcaaaatgaatgggtcgaccaagaaatcattagtcaacggtgttttggatcaaccaaatgccaactcagggctagaatcttcgggaaatgattatcctagctacactaactcgagcagtgctatgccacccgcgagtaccgagttaattgggtctgcagctgctgttatagatgttgattctgctgagaatggcccaggtacgaaaccagaacaaccggctaagggagcctcgagagcatcgaaatccaaggttgttccacgaggacagaagagggtgttgcgaagcgcaacaagaggaagagcgacgtaggggcattgctgcgctacattgttgtgtactaatatatgttgacggcccagaagggcaacatgatccctaggttaactagagctagcgccgactggtcgtttccacgtacgatgcactgcgcatcagcctgtatccatgttgtattatcgtagggcttgtaatgaccacatgccctggttagagttgatcattaggaccagtagctgcttgatttgtgtctcggtgatctagctttgggtagtttgtgcagttggaaggagacagtttgttggttgtattgtattgcagcgcacagctagcaagtgttgttgtagccatcaggtacgtgttgtgtagtgaatccaggtccagggacagagctgttcctctgtatggtggaccctgaccctttgttttgtgccatggggcctttctgtgttgtgcttacatgagctggagctgctttatttttctttttttatacgattaatacgctgctgatgagtcttttttttt

SEQ ID NO: 15494 - DNA, 1284 bp, Zea Mays
aaaacgtctcaccctcgcccgtttgctgaacaagtggtgctgaactaggtgctcaaggtttctgtcaaaggaaacaatggcaatgattcttctgttactgttcggttgtatggaccaaatacagacttggtgattgatcggaaaagggaattgcaggcgataccgtatctctcagctgcagggttcggggctcggctgcttggaatgtttgaaaatggagtagttcagtcattcatctatgctcgaacactgtcacctgcagacatgaaagaacctaaaatagcagctgaaattgccaaggagctacgcaaatttcatcaagtagatataccagggtctaaagaaccacaattgtggaatgatatattcaagtttttgaagaaagctgcagcattgaagtttgaggataacgagcagcaaaagagatatgtaaagatctcatttacagaaatacaagatgaagttaaagaacttaaggatctcttggacattctgcatgcacctgtggtttatgcacacaatgacttgctttcaggaaatctgatgctcaatgatttggaagggaagctatattttattgattttgagtatgggtcatacagctaccgtgggtatgacattgcaaatcatttcaatgagtatgcaggatttgactgtgactttaatttgtacccagataaagatgcccagtatcacttcttcaggaattatctgcatcctgatagacctagtgaggtgcaggcacaagatatggaagtgctttatgtggaaacaaacactttcagactagcatcgcacatttactgggcattatgggctcttattcaggcaaaggtatccccaattgactttgactatcttggatacttcttcttacggtatggtgagtacaagaaacaaagggactcctgcttcgccttggcacaaagtttcctctccgggctaagaaatggctagagcctgagaatctggtcaagggtttgcactgttgtacgcatactcggggcgggtacgcgttgtgatcatcgtctgctactcagaaactctattatagtggtggtagcagcctcattttgttgtatctgatggtagtttcgtcatcgcctgataggaaagtctcatgatcgccctcgggaacgcagggtggcgagatctgtacttatatttgtaataaacacaatccggatgggttctgtcctgtgcaatttgttgtgcgcataagcattccgtgtttttatacattattgtgaggaattgcataagtttttttgtttttcgattaaa

SEQ ID NO: 15495 - DNA, 1573 bp, Zea Mays
ccttataactattgtctgtgcattgaggatccaactatttttatatgataattacaggaaaacaatagaagtgctactccaacaatattttgcataaaatccagaatggatgtactagagaaacagaaggatgtccttgatactgttctgaacatctacatcaagactatgacagaggatgacgataaagaggtagttgcacaagcttgcatgagtgtagcagacattgtgaaggactgtggttttgctgcaattgagccttacatgctgaggcttgctgaggtaacactggtccttttacgccaagaatcaagctgtcagcaagtagagtcagatggtgaggatgatggcgacattgaccatgatgaagtcctcatggatgcagtttcagatcttttgcctgcttttgcaaaagtgatgggatcttattttgatcccatatttgcaaaattatttgatccgttgatgaaatttgctaaatctccccatcctccccaagataagactatggttgttgcaaccttagctgaggttgctcaggaaatgggtgctccaatatctgcttatgttgataagataatgcctttggtgttgaaagagcttgcatcatctgatgctactaataggagaaatgctgctttctgtgctggcgagatatgcaagaatgggggtgctgcagcactgaaatactatggtgatatacttcgttctctgcataatttgtttagtaactcagaatcagatgatgcagtaagagataacgctgctggtgctattgctaggatgataatggtgcagcctcagtcgattcctctcaaccaggttcttccagtttttatcaaagctttgccactaaaagaagatcatgaagaatcaatgactgtctatggttgcgtctgcggtttattattatcatcacatccccagatcctccctctggtgcctgacgtcatacatgtctttgcccaagtggtggtatccccagatgagagcgatgaagtgaaaacaaatattggcaaggctatttctcacttgatatctgtctatggccagcaaatgcagccaatactgagtgcccttccaccagcccatgcaaacgcgctggcttcatttgcgagtagaagatgaccttggaggaccagcttttctttggttccttgttctgcttgattttgttttggttttgtcgacgattgccattttctgaggatctggtcacatggatcaggccagatgggagtgcttgcattgcacattggcaagggcgagcggagttgtcaggttggcgcatgattgattatatggtgagcttggtttctctttgagatacatagttgtgcttgctttggagccctgtacggttatgagtgcctgcctgtattcaggttccggatttggttatttatgctcttgttttttatatttttttgcctgtatttgcaattcattgattgctgttgtatatagaagagagttttaaatagagagaatgtacgactctgcaactggcaaattttgtatacatactgctcataccacttgctaatgttcgtccggattgcgtaccttgtgc

SEQ ID NO: 15496 - DNA, 3948 bp, Zea Mays
cagatttctgttggtcaaagcaaaaactgtaatttgtggctgaaagaccaacctgttagcaaagtgctttgcaagctgcggcgccttgagcaaggaggtccatgtgagttagaagttatagggaagaagggtatggtccaattaaatggaaggtccgtaagtccaggcacaaaagttccccttacaggaggggatgaagtcatattcagttcatgcggcaagcatacttatatttttctttatcctttgaatgacaaagttcctaaaacggtgctatcatctgctgttagccttctagaagctcctgttgctagtgtaaagcgtatccgtacagataagagaacaggagacacttcagctgttgctggtacagagatgatgacatctacatctaatcagaaggatgtagcagcagtacctcccgcgtcagctggagagaacagccaaagagtagtgcggccattggcatcatctgcttctgataaattgaaagggcgtgctgtgagccctgaaaaggaatttgcgaatggggaaaatgctaatgaggttaattctaacatcgaagactctccaatggttgttgctgcagcccccatatctcctgatgctgctgcgaacgatacctgtcaacaaaatggctttgtctctgattctcatctcggtgcggaaatcgctcttgaagatcagagggatcacatcatcagggagcttaacgcttcaaccaacgtgcctccaagtagatgccaagcctttaaggatgggatgaaacaaggaattatcaatccaagtgatattgatgtcacctttgagaattttccttattatctcagtgagaatacaaagaatgtgctcttgtcatctgcgttcatacacttaaaaaagaaggagttcatcaagcaatttgttgagatctcatcaataaaccagcgaattttgttatctggtccagcaggttccgagatttatcaggaaacattggtaaaggcacttgccaaacattttagtgctagactccttgtggtggattcacttttgctgcctggggcaccttcaaaggatccagaattccagaaagatgttgggaaggctgataaatcaggggataaggcagctgccgagaagtttgcaatatatcagaagcatcgttcttcgttggcagacactgttcacttcaggaggccagctgcaccaacttctagtgtgaatgctgatattgtaggaacatccactctgcattctgcatctctaccaaaacaggaatcgtcaacagctacatccaagagttatacttttagagaaggtgatagggtgcgttatgtgggtccagctcaaccatgctcgttgtcacaaaggggaccaagttatggttatcgaggtagagtgatgcttgcttttgaagataatggatcctcaaaaattggagtccggtttgacaagcagatccctgatggtaatgatcttggtggtttgtgcgaggaagatcatggcttcttctgctctgctgaattactgcgcccagacttttctgctggtgaagaagttgagaggctagctatgaccgagttaatagaggtcatttcagaagagaacaaatctggacctctgatagtgttacttaaggatgtcgagaaatcattcacgggggttacagagtcactatcatctttgaggagcaaacttgaatcgcttccacctggtgttcttattataggatcccacacccagatggacagccgcaaagagaaggcacatcctggaggttttcttttcacgaagtttgccagtagtagccagactctttttgaccttttcccggatagctttggtagcaggttgcatgaaagaagcaaagaaagtccgaaaacaatgaaacatctaaataaacttttcccaaacaaaattttgatccagcttccacaggatgaagctctacttacagattggaagcagcagttggatcgtgatgttgaaacccttaaagccaaatcaaatattggtagcattcgcatgtttctgagccgcaatggaattgaatgcaatgatcttgaagaattattcatcaaagaccaatcattgagtaatgaaaatgtggacaagattgttgggtacgcagtaagttatcaccttaatcagaataaaattgaaacctctaaggatgccaaacttgtactcacaactgaaagccttaagcatgggctcaacatgctccaaagcatgcaaaatgataacaagagctccaaaaaatcactgaaggatgttgtcacagagaatgagtttgagaaaaggcttttggcagatgttatacctccaaatgacattggagttacctttgatgatattggagccttggagaatgtaaaggacacgttaaaggagctggtgatgctccctttgcaaagacctgagttgttctgcaaagggcagttaacaaagccttgcaaggggatattgcttttcggacctcctggcactggaaaaactatgcttgccaaagcagtagcaactgaagcaggcgctaatttcatcaatatatcaatgtcgagcattacatcgaagtggtttggtgaaggggagaagtatgtaaaggctgttttctcactagcaagtaaaatagcacccagtgttatatttattgatgaggtcgatagtatgctaggaaggagagaaaatccaggggagcatgaagcgatgcgcaagatgaagaatgaatttatggtaaattgggatgggttgcgcactaaagataaggagcgtgtgcttgttcttggtgctacaaataggccttttgacctcgacgaggctgtgattaggaggttcccccgcaggttaatggtaaacttgcccgatgcatcaaatagggagaaaattctaaaagtaattttggcaaaagaagagctgggatctgatgttgatatggactcgcttgccaatatgactgatggttattcaggaagcgacctgaagaatctgtgtgtgaccgcggcgcattaccccatccgagaaattctggagaaggaaaagaaggagaagaatttggctaaaacagaaggtaggccggagcctgcattatatggaagcgaggacatccgccctcttagcatagatgacttcaaatctgcccatgagcaggtttgtgcgagcgtttcgtccgactcggcgaacatgaacgagctccttcaatggaacgacctgtacggcgaaggcgggtcaaggaagaagaaagcgctgagctacttcatgtgatggggtgagagcatagaatccagaaggatcacagccgtggcataagatcagaaggaacacagagcggccatagtaccacacccactatggccctaaatccagtcaagttttcgctccttccccctccctcagtagccgccgccgccccgccgccgcctggtgtaattagaactgtgtacggagtcgagttggtttgccagctgtttcaaggttacagagttgagatttggaattacaatggcgccattgccctcctccaacccccccccccccccccccccccccccgttttcttcctcccataagttgcggtcactgtccttcttggactctctggcctttgttcttgtaaatgcgaaatgaagggatgtgaaataagaacatcttcgtcctgttgttgacagtatggtacacatatttaatttttgtacttgaccggcgatgataaattggatcggtgccaacataagaattatggaaaggtgcctttcctgcccgccgaaatctgtgtgtatgtcgagtgggctgggtattgtgaggtgaaattttatgcgtctcctgtcgtcttgtggttgcgaaatgcgtgggagcaaacgtccggcataatgaactttcgtcatttcttatggctgcgaaatgcatgggttcggtatgtatgaattttctctgtcataatgaacttggattctgataacggtgcattgc

SEQ ID NO: 15497 - DNA, 1174 bp, Zea Mays
ccaccttccatttccatttcagggtaccactaaacaatgggggttctctggtcatagaacagactgaagctctggtatcagttgatgtgaatggtggtcacagtatgtttggtcagggaacttcacaggagaaggctattttagaagttaatcttgaagctgcaaagcaaattgcccgtgagttgcgcttgagggatattggtggcattatcattgtggattttatcgatatgtcagatgattcaaacaaaaaactagtatatgaagaaatgaagaaagcagtagaaaaggatcgatcaacagttggtgtttcagaactatcaaagctaggtttgatggaaataactagaaaaagggtccgaccaagcgttactttcatgatcagtgagccatgtacatgctgccatggtactggtcgtgtggaagctcttgacacatcgttttcaaagatcgaacgtgaaatatgtcgacgtcttgctgcctctcgacgaaaatcagaccctgagaaaccaaaatcatggccaaggtttctgcttagagtggatcatgagatgtgcacgtatttgacgtccggaaagaagacaaaactaggactcctgagtagctcccttaaagtgtggattttgttgaagattgccagaggtttctcccgtggcgcttttgaactgctaccgtactcggagaaggaaaactactctatggagaaagaaacatcagagttgccccaaaaagagtccaggcccaagctatctgtctttcctatcaagaagtggatgagccgggccaagcgtgctaagtgattctcttttattagcatggggccttcctttgtattcacaacttagaatgagtaaagattcaggaagaggatcattcttttcgttcatgaaatctcagcgtcggatatctagagatctctcgaccagcttttgtttacatttttttaggaattcagacaattccatgtttagtttaatccagaaaattttcagcaaaaatgtgacgatatatataactgtgcaaatctagtacccttaatagtagtagatctcttaaatggttcttagtgttaccataagatacataatatatttatcatgagaagactacgattactcttttaagttactacattgttatgctccttaggatttgcttatgaggttcctcgtga

SEQ ID NO: 15498 - DNA, 2165 bp, Zea Mays
cgagggaagcatttcccctgcaaatgcggagagtccgcttcgaacgcgcgacatggtgactcaagttttaatgttaccgacagagatttagatgatttttttggtggaccagctttccttgcttgggctagaatggggaacttgcatgggtggggtggaccactgtcacaaaactggttggatcaacaattggcattgcagaagaaaattctatcccggatgattgagcttgggatggtccctgttcttccatcgttctcaggaaatgtcccagctattttcgcaaaattatttccgtcagccaacattacgcgacttggtgattggaatacagttgatgctaatcctaagtggtgttgcacttatcttcttgatccttctgattcattgtttatagatgtggggcaggcttttatcaggcaacagataaaagagtacggcgatgtaaccaacatctataactgtgacacattcaatgagaatactccaccaacagatgaaccggcatatatttcatcacttggttctgctatctatgaagcaatgtcccgaggtaacaagaatgcagtatggttaatgcagggttggttattctactcagatgctgcattctggaaggagccacaaatgaaagcactacttcactctgttccaattggtaagatgatagttctcgatttatttgctgatgtcaagcccatttggaaagtgtcctctcagttttacggcgtaccatacatctggtgcatgttacacaactttggtgggaacattgaaatgtatggcatacttgattcaatttcatctggccccattgatgcccgtacaagttacaattcaacaatgattggcgttggcatgtgcatggagggaatagagcacaatccagttgtttatgaacttatgtctgaaatggcatttcataataagaaggttgaggttgagtgagatcgggattaattgaagttttctgccttgagttaaatgttgacctgtgcatcagagaaggattgtccaaaacaccaaacatttgtaatttgtgtagtttcttggtagacatgctttctgcgaccttgtttacatgaggattggctaaaaacatactcctgtaggagatatggtcaagcaaatgctgacatagagaaagcttggagatatttgtatcatacaatatacaattgcactgatgggattgcggaccataataaagactatatagttgaatttccagacataagtcccagctcagttacttatcaggtttctaaacgaaggggcatgtcaattacgagaaaccataggaggtttttcttaagcgaggtgtctggaatcctaccgcagccgcatctgtggtactctacgaaggaggccgtcaaagcccttgaactatttcttgatgcaggaagcacattttcagaaagtctcacgtataggtatgaccttgtcgacctaactaggcagtgcctatccaaactagcgaatgaagtttaccttgacgcgataagtttgtaccaaaagaaagattcacatggcctgaatgctcacgcgaggaaatttcttgagatcatcgtggatatcgatacgttactagctgctgatgataactttctgctgggcccctggctggaaagtgcaaaaagccttgctataactgaaaaggaacgccagcagtacgagtggaacgccagaacacaggtgacgatgtggtatgacaacacggagaccgagcagagtaaactgcatgactacgccaataagttttggagcgggctgctgaagagctactaccttccaagggcgtcaaagtacttcgcctacttaacgaggagcctgcaagagaaccggagcttccagctggaggagtggaggaaggactggatctcgtattccaacgagtggcagtccggaaaggaggtgtacgccgtgaaggccacgggtgatgctttggcgattgccaggtcactgtacagaaaatacttgaggccttgagctagtgctagtcaatgcacggatgtgaccattagaataagtggattccacatctctctccatcaatttaagtttaattgatacatataatttaatatatggtgtcagtcagatatctttgagttttaaatcttgattagcacaattaaataaaatagatattgctcgttcctatt

SEQ ID NO: 15499 - DNA, 1601 bp, Zea Mays
cggatggatttgaggccaggtgtggcggtgggtggcagccaggcaagtttgcaatgactcatcaagcagctttggcaagtgttacagcacaggcacaaatgcacttgcagtcaccaactccatctgcatgttcggaagtgccatcaagtccattttatatgacaccaagatctctagtgccattgcagcattcaccatcagtaactgaaggaaatatttgtacaccaattgctgacaagtcattttcatctgattcaaaatcacaccatgttgtaaatatggtagctgatggcttcaactggaggaaatatggtcagaagcaggtgaagagtagtgataattccaggagctactatagatgcacaaactctggttgtctcgctaaaaagaaggttgagcatttccctgatggccgcgttgtggaaatcatttacagaggagcccataatcatgaaccaccacagaagaccagatttgcaaaggaaagagtgactcctattagtgttccctctggaggcgaaaccttgaggcttgtgaacacagaaattgtagaatctagcacgcctacctgtgaattggaacggagtgccatctcagaaacttctgagcagcatctcttttgctcaagtgactgcgaaggggatgctggtaacaaatctgaagatgaacatcctagcgcggaagccctgccaaagcgaagaacacttgaggctacagcaccaaatttaacgccggttcgcagaactgttagagagcaaaagattattgtgcaggctggaaagatgagtgatggatacagatggcgtaagtatggacagaaaattgtgaagggaaatccaaaccccaggagttattaccgctgcacgcacggtggatgccctgtccgtaagcatgtggagaaggcgccagatgatgttaacaatattgttgtaacgtatgaaggcaaacacaaccacgacgaacctttcagaagcagcagcataccagtttctgtaatcagtccatcagcgacagccactgagcaacccaacacatcaagtacgtcagatgagagacctccaaccattacccagaaggacgccaacagtgagtctgataaggagacaaccttgaaatttggaggcgagaaggcactcgaatctgcgcaaacgctgctcagcatcaaaactaactccgatgacatgaagaactctgtcctgaaggaaacttctgctgcagttccagtccaaaacaattgagcatgctgagatagggtgattctattgacatctcttaggctgtcatatttattggttgagtgatatgctattatgttaacttgtatgacgtgaggcttggtgttcggtattccgtgtggagcatttgaggaagcattaggtttcaggaagccacgactggttgtttctgcctgtatagattcccattccctagtgtgtacaggtactgtattttatctgaggccagataacatgtgtggggtggttcttgagaacctgtgtgtgctgtattgttctagctcgatctattgcaatagctgatacgagattgtcatttatttatcggtataacacatcgtgcgtgccgtttgcagtttgtgatag

SEQ ID NO: 15500 - DNA, 251 bp, Zea Mays
aactcctctgaggccaaaagagaatcccggcccgtgtccagaagacgcctcagccaccgcaaaatccccaaatccgcggcggagaggagagagccggagagaggggcgcagccagagagatcggagaaggggaagaagatggtgcgggtggcgacctacttcgcgatgaccttcggggcgttcctcttctggcagtccatggacagggtccacgtctggatcgcccttcaccaggacgagaagttgctcga

SEQ ID NO: 15501 - DNA, 2152 bp, Zea Mays
cagaatcctgacttcgagtcttgtcttgtgggctgtgcctgtgacggactgacggcacagaggtaatggaggccgcgcctaccaccatcaccgtccaggtcaagttcgccgggcggacgatccccgtggaggtcccggcagcggcttccggcgcggagctgaagcgcctcctccagccgctgaccaatgtcctcccgcgcggccagaggctcatctgcaaaggcaaagtgctccaggatgccgcaagcctgagctcgatgcaagtagtgggcggatccaaggtgatgctcatcgcgtcgcaggggctccatcagggggatggtcctatcacaaataatagcagtagctcagcaacaactgtgagaaggccttcaaatgttaaggagaatcaaacacaaaagccagaggtagttgtcaccaaaagccgatctgagcgctggaagttaacaggtgttgttgcgctgcaagactgtgacttgaaggtaatacctgaagaagtctgggattgtggcacctcgatacgaatactagacattagctacaactgtatcaaggaaattccacacaaaatctctgctcttaaatctctaaataaattgctcctaactgaaaatgatatagttgatgatagcatctgctgggaaggtctatcatgtcttcaaaagctattgaatttatctttaagcgaaaaccgactggttagcttgccaccaactttgggttcactgacttctcttcgtgaactgtgtgttgcaaagaacaggcttgataacttgcctgtagaaataggactgctgaagcacctccaggtcctcatagcaaataacaacaggataacttcattgccttcatcaataggagattgtgaatctctcactgtggttcacctgtcatcaaatctcttaactgaactgccagagacctttgcgaaccttcgtaatcttaagaatttgcttataagcaacaatggccttacgtccttgccagcagcgtttttcaaaaagtgctcgcagcttactacactggatctccatggcacagaaatcacaaatgatgttcttcgacaggtggaggggtgggaagagttcgaccagcggcggaggcagaaacatcagaagcagctcgacttccgtgttggctcatctggtgtgttcgatgaaggcgcggatgatgataataggcgaaggtgactgcctgaaaattgtgagcataatactttgctacgatatttctcccaaagaaccgtagaaatgtacaactgaaaactacttctatggagcccgagatgtacaacctttttcattcagtcacgtagatagacacgtcaggaaaacaacatccttggaaagccatggcagataatgaggtaataataacaacgccgcactcatgcgacgcccccattgaccctgataacctgcccgttcacccagcccgaggcctcgctcgccaggaacgccaccacgggcgctatgtctgtcgtctcggctatacccatggagttctttatcctctctaggaacgcctcatccttcccggcaaggaagagctccgtgcgcacagggcccggcgccaccacgttggccgtgatccccttcgccgccacctccttggccaggaccctcgtcatcgcctccacagcggcgttggacgcagcgtacgccgcgtagcccggcggcagcacggcaaccgtcgtggacgagaacgtcatgatgcgcccaccgctgttgggggggatgcgccgggcggcctcccggcacaccaggaacttgccgcgcgtgttcaccgcgaacgtggcgtcgaagtcctcgacggcagtgtcggccagcgcggggtacttggcgtccatgatgcccgcgcaggcgaccactacgtggggcggggacccgaatgcctcctcggcgcggtcgaagagcgcgcgcacggcggccgggtcggagacgtccgcgcgcacggccacggcgcggaggccgcgcgaggcgagctccgcgacgagctcctcggccttggccgggttggtggcgtagttgaccacgacacgcgcgccgagcgcggcgaggtgggacgacacctcgcggccgatgccccgggagccaccggtgacgagcgcgatgcggccttcgagcgccggcgcggtggacactgctgccat

SEQ ID NO: 15502 - DNA, 725 bp, Zea Mays
ctaatgagtatttgctcagagaacagcctgaagaagtgaagatctcaatgaactcaacgcaatgttctcaaagcctctgaaagagcttttgtcaactgatgaaggagaggtagacgatgttgctcttatttcaatggacagcaaaggtatcgatatccgtgtccgacaaggtgcacagttcaacatacagagggtgccctttgaggtggatcacagcgtcgaaacactggatgaagccactgaagcgctcaggaggataatcagcaagtctaggtggcacacaaagagctcagtcataggacgcccttgaaagctgaagctggaggctctatagaacagtttgtacagtgcggcagcagtctctactatggtatgtgccaataagaggaactccgttccagagtttcgtctactgccaagggcctcgtgtttgtgggtgggttgaataaacacgcaatttgagatgacgctgttttgaccatgaatttagattgaacgcacaacggcaaaaaggattttatgtgaagttgtcgatgggttgaaaaagatgtgaccatctctgacggtctgacctgcttcattcatgaggaattgaggataaagcacatttgaacatgcgcatgccattttgtttttaccaaatccagtttgcatgaaacgtgaaagtgggcatgcctagattgattgtgtcaggcgcgaacaaatcacccagtttttgagtgcca

SEQ ID NO: 15503 - DNA, 5102 bp, Zea Mays
cgcttccacagccagctctccccaggctcactcttctccccagttgcgttttctttggaagcttccatacacaactcgcatcgttcatcttccactgatgctatataaggagagagagagagagagatagagagagagagagagagagagagagagagagagagatgatctgatgatgcatgctgtaacagctcctgaactgcacaagttgtagtttggctgctggataataagttcatccatccatcaacgctacaaatcaaggctctgctcggacattgcgtaatccaagagaccgtcaaggcaaggcaaagccaacaccagacgagtcgagaacaccgcagcagagcgcggcgtccaatggacatggacggcaactccccgcggcggcctccccgccggcctgagcgggaggggagctacggctacgacatcgagagcatggacggctccggggccgggggcccgccgccgtggagcgcgcaccacaacggctcctccgaggccctgctccgctacgacgacggcggcgccgaccgcgggagcacgcaacagccgctgctgcggaagcgcaccgtgaacacgacctcgcagatcgctatcgtcggtgccaacgtctgccccatcgagagcttggactacgaagtcgtggagaatgaccttttcaagcaggactggcgatcaagaaagaagaagcagatatttcagtacatcgtactcaagtggagcttggtgctccttattggcctattaactggatttgtcggcttcttcaacaatcttgcagttgagaacattgctggattcaaattgctgctcacgagcgatcttatgctcaaggggaggtatattagagcattttttgtgtatggaggttgcaatttagttttggcagcagctgcagcagcaatctgtgcttatattgcacctgctgctgctgggtctggtattcctgaagtcaaagcttatcttaatggggttgatgcctattctatattagctcctagcacactctttgttaagatttttggttcaatacttggagtttcagctggattcgtgctaggaaaggaagggcccatggtacatacaggggcatgcattgccaacttgcttggtcagggtggatcacgcaagtatcatcttacttgtaactggctacgctactttaagaatgacagagacaggagagatttgatcacatgtggatctgcagctggtgtggcggctgccttccgtgcacctgttggcggtgttctgtttgctcttgaagaagcagcatcatggtggcgaagtgctcttttgtggagaacattctttacaactgctgttgttgcggtggtattgagggggctgattgagttctgtcgtagtggaaaatgtggtctctttgggcaaggtggattgatcatgtttgatctcagttcaactgttgcagtctacagtactccagatctaattgcaattatagtccttgggataattggtggaatctttggaggcctcttcaactatctgttggacaagatcctccgagtttatagtattatcaacgagagaggtgctccattcaagatccttctcactataacaatatcaataatcacatcaatgtgttcctatggtcttccttggcttgctgcatgcactccatgccctgttgatgctgtggagcagtgtcccactgttggccgctccggaaattataagaacttccaatgcccaccaggacattacaatggtcttgcatcactcttcttcaacacaaatgatgatgccatccgcaatctcttcagcaacggcacatcgactgagttccaaatgtcatctcttttcatcttcttcactgctatttactgccttggactagtgacttacggtattgctgtcccatctggtctctttatccctgttattcttgctggagccacgtatgggcgcatagtgggaactcttcttggatccatatctgatcttgatcctggcctttttgccctacttggcgcagcatcttttcttggtgggacaatgagaatgactgtgtcagtctgtgtgatccttctagagctcaccaacgatctccccatgctccctttagtcatgcttgttcttctcatatccaagaccatagcagatagctttaacaagggagtttatgatcagatagtggtgatgaaaggcttgccgtacatggaggctcatgctgaaccatacatgaggcacttggttgctggtgatgtggtgtctggcccactaatcaccttttctggggttgagaaggtggggaacattgttcatgcattaaggttaacgggccacaatggtttccctgtgcttgatgagccacccataacggaaaccccggaactggttgggcttgtgactaggtctcatttattagttttgctgaacagcaagaatttcatgaagggacgggttaaaactagtggtagcttcgttctgcgaagatttggtgcatttgactttgcgaaaccaggttcaggtaaaggtttgaaaattgaggacctggatttcactgatgaggagatggacatgtatgtggatctccacccgatcacaaatacatcaccttacacagtggttgagacgatgtcactggcaaaagcagcaatccttttccgggaacttggtttgaggcaccttttggttgtgccaaagacaccagacaggcctcccatagtcgggattctcacaaggcatgacttcatgcctgagcacattcacagtctgttcccaaacctcaatcctcacaagtaccattcagcatcaatggcaggttgacaaggagactctttctgcttctcatctatttggcattattcgggtgctggctgtatgtaaattgcaaaggtgtatgcgtatctggttttcaattggatccatctcatcttctctacatagttttgtttgtgtggattttgtagcatatgctctttttgcaataaaaaaaatgtggcagttgtttggctggtgactgcctattatgagcctgcggcaataaatgttcagcaaattgcggaatcctcccctaaaagaattgaaggccctgatggaagaaatcttcagctccagttcagaagtcagttggctcttccaatcttcactggtggaaaagttgaaggtgagcagggagcagctatacatgttgtgctgttggatgcaaacactggatgtgttgttacttcaggacccgagtcatttgcaaaattggatatccttgtgcttgagggtgactttagtaaagaggaagatgaggattggacagaagaagagtttgaaagtaatattgtcaaggagcgtgaagggaagaggcctcttttgacaggcgacctgcaagtgactcttaaagaaggtgttggaaccataggggagcttacattcactgacaactccagctggataagaagcaggaaattcagacttgggctgaggattgctcctggcttttgtgaaggtatccgtgtccgagaagccaagacagaagctttccccgttaaggatcacagaggagaattgtacaagaagcactacccacctgcgctgaaggatgatgtttggagattagaaaagattggcaaggatggcgcattccacaagaagttaaatgccagtgggatctatacagttgaagatttcctccggcttcttgttagggatcagcagagattacgtagcattctgggcagtggaatgtcaaataagatgtgggacagccttgttgagcatgcaaagacatgtgtcttaagtggaaagcattatgtatactatgctagagactcaagaaacgtgggtgcaatattcaataacatctacgagttcactggtttgattgccgatgatcagttcatttcagctgaaaatctcacagacaaccagaaggtctatgctgatgcattggtaaagaaagcatatgaggactggatgcaagttgtagaatatgatggcaaggcactcttgagcttcaagcagaaaaagaaaactgtcacgacaagaagtgacgttgcatctgcctcaacaagcaatcctgcttcatatggttcggccaattcacagaaacagttgtctcttccagcaaaagctggacaaacttcctcagcgggtactatgaatgaagcagatggaactagaaatgcatacaacgcaaatggaaaccagtcagcaagatatgcagccaacactcagagcattcctgcaaacgtcggcatgcaatacgacgggagtgcagtgtcgcctgaaatccagtttagtggttcatcccttcagagtcagtcttcaagagggtccaacatgctagcattgggccctccgcagcaacatcaaagtttcgaattcccagcgctcggccagcccgttcagccaacaggcctgaaccctttcgaagagtggccgcagcagcaggagaaccgtggcggcggtgtcgacgactacctgatggaggagatccggatgaggagccacgagatcctggaaaacgaagagatgcagcagatgttgcggctcctgagcatgggcggtgccggaaccagcctagccgaagacggcttcaatttccctccgtacatgcctgcgccttcgccgaacgtgagctacgaggacgaccgcacccgcgcgcccgggaaagccgtcgtcgggtggctcaagatcaaggctgccatgcggtggggcatctttgtgaggaagaaggcggctgagagaagagctcagcttgttgagctagacgactagaaagtattgaaccctcgagctgttcatgtaccagagttttcattgttgatggtgtttgtggatccggacggggctcggctatggccctgccccttaggaggacagcagttctggtcctgagcttaattctggacaaaactattttccgtttcccccctttttgtatgtatagcttttttttaccattttaaatgcgttgcttgtttagtgtgatgccggtagtcctgttgtgaaccttagcctgagctctgtacatccatctgttacagaattcaaatcgaaacaggtaaacattggcacttgctgggctgttgtatactcgtggtggtgaatctagccgagaaatattattgagg

SEQ ID NO: 15504 - DNA, 382 bp, Zea Mays
tgggtggtgtggatcatcagaagcgcatccaaggtcaggtcaggtgtgtgggggcatggcatggcaggtatggaggagttgctgacgctgctgttcaacgcgctgctgctggtgttcgtggtgaagctcttgctggccttgttccacaccaagatcatcgtcatcctcctctacatcctcgtcctcctcttcgccatgctcctctccggcagattccccggttggcgaagtaatccgattccaatgcagacatttttccagtcagcaatgggcactgcatctagtttcatctgcgctatctcctggttcttttcagtcagcagccattggtggcgaaatcaggatccgaatagcttgctgttctgtatgtattgaactgctg

SEQ ID NO: 15505 - DNA, 2605 bp, Zea Mays
gatggtgaagcatgcatgcatgaatgagcgcatggtggggatactaaaacgtgtactcgaagaggtcgaaaaggtgatgcaagaattcaggggcatgctttataagtccatggaggatcctcatcttgatcttgctgagattgagaacattgttcgtctattgttggagttggaacctgaaacagatccagtgtggcattatttaaatattcagaatagcaggattcatggattgtttgaaaagtgtactcaagatcatgactcgagaatggaagttttgcaaaataaaattcgcgaaaaagtgctctctgattcgaagtggaggcagctgcaacaagattcaaataaatctctggaagttgattctaccattggtgattctcctcgagttgatcagttgtcaacaaactttatggctgaggaagctgatagtttaagggccacctacattcgtaggctaacttctgtactgatccagcatgttccagctttctggagattagctttatctgttttcagtggaaaatttgccaaggcagcttctggtaacgtagtttctgattttgatgtgaatgcaaagccgactgcaaataagaatgatgaaaaaggtggagaagtaaagtacacaaaccacactcttgatgaagttggtagtatggttcaggctactatatcggcttttgacactaaggttcagagtaccttccgtgattttgaggaatgcaacattctttgtccatacatgagtgacactataaaagaaatagctaaggcctgtcagactcttgaagggaaggattcgtctccaactgctgtaaaaatgttgcgcacacttcattttgaaatgacaaagctttacattctacggctttgttcatggatgcgggcaacaacaaaggagatatcaaaagatgagacttgggttactttatccacccttgagagaaacaagtcccagtatgcgatttcatgcttgcccctggagttccgtgacataacagtttcagctatggaccgaattgatactatgattcttaatctgatgagcgagactgcgaagtcatatgacatttctcaaccacttcaggaaatcaatgagtctgttagacttgcatttttgaattcctttctggactttgctggttatctggagaggtttggaggtgaactaaccgagaacagaccaaacaaagaaaacaattatgtctcaaatggatacataaatggtactagagaaacatttgttaacacagatggagatttgcacaaaaagctgctggttgttttgagtaacattgggtattgtaaagctgaactttcagaagaactttacagcaaatatagacacatttggtctccagtcaggaataatgaggagcgaagttctgacatgcgagacctgaggacttctttctctgcacttgaagagaaagtcctggaccaatatacttttgcaaagtcaaacttgatcagaagtgctgcacaaagttatcttttggattctgggatttattggggagcagcgccaatggtaaagggcattcgagatgcaactcttgacttactgcacatccttgtagcagtacatgcagaggtatactctggcgctcggcctctgttggagaagacaatgaaaattttggttgagggtttggtcgacatctttcttagtgtttttcatgagaataagaccaaagatattagattgttggatgcgaatggtttttgtcaactgatgcttgagcttgagtattttgagactgtactgcacacgtacttctcacctgaggcgcaacaggctatgaaatctttacaagagaatttgttggaaaaggcctgtgaaagtgttgcagaagccatggaaaatcctggacaccaacgtcgaccaacccgtggcagtgaagatacagcatcggatgacagacagccatcagtatcacctgatgatttgcttgtgcttgctcagcagtgcagtagtgatctgctgcaaggggagttggagaggactcgattgaacatagcctgtttcatggagtcgacccttcaaccaacagctgcgccagcaggcccaaagcctgccgcacattcttcttaccaagcacagcatgctcccgtccaaacgtcctcgcctagttttagaaggcagcagactggtacaagttcccctgtagtctccaggcggcgccggtgagcttagtgcatctttccatcattggcgtagcctcttcccggagtttccttccttttcccccctcacatgtgtgctttttttaatcacttgtaattgtcatcctgttgtcatgtgttacgaatttcgatccattcttttggtgttgtataagatgaaaaggaggagtacagtactggtgctgctgcacgggatcatggaattgtataatatcgacgagtcaaatattattgctgcttgaagataccaccacagctttatgtatatggaattctggagttgtcggtctgcgccaacttccttcctgcggtcgtcaccgcatgtttgtacattcgtcgcttggacagttttatgtatcccgagatttgttaatattgtatcagttggttcgtgattgttgatatgtctgcatgcttt

SEQ ID NO: 15506 - DNA, 679 bp, Zea Mays
ccaggggcatggctgtctccaggtcaaagcggttcgtgcaagacttcaagaagggagaggcttactgatggttctagggctgatgcccttcaggaccaagaatatgtccttacttacgaagataaagatgctgactggatgctcgttggtgatctcccctgggacttgttcaccacaatttgcgggaaacttagaatcatgagaggctctgatgctgctggcatggctccaagatcaccggagcagatagttgggaccagaataaggaacgttgcccggcatgcagagtcgtgaactgaaaggaaaggacagagtttacatggcgctgaagggagcggtgtttttacgtgaagtgctccggttaagtctctctctctctctttttttttgtaacccccacatgtgcaatgagatgtgtgtggccctactgtaagacaccccattttgcccacgaggttgtcacgtgttattgtagatggtcgcctttgtgttatgaacgatcaaactcggcagtagcctgcttgctgcttcctctatgatactttcctccgtatttggaagctcgtacttcatatggtagaagtaagaaaaaaaaagcccatgttgcccattaagattttttgttctcctgatgtgtgtgcgagtgaactaaactattcagtggatctagaaagaatct

SEQ ID NO: 15507 - DNA, 736 bp, Zea Mays
aaagagaagaaaagggaagggccccatctacgcccgccctcgtgtacctggagccgtcggcttccgccagcgcccagctggaggtctcgctgttcccttcacgatacgcccccccaaagcggatcaaaccctagatctcgtcttgtcgccccgttcctccgatcccatcctatccgatcctcatggattcctcctcgtccagcctcagccagcagcccgagttcgactacctcttcaagctactccttatcggcgactccggcgtcggcaagagcagcctcctcctccgcttcaccgccgactccttcgatgacctctcccctaccataggtgttgacttcaaggtgaagatggttagcattggtggcaaaaaactcaagcttgccatctgggacacagctggacaagagaggtttaggaccttgaccagctcttactacagaggggcacaggggatcattatggtgtatgatgtcagtcgacgagagacgttcaccaatctttctgatatatgggccaaggaaattgacctgtattcaaccaaccaggactgtgtaaagatgcttgttggaaataaagtagacaaggaaagtgagagggctgtcacgaaaaaggagggaattgaatttgccagggaatacggttgtttgtttctagaatgcagtgcgaaaacaaaagtaaacgtagaacagtgttttgaggaactggttctaaagtattggcctgtatgcacgtt

SEQ ID NO: 15508 - DNA, 1204 bp, Zea Mays
attttttctgctgcttctgatgaaagtgacaaaggagaaaaatacattagcagaacagctgaagaatgctgaagcttcaaggaaaaggtttgatgatgaattaaaacgttatgcagctgaaacacagactcgtgaagaaattcgaaaatcacttgagaatgaagtgagaaggctgacacagacagtggggcaaacagagggagaaaaaagggaaaaagaagagcaaattactcgttgtgaagcatacattgatgggatggaatccaaactgcaagtttgccagcaatacatccggacacttgaaacgtccctccaagaagaggtggcccggcatgctccactatacggtgtcggcgtcgaatcattgtcgtttaatgagctggaggcactcgcaaacatccacgagcagagtttaaggcagatcaaagctatccagcaaaggaaaggtagcagccatctcttgggtggcaccgccctttctcacatccctgccctattctccccgccgcctccttcagcggcagttggctctccggcctcacggatccccgcatccccaatggcaccaaacggtgcagggatgcacgggaacgggcaccacatgaacagcacgactggcggccgctggttcaacccgagctgagtgataaggtgcaaagattttgtgattcaacgggccacatttgcataggcgtattttgcagccgctgagcaagcccaacgtcaaccccattttgttcctggccttccgtcaggctttcttcttgtacttaggctctcctcaccataagatctaagtggatgtgcagaacacttctggcaatataggcatagtggagttcggaatatagatggcgggggtaggtcttctggtgaggtcggccttacttggtagtgccgtcgtcgtcttgatatcgcatgggcgtggagagcttggtatgaaataatgcatgtaataatcaagtgaaccgatggaaataccaggtacaagtggagggctatgggaatggttgtgcttgttcactttctaaaggcattcaggttcatttgttttagaggagtgttgcggatggtaaagacgaccgagttcgaagcttttattttctttagagttgcatacatagtagtccttgcacatgtcaggggtgtcacttcggtataaacttcgaaagcagaacgtgtttgcatcgcatgcctctaagct

SEQ ID NO: 15509 - DNA, 2124 bp, Zea Mays
cccacacgtcatcctcccctaaaccctccgccaccttttcccgaaagccctgccctttttatgccagcccgaaccatccgggtccggggcatcggcattcagcacagcagccacctcttaccacgccccacggcaccaccccaacgtgatggcggtgagcaacaacatcacggcatgcgtgacgctgctggcgctgatctgcgcggtgcccgtgatcgcgtcgggggtgtggttcgcgtcggcgcagggcgaggagtgcgcgcgcctggcgcggtggcccgtggccatcctgggcgggctgctcctgctggccgcgctggcgggcttcgtgggcgcgtactggaaccggcgcggcctgcttgccttctacctcttcgccatggcgtcgctcgtcgtgctcctcatcgcgctcctcgccttcgccttcgccgtcacccgcgggtccggcgcctaccccgtgctcggccgcgcctacgacgactaccgcctcgacggcttctccatgtggctccgcgggtacgtctccgacgaccccgggcgctgggacaaggtcagggcctgcctcgccgtctccgacacctgcaagaagctcgcgcgccaggccgccttcaccagcgcagaccagttctatcagtcgcacctctccccgctccagtccgggtgctgcaagccgccgtcggtgtgcgggttcagctacgtgagcccgacggtgtggtccgccccggcggcgcggccggcggcggacgcggactgcgggctgtggagcaacgacccggggcagctgtgctacgggtgcgagtcctgcaaggcgggcctcctggaggcgctccgggaccagtggcacaaggccaacgtcgccctcgtcgtcgccaccgtcgccctcgtcatcctctacctcgtcggctgcagcgcctacaagaacgcgcaggccgccgccatcttcggacgccgcaagtattagctagctagctgccatgttagtttttttttgcgcttttttttctttattgtcatgtgggttgtggattatggattgcgtatgtgtgtcccccctggtggagagaagcatttgtagcggtggcgtggtgtgtgtttccggacttggttcatcatggtagtgtgatacatgtgtaagattagttactttaattactaattgtgctgttttcctctttccctgttcgccgacgagtaatgtatctggtttgaagattagttactttactaatggtttgaagacgactaagggcttgttcgttttgctctcaatccatgtggattgggtgggattggatgggtttcaatcccaaacaagtcaaaatcgttcacaattttttccaatcccatccaatccatatgggataggaataaccgaacaagccctaatagattatagatgtgggttgggcctgtggaaagatcaccgatggccttggtagacggcagtagtaatacacaggggagcaggatgttatttgtttggcaatggaatggagacacgccttgccgtcagtagtgctacacccgttgctcctcgtcccgtgcgtgcttgggcggctggccgtcagcgtcaggcggcgggtggcacctgctgctgaacaccctgaaggcggagacgagtgagagcgcggcgaagcaggccagcgcggcggcgtgcagcgccagcgacaccgtggccttcccgcagaaccggccgaagtaggagcacgcctcgccccacgacacgccccggtcgccgtgccgcgccagctgcagcagctccgccgccgccgaggccgacgtcaccagcaggtatgccgacgcctgaatccggagagatcggagaacttgacctccccgtaggtgtcgtctgcctgcgcgttggtggccatctcccacagggaggccaaggagagcgggacgacgcagagcctgagcgccatctcggggaccttgaggcccgccgccatgatcctggactcagcgtgtgcgcgtgccgtgctgtggaggaaggggaataagaagaagaagaagacgacgacgaccgagagaggaccagggcttgactggtgcacgcacgcaccaactccataccactagcgtacaaagcgatgaatgcgcatgggctggcccatggaatgtatt

SEQ ID NO: 15510 - DNA, 840 bp, Zea Mays
acggaccgggcgggaaggggaggagagtttcccgcgctcagacggcggccaccccatttccatcccccaaatcctaatctaggggtcttcggcccgtgaatcaccgtacctcatggcccccaagcgacgtcgcgcggatcagggctcgtcggtgcctgcgccacctcctcctttgcggaaagcaaaacttcagccggttgtcatcttcgcccacggcgccggtgccccttcctcctccgactggatggtccattggaagaagatggtgcaggacgcattagatgctgtagccgtggtgacctttgactacccatatatgtcgggtgggaagcgcagggcgccgccaaaggcagagaagcttgttgatcaccacctgggcatcgtgaaggatgctgctgtcaagtatcaggggcaccctcttattttgatggggaagtccatgggatcgagggagtgaatggagcagtgagagatgagacactcttacagctgaaggtaccaacgatgtttgttcagggaagtaaagatgccctgtgccccttagataaacttctgtctactcaaaagaagatgacctgcaagaatgaactgcatatcattgatggcggtgatcactcttttaaggtcggcaaaaagtacctagaatctaaagggttaaatcaatatgatcttgaaatggaagctgtcacaaaaatttcacagtttttccaggattccttcactgagagttgtacctagccgttctgtatattttccttaacaccttcatggtgactaaacctaatctctgtcttcgaacaagattaatatgttagtgtaatattttggtgtaagatgcta

SEQ ID NO: 15511 - DNA, 840 bp, Zea Mays
gatcttgggaagctgatgatggaagttggtttgatgttggctcatcattgtgatcgctatgtaatgaggcaaggagtagggtcatatgatggtgacagtcttgagcagacaattgctcgttcaaggtgtcacaagggtcgtctgttgtactatttcccacgacagtttagcaagcagacagacttcgactcggtttcatcatggtgtggatggcacactgatcatggatctctaacagggcttacatgtggcttgtttacgaagaattctatggaggtaccatgtccagacagtgcagctggactatacattcggactcgtgataaccaagttgttaaggttgtgttcgacgaggatcagctagcttaccaaatcggggaaactactgaaatactgtcaagaggttatctatgtgcaaccccacactgtgtgcaggcacccagcagcgaaaatgcttcaaatgttgaccgctctacttttgccttgttcatgcaaccagattggaatgagaagctgaagtttccaagcgaaatcccctatcaccaagagttgattccaccaaacggaacgctgactttcggggagtactcagaaaggctggtagacaagtattaccagacaacaacgtagagcatacctcaagaaaagctaccgtccatacgttcgtaccatcaagtgtgttcttgtgtattcatttttagctttgatcataactctgtacaaaatatagtcgatcatcgaatcgaatacagcgcacagtaatgtatcacgcctattgctttgggtgaatttacgtatactactacgactaagaagctaatgtttagatgctaatctaat

SEQ ID NO: 15512 - DNA, 139 bp, Zea Mays
gccccaagcggcccttgaaatccggaggaccgaattccgtgctcacccggtcgtactcataccgcatcaggtcttcaaggtgaacagcctctggtcaatggaacaatgtaggcaagggaagtcggcaaaacggatcagt

SEQ ID NO: 15513 - DNA, 1718 bp, Zea Mays
ccattttcgagcgcagaagcgagagagatccggagcagccgcagtcccaccgacctcgccgccggtcgccctccatctcctcgccgctgcctctcggtgctaagtgcacatttccgggcttacatacaagcattggagaaactacagatggacatagcaacttccactgatttgcttggtgttgaaaccagaagcacaggcttcattttctccattggaaaagaacctctgaaaacccgtccttcagtgtttgctctgggtgaacgaataaacattttgaaggaaatcgaccagccagcattgatacctcatatagctgaagcgaagtcacagaaatactcgtatgaagttcttttcagaagcttgcagaaacttcttattgatactgccacttcagaatacctgtttactgatgatttctttggcgaagaatccatattccatgatatatttgcaggaccgattcaagttgttgatgaacatttcaatactgtactcctgaactgttatgatgcaattggcataatgcttatgatcagaataattcatcagcaccagctcatcatgtttaagcggcgaatcccatgtttggactcttacctagacaaagttaatatgtcactctggcctcgcttcaagatggtgttcgacttgcatttgaacagcttgcgaaatgcaaatattaaaacactttgggaggatgatgtccatccacactatgttacaaggagatatgctgaatttacagcttctctagttcatctcaatgttgagcatggggacggtcagcttgatctaaatttggagcgattgcggatggccattgaggatttgcttgttaagttggccaagatgttttccaaaccgaagctacaaactgtctttctgataaacaactatgatttaacaatttccattttgaaggaagctggaactgagggtgggaaagcacaacaacacttcgaggaggttcttaagagcaacatcgcaatatatgtggaagagttgctcctggagcagttcagtagtttgatcagattcgtcaaatctcgtccagcggatgagacggctgcaaattccgagaaagccagcattgccgaagttgagccactggtaaaggatttcgcgagccggtataaggccgcgatcgagctgatgcactatgatgtgatcacatctttcagcaactttctttgcgggatggagatcttgagagcgacgctcgcacagctcctgctatactacaccaggctctccgagtgtgtcaagagaatcaacggcggctctgctctcaacaaggaccttgtctccatatcctccatcctgttcgaaatcaagaagtattctaggacgttttagttgtttcacccccttccatgtacactaggacggctagctgaggggtagctgtgtatccttactttgtaactggtatgtgcgactgcaggggaaacaagggcattttgtcgtggtttgtatcttcgtctgtgttacccgacttgacccctgcccctttccagcacagaactatgatctctaggctgtctccacagttatcctattctatcttctgtcctatcatctattttaaacttcattttgtaaacagtatcgattatagtgcaaatctacaattttatacgatccgctgtggataaccatatgctgcatactaatgaatgcgtaccaaacgcttgccttaatgttatttttatgac

SEQ ID NO: 15514 - DNA, 2224 bp, Zea Mays
caccggcggccgctttcgtggtccaagtccctcgtcaggaagtggctcaacatccggcccagggcgcaggacttccatgccgatttcgacgccggccaccaggcaagggacggcggcggcggcggcggtggatcatggaggcccagctgttcctcgagcgaagcgagcgcaagcactgccaagaaaagcagagctgaccggccgtcgtcgaagcggagcgccgaacgcgctcgccgagggaggaataatttcgacctagcacgcctgacagaagtgcaagattacaggatcttcgctgcgacgtggaacgtgggtggcaagtcaccacccagggggctaaatctagatgaatggctccatacttctccttctgccgatatctatgtcttagggtttcaagagattgtccctttgaacgcgggaaacgttcttggcactgaagataaccttccagccaagaagtgggtgtcccttatcaggcggacgctgaacaagaatcctggatctagtggctgtggtggtggctaccatacaccctcaccagtcctggatccggttgtcgagttagacgccgacttcgaggggtctgcgagaaggcaggacaacttctcattcttccaccgtcggtcgttccacaatctcagccgtagcttaagaatggacggggacttgatgttcccgcagccaaggctagatcgcaggttcagcgtctgcgatccagtcaacctaggaggcagaccaagcgattttgatggaagtctgcgttgccccggatcacctgatgaggatacaatcgatatggaaatgggtgacagcgtacaagtttcaccattccctcatagctacagtgcatctgcaccttccgaacagaacgatgaccaatcaaacagctccaggtattgcttagttgccagcaaacaaatggtcggcatatttctcacggtctgggtgcgcaatgaaataagagacgacgtcaggaacttgaaagtctcttgcgtgggtagaggattgatgggttatctcggaaacaagggttcgatttcagtgagcatgtgcctgcaccagacgagcttctgcttcgtatgttgccacctgacctcgggggagaaggaaggcgacgagctgcgcaggaactccgacgtcctggagatcctaaggaagaccaggttcccgcgggtccgcggcgccggtgacgtcaggtcacctgagacgatcctcgagcacgatcgggttatatggcttggggatttgaactaccggatcgccctgtcttactgctcggcgaaggctctcgtggaaatgcatagctggaagcagttattggagaaagaccagctgcggatgcaacagagatacggacgagttttccagggctggaaagaagggaggatctacttccctcccacgtacaaatactctttcaactcagaccggtacgccggcgagggcaggcaccctaaggagaagcggaggacgccagcatggtgcgaccgcatcctctggcacggcaacggcctgagccagctgtgctacgtccgcggcgagtcccgcttctccgaccaccggccggtgtatggcatcttcctggcggaggtcggcgtcgtgcgccagcggaggaggaacaacgccgggtacttcggatctagggtcgaggtggaggagctgttgccgcgctctcggagctatagactgagagatgatgaagttttgctgagctgacttatagcatgatataatagaaggtacccctcccccaacagcacccaagagagaatgtgcagacactaactggatgaaaaaaaaggacgctgggcggtattttttgctcaccaagagcaggcaggcaacagcgggacacgcacgacgagtatgtcgccgctcgtcgtcggagacgtagcagcagcaggcatgccgctgactggctatagagtttacccccagctttagccggcccacacttagttattcctcctcctagcaactgcatttgcttcaattttgttttcctcgtttttttggtaggtggaccttgggagtgtcagcaaacacaacatgttttcttcctcttctttttttgatgattcttttcgtttgtaagaaactttgtaaaaacctgctggtgtctgtgctgtgcttgccatgcaagtcgtggaacctttttaagataagctcagcatggctagagagcagtttggttggttgagggggcaaggcattttcactc

SEQ ID NO: 15515 - DNA, 1608 bp, Zea Mays
attatttcgtccagacctattaacagacctattaacaacgaggcaagtgggcaaaatcacaaaaaaatcgtgtttcctgtctcggagatagcctctaatttgaaatcagcaaaggagtttcgtggtggcacgacgcacatgcgacggtctcctgtcctgctctgtcccctctggcctccctagcagcttatactttcttattgtactttcttatagtcttccacggccgcagttagccacatctcgccgtcggcgacgagggacagggaggcaggatactcctgtcaggccgcgacgtagccctcctcctcttgctctccccgccatcctctgcttctcgtccacctgggattagatctatttcttggtacctgagcatcttatctgaaatcctctaaaccaagcaccatagtgctatccgggctcagtggcagtggcaaaaccactattttctaccagcttcgggacggatcatcacatcaaggaactgtgacttcaatggaagaaaacagtgatacttttgtgctgcattcggagcaagaaaggaaaggcaaagtaaaacctgtgcatattgttgatgttcctggtcatgctaggctcaagcccaagcttgatgaagtcctgcctaaagctgctggggttgtctttattgttgatgctcaggatttcttgtctagcatgcaagctgctgcagagtacctttatgacattctgacaaaagcatctgtagttaagaaaaggatccctgtgcttatattctgcaacaagacggataaagttaccgcccactcgaaggaattcatcaagaaacagttggagaaagaattgaacaagcttcgggaatcaaggaacgccatatcttcagctgacatctctgatgaagtccagctcggggtccctggagaggcattcaacttcagccagtgccagaacaaggtggctgttgcggagggtgccggttcaactggtaatgttttggccgtggagcaattcatccgtgaacatgtgagggcgtaggtcgttcttattgttctcagggctccaaatggctctcttgatctaatgaggcaagatgtacattgcgtcaatggggttgcctttcaatgtgactcttcatccggtcctctgaagttgcttaagaagcagtgaggcgcaatcatattctgcactggttcagctgacccatgtttacatgttgcaatgtgtatgcctgacagtcatcggatatgaatagagcatggtataactgtctggctatggttgttttgcacttttgctccgtaagtttttatattttcctgattttcacgtcgtctcggttttaaagtttaaactctttccgttatatagtccggatccctggtgaggtgagactcggtccaagaagggctttggggcacttgtctagaccgctatgatcagatcagatgaaattgttggccaccgtcttgtcccaaggactcgttctaacaattcccataacgctgtcccatctataatactgggaccagtaaactttgcaagacagtttagagtcaatagttatttggtacaaaatttgtctccccttatttagagccaatagtatcagaaaaaaataaaataaaa

SEQ ID NO: 15516 - DNA, 3389 bp, Zea Mays
aggtcaaggttttgaagctgcgatttgtccatgtaaaaaaatactaactgtcttactaggagcctagagtgtccgaatttttgccattgcttgtcctgacttgccaacctacaatgggatggggaaacactattaccagacgcctcaaggttttctctatggccctgtttatctacttcgactataaggctgttcagaagagagttcaatgggttagcactggtaaaaagagtgctatatggaagaaaacacatgagcgaaatgctcgccgtgtcctcaacctgatgatagagttagaaggtttatgggtgaaactgggccaatatttatccacaagagcagatgtacttcctgaaccctacataaatgtcctcaagcagttgcaggattcgcttcctccacgaccttttgaagaggttcgtgaaacgatagagaaagaacttggagaacctatgagtgatctatttgctgattttgtcctagaccctctcgcaaccgcatcaatagcacaagttcatcgtgcaactctggcagatggcagagaagtagttgtcaaaattcagcatgatggtgtgaaggagatcatattagaggatctgaagaatgcaaaatcattgattgaatggatagcgtgggcagagcctcagtatgattttaatccgatgattgatgaatggtgcaaggaggctccaaaggaacttgatttcaaccatgaagcagagaatactagggctgtctccaggaatcttagtcgcaaaagtgactgtgggagtggcagtgtttccagtactgttgatgtactcattccagaagttattcagtcaactggcaaggttctaattttggaatatatggatgggattcgtttaaatgataatgattcattggaagcatatggtgttgacaagcaaaaactggtcgaagagataacccgtgcatacgctcatcaaatatacattgatggcttctttaacggcgaccctcatcctggcaattttcttgtgagcaaggaacctccacataaaccgattctccttgattttgggctcactaagcgcatatctgaatctatgaggcaggcactagcaaaaatgtttttgtcatgtgcagagggagatcacgtggcactgctgtcagcattttcagagatggggcttaaactgcgggttgacatgcctcagcaggctatggatattgccacagtattctttcgtcagtcaaccacagcaagtgaagcaaaggagaacataaaaacacttaatgaccaaagagagagaaatgtcaaagctcttcaagaaaagatgaaattgaacaagaaggaggttcaacgctttaatcctgttgatgctttccccggggatgccataatatttatgagggtcttgaatctcctcagaggtctttcagcttcactaaatgttaggatagtttatctggacatcatgaggccatttgctgaatcaactttgttagggagtttgacacacggacaaatacctaacagtcagtggatttttgactcacctgctaactctgatgtggagtctaaactgagaaattatctgcttgagttgggaagcgacaaaattttaggaatacaagtctgcgcatataaagatggaaaggtcataatagatactgctgctggtatgctggggaagtatgatccccgacctgttcaacctgattctctttttcctgttttctcagtgactaagggtatcactgctgggatggtacattggcttgtggacaaagggaagctgaagtacgaggaaacagttgccaacatatggccgaattttggaactaacggaaaggagttaataaaggtccatcatcttctaaatcacacatccggtttgcacaatgcactgggtgatgtggtaaagaatgatcctttgttggtatgtgactgggaggagacactaaaccagattacgaagagtacacctgagaccgaacctggttcagcacaaatttaccattacctctccttcggttggctgtgtgggggagtcatagagcatgcatctgggaagaagtttcaagagattctagaagaggctattgttcgtcctcttcacattgagggggagttgtatgttggcattccaccaggtgtcgagtctcggctggcagcgctgacagttgacaccgaggagctccagaagctatcaggaatcagggcaggtgcagatgtgccagcagctctgctgaacaacatcgcgcagatggcgtccggtgtgcccgctattttcaacacgctaaacgtccgtcgggccatcatccctgccgccaacggccactgctctgcccgcgcgctcgctcgatactacgcggcgctagcggccggcggttctgttcccccgccgcactcttcgggcgccatgccgcccctcggcagccacgtgcacacccccaagttcccgaccgcgccgctcaagaagaagaagaagggcgccggaaagaagaagggcgccggcggcggctccatgggagacctcaaggtccaggatataagcggcggcagcagcgacaggaacgggtactgccagctgcgcaccagcgacgccgacagcgaggcggggagcggcagcggcggaggcggcaggatgttcggcagcgacaggatcctcgacgcgttcatgggcgtcggcgagtacgagggcatggcgcaccgggacggcaagttcgggctcgggttcaggaggtacgacgacgccagcagcggcagcggcaggctgaggtgctttgggcactccgggatgggcggctcgaccgggttctgcgacgtggagaacggcttcgccatcgcggtgacggtgaacaagctgtctctgggcagcgtcacgcgcggcgtcgtccggctcgtcctcgaggagctgggcctgcccgtgccggacgagtactcggccaccggggagaaggggcctgacatgatgctcaacctgacgacaacgacgacgactacgccgccgcaactgagatgacgacggcgaaactgagattatcaggttgggttcgtaataatctgtggaacaagatatatagcgagcagaaggaaggttggggtacagggatttggtggacagtatatatacgcgtgccattttgattttgacgtggcatgtaaaactcggcaaattctggtatattacgaagctgggtgctgggaattgtggccagcagtacaagaaatggacatgctagtttgttgacctgtgttttttttatggcggaactttttgttttgtcttctgggcttcactaggtctatgctcgtgcgttgccacggaaaacacatgaaatcgtaatatgtgtggtatcgtaaatcaaacaatatatcatgatatgacttctcgtcctaaattaggtatatataaaat

SEQ ID NO: 15517 - DNA, 1422 bp, Zea Mays
aaattgtttcgtttattcctttcctaaaccccgctcatgtgaaagccttcggtactagatctgccctctatctgttagaaaaacaattggaaattgacctatcacaggcttatattgcttggttatcattaatactttacttctttgggagtatgaatgtaaaacttcttataatagcattccctttatctcagctatcaggtcgtatgcgggctctactcaattatgaagcacctgaaatccatgactctgagccttttactcagcgcagcgacgtatatagtttcggtgtggtgatgctagaacttcttactggtcgtaagccatatgacagctctcgtccacgtgctgaacaacatcttgttagatgggctgattctcagcttcatgacatgaagtccctgtcagagatggttgatccatctatccgaggagagtgttccgtgatactattgtcatgttttgcagacatcatcagtcggtgtattcagccgggaccagaattcaggccagcaatgtctcaaatcgtccaagacctagctaggattgtaggtgctagtagtgaggtatcagagtgacaaataaaggaggaacagtaaaatatctagcttgccagtggcgtggccagcgaagatccctagatccatagcgcagtgccaggggcactctatctatcagcatttatattggacgagattgcggctagtgtacatgccattttggagcctcatttacttctggaaagatgtagactggtagtatggcacaaccagtgagatatggcttctcattgttgccgagcagattcatgtgctctagacatgatagtttcacctgtaggcagtatttcttgtaactaattctaatttttattactttattacattatggctagctatgttaaatatgatgcctttaccatgtcttgagactcatgtttctccggttgctaactccgtatggtttgttaatcatagaagtctactgttattgagattattttcagaggcaaagcgacattccaacttgacatggacatgatcatcatagtgacctggtgtcttctgccgaccacatgaaggttctcctccttgaagcgaaagcacccctgctagagcaagagcatgtcacgaaactgggagagtttgccctgcttcctatcttgttgggggaaatggttggcgatgttatgcttgcctttcaggaaaagaaaaaaaacaaaaggttataactcaaaactgtgaaagcgttgccctgcttcctgtctcttgggggcgaaatgtttgacggccatttttttactgtggacttggtggagctgtgagtaacgaaacccttaggcattgttgcttgagacggaccgcttttctaggaagatgacttgttttgacttcgaaaatgattgttcgtttgattttaatc

SEQ ID NO: 15518 - DNA, 3290 bp, Zea Mays
gaaggcccctacaggctacagctgcggccgccgctgcaaccgcatgtacggcagctggagttggagggcatccagagaatctcggcacgccggaaggaacaggagcaggtgcgtcgtgaggcgacggaggacctggccgacgatctgtcagaaggcgagaaaggggacaccctcgctgagcttgtgccggttgaggcggccaagaagaagttccagaggaacttctctgaccttaccgtctggtctgacgacaataatgagaagaagctttacattgtgctcatcagtgttcatggtcttgttcgtggcgaaaacatggaactaggtcgtgattctgacaccggtggccaggtgaaatatgttgtcgaacttgcaagagcaatgtcaatgatgcctggagtgtacagggtggacctcttcactcgtcaagtgtcatctcctgacgtggactggagctatggtgagccgaccgagatgttatgctccggttccaacgatggagaggggatgggtgagagtgccggagcctacattgtgcgcataccgtgtggaccacgggataaatacctcaagaaggaagcactgtggccttacctccaagagtttgtcgatggagctcttgcgcatatccttaacatgtccaaggctctgggagaacaggttggaaatgggaggccagtactgccttacgtgatacatggacactatgccgacgctggagatgttgctgctctcctttccggtgcgctcaatgtacccatggtgctcactggtcactcacttgggaggaacaagctggagcaactcctgaagcaagggcgcatgtccaaggaggagatcgattcaacatacaagatcatgaggcgtatcgagggtgaggagctggccctggatgcgtcagagcttgtcatcaccagcacaaggcaggagattgatgaacagtggggattgtacgacggatttgatgtcaagcttgagaaagtgttgagggcacgggcgaggcgtggggttagctgccatggtcgtttcatgcctaggatggtggtgattcctccaggaatggatttcagcaatgttgtggttcatgaagacattgatggggatggtgacagcaaagatgatatcgttggtttggagggtgcttcaccgaagtcaatgcccccaatttgggccgaggtgatgcggttcctaaccaatcctcacaagccgatgatcctggcgctgtcgaggccagacccgaagaagaacatcactaccctcgtcaaagcctttggagagtgccccccactcagggaacttgcaaaccttactctaatcatgggaaacagagatgacatcgacgatatgtctgctggcaatgccagtgtcctcaccacagttctgaagctgatagacaagtatgatctgtatggaagcgtagcgtttcctaagcatcacaatcaggctgatgtcccggagatctaccgcctcgcggccaaaatgaagggtgtcttcatcaaccctgctctcgttgagccgttcggtctcaccctgatcgaggctgcagcacacggacttccaatagtcgctaccaagaatggtggtccggtcgacattacaactgcactgagcaacggactgctcgttgacccgcacgaccagaacgccatcgctcaagcactgctgaagctcgtagcagataagaacctgtggcaggaatgccggagaaacgggctgcgaaacatccacctttactcatggccggagcactgccgcacttacctcaccagggttgctgggtgccggttaaggaacccgaggtggctgaaggacacaccagcagatgccggagctgatgaggaggagttcctggaggattccatggacgctcaggacctgtcactccgtctgtccatcgacggtgagaagagctcgctgaacaccaacgacccattgtcgtcggacccgcaggatcaggtgcagaagatcatgaacaagatcaatcagtcgtcagcacttccgccgtccatgtcctcagtcgcagacggtgccaagaacgcaaccgaggccacgggcagcaccttgaacaagtacccactcctgcgccggcgccggcgcctgttcgtcatcgccgtggactgctaccaagacgacggccgtgctagcaagaagatgctgcaggtgatccaggaagttttcagagcagtccgatcggactcccagatgtccaagatctcagggttcgcgctgtccactgcgatgccgttgtccgaaacactccagcttctgcagctcggcaagatcccagcgaccgacttcgacaccctcatctgtggcagtggcagcgaggtctactatcctggcacagtgaactgcgtcgacgctgaaggaaagctgcgcccagaccaggactatctgatgcacatcagccaccgctggtcccatgacggcgcgaagcagaccatagcgaagctcatggccactcaggacggttcaggcgacactgtcgagctggacccggcgtctagtaatgcacactgcttcacgttccttatcaaagatcccaaaaaggtgaaaacggtcgatgagatgagggagaggctgaggatgcgtggtctccggtgccacatcatgtactgcaggaactcgacaaggcttcaggttgtccctctgctagcatcaaggtcacaggcactcaggtatctttttgtgcgctggggcctatatgtggggaacatgtatctgatcactggggaacatggcgacaccgatcatgaggagatgctatctggattacacaagactgtgatcgtccggggtgtcaccgagaaaggttcggaagggctgctgaggagcccaggaagctacaagaaggacgacgtcgtgccgtctgagacccccttggctgcgtacacgactggtgagatgaaggccgatgagatcatgcgagctctgaaacaagtctccaagacttccagcggcatgtgaattagctgctgggaaaggtcgatctctaatatattcttcttgttcataactcaaacggcagacacattttctccttttcttcactagtactacataaataacttgtgaacagtaccgagggtgtatatattgcagtgacaaataactaggacactgctaattctactgctggctcaccactgtcttggtgagatgtagccctacaagattgtatactgtgtatttctctagtcgcagctaggcatactttgttttttaaaaaaagaacttcagtttactgcatactcaaggaaacgaaatgacagtaaaagtcagggtttaat

SEQ ID NO: 15519 - DNA, 768 bp, Zea Mays
cagcccatgtgaaaacctccacgcgattattgcatcttatccagacagccccgcactcctctcttcagtctctctccccttcgcggctcccaccgcgtgccgccgccctacaccaggtgccccccacgtctgcatcgggcccgtctccggcgacgaacgcccagcagggggaggaggatgggcgagttcgacgactactgggcgcgggcgtacaggggcgaccccgcggtcccgcactccgacccgcagcggctcatctccacctggaccggcgcctttgccctcggcgcggccgcctgcgtccaccaccacgcctccgcgcttgcatcccgcctcaagtccctaccggcgacttggcaagacatgacattggcccttgatcaaaagcgatggaagaaagcttttgagaaaaagcggcagcaaccttaagctcattgttctttccaacttcttgggccagttggatgagcactgtttctggtcatcaattgtggcgcatgaagcttcaaagttctctctatatacacatgatgtattgactgagggtctgggttcgccaccggttgtaggcttgtagcacttgcgcgcccaagttatatgggagacctccaagactgtcgttcaagaacattgagcatgtcctgttaataaaaaagaatttaattagcggttcattactatgtctacatgattctaaattgcgcttgagtctaagaaatgtataatgtcgaagcatgaatcatttattggcaaagtttatgagcggat

SEQ ID NO: 15520 - DNA, 2408 bp, Zea Mays
cttcgccaaggaaatttagggccaatcgatgctggcgattcggtgaattcgaagctcgtacgacgggatcctgttgagttttgacaatgcggggctacgggtacgagaccaatggtaaccaccaggaagtggaagatgagtacggagatgagtactatgatcaagatgagtatgatgaggaaggttcgggtgctggggatgagtattttgaggaggaagagcctacagagggacaaaaggagatcctagaattgagagaacgattaaaagagcagattaggcgaaaggcaaaggctgctgcttcctgcacagctggcagatcgtcttctttacaaatacctcaagccagggacaaatttggctctttctttgggccatccaagccggtgatttctcgtcgagtgattgaagaaagaaaatcattgaaagaactgcatagcacagttgcaagggagccaaggccttcgggagtacataaggacattccgtcgtcctctaaagtgcaaagtaaagtaaatggacatcagcataaacagaaaattgttaatcaggtaaagaagaaggccgaggcacttaaggataaccgggattattcatttctactctcggatgatgctgacctgtcatcctctccaaaggagaagcctgctgctagatcttccttgactcaaagggctgatcgtgaggtgatgcgaacaacagtgaagagcaaggcaccaacaagtcaacctgcacgggtgtcaaatggatatggatctaagaacaaaatgtcaactcaaaggcatgccgaaggtagggtagataccatgagaaaggaggctttcttgaacagagaaagggttgtctcacgtgacaatgaaaggatgcatgaaagggttgtttcacgtggcaatgagaggatgcatggtagtgcaataaatgggtccaaccaggcaagtactagcaaaaccacaatccaaaagcttacaagcagaggttccattgctaataagcaagcttccacggatctgaatgatgctgctctgaggaagagcagtgtagccccaaagcaccatttctcagaggttgacagatcaaaatccttgcaaagccagaagatgcagtcagctggtcagagactgcagcattcttcccatggtcagaggccacatcaatccatgcagcataggccgcagcagtcattgcagagtcggaggccacagcaaatgactcaggatcagaagccacaacagtctttgcagagtcaaaggactcaacagtccttgcagaataaaaggcaacagcagtcctcacatattcagaaattgcagtcctcacatactcagaaatcgcagtcctcacaagcacacagaccacagtcgctaagtaacaggtcccaggagttacgaggacaaaggcctctttcttcacagggacaatacttggagcaaagaagagtacaggcaaatgatagagtcaaacaagctgaaaggcacattcggcctccctcgaagtccatgccatctcgaccagtctcctctaatggaattcgcgatgatcatgcaaagagaaagcaagtggtaaaaagaagatttgatgacgacgacgatgaggacgaccccttggcaatgatcagaaatatgttcgggtatgatcctagtagatatgcagggagagatgaggatgtcagtgacatggaagcagattttgctactatagaaatggaagagaaaagaagtgcgaggatagctaggcaggaggacgaagagcaacttcgcttgattgaggaagaagagagacgcgagcaggagaggaagaggcgaaagatggcacgaggccgatagtccaacacgcgtcatatttgggtgttataattgcacagacctgattgcctgaagacgaggcccatggtcgatcatacgggcgcgttgcagacaacaggaaaacttgccacgtggattatatggcggcaaatcaaggaaaacggcaggtgggcaacgctgggcacctgtaacaagcagaatgttaggcgcagtggtttagttgacgaagctgacatagacccatatataagctctcatcagattgtttggatcacacaaggctcccaacgttgcagcgcttcatcagattattctaaattctagccacatgctgattctttctgttaagcctatataaggatgcctaatccaagtagctcctttgttcatttttgtttgggtgtagtgttgtactccctccattttttttatctgacggttgttagtttaaatttgaactgtccggcgccaaataaaaaaatagaggtagcaacaaacaatgtgtttgatttttttggtacaattttgaccttcgtcagacgatcactgcacagcagatttcgagtttctatgcctgtgatcacatgaagtctattccgctcgcaa

SEQ ID NO: 15521 - DNA, 1540 bp, Zea Mays
ggcggcttttagccctcccccgaccccgagtgctgctgttgccggtttctgcttccaagttccaaagggcctttctatctaggcatgcatgccttctatctattccttctctggttgcttcttctcccgtggctgctagctcttctccacccctgcttttgtcatcgccacggctcctccaagatgagtcagatgacgtgggaggcagccaggcgtcggtgcctgcttatatagctgcgtattcacaacacgccacggcatcctccccctcccttcctctcccttctcttctcttcttcacttcacagcacgatcgagccagttgcaatcacacagcgcagacgatgccgaccatcatcgtctcggtggacctggaatgcagccgctgccgcgccaagatccagagggtgctcaacaggatccaagagaagggcgagttctgcatcgatgacatcgacttcgacgagaagaacaacaaggtgaaggtcacggggcccttcgacccggacaagctcgccgacaagctgtgctgcaaggcgtgcaagatcatcaagcagatcgagatcgtcgagcccccgcccccgccgccgcccaagcccaaggaggagccgaagaaggaggagcaagccccgccgccgccggagaagaaggaggaggccgccccgcccccgccggagccacccaaggagaagcccccgccacccaaggaggagccgcccaaggagaagccacccccgcccaaggaggagaagcccgccccggcaccgcccaaggaggagaagcccgccccgccgccgcccaaggtggtggaggtcccctacccgtggccgtacccgtacccgtaccctgcgtggccgtccgactgctgctgccaccacggccacggcgggtgccactgctgctcctgcggcaaggcccccgagccggccccggcccccgccccggccccacccccgccgcagtacttcccgcagtacatgccccagccgtacccctgcaacccctgcggcggcggctaccggatcgtctgcgaggaggacccctcctacgcctgcgccatcatgtgattcgtttattatcaatatcatcccttgatgagtgtaccgtccgtgtgcgtaccatggccttaattaccattatacccaaccccaccctaaaaaaaaccccagtacgtcgtctcatcatcattccgtacctcctcctgtataatcgccgtacagattcatcatatatatactctatacatatatagcatcatgtatacaccgccgtaccccctgtcatctctttatgtagattgtgcattatgttctgcgcgcttcgttttggtaattacagtatatgccagtcaggctaagtgagagaataaaataagcaatgatgctgttgttttttttttcttctgtgtgtgtaaagaaaaagggcaaggtgagagagttcatccgttgatggcagcagaaatgtcctaccttgcacaccagcatccctttctttatgttgcacccagggaaaaaaaaataaacagttgcttttatcaacg

SEQ ID NO: 15522 - DNA, 223 bp, Zea Mays
cattaattaacctctctccttcctcgccccttcccctccacgactccactaccaccaccttcaccttgtctcccacaaccgccgcgcgcaagccctagcccgatctcgccggcgacagacaccagatctcgccgcccgttgcgcgccgatacgcgccccgccggattcaccgctcctcgcgctgcagcacgcccgggcctggaaaaagaggcaactctggggg

SEQ ID NO: 15523 - DNA, 4895 bp, Zea Mays
gtcatcggcaggacatccacaccaacccgtgctcaaggaaaaaaaaccggggcggcgaaaaccctcgaaccctaatccttacgcccctcatggcggacgctgatgcggcgctgccaacgccgcctccggaggtagtagcccccgaggagcatcccgtgggcgccgaatccaccgtcgccgcgccggccgaagtcgataacaagcggaagctagaggaggtcagcgccgacgcggaggtgaaaggcaccagcgaggacgccaagcgcccgcgcgtggacggcgagcccgacgccgcaacaggggttgagcagcaaatcgatgggtcctccgtgaatgcggatcccgcagctccggaggataaggctgctcttaacgttggcgcagcaatggatggtgataatgacacgcctgctcccgctcccgctccagactcgcaggcggtttctgacgagaagccgcttgaagcagcagctgaagctccacagcaggaaggtgatgcagcaactgctgtacaggagatttctcgtaagatcgaagtgcccaacagcaaggttggtgtcgttattggaaaagctggtgagacaatcaggaacttgcaaatcagctcgggtgcaaagatccaaatcaccaaggacatcgaagcggactcaaatgccctgactcggccggttgaactagttggaacacctggcagcgttgataaagctgagcagcttattaagagtgtcatagctgaggctgaggctggtggttcccctgccttaatagctagaggatttggaagtggacagcctggatcagagcaatttgagatgacagttcctgataacaaggtcggtctcattatcggaaaaggtggtgagacaattaaaggcatgcagaccaaatctggtgctcgtattcagttaataccccaacatcctccagagggtgttacattgactgaaagaattgtacgtgttactgggaataagaagcagattgaagctgcaaaggatttgatcaagcaagctatgaatcaggtgatgtgatcttcctttgtgattttttggtagtcgatttgtgtttcaattgttaagtcatggtagatgctggtatgatactatatgcttttaattgttcatgctttatgtgattttactctgatggttgctgatgatgtcatcacatttcatgattcattgttcatgatatggttacttttgtgatcgtagataccgaattcaatgttgtcttcatggtattttttgaccaaggcaaattcaacctatcgagaacattgccttattacaatgctatgatggaccaattgattttttagctttgggtttcataatatgcctgtttttatcattgcatacattttgtacaattttcctgatcaagccaaacttgagaatccatgataagctttgtagcttgcatatatttgggttccataatatgcctgttttatcattgcacgcaattcatagtttcatactgtctttctgttcaaactaagcttgagaattccctgatgagctttgtagcttatataggtgtcccaagtgtactgatatttttgttatgaacaaaacatgatttgattttgtacttcattcatactgtgaatatattactatttctcttgtatcggacccttgaattttaagtgttgttttaaactaatcaatcttctctacacttggccttgtatgaagtatccatgatatatagcagagcctaattgggctggaaggtaagtttcttttaatgtttgagttctcatctttagatgaaagacaaatgggacaccgttgcgttttcaagattataaggatgtaaaacttttaaatccgatttactagctcaatgaatatttcactttctttcccttgtcaaaatctcttatcctgggtgttaagcactgcgaactttggcttattttgccttcttgtttttactggatcatacacgcttccattttgtacctgttcgttggagcatagttcttgatttatgcattaatgacatatgatatatgaattatggaagagtaaaaaatgagtgcatgatcatacgattcagaaatgaacttttgagctgtaatacatagcatatgatttgtctggaaatctgggtactgattgaattcttgatcccattagcttgactattcttcgtaggatatacactatgagtaggacttctcatcttcatctatcagccttaacagtaaacatgggcatgctttggatcaatgtccatgactatagctttggaagtgttgtataccagcggatcatccagttgctagatgagatatgattctgtttcctacataagcagtctgaactgacacatcaagttccctcgcttctagttttcgtcaattatttttgttgaaggtgccgatttggagttggtcaggtatcctaatgcagatacagctagctttcttcatggggggtcatcgctcttcatcgtttacttgcaccgaagagggacattgaccattatcccttagccttgcatggtgtatgtagttggtaactggtaaggctgcctattgccgaaaggaaacataaactgtttggcattggaagactgcaacaagtgtatcattgccatgacaaggcttctacatcaccatgttaggtttgctaagctgaatcatttgtgactgtatgttgtctgcaaaacagaacttccatatgttatagttgaacgattaagaatttagtgttgttgttacttatttggtatgtcactgttaactatagtttgagttgcttagcattattattcttcccattagtcacggttgctattagaaagtaagtatgtgtgatatagtgtatttaatatcaatattattgtgttatccattgaagctgtttatgtttatgcgatgcatctataaattaaattctgaagtaaccctttgcttgtatttctatttcttgttgcaatttttaatgatggttaaccaagatgcacagaaattcgtggagattttgttaatggaattcttttcttgaacattgttttttgaatgacatagttatcaatgctggacagtgtttaagaagtatgaaatatgagctactatgcaggcgtattttcttaatgccgttcttatttaactgcaatttgtacagtctggttgccccttgatggtttcctataacctgttgctttatgttagtttgtagtgtctgttatttacttccccttttggtttctaacatgaattcttgtacagacattttcaaagcatacaaatcagtctggcggatatggtccacaaggttaccgacctcagggtcatggtgccgcttctcagttggggccacgctctcagaatcatggctatggatacccacctagaggtatgcctccacctcaaaactacaacgcaccctacggtggctacccaccgcagggaccgtcaagaggtggcatgggctgggaccagaggccgggcccaccaacccatccttcgtaccagggtggtggttctgactactacaagcagggatctcagccatatgatagccagccacccagctaccctcctgggccagggaattacaacagttatgggcaatcccagggccctaactatggccaacctcagtatccgcaacatgcacctcaacagaactacagccatggctatggtgatcctagatacaatgccccccctccgaaccagcagtactatggtcagccaccgatggccccgcagcaaggctatcctcaacagccagatccctatgctaggcctccatacagtggacctggtcaatggacccccaggggtgctcccgccgcagatggctcctaccaggcgccaccttcatcttatgggccaccgtctcagcaacctcctgcttatgggcaaacatatggtgcagcaacgggacctgatgggtatggtcaacagggttacccacagcagggtggccaggtaccagcttcatatggtcagagtgcaccagcagctccaggatatcctcagcaaggcacgcagcaaggtggctatgcacagtacccgcagacccaaccagcatatggtgatcaagcagctcaagccaatgcgaactatgggtaccagggagctccagcagatcccaactacggaagtgcgtacccacagcagccagggtatggtcctcctggtcaggcaactggtcaggctggttatgcatcctctgcgccagcggccagccagcctgtgtatggccaggctggatatacccagccacctacaaatcctccaagttatgatcagtctgcagcaccagcggcgactcagagcggttatgctgcgccccctgcaaatccacaacagcctgctgcagcaaaaggggtctcgccacagcctgctgctgctgctgctgctggatatggtgctagcgggcagtggacggcatgagcctcgtcttccgaacttcgatgacagcaaggtcaggttggatatccgcttttggcgcgtgtttgaatgtttgcatcttttggatgtctgtggacgcatcatgtagggcttgaccccgttatcgaaagagattgtaaccccttgagttgtgatactggacatcttctgtagtatctacgagtagttgcttaatgtgacttttaaacattctattcagtttggatgttccttgtcttgctacttcacagcttgccaagccagtaatctttggattcatgtttggttgctctttggtctttgctgtcgttcctgtaaataaatattggcgtttggccttctcttacgtcgttcatgggatgacggggtgccctttcgagttggcaatagatctgctgttcatccaaactcagttggttttgtttgtatttgttccgaatcatgttggtacagttagcatgtgaatggacaagcc

SEQ ID NO: 15524 - DNA, 695 bp, Zea Mays
catggaaccaaaactccctggcgaatacacagttaaccagcaggttcgtcagattacaatcacaataagaacaattgtcactgggctgtgctacctagcaacttctgtctttggaatcaatgcggtgggattagttttgtattccctccaactcactttacaatcaatcatggacgatgactccagctcttccacagggaagattagtgaacaatctaatacactggcatcatctgatagctccacaagtagcagggaatcagacagtagtgacatgcaagtcactgacaaaagtaaaaactcagcagagaagcagagctagacatgtaatccagacagccaaaatctgagatctgagggtacatatctgatgaaatcattttaagcattccttctcattattagctgaaaaatctgatgagagcgatctcaactcgagagtttcaattatgctagtattccgtccaaaatccgtccaaaaaaaagaagagaactcaattctagatttgagctaagttaaattgtcttaagtttgattatgtttttttaaaaatatcattatttatatcattaaatatgtttgttataaaatatattctatgattagtggaagtacctctagttgagttggtatttctcaggactgtcgttggatttatgtgggaatgtcaaaggcttggccggtatttctcagg

SEQ ID NO: 15525 - DNA, 224 bp, Zea Mays
tttgcagccagcagaaatgagtttggaggaaatagaagagaggttaagttctgttgtgaaatctgagataatttcccagctgaagagctctgtctggaaagagcgccttgaaggttgtcaatatccctgtgttctatcctgtaaattttgtctatttgtttgatttcgaagaattaacttgaatcacttctattttcccttttaaatgacacattcgttgttct

SEQ ID NO: 15526 - DNA, 4980 bp, Zea Mays
ctgttccagtattttacccgagttgtaaaggaaaacctggataaaaagattaaagaattccataccatccaggaggttaccacagacaggtcaaaagtatttcccaaggatatggaagctccaccaggaggagttgatgatatgacaagactttcatacttacatgaacctggtgttctacagaatcttgctacccgctatgaactgaatgaaatatatacttacacaggcagcattttgattgctgtaaatccatttcaaagattgccacatctttatgatacccacatgatggaacagtacaagggtgcagattttggggaattgagtccccatgtctttgctatcgcggatgttgcttacagggcaatgataaatgaagggaaaagcaactctatattggtcagtggtgaaagtggtgctgggaagactgagacaacgaagatgcttatgagatatttagcacatttaggtgggcgatctggagtagaaggacgtacagtggaacaacaagttttagagtccaacccagttcttgaagcttttggtaatgctaaaactgtgcgaaataacaactcaagtcgctttggcaagtttgttgagatccaatttgacaagactggacggatctcaggagctgctatcagaacttacttgctggaaagatcacgtgtgtgccaaattaattctccagaaagaaattaccattgcttttattttctttgtgccgcaccacctgagtacactcagaggtacaagctgtctgatcctagatctttccattacctcaatcagtcgagctgtattgaggtggatggaatcaatgatgctgaagagtatttagcaacacgaagagctatggatatagttggaatcaatgaggaagagcaggaaggtatattccgggttgtagctgctgtacttcatcttggaaatataaattttgccaagggaacagaaatcgattcttctgtaatcaaggatgataaatccaggttccaccttaatatcgcagcagaacttttgaaatgtgattgccagaatttagagaaggcgctgataacacgagttatagtcacgcctgaagaagttatcactagaacacttgatcctgcttctgcagttgctagcagagacgcattagctaaaataatatactcccgattgtttgattggattgtggaaaaaattaatgtctcaattggacaggacccaaactcaaaacagttaattggagttcttgatatctatggttttgagagcttcaaagttaacagttttgaacagctatgtatcaattatacaaatgaaaagctgcaacaacattttaaccagcacgtgttcaaaatggaacaagaagagtataccagagaagagataaactggagttacatcgagtttgttgataatcaagatgtgctagacttgatagagaagaaaggtggattgattgcacttctggatgaagcatgtatgtttcctagatctacacatgagacgtttgcgcagaagctatatacaacatttaagaataacaagcggtttgccaagccaaagctttcacgcactgattttacagtagtccattatgctggcgatgtgacataccaggctgattatttcttagacaagaacaaagattatgtagtggctgaacatcaggatctgctgaatgcttcttcatgcctattcgtagctggtttattccctcctctcccacaggagacagcaaagtcttcaaaattttcatccattggatcacgttttaagcttcaacttcaatccctcatggaaactttgagctctaccgaaccccactatattagatgtgtgaagccaaataatctccttaagccagctatttttgagaatacaaatgttatacaacaactaagatgtggaggtgttctcgaagctatcaggatcagctgtgctggatatcccacaagaaaaacattttatgaatttgtcaatcgttttggtgtccttgctcctgaagttttagaagggagcaatgatgataagattgcgtgccaaaagattttggaaaaaatgggtctggagaattaccagattggaaaaacaaaggtgtttctaagagctggacagatggctgatttggatgctcgtagagctgaagtattaggaagagcagcaagaatcatacagaggcaaatacgtacatatattgcaaggaaacagtttgctgagcttaaaagatcagcaacacagctgcaatcttttgtcagaggaaccttggctcgtaagttgtatgagtgcatgaggcaggaagcagcagcagtgaaaatacaaaagaatatgcgacgccacaaagcacgggaatcttatttacaattgcaagcagctgcaatcacattgcagacaggtttaagggcaatgtctgctcgcaaagaattcaggttcagaaaggaaacaaaagctgctgtccacatccaagctcaatggcgccgccacagagactactcacattacaagaatctgcaaggagcagctcttacttaccagtgtgcctggaggcaaaggcttgccagaagggagctcaggaagctcaagatggcggcaagagaaacaggagccctaaaagaggccaaggataaacttgagaagcgtgttgaagaactcacctggcgcttaggattggagaagcgattaaggactgaccttgaggaagcaaaagcccaggaaattgctaagctgcaagagacgttgcatgatatgcagcttcaagttgaagagtcaaaggccatggtagttaaggagagggaagctgctagaaaggcaattgaagaagcacctccagtaattaaagagactcctgtgctagtcgaagacacagaaaagattaactcactgacgaccgaagttgaacaactgaaggctttgctgctaactgaaagacaagcaacagaagctgcaaaaagagaacacgctgaatctgaactgagaaatgaagaactaattaagaaatttgagagcgcagagaaaaagattgagcaacttcaggaaactgtccataggctggaggagaaagcaaccaacatggagtctgagaacaaagtgctccgtcaacaagctgttgcaatttctcctacgtcaaaatcattagctgcatatcctaagtctcctttccagctgaaaactccggagaatgggaatgctctaaatggagaagtgaagtcatcaccagatatcacccctatcttaccaaaccccaaggagcttgaggctgaagagaagccacaaaaatcacttaatgaaaagcagcaggaaaatcaagacctactgatcaagtgtgtatcacaagatctgggattctccagtggcaaacctattgcagcttgccttatctacaggtgtcttctacactggagatcattcgaagttgaaagaactggtgtttttgaccgtattattcaaacaattggctctgctattgagtcccaggacaacaatgacaagttggcatattggctctcgaattcatccacactgctgctgctgctgcaacgaacactgaaaacaactggagcagctggattcactcctcaaaggcgcaggtcatctgctgcatcttttgggagggtgttttcggggatgcgagcctcaccacaaagtgctgggcgtgcttttatgggaagtcgcttgattggaggtctaggtgaccttcgtcaagttgaagccaagtaccctgccctgcttttcaagcaacagctcacagctttccttgagaagatctatggaatgataagagacaatttgaaaaaggagatatctcctttgcttggcctttgcatccaggcaccaagaacatcccgtgcaagcctaattaaagggtcacgttcccaagcaaatgccttagctcagcaaactctgattgcacattggcagagcattgtgaaaatattgacaaattacttgaatgttttaaaagcaaattatgtcccttcagtcttaatcagcaaagtgttcactcaaatcttttcatttattaatgttcagttatttaatagtcttcttcttcgacgggagtgctgttcatttagcaacggagaatatgtgaaagctggattggcagaattagagcagtggtgcatttatgcaacagaagagtatgcaggttcttcctgggaagaattaaaacatattaggcaggctgttggattccttgtgattcatcaaaagccaaagaaaacattgaaagaaattaccaacgatctgtgccctgtccttagcatacaacagctatatcgaatcagtacaatgtactgggatgataagtacggtacccacactgtttcatcagatgtcatctcaagtatgagagtaatgatgacagaagattctaataacgcggtcagcagttcgttcctgttggatgatgattccagcattccgttttcggtggacgacatctcgaagtcgatgacagaaatcgaggtaacagatgtcgacatgccacctctgatccgggagaattctggcttcaccttcctacaccaaagaaaggactaacagggtggtccttccagctgcatgtccctttttgcacattctttttctccgctcaacctgtgcataactcatgtacatacgctcgtgccttttgctctctggtcagggcttgttagatgtattgtctttggtttgattggttggttggttctttcctcgatcctctcccaattttgttgggcgaagggtccacaatctatgtttctccatactgtagtgaaaaggggccggatgcccctggtctccccgagctgcttttggaaaagctcgtggtcattaagcagttaagcttgtggaaaaggttctccacatctaccgagtcgttcgttgtgtcgccttcttcatatggatcatcgccatattgtaaattgcaaatacgattatagttgaaaaaagagatattacagtgatagcagtgttctggagtttggatctcatgaatattct

SEQ ID NO: 15527 - DNA, 2322 bp, Zea Mays
aacccaacgccgttcgcccgctccccgccacaagctcctcctcctctcctccctacacactccagagccagaggcagcacgtgctgccgtgctcgagcacagctaggccgcagctgcatcaccatggcgggcgcgccgctgcggagatcggaccttgacttcgccgacgtctttggcggcccgccgcgccgcgtgtctgggaacgagcaccgctcgcagcgcggctcgcaggacacctcgtcgttcgagtccgcgacgagggcggggagcggcggaccggacacgcccgttttcggggaccgggggagctccgaccgaagaaggcagctcggggaggagttctacaaggacatattccccgggagcgaggcagcgtcgcccaggcggagcggcgccggggattgggggaatgtgttcggcgcgcaggcttcgcctgtctccacggcccgcccgcgatcgagcttctccattcggttcaacagaggcatggacagttcaatgcctacttctccctctcagcaaatgtccaacagaaacgatgatggcacatcttatgcttatagtgttccaacttcacccaatgcatccatgaacaattatcttgctcaaggggcagcccgacaagattcgaagaagaatcccttctcatggcatcgctatccatttctatctaggttccgttctcaaagtggagaaaagaagagcacatctaatcatgtcagctcaatggacaatgaatttgaagggactcctgttaacttggaaagtatcatggccaataacaagttccatttttccttctacaagtgggcaggcaaaggagccttgttagtgttgccagctactgcacaagaaaagtccgtagacatcattggactgagaagcttccctcaagtggtcattcaaggtattgatctaattgattgtgaagacagcatgtcaactgccaccggaacagccaaaaatcagacagattacgaagattcgaaatctggaaaacatagcgcaaactcagcaaccaaggatggagctattcctttactctttgaagactacatgcaaggaacgaaacagagcaatgatcatacaaagaatgatgtttcatcaactaccctgagttctaaaatttctcgatcaccttcaggggagagaagtcgtagtagcagggtgaaggaaaagatgaagggtttcataaaactatttagccctgagagttcaccaaagcgcaaacgagcaccggaaacacaaaggcaaacatctgtggggaaaaatggaaccaaaactgaactgcatgataagttcagcatgtccagtttggaggccagtgaggatgtggaaacggtacaaatgaacagccagaatgcttttactgccgaaccttttccaatgactgaagtgcaagagaggttggacaaaccagttttgacagcgaatagtaaaatggatacagctacgggaagtaatgaggccgcttctaatgagcccatccatgatgatacaaaagacaaagcggccaacacaatagagcatgaggacattgaagatcttgatggatgtgtggttgagcatttttctgaagatcatgttcttcataatgatcaggaaaaggagctaataaagatatcagaagctaaaattcgcgaatggtctaggggaaaagaaggaaatattaggtcattgctttcaacactgcaatatgtcttatggcctgagagtggatggaaaccagttccacttgttgatataattgaaggagcagcagttaagaaggcttaccagaaagcattattgtgccttcatccagataagttgcagcaacgaggtgctgccatgcatcagaagtgtatagcagagaaggtttttgacattttacaggaagcatggaaggaattcaattcggtcacttttggatagtactaggagtttatttcactactgtattggtccaatgatctatcgcacaggcatattgcttcccggtgtctgcaacagttagttggttgaaacaacctagaacagtacagcaaatgggcaaccgagagttcggtttgtgaatttcggtgcacagtcaatgccgacctccgccatttcttcaaaattccgactgtaacaagtgtaatatgtaatattggttaatcaggtttaatggatccagacgatgactgaaatgtcatttaaggaatgctttgtgcacagccatttgatgtgtgcctagtagctgttggtgcataaattttgtctaagcttcggatgaaaaaggttatcaatcttttatctgactgttaattttgtccaatatacgttagcagcagtaaatatttg

SEQ ID NO: 15528 - DNA, 2987 bp, Zea Mays
tttgtccttaagttctgccttagcgcctcccactgttcttctcaaatggaggggctccagaagcttcttgaggatcatcaggtggagcttgaatccaaaagacgggattttgaattagaattagagagggaaaggaaatcttttgatcaaaatatgacacagaagcaagcggatttattgaaaagggagaaagatgttaaatctttggaggctaaactttctaaaagtgagcaggcattgaatgataagaagaaatcaatggaaaacttgcagaatgatcttgatgccaaatctaaggctctgaagagttgggatgaatcattgaaaaatgacgagaaaaggttactgaaagaaaagcagcaaatggatcatgaaagagaacaattggagacatacaaattggagcttgaaaagatcaaatcagcattagaagctgagaaggaaaaaatatcagaagagcagaataatctgaaactcacagcgcaagagaggcaggagcatagcttgttgatagcaaaacttaagaaggagattgaggaatacagaatgcgaagcaactccctatctgaggaaatggaggatttaaggaagcaacggcagaaatttgaagaagagtgggaacaactagacgaaaagagagccctccttgtagaggaggacaaaaggttgaacattgagaggatgaatttagaacggtggcgtgacaacgaagaaaaaaggttaaatgatatgaaactcaaaatggatgaagaatacaagcagcagctggagagtcttgagcgcaaggaaaaggctttgagtgatgatatgaagcacaagcaaatggaaaatgatgaatttctgaagggagaacgtgctgatgttcaacgtaaattgcaactcaaacggcatgaattggagatggagatggagcaaaaacaagccacgaaggagaaggaactggaagaaaaggaaaatgagttaaataagaaaatagattttgtggaaaataaactccgacatgcaattgagttgaatgagtccaagattgagaagttattattggagaaaagggaggtgcagatggaaagagaattactgctggaggaaagaaagaaaacggagactgacaaggcagatattagaagggatattgagagtctgcactcattgagcaagagtttgaaggaacgtcgagaggcatataacagggacaggagcagactcatcgaactatttgaaaagtacaaggcgtgcaaaaactgtgggatttctatttttgagggattggattctctgctgcttaaagacagtgctgaaattgagcatccaagtttggctgttgagggagatgatcatgccttgaccaccgatacatcaggtccagatacaggaacccttgttaattcaggtggtcgtttttctttgttacagaagtgttcaaggcttttcaagttctcccctagaaaaaagggtgagcagtcatcagaacaaccatcagagaggaatatatcttttggtgcaagactcgaggaagcaacacagagcgatggagattatgtgccaactcctgtctatgagatagcccacgattctttcaatgcagaggatgagctcccttctgacggtgaaaccagggagaatgaagagtctgaaaggcatgacatagctgataatgcccagatggagtcttctgttggtgtagcagataacagtatagatattctcggtactaagtcatttgatggtgctaacgacatggcagttgaagcaactattgtctctgttgatcaaaatggcgaggactctgtagttcctgctgaagcaggtgtagagcctgaaacatcagagcaaggtcggcgccagcaaaaccagagaggcagaagaaaaggtggtatgaaaagaacacggtctgttaatgctgtagttgaagatgctaagatgatacttggcgaggtttttgaggagaagactgatgatcagggagatacagtcaaggtgggtgctacacgaaagcggcggtttgctggagctacaataagtgaacaagatgaagaagggagcgaagcacattcagaaagtgtttcacttggagggcagcgccgtaagaggcggcaaactgctggggcagtgacagatgccccaggagaaagacgttacaatttgagacacagtagagctgcaaatgctggcgctgcaacagcccaagcagacaaaaaaaaatcttcaaaagcaagaaataaacatacagtagaagcttctgctgatgacaccgaaggaacatcaaaggttgttgaggaacctgcccctgagagcaagagggtatctgaatctgcagactacgatgcatcccagttgcatgagttttcccaggttgaagttggtgatgcccatgctgtagacggtgagggtgctggtgaggaagatggtgatattttggatggccaagatgcactgcctgatgtgccaatgacaccttctggaagcgagtttggagcggaacaggaagatgaggacgatgatgattcagagaggcgaaaccaatcaatcagcaagaagctatggtcattcttcactacatgacttgctgaagaggtcgtcatgtaggttatttctagcttttgtggtttcgattcatgataccccattcttggaactgtaggtcgtgtgcttttggtgattatgtactagatctcccacttgattgtgcttctctcccgtgtaattgaaatatatttgtagtggacatagtttgatggcactcacagaagtagctgatgagatgtacaatggcgatgatggtatgccctgtaaggctgtaacaccagtagcttggtttgtaattgttcttttcccccggttcgtgttacttcgttgaccttattccggggaaatattttagtgctgtgatgatggtctaaatgtttgttcgcctattgaaactaaatacaatgaattagaataccacagtccacaggagcttcggagacttccatcgtcaagattcc

SEQ ID NO: 15529 - DNA, 3307 bp, Zea Mays
tggcgagtgaccggtgtgactcggcgtggtcaggctacagggcgaggttttttcttcgattcggcgcgtggcaacctggtcagtccaatccgtccgtgaagaatttatccgtattttcgtttgcgtcgcatcgtttctgcgaaggatttcctgttcgttttgggggagaaaggcgtcgtccttgatgtctactatcgcgaccccgccgccgccgattgcgcaagagaaggccgccagccggaataagcgcaagtaccgtgccgagccaccttccgccgagttgggcccatacgggctggagtacccgctgacggcggactgcatgggattcgagtttatgtcgcctgagaaggctgccatggcagcagcggtagccgctgccgagggtgtcagccttgacctcctccagaactcgtgcgaaaagtgcaaagatctccaccctactgcggaggagttactggactgccaacgatatgtgaattggagcgacccaaacgagacgcagctggaggagatccttctcaagagtctgggcaccacctttgacaatgctgtgagtctgatcaccacaatgggctactctgaggcggttgcacgggctgctgttgtgcgggcagctgcgcaatacaactggagggagagccttgcagggtttggagaggcagcagttgaggttctcaagacggaaggggacatgttgccgagggagggtgcctctgttgaagacatgaggaggattgagcaggctgtgcttggtagtatggttatgtgggtaaatgaggctcagccactctgcaccacaggcgatgtaatgttttgcttgcttatgtctgacatgaacgtggcaaatgccagtgccatggactacaatacttcttccctcccatctgttgctgctcaagttattgcccaaccagacgcggggaactatgttactggttcaggttcaaatttatcagtttctattaccaacccacagactggcgttacattccgtggaaaacttaccccaatgccaccgggctcttatggtgctgtaaaagctgattcgtcaatggcaccagcaagcctcaatgtgtcaagtaccaaaccctcggtgccgggcaagactcagtgtgtgataccaaatattgagccaaaagaacaacctgttcctatacatgatcattcagaggaccaaccatttgttgctgctgcgacacaatctgtgaaaaatgacaagccatccccaagcaagagggggggctctaagagggactccttgcatcgacagaagttgacaagctttgataaaagttcccgagcattgggttccaaaggttctcttaggtctggcaagcatagctattcggccagtgcggtattggagaggaagtgccggtcattttcagattctactactagcaacttgaagggtgcatcaagagttgctaaagggtttgctgcaagcatatctggatcagaagtatcagctgacctttcctttactggtaccctttccccttctccatcatttgatgccaagatagttagtaactcaaacccagcacctactgctagcacagatctttcattgtcattgccctcctcaagtgatagtttaacaccatcttcgaatcatgattccattaccgagggagtggactctagtagcaaaattaatttttcgtatgatgaagaacagaaggtctggatcccacaagataaaaaggataaaattgtcttgattcttgttcagaggcagaaagaactgcaagcacatatgcatgactggacagactgggcccagcagaaagtgatgcaggtcgcacaccgacttgcaaaggagaaggatgaacttcagtcactcaggaaagagaaggaagaggctgaccgcctgcaagaggagaggcaccatttggaagagagtactcggaaaaagcttctggagatggagtctgcaatttctagggcaaatgctcagctggagaaagcagaagcttctgctcgcagacgtgaggttgagaatgcacaactcacgttacagatggaagctgcaaagcgacatgcagcagagtcagcaacaaatatttcagagcttttaaagaaagacgagaacagccgtaaaaggtctcagcgttgggaatctgatagagccctattacaagaggaacttgcagcacaaaagagcaggttatttcgggttcaagaacaactccagcatgctaaagagctaaaggatcaagtgcaggcaaggtggaaacaagaggaggctgcaaagactgaggcaattgcccttgtaacctcagtgaggaaagagagagggcaaattgagacctccatgaggtcagaagagaatttgctgcatctcaaagcagcgaatgacgcacaaagatacaagagtgagatccgtgtccttgagcagcgtattgcgcagctgaaggtgtcattggactcttcaagggttgctgcccccaagtggggagccgacaataaatcctatgcattgcatctttctgaagggagaaagaacaacaatgcccaagttttgtccaacacagcagtaccccaaggtctcgattttgacgatatacagcgcgaccgggagtgcgtcatgtgcttgagcgaggagatgtccgtggtgttcctcccctgcgcccaccaggtcgtctgtgccaaatgcagcgacctccatgagaagcaaggtatgaaggaatgcccttcgtgccgggcccccatccagcgcagggtgcgcgcccgccccgccggttgctagatttcacatataccatttggattttacttttcttctttttttcaccttgattgctcagcttaagttgatggaagattggagggaataatcaggtggtgtgagtggttgaaactgtgacaataatacatcgttaaacaccaaacaagccccagcagacagtgggtactggtttggtttgttatatggctataccggccgcttctgaatgctttggttttgctgcactctggttccaagtcccgtactgttttgtaaaaatgtcgatctgtgactgtaatgctcggtaggaaatctgttgatcgatgttgttatgtcctgttgcattcatctgtagctattgaagtcttaaatgaagtcagcttccatcgtctccttgggccactctcaataggagtttcattagatatttcatgacattaattagtatgtcacatagtatttcttttgatgatatgactataggtgacaatgtgttctaaatctctactaatccgtaagacaatagtgtagactaggcacaaccatgcccccgtctccatctcgaccgtccga

SEQ ID NO: 15530 - DNA, 2252 bp, Zea Mays
cccagatcgatttgggccgcactacaactacgattcatctcggaacagcccaactagcccattcaacattcctgtaagcgcggagtcggcgacgcacggggagaagtcgaacagcggccgcgcgcggggaagttgcccggcggcggcggatctcggaggcagcgacgcgcgggtggaggagctcagtgacagcgccagtgcctatcgagcgagcgaatcgaggagattctccccactgtttctttcctgctgattccgatttcgcgttgaaacaccggggggagaagaattgcgggcgaccataactcggcaagaagcggctccaaaaagggcatctacctttgccgattccggcaccgatggatcccgcggcgtcggggaggttcgacaagctccagagctcgttcaagctctccatccagtgcctcctcaccgcctgctcccgcgaggatgtcaatgacgctttctcgtccttcactgatgctgagaaggagcgtttgcaccggatgctcacccttgtgatgaagaatctgcatgccaacgtagtggatgagtttgacgacttctgccaagaaacacaggtggctgctgcccttgaaaagatagatgactttgttgaaaagcagaatcttgatgcattatcttcagagaagactactgttgaagaaatcgaagaaaaggtatcaagagcaaaaaaggatgaaattgaatatttgactggtttactgaaaaaggttgaagaaagtaacaatgccaagaaagctcgaattgaactcctgaagaaagaggaggatttaactgctgcaagagatgtcctcaataagatgacgcagtggaactctgcactcgtggagaacattaacccttgaatctgtgtgatgacgattcattggcgtcaaaggacatctttgtataggggtgtgttagattggatgacatgtgaatgtgattcatggatcagcctggatgttctgttatgattaagaactgctatgtatcgtgcaatagacacatcgtctgtactttggatgttattatcaggtcccaaacttcattatatccaatatgttacaatatcattttggtgacttaactacaatgtcagctcgtgccaacagaaaaagaagaaaagaaatgggcggtggttgcccgacaagtccttgtcagccgcacagtcttcacacgaccaggggccatgagcaccactcttgccttagccacggcccacgggcagcacagcatctccatctatccaaatggcagccagcagccgtccccttcctccaccctctgccatcctcgcagtcacagcccctcaccatggctgccacactctcctccgtggctgccccttccctccccaagcacatccccgttaccagagctcagcagcaggcgcctccttccatcatctcggcatcaactaagactgccttccatggggtgtcgctggtggtggacaggaggtgggcggccggccaccggagaggcggcggccggcggaggctgctgcaggtgaacgcgaggaccgccgccaagaacatcgaggtggaggtcgagaagccgcttggcttagccttgggccagaagcccggtggtggcgtcgtcatcacttctgtggagtctggagggaatgcagccagagccggtctgaaaaccggggaccaggtcctgtacacaagcagcttcttcggagacgagctgtggcctgcggataagcttgggttcaccaagacagccatccaagcgaagtcagactccgtctacttcgtcgtgagcaggggtgccgaagttgacgtgaagcgcctacctaagaggccggcgccaccccggtttggacggaagctgactgattcacaaaaggagagagcaacgcacgtctgccttgattgtgggtacatatacttcctacccaagccttttgacgaacagcccgacgactacggttgcccacagtgcaacgcgccgaagaagcggtttgcgaggtacgacgctgccaccgggaaggccatcggcggcgctctgccgcctatcgccgtgatcgtaagtttggtgatcggcatcgctggggtaggagctctgctcgtgtacggcctgcagtagcctgctcgttcttgttcagaacctttttttttttttgctgtgctcaagaagctcagctgactgctgctgtactctgtctcacaagacattccgagtgatatacatacataaaagggaagaaggaaatacacagtatttgaggctaaaaa

SEQ ID NO: 15531 - DNA, 1977 bp, Zea Mays
aacatgtaaaagaagaagagattcatccctccgccactccccaacatgtaaaccagaccattctcctctccgaattcaataattcctccgccgcaccacgcttcctcctcctctgctccgcctcttcatccagcgagcgtcctccgattgctgacggatccctcctcgccgccgccgcgggccgaccggtggaagcaaagaaggctgttcccagggacgaccacagtattgtgaccaagagcaacgccagcagcatagggtcacctggaccgggacgcaccaggaagatctttgttggaggcctgccctcgaacgtcacggaggctgacttcagaaggtactttgagcagtttggcgtcatcactgatgtggttgtgatgtacgaccacaacacgcagaggccgaggggctttggattcatcacctacgattcagaagacgccgtggacaaagccctgcacaagagcttccatgagctcaatggtaaaatggttgaggtcaagagggctgttccaaaggagcagtcgcctggacctgccgcacgctcacctgtgggagtggggcagaactatgctatgaacagggttcatagcttcctcaatggcttcaaccagggttacaatccgaaccccataggaggttacggcatcagggtggatggaaggtatggcttgatttcaggtgcacgaaatgggttctcttcttttggaccagggtatgggatgggcatgaatgttgaaggtgggttgggcggaacatttggtgcaagctctggtttcatcagcaactccaacgggaggcaaatgggttcgtacttcaatgcaagttcgaacagattgggtagccctattgggtaccttggccttaatgatgttccgggatcaatgttgagttccatgtctaggaatgtttggggtaatgggagtctaaactacccgagcaatcctacaaatatgagtgcttttgcttcacctaggaatgggggccaagtcagtcttcccagtgacaattggggaggtcttccttctgctcatgggatggacaacatttcaagccttgggtcagggaaccttggtcgtggaactggagataataactttggtttgccttctggtagctatggcaggaacaactcaactggtacaattggtgagcctttttctgcagcaggcaatacatatgaagtaaacaatcgagatacatatgggagcagctctatttatggtggcacagcctggaggttcgcatcatctgaggttgacatgccttcttttgttcatgatattggaaatgttgatccgactattaaatgatacatgtcagcaagtcacatgggcaactaccctgttaacaacaatcagccaagcagaggcatcagttcctagggggcggcgagtattacacttgggggtagtagaagaaagaaacacccattcagccaggcaatcccggcgcacacggctgtgaatcggtcggtgattgtcaggttaatacacaggttagtttttgtgtagctaacccagcggcgtggtttgcgaacaccgacatgctagaggtggaagctgctaggctagctagaggaaaggagcgcggatggatatacagaaacatttcgtgaaggttttgtttttgttttgttttttggtttttgcgggggtggtggtcatgttctagttttggttcgtacgcgcgtggtgaggccttttggagttttgaaatgagatgtagtagtaattgttgcggcacatattttagaagtcaagccatgttccaacagaagctggaaagagatgtccgctgtatacgggtgagcatgtataccaaccaaagggatgctgtattatacattagcctgtgtgtgtgtgtgcgtgtttttatttttgtttgatccggtttttagccatttgtcttttttttttcaatctggagattttgctgacttgctctgaattattatgcatgcagtggtgtttattt

SEQ ID NO: 15532 - DNA, 930 bp, Zea Mays
ctgccaaaaccatcaaggaactactggtttaagaattgcctacaacagagtgatgagactcctatggtttgggagatccttctctacatgtatgtcctctattcaccggactggcactacaggagcacaatgccaactttcctgttcctgtatggtgctgcctttgccgtagtacatttctttgcccggttccaagtcgtattcaagctgcattacgttggcctctgcttgctctgcatcccccggatgtacaagtactacatacagacgaaagacgtgggtgcgaagcggctcgcaaaactgtgggtccttacactgacccttgggaccctctgctggctggttgatcgcgtcttctgcaagaagctttcgcattggtacgtcaacccgcaggggcacgcgtggtggcacgtgcttatgggcctcaactcgtactatgcaaacacgttcctgatgttctgccgggctcagcagcgcgggtgggagccgcggatcacgcacctccttggattcttgccgtatgtcaaggtccagaaaccagagaagagggaatgatttctgtctctgcttgaaaactgatgatattcagtcggccaccagtaagctaatgcccccaatgtgtgctcagacaagtccgtggcactcttgtatatgggcgcccaaatgattacggacttcaaatgttctgatgtcgcattagattttgtatcatacttaaatcatcgaacagagattgtcctagttttggccacctttcttttggtttcttcgcaattaccgtttggtggtaaattaggactgagttatttatttatttgtttgtcgttgaatggagtccagttgtactagttaccactgcacaagaagatacattcatccacatgatgacatgttaattatttggcttgtgttgctgccaatagacaactc

SEQ ID NO: 15533 - DNA, 1115 bp, Zea Mays
ggccatctccgcatccactaccgcaggccgcagcccagcaccggccgctctacgccggcacgtcctcgtttctgtccgaggtcatcgcctccgcaacttcgtggccggtgaggtcgcaccaccatggcgtcgctcctagcccggcaggcagcgcaggcgctccgcgcgaggcaaacggcgcagctcgggccggccgcgtcggcgatgcaagggcacctccgtacctacatgaacgcggggattcccaagcggttcaaagaggatgaggagaaagaacagcttgcaaaagatctcgcaaaagattggaatgctgtgtttgaaaggagcatcaatacattgtttttgactgaaatgattaactatccgtttgagaagggtcctctgagcccccgcttccgtggtgagcacgctctcagacgttatgaatctggggaagagcgctgcattgcttgtaaactatgcgaagctatatgcccagcgcaggcaattacaattgaggctgaagaacgtgaagatggcagtcgccgaaccacaagatatgatattgacatgaccaaatgcatttactgtgggttctgtcaagaggcttgcccagtcgatgctattgttgaggggcctaactttgagtttgccactgagacacacgaggaactactgtacgacaaggagaaattgcttgagaatggtgatcgctgggagactgagattgctgagaacttgagatctgagagcctctatcgctgaatctgtcttccattatggttgataaactgggttcttccattttccatattttgctcaactagctgatgaataagcaaacgatgtatcataacttaggtacgatgtttttgtaccttggcaccatctgtgtgttttgttcattgccttgctaaaggtggcaccagatgttctttgatgggaaaattccttttgtagcactgagctgttttcagtcaccttattttgtatacaatgaaacagaacgctgtgttcatggcacagtgatttggtgaatgttcacatgcttgtttccgactccgttttaaaacaaaacaaggtttgaactgattagcttgttgtaaatgtcgtttattttgaaaattgaaacaaac

SEQ ID NO: 15534 - DNA, 2471 bp, Zea Mays
ttggataaccatttagacaagctgttggaagatggagctggcggcaaagggacttggggcaaactaattgagactgatgcagaggcatgccttgatcgaaatgatccaaattatgacagtggagccatatgagttagttgaggcccctgtttcaaccccactagaagactacaagaaatctgttgtccctttaattgaggaatatttcagcaatggggatgtaaaattagctgcttctgatcttaaagagttgggtcatgatggtttccactgttactttgtcaagaagcttgtttccacagcaatggataggcatgacaaggagaaagagatggcatcagtgcttctgtcgtatctttatggcaacgtggtcagttcaactcaaattaggctgggatttgtgctgctattagaggctgttgatgacttggctgttgacatacctgatgtggttgatgtgctcgcccttttcattgcacgtgcagttgttgatgacattctgccacctgctttcctcagcaatgcaaaagtgagtctgtcaggatcttcaaagggtatgcaggttgtacaaattgcagagaaaagctatctttcagcaccccaccatgcagagttaattgagcgacgatggggtggttcaacccacatcacagtagaagaggtgaagaggaggattgctgatcttctgaaggaatacatcagaaatggtgatacagctgaggcttgtaggtgcattagagaattggcagtgccgtttttccatcatgaggtggtgaagcgagctcttactcttggaatggagagtccagctgctgaagctcttattgtcaagcttctgaaggaagcatctgaagaatgtttagtaagctctagtcagatgatgaaaggattccaccgtgttgctgagagtcttgatgatctcattcttgacataccatctgcaaagtctgaatttcagttgttggtatcaaaagccatttctgagggatggttagattcttcctatgtgaactcaggtgtcaacggaagcgttgaagacgatgaacatgagaagctggctaggtacaagagggaggctgtatccataatacacgaatactttttctctgatgatacaacagaggtcatccgtagtgtcaaagagcttggttatccggaatacaatccgatcttcgtcaagaagctcataacaattgctatggaccgcaagaacagggagaaagaaatggcatcggttcttctcccttcattaagcatggagctgttctcgtctgaagacatcgccaagggatttgtaatgctccttgaatctgcagaagacaccgcgctggacatattggatgcctcagatgagctgggactgttcctagccagggctgtgattgatgacgttctcgcacctctaaacttggatgagattagcagcaagcttccaccaaactgcagtggggctgaaacattgaacatggcacgctcccttgcgtcggcccgtcatgccggtgagaggcttctgaggtgctggggcggtggaaccggatgggctgtggaggatgccaaggacaagataacaaagctcctggaggagtatgagagtggaggcgatgtaggggaggcatgcaactgcatccgtgagctgggtatgtctttcttcaaccatgaagttgtcaagaaggcgctcgtgatggcaatggagaagaagaacgagaggaccctgaacctgctgcaggagtgctttggtgaagggatcataaccatcaaccagatgaccaaggggttctcaagggtcagggatgggctcgacgatctggctctcgacattcctgatgccagggagaagttcctttcctatgtgcagcgcgcgaagaagagtggatggctcctgcctgggttcggtgtggcatcttcggcttgaacagctgggcagaagagaagtacgaagctgaagcggctcagcaaacccagtttggatgtgtgttttcgtcgttcgtggttgcccttgcgcctaggttagcggagcgagcccttcctggttgcggtggtggtggcttgtgtaggtctcgcatctgacatgttcatgctgttcttgtttcatttcatttaactctccatagaccctttttttttacatcaagctaaaacagagaagagaaaaaaaagaccatgttgtaaaagttctcccatgctccgcctgcattgcggccggttttttcatcctcatttagctgcaatcgtgcgttcctgccctctcatggccgccgtagctgtttttctatgccattggatgcttggattgtgattgctagtttgttactcttttattctttgtggaaatggtgtggcctggtgaatgcctggattgctagcatgcaccgccggccgcccggcactgtatctttcgatgctttctttgttttatgatgcgacgaatgctcatggacttggatttcagagactatggcatgggctttttc

SEQ ID NO: 15535 - DNA, 1104 bp, Zea Mays
cctgactattcaagtctttgtctgtttggccgtgtctgctatgtgctgctcccacctctatgtaaacaaagaattcttacggaaccgtagcatggatgagaatcagctagctcagcagatgtggaatagtgtagctgcaaatgacaagaaagcagcatacagtctcattgtgagatcacgcgccaatgtaaatttagttcatggagagatacattctagcccatttttgactctcggaaaagcacttcagcaagagcaaccggcttcaccacctgttggaagtcctagatttttcgattgcaactcgcatgacaagatttctcgagagcccctttcccctgctagcacgagttcatgcagagatggcatggaggacggttgcgaaggtctctccttgctccatcttgcatgccgtgttgcagatgttgggatggttgaattacttttgcagtatggtgctagtgtaaacatgaatgattctatgggtcggacaccccttcatcactgcattctgaaaggaagacatcggcatgcaaagcttctcctctccagaggtgctgattcacaagccatggatcgagatggtaggacagcattacagtatgcaatcaatggcggaacaagtgacgaagacattcttgcgttattacaggatcatagtagataatcttgcaaccaataccttcagtaaatcgaggcactcttggtgtggtcgactcaactaacaaggcaccagccccgccaggccccagcttgtcgtgcagacaatcctaaatttatggcatgaaagcaacctatgtacatgtcgttatagggcttcagtatcatgacgcgcctgttgtttcttcccccaccttgtgcttgtttaggataagtcatccatatttagtcatctggcaaacggtttggttttgtttgctgcaggtgatgcatagtaagcctgtaaatggagttatttctctttattttctagtcatcttccgtcacgaagtagatttggcattctgatgaaagatgattgtacatatcgagatgtgtgatgttggggacttgttctcaaatgctatgaattaagaacgaggcaacataaaatgttaaatgatt

SEQ ID NO: 15536 - DNA, 1262 bp, Zea Mays
ctgcgttgaaggaagaagagggagatggggactccgatctgttggtgtcagaaggagagacgagtctgcgaaggaaggagtgagatccgatccagtccagtccagtccagtccaacggaaacctttgcgttttttaagcgagccacgccaataacggagaggcatgcaccgacgatcggcatttccttccagtggcggtgagaagggaaagggaggacagcagagcagaggtcgagcatcgcatcgcatcgcatcgcgcgctttgcctgccgcagcggctaacgaacgcgtggatcatcccttctattattaattaattgggaggagtgggagtgatagctgcagcacccagcgcccatcactgagcccatccggaaccctagcctcctcgtcgttgaatccaccacaccatgagcgggagcgcctccaggaagctcttccaggccgccaggtccatcgtcctctccgcttctcaacgctcctccttctccgtcctcgccgccgagggccgcaccgccgcgctcgccaactttggcaggaagatcctccccagcgcctgctcctaccacaggcagggatcccacgccgcgtcgggatggggagccatcgctgccgcagtccccgccgcagtttacatgctccaggaccaggaggctcatgctgcagagatggagcgcactttcatcgccatcaagcccgacggcgtccaaagaggcctgatttctgagattgtgaaccgattcgagagaaaaggctacaagcttgttgccatcaagctgattgtcccatccaaaggattcgctgagaagcactaccatgatctcaaggaaaggcctttcttcaacgggttgtgtgacttcctcagctctggccctgtacttgcaatggtttgggaaggagagggtgtcatcaagtatgggagaaaactaattggtgccacagacccacagaaatctgaaccaggaaccatcaggggcgatcttggtgttgttgtgggaagttttcacataattgccgacagaccaaggcaggatgtaataaagtagctaccgtcacctattacttttgagttggattgattgtggtgcagtaaggcacaaggaaaggaaggaatacaccgtgaaatttgttaatcttcatgagtctgtttttgctcttgttttcagtaaggcacaaggagtgcagtgccaagcaagcagaggggagagctgagttttattgccatcttcattcaagcctttgtacaggggctagctaaccaa

SEQ ID NO: 15537 - DNA, 129 bp, Zea Mays
cataggagtgaggtcacgagatatctgaagaccaacttggtgaagtacctagagatcttgagtctaaggcaagttgtgcccttaatcactcctttttacctaataatgttgttggtcacttgttctcaa

SEQ ID NO: 15538 - DNA, 4476 bp, Zea Mays
ccgcacacaagtcctcacgatatttagattcttatgcagctagttatacacgaattcaaattctatatttaaaaggagtaccaaacaggtccaatgtgtgtaataaaaagaaaaaaaaagattccagtagcagcagtaaagcccattcgtatgtggccctgctccggaccgaaagataaagcccatttgaaatccagctcggcctgctgtcagttcaggagcaggacgagtcggggtcggcgcggcggcaggccgcaggccggcagcaggctctcgcttcgctctctcgttgtctgtcgagaggaagaagacgaggcgagggacggcagcagtagcagctccagcatcttctagcttcttcattcatgggattcggtctctactaggattaggggtgcttcatttcatccgatccccaacgacttgacctgattctgatctcgacgacgatgcggaagcgggatctgggcatcctgctgctcgccgccttcgccatcttcttctccctccaccacgaaggcgacttctccttccgggagtcctggtaccacctcaccgacgaggacttccccatcaagtacgaggccgaccgcctgcccccgccgctcgtcgccgatctcaacggcgacggcaagcccgaggtcctcctccccacccacgacgccaagatccaggttctccagccgccccacgcccgccacctcaacgatgactccgccttccaggaggcccgtgtcatggccgacatctctctcctccccgacaacgtccgcctcgcctcggggaggcgccccatcgccatggccgtcggcaacgtcgaccgctcctacagacctggcgaggtcaggaagcaggtgctcgtcgtcgtcacctccggatggtcagtcatgtgcttcgaccataacctcaagaagctgtgggagcacaacctccaggacgatttccctcatgccgcccaccaccgcgaggtcgcaatctccataaccaattatactctcaagcatggagatgcaggcctcgtcatcgttggaggaaggatggagatgcagcatcattcagcagatctcttcgatgaatttatgataccagaacacaacatggatgatcgccgtcgaagcgccagtgagaaacagggctctgaggctggcaatgcagacctgcgccattttgccctttatgccttcgctggacgtagtggcgaccgtagatggagccggaagaatgagaacatccagtcacagccatcagatgcttctgtgatgttaccacagcataattacaaactcgacgttcatgccctcaatagtcatcaacctggtcagttcgaatgtcgtgaattcagagaatcaatccttggcatcatgcctcatcattgggataggagagaggatactaccctacaacttgcacattttaggaagcataaaaggaaacaagttaagagaacgcctggaaaggctgttattaatagcgtgaacaagcccattgaacacaatccacctgggaaggatgcttccaatagaatagctagagctcttgggaaggctgcagatatggctaactcaaataaagccaggaaggcacagaggatgcagtatgttccgacaatcactaatcatactcaagtttggtgggttcctaatgttgttgttgtacatgaaaaggaagggatagaggttgtccatctagcttctggacgtacaatatgcaagcttcatttaaatgaaggaggccttcatgcagatattaatggagatggagttctggatcatgtccaggttgttggtggaaatggtattaaagagcagactgtcaagttttgggaggacattgatacagctggtttagaggtcgcgactcctatcctggtccagacagacgatgggcataaacacaggagaggaagccatggtgatatcatctttttgacaagccggggagaggtgacatcgtactctcctgggctgctcggccatgatgcggtgtggagatggcaagtatcatcaggggcgacatggtccaaccttccatctccatcgggaatgatggagaacatagtggtgcctaccttgaaggccttctccctacgtgcctatgacccgaaagaggtgatcatcgccggtggtgaccaggaagcggtggtgctctctccttctggtggcatactggccatgatcgagctcccagcgccccccactcacgctcacctcctggaggatttctccggggacggtctcaccgacatgattgtggtaacttccggtggaatatatggattcgtgcagacaaggcagcctggggctcttttcttcagcacgctggtggggtgcctgatagttgtgatcggcgtggtattcgtgtctctgcacctcagttcgtccaatgccgccaaacccagggcttcctcgtctgaatacagatgatgttttgatatgcaagggccaagaggtatccgataaaactggaaagcaaggaatctggtatttgcagggggagcaaggtatgctatgtttatgcagacacctcttgggagaaggaatcatggtgtaaagcactccgtcttgcttctactacggacaaggacaaactcaaatcccatgaaatgctgacccaagagttccgcagttacatgtcctctctgaaagctggatacccttcctttctgggaccctcgacactctccagtcaggaacatgtgcttgtggacaacactgtgaagaatgatggaccttcaaaactccgaggttttctcaaacgattggtgggaaagaaggcatctgccaaggcttctcaggagagcaaaacaggtccggcgccatctaaacaagatacaagccaacccagtactcctagctccactatgagtttcaacagccagctaccagcttcccccagtgcaaaggtggatgaaaagcttgccgatgacggtacactttgttggaacctcctaatctcccggttgttttttgatgctaaaatgaatgatgagatgaacaaagccatcagagcacgtattcagcgaacattgtcgaacaccagaactccagcctacattggtgagatcacgcttactgacctcaaccttggcaagctcccaccatctctgcacagaatgagagtcctcccactggatttggacgaatcgtgggctttcgaagttgacttcgagtgttctagtggaatactgctgcatatcgaaacaagacttgaggttcaggcgccagagctggaaaaggacattatgaagactgatattagaggcaatcctaatggggacgcgagttcagatttccttgatagtattgagcaatatggtaaccaattcgggccttcagaagtttcggattttgcagcagaggtcaacgatgaagcagataccttaaggaaatcaaagagcgctgggtgggcatcaacatatatgtcaaggtggagaagtatcttgaattcaatagcggaccaggtttcacaggtgccgctatcattggcgattaaaatttcttcagttcgtggaacgatgcggatacatctaaagcctcctccgggtgatcgagtttggtatgggtttacgtccatgccggagatagagtgggagttggaatcatcggttggggataggaagataagcagcagttacatcgcctcgcttatcggcaacaggatcaaggcttcggttcgtcagatcttggtgatgcccaactgtgaaagctttcctatttcctggatgatagcagatacggatgactgggtgccccgcagaattgcaccttttatatggctgaaccgtgagcccgctgataggcgtgctgcagacacaactagagagatgatgccaggggaagcttccacatccaaggccattgcaaagaacaagtcgagtccgctgccgtctacaaaaagaatcaccaacggttcctggaacaagacaaagatacgtgttgatgggcaagagcaagagcaggcagaagcatcaacgagctcgcagtcttggctggtttcagcaaatggtgatgcaacaagggaacagctgaggatgccactgctgagcagcagcggagacgagagagcaggccctgtggaggagcagcaagcatcaccttctgctgctgaggaggagggagatgcgaagaagaggaagaggcgtgcacgggtgatggatctaggaaggaggatgggcgacaagctggaagagaagggcaagcgtttcgtcgggaagatgcgggagaacgcgaggaacaaccgcttgctattgccggacttggagcaggccaccacccctcctgctcctgctcctagttaggcattttaaggatgttactcgacaaaatgaaaattaatcagttgcagcgcctagcaacagctcctaattaggagcacttgtattatgtaaaagaaagaaagaaaaagcttatgagatatgattgtaccacacagatggatgtatgcatctctcatctcacccactgaattaacacaaca

SEQ ID NO: 15539 - DNA, 2948 bp, Zea Mays
atcgcgaaaaaatctttttctcgcctctcatcgctcctcgccatttctctctcctcccctccgtctcacccgccgcccgccgcgaaaatctgcgcacggacgcgccggctgcccgcggagagcctcgggtgggagcgcgccccgtcgaggctcttgagctaccaagcatgtcagaatcaaatgtgaagtggattgatgggcttcacttcacatcattgtactggcctccaccccaggatgtggagcagaagcaggcacaaatcttggcctacgtcgagtactttggccagtttacagctgacagtgagcagttccctgaagatgtagctcagtatctacctcgtggaagtccatctgaagcatgcttgatgaggatatttgtggcaacagttgaagctatacttaggagagcttttccttctgaaacaccagagcaatccagaaagccaagaagtcaatctaagaatcttgctgttgctgaacttcacacaatgatacattcactctttgttgaatcctgtgcctcaatggaccttgcctcccggttgctatttgtggtgttaactgtttgtgtaagtcatcaagctttgccagggggcagcaaaagaccaactggtagcgataaccattccctcgaggaagccactgagcattcaagattaacaaatggaagaagcagatgtaagaagagacaaggccctgttgctacgtttgattcgtatgttctagctgcagtttgtgccttatcttgtgagcttcagctgttcccttgcatttctaagaatggatcacattcaaatttaaaggattccatgaagattatcatacctggaaaaaacaatgggatcaataatgagctacacagtagcatcagctcagcaattattcatactcgtagaattcttgccatcctcgaagcccttttctccttgaagccatcatcagttggtacctcatggagctatagctcaaatgaaatagttgcagcagctatggttgctgctcacgtttctgagttattccgtcggtccaggccatgccttaattcactctctgcactgatgagatgcaagcgggatgctgagatttctaccagggcatcatccctctaccatttgattgacttgcatggtaaaacagtgtcctccattgtgaacaaagctgagcctcttgaagctcacctgacccttacaccagtaaagaaggttaatcaacatcgctgtgaggaaaacaacaccaactcatcggatagtgccaagttggaaaacaagaatggttcaacacataagaaaaacggtttctcaaaaccacacttgaaatgtgcagaagaggttctgaacggcaatgttgcaagtacatctgggaaatccattgcaagcttacaggtggaagcatctgatttggcaaacttccttaccatggatcggaatggggggtaccgaggttcacaaactctcctaagatctgtattatcagagaaacaagagctgtgcttctctgttgtctcattgctctggcagaagctcatagcttctcccgaaatgcagatgtctgcagaaagcacatcagctcaccaaggatggaggaaggttgtggatgcactttgtgatgtcgtttcagcctcaccaaccaaggcctcagctgctatcgttctccaggtcaagatattgctatattcgccgagaaggacttgcagccttggattgctagagacgacgaacaaggccagaagatgtggagagtcaaccaacgtatagtgaagcttatagcggagctcatgaggaaccatgacagccctgaaaccttggtgatactcgctagtgcctctgaccttctacttcgtgctactgatggaatacttgttgacggtgaagcttgtactttgccacagcttgagcttctcgaagtaaccgctcgagcagtccatcttattattgaatggggagatccaggtttatcagttgctgatggcctttctaatctgctaaagtgccgtctttcaaccaccatccgctgcctttctcacccaagcgcgcacgtgcgcgcgctcagcatgtccgttctccgtgacatcctggaccacggatccgtgagccccaacaagatcagccgaggggaacagcagcggaatggcatccagagcccatcgtaccggtgcgtggccgcaggcatcctcaactggcaagcggacgtggagaggtgcatagagtgggaagcccacagccgccgcgccaccgggctgacgctcgccttcctcagtacggcggcgaaggagctcggctgccctctcccgtgctgacgaggccgctcccggatctgatctgacatcggcggccacttgacggccagtgctggcagcttgctgcgggaccggcgagtaggacgctaatctctcgaccaaggacgactcgccggtttgttcacgtgatatgtgatcaaactgatattagatggtgtttccaaagtatatatctactgaggggcttgctcccatgatgcgattttattccaatctgacgtcagatgctttacgagcatatttaactgcttgagctgtacgtagcttgtattacttgtaactttgtgtaatatggttattattgccgaagaagcagaacatagctttttcttttttttctctctcttttttagactgctgctagatccttatccatgcgttgcaacggagcgccatatagattgaagttccccttgcagggctccttgtacggtctataacatgaacataaagatggcatccagtagtcaatcagcaactatcgcaatgagattggtcttctgcacgtgacccagtttagctcccgtgcagggctctctgtaacctactgtgatgtcccatgacatgaacataaatgtggcaggtttatcattcaataaccaaacagcagccgatatgtttcatctttatacataagtgctgatctaat

SEQ ID NO: 15540 - DNA, 1362 bp, Zea Mays
gcagtcgcagcagggccgagccgaccggtcaaaagcactgctgccccaccccaacccaccaccatccccgttccccaacccccaaagccgagagccatcccgcccgcagccgcaaccaggcaagcaagcgggagccgccaactcgtgcctctcggcagcggcgtctgaactctgaaccgaccgaccgaccgaccgttccgttccgttcaccccaccatggaggcgccgccgggaccggggcccatggagctggacgccccacctcccgccgccgccgccgcggcgattcctcccgccggcagcgacaagcacaaggacggggaagggggagacgctgtgacgggccatatcatctccaccaccatcggcgggaagaacggcgagcccaagcggttacatggcagaacgtgtcgtgggcacaggctcatttgggatcgtcttccaggctaagtgtctggaaacaggagagaccttcgccatcaagaaggtgctgcaagatcggcgttacaagaaccgggagctgcaacttatgcgtgccatggagcaccccaacgtcatctgcctgaagcactgcttcttctcgacaacgagcagggacgaattgtttttaaaccttgtcatggaattcgtccctgagactctataccgagtcctgaagcactacagcaatgcgaaccagaggatgcctcttatctacgtcaagctctacatgtatcagctttttagaggcctagcttatattcataatgtaccaggagtctgccatagggatgtgaagccacaaaacgttttggtatgtgtcatgtggacaaggatttgttcttcctttgatttggtaattagttctgaattggtctcgtcgtctctctttgatgtacaggttgatcctctcacccaccaggtcaagctctgtgactttggtagtgcaaaagttctgattcctggtgaaccgaacatatcttacatatgctctcgttactatcgtgcccctgagctcatatttggtgcgacggagtatacaagttcaatagacatatggtcagctggttgtgttctagctgagttgcttcttggacagccactatttccaggagagagcgctgttgatcagttggtagagatcatcaaggttcttggtactccaacccgtgaggagatacggtgcatgaatcccaactatactgagttcaggtttcctcagataaaggctcatccatggcacaagattttccacaagagaatgcctcctgaagccatagaccttgcttctcgtctccttcagtattcaccaagtcttcgctgctctgcttcttgtagaccgtgaccaattaaaagtggccaagtccatgtggaagtatgtcc

SEQ ID NO: 15541 - DNA, 1185 bp, Zea Mays
gggatggccggagttcccgccaccttctcctcagccaccgctcagatcgggggcttcctctcgaagaagccttacgcgccgccgttgtgggccacgcacctctcccccatgccttgccataccttctcgctcggccatttcccaacaccgattcacaagtggaatctgcccaatttgccggaaggaacggaagtgtggatcaagcgagacgatttatcaggcatgcagttgagtggaaacaaggtccggaagctggagttcttgatggcagatgccgtagcacaaggcgcagactgcgttattactgttgggggtatacagagtaaccactgccgtgccacagccgtggctgctaagtatctcaatcttgattgctacctgatactacgtacctccaagcttcttgtggataaggaccctggtttggttggcaatcttcttgtcgagagactagttggggcacacgttgatcttgtgtcaaaagaagaatatggaaaaattggtagtgtggctttagctgacctgctgaaaaaaaggcttctggaagaagggaggaagccgtatgtgattcctgttggtggatcaaactcattgggaacttggggatatattgaggcaataagggagattgagcagcaaattcagcaatcttctgatgttcagtttgatgatattgttgttgcatgtggcagtggtggaaccattgctggccttgctttaggatccagattgagcagcttaaatacaaaagttcatgcattctctgtttgtgatgaccctgaatacttctatgactatgtccaaggcctgattgatggacttaattctggtttcgattcacatgatatagttagcatggaaaatgctaaggggttaggctatgccatgaacacagctgaggagcttaagtttgtcaaagacatagctgcatcaacaggcattgtccttgatccagtctacagtgggaaggcggtttatggtttgctaaaagacatggctggcaatccagccaaatggaaaggtcgaaaagttctgtttatccacacaggtggtcttcttgggttgtatgataaggctgaccagttgtcatctttggctgggagctggcgcagaatggatcttgaagattctgttccacgcaaagatggcactggttcatctccatgaactccgagagaggaatca

SEQ ID NO: 15542 - DNA, 281 bp, Zea Mays
ttgccgtcaccccaactgccccccacacccgggttctttcggtctcgtgctttaaaagatggtcttactcttatagggggaccttaattgccacaaattctccaaggtcggaaatgatttccaatgttaactgaaaataagttgcaaacttcctcaacggtgaggaggctggcaactggctggacatcaagtgatcgagccactggaaatgtttctctgtcaataagtttctctcttttttatataaaaaagtgtccagaaccactggtctgtggcttgca

SEQ ID NO: 15543 - DNA, 3817 bp, Zea Mays
ctgaaggtgaaagccacagcagctcgtccccttccccccacttcttcctcagataaggagaggccccaggccagagaaaaaagcatcgaatttccccccgttaattggcctgagccctcagccgtctaccagcagcagctagaggcagacaagctaggttttactgcttcattgagcacaaagatccgctgacctcttgctcttgatatgccaccaagagtacaaccagccaacatgtatattccttggtgttcaagctggattgtctttgttgacgtcagagctgactatgatttttggcatagcactcggattcaacctcctgtttgaatatgatgatctcatcacagggatatgctttgcaacagtggtacctaatctgctaccatatgctatatcccacctgggaaagaagatggaagggacaataaatgcctgcatagcaggatttgcacttcttagttatgtgcttggcttattggttagccagccacaaattcctctcacgatgaatgtaatattccccaagatcagtggtgagagtgcttactctctgatggcgcttcttggtgcaaacataatggcacacaacttctacattcattcatcagttgtccagggtcagaaaaagtcatctgcagttggtcttggagccttatttcacgaccaccttttttcaatattgttcatttttactggaatctttatggtgaactatgttctaatgaactctgcagcagcggaatctactaatactcttctcattaccttccaagatgttgtagagctaatgaatcagatatttgtaaaccctctggcaccaactatatttttagtggttcttctcttctccagccacatcatctcgctgacatctgctatcggtagccaagtgatttcacaccatttattcgagagaactcttgaatacttctcaagaaagggaagatgttaaggtggacaatgttacatatgaggaagatcaaagatcagatgttgtcccttctcccagggatgtgcctgacagccatccggaactggccttggactatattgatacttctgacactgctgtagaatctgatcacgactctcaacaatctactgcttatgcatccactgctcctgaaacctgctcctccccgtcgtttactcgcgaggagtcaaaatcagttgttgcagtcaactggccggagcctttggagaaggttcctacttctactgtgatggaggaaagcacagtagaaaatgtggtctctaggatcacgactgaaagagatgttttagtagaaacagatgttgtctcgggcaaggataaggaagatatccgtactttggagtctgagaagtcaattgttgatagcaccccatatgtgtctgatgacggtccgccatcccttactttcagcaggggaaagggctcagatgcaggaaatggcagtggtagtctctcaaggttatctggtttgggccgtgcagcaaggagacagctagctgctactcttgatgagttctgggggcatctgtttgattaccatggtaagctcactcaagaagctagcaccaaaaagtttggtatcttgcttgggatagaccttagaacacctagcacatctgtaagaacggataaacaagctgctgaaatacttaagagcccactggtgagagactcaatgcggggggcagcttttttgtcaagctcagtggacatgatgtcccctaagaatgaaacgtcgaatttggaacttgcatatgggcttcagaggggacctggcatgggattgtcaagctggtctcagggtatgcagctaccaaatacacagctgcagagctcaagcaatagcctacttgagcagagtgcaagattaaactcaaattttagttcatcttattcagacaacaatcagttctaccaacctgcaacaattcatggataccagctcacatcttacctgaaacagatgaatgccagcccaagcctttactctagcatgccgctggacccacaacggcttccaaaatcatctgtgtctgctgtgccaaactatgctgattccatgatgcatgctcgtaatcataacctgcttgcttcactgggtggtactactacacagcttcctgcaacatcccgcgtaggctcaatgatgcctgaaagatcgtattatgatccttccagcgttgatgggaatgaaaacgctggttcacctgcttactcaaaaaagtaccacagctcacctgatatgtctggaataatcgctgcaagtagagctgcactcttgaatgaagcaaagttgggtgctgccattggaccacagtcatacctcagcaggctggcggcagaaagatctcaatatgcaagctcaacagccaggcccgcggctccattagcatttgacgagctttcacctcctaagctccagagtgatatcttctcggcgcagtcaagcatgagaccaagtgctagatccctttgggctaagcaaccatttgagcaattgttcggcatgtcaagtgcagagctcagtaaaggtgacttcaatcttccaggcagatcaggtggcgtggccaaggatgatttctcttataaggaatctgagacgaagcttcttcagtccctcaggctctgcatcatgaagctccttaagctagagggatcagggtggctgttcaagcaaaatggtggttgtgatgaagatctaatcgaccgagtcgctgcagccgagaagctattgatgcaagggactgccgagaatcaactgctgcttcatggtggtgatctccagcaacattcttccgaccaggccggcatccagtacatgcgcacgcttcccaactgcggggaggactgtgtttggcgcgcgtcactcgtcgttagtttcggtgtctggtgtgtccgccgagtgctggacatgtctctggtggaaagcaggccagaactttggggcaagtatacctatgtccttaaccgtcttcaggggatcttggaccctgcgttctccaagcctcggggtgctctgacaatatgcacctgccttcagaaagacaccagagtgcgcaatagcccaccccacagtgggctaacagccatgggcccggtccccacaccgatccggggcgccttcacgaccgcaggcgtggttctggagatgatcaaggacgtggaggctgcggtctcaggccgcaagggcaggagcggcacggcggcgggcgacgtcgccttccccaaggggaaggagaacctggcctccgtgctgaagcggtacaagcggcggctcgccagcaagggccagtagcgcgcgggtgtcagacaggcaggcgatcgcaagcaatgttaggaggagcctgactattgttctccaggggggctgccactggcgccggcctccctgagccctggattttttcgttgcacgacgttcctagggaccggtggttgcccgatggtcgtcttggtcccttccagcaggttttttttttccttccctctttctgttggtttctttttgttggctttgtgatgttttgtaaggggcaactagggtatgtgctcagaaggactcaagatgtacacgcgaagatgtactagtctgctgatgcagcgttgtaaagtccacactctgcaggttaaccctttttggggccgtcaagtgttagtgcgtgccctatgtatgttaatcacccctgcagagaggttgcgaatactgaactactcacagacctgcacctgtcgagatcgtttgtaatatccgacgtcttgttcagaattgttctcactcttttttgcccgttgtgtaatttaccctgaagggacttcaag

SEQ ID NO: 15544 - DNA, 451 bp, Zea Mays
cgccgtgctgccgctcggctgggaacttaggtgaggtgcggaacacagaagctagtccagcggtccttgaaggaggaagagaagctgcagcatatgcttgcgaacttaccttctggaatgcgcaagaatgattttgctaatcagcacgaacagagctcatcaaggatgctgcctcattttaactcttcttttactgaagctaatgaatgtgaactgaagattaaggatgaaccagttgcagctcctaggaagggaagagcacctgcacctcgttggtatatctcaaccgaggagcttgattcactctcatcgtacatgaggggaagactgactttggaaaaggttaatatcgcaataaatgaagtggcttcatatgcagatgccaatgctcatcttgttacatgccctaagaaaaagttgtcagaagatacatgggaaaaagctttggtaa

SEQ ID NO: 15545 - DNA, 768 bp, Zea Mays
cccctgaggtgttactcggaagcctttaatcactaggaacaacaagggagacaaccttactggagcttactaccacaaggtgagcgaattgacaaacacagctgttggggcagagcttacccacagtttctcgaccaatgaaaacaccctcacctttggcgggcagcacactctggacccactaaccgtcttgaaggcacgcatcaacaactcgggcaaagccagcgtcctgatccagcatgagtggaggccaaagtcgctggtcaccatctcggctgaggtcgatacaaagaccattgagaagagctcgaaggttggaattgctgtggccctcaagccctgattgattatcaagactattttttcttctaaggtcctagcatgactgtttgggtcatatcaggtcagctggggaaaacaaaactgttggggttaccggcatcttttggtcgttgcagtctgttgatttcatgaactgcgaaatgtttcattgaggaaatttttgggtcatctgcttagcgctctgttaaatgagcaacttccaaaataattcgagcccagtagaattctgaacttgtttacaatggttgatggtgacattgtcaattgaggtaggggtggttcagttttctaactgcgttttttggaccggtttgtttcatcttttttctgacaagcttttctaataatctaagaatttatctgtggagaatatggttgtgagaagaattagagcatcatgagaattatgtgcagagtaagatgaag

SEQ ID NO: 15546 - DNA, 2136 bp, Zea Mays
aaaccaggttttccgacaacccagagagccaaagaaaggactaccaacaaccgcaaccgctcgcttcccagcacctccccacctttcgctccctccctccctccaattgcaggatcggcaccgatgcgattcgaccgcggcctcgcatccggtgcggaggtctgtcattggagggaggctcctctccgctgcgcgcgcgcgtcgcggcctgggcgagtttcctgctggttcctcgtccctcgggagagattttgcgatccttggcgttactgttcgattgcaaacagtattgctgcttctctgaggaggcattagggctatgggcagttgaactgaaccgccgcggcagaaatccattcgtgggagagagaaatcaaagaggagagtgagtgatcatggagcgcgtgattggagggaagtataagcttgggaggaagattgggagcggatcttttggggagctatatctcggtgttaatatacagaatggtgaggaagtgggaataaaattggagcctgtgaaaacaaaacatccacagctgcactatgaatctaaagtttatatgctactgcagggtggaaatggtatcccacacctcaagtggtatggtgtcgagggggagtacaatgttatggtgatcgatcttcttggcccaagcttggaagatttgtttaattcctgccacaggaatttttctatgaaaacagtactcatgcttgctgatcaactgataaaccgagtggaatacatgcattccaagggatttattcatcgtgacatcaagccagacaacttccttatgggcttaggtcggaaagctaatcaggtctatatcattgattatggacttgctaagaaatacaaggaccttcatactcataaacacatcccatacagggagaacaaaaatctgactggaacagcacgttatgctagtgtgaatactcatcttggaatagaacaaagtaggagagatgatctggagtctgctggctatcttctgctatattttttaagaggaagcctcccatggcagggtcttaaagctggcactaagaaacagaagtatgacaaaattagtgaaaagaaaatgcttacgtcagcagagattaacactgtaggataccagtttgattacgtatttgactggactgtactcaagcaccctcaaatcggttccaacaacaagcttgttcaatgggacaagaggcccgggacagattcacgggtgctgttgaggcattcgccagaagaaatccaggctctggtcgccatggagatcattccaggcaccaaagccttgcagattcctttggcacatccaacgaagcagttgccgactcagagaaaacgcacatcttgtcctggggagggagctcgtcgaaaatgcccgcggcttcgtccagccggccgacctcctcgggggactgcagtgaccagaaccaccggtgggtttctggcagtagtggcggcagcgggcggccgtccacagtgcagaggcaccaccactcggcaggcgccgagaacagcaggtcgtccacgcgctcccccgtggcccggaacgcggccgagagaggaggctccggctcgcgggacagcacgacgttccggagcctcgagcgcctctccatcaccaccagcaggaggaagtgagctgccgaggaccacgccgacgatttctgtgagtgaaaggcggttactaggccgacatcttttgcgggatcgttgctctctgcagctgaagcaaatcggcaaatggatggacgggattgcagcgcaatgacctcgaggatggcctcctttacaagaactgccatgaaaatgctttctccaaaccgtaacgtataacgcttcccccaaccaaccagagggaagacaactccaaagtacaatgcaatcctgtttcacggcaagctttcactgttcacttgttttgccgttctggcactagtttctaaagtctccagcaatgtaatctatattcatcttctatgcctgtactttatagtctcatctaaaagattctctcttctatatctttctaatctgcagcagcgtcctctatatctcgtcctttatacatactagtcggttgcctatgcgttgtgacggctcacaataatacccacgtaaac

SEQ ID NO: 15547 - DNA, 784 bp, Zea Mays
gaaaaatcattcttctgccatgaaagcatttcaaaagctaagctttctgagtattcagaaaagattgaagcacttgcttccaggcttgctgcttcagtgcctgaaaatgaaaagccgattattgaaagcaaagatgaaatctcttatgaagaagcaaagccagaaagtccaatatctttatcatcaggactgcgaaggagatcaacagcccatgctgtggttggaacaagccatcaggaaaataaagaagatatcggagcaccgataaaattggatgcagaagctcaggctcacattgagaagcataggaagctccaagaagatttgactgatgaaatggtcgagttagcacgtcaactgaaggaaagtagcctaatgatgaaccaatccgtgcaggagacagagaagatccttgattctaccgagagggccgtggagcacagcctggcaagcacaggccacgcaacctcgcgagctgcggaggtctactcgctggcttccaagactacgtgcttccagtggctgctaatgtttgtgatgacctgcatgtttgtaatggtggttctgctgataaggatcacttgaatgatgaggctgtagcaggcactcaaatcgtagtcacccttgtctttgtttcatgggaattctttgtggtcaggtcatggtatttttccgagcaagtgtccccaaccaaacaagcctgctgtatgagagagaaactggaacagctgcctgtacagaggcttggtggtcgctgttttattggtcaggcctgagagactcc

SEQ ID NO: 15548 - DNA, 587 bp, Zea Mays
cttctgaaagcttgtactttattgatctgaagtgcttcgtgttttcactcatcaacctccacttcaagatcaagccaatccagtcttgagctccatctcaagccttcatgcgactgttttggagtgttttaagagagaaccttgtaccatgttaagatgatgttgagcttgtgacgatgcgcacggtagaagtggaacctttttttttttttgcggttggattgtgcaaactgcgagcagtagtgagtgtggtatatttgtgccttcagtttcctgttgggtggagtgttcttgtcgtttggcacggcacactagtattcttctctgttatcagcgctctgttgaaggatggaatggatatccagattgtctgggacttgtggtgatgcagatccagccagtaactagtatgaatttctctagtggggttgttgggctgctaaaaaccgccggactgagcaaaggaaccttgcgtctttgtgtaaagcagcagtcgaatctgtgtgtgtgtgtttgtgattaaagtcgtcattcggtcctgactgcctgccgtgtgttgtctttaatctgatgcgcgctgtctgctt

SEQ ID NO: 15549 - DNA, 1554 bp, Zea Mays
agggacggagcaaaggccctaccgccctacacaccaccaccacccacacaaattagaggattggtgccttgctccctcccccttcttgtcgttgctccaccctctcttcttttattattgggttctttttttctctctctccccttggatttgcgcttgtgctcgtctggccgcatactagtatccgcaccagagaggagacacctccgactccgacctgctcttgcatatagattgggcagagagtgagagagcgcgcgcgcgctcaaggggtgccaaaaggagattttttttttaatccagcttcttagcctcactgtctttgatcccggagagcagccgccagcccaactaatccttgctgctggcgcgccggggctccgattgcgctccagatctgaggcacctgctcggtggattccaggaatccgagcaccaactcgacaggggagttctcagggtaaagaggctgagagcgcgttggagatttggactataagagcgagcgagcgagctgggtgccttgctgccttgaggacgccgtcaagaaaccgcgtggaggggagggcgatgagatgagggatgctggccgcggtgatggactacttcagcacctgctggggcccgcggtctcgtgcggggcaccggggcaagggctccgacgccgccggccggcaggacggcctcctctggtacaaggacgccgggcagctcgtcaccggggggttctccatggccgtggtgcaggccaaccagctgcttgaggaccagagccaggtggagtccggatcgctctccctggctgactacggcccgcagggcaccttcgtcggcgtctatgatggccatggcggcccggagacgtcccggttcatcaatgaccacctcttcaaccatctcaggagatttgcaactgagcacaagtccatgtcagcagacgtgatccggaaagctttccaagaaactgaggagggctttctttctctagtcatcaaggaatggtctttcaagcctcagattgcatcagttggctcctgttgccttgttggtgtaatctgtgctgggactctctatgttgcaaacctgggcgactcgcgtgcagttcttggaaggcttgtgaaagcaactggagaggttctggccactcagttgtcagcggagcacaatgcatgctatgaagaagttagacaagagctgcagtcatcacatcctgatgatccacgtattgtggttctcaaacataacgtttggcgagtgaagggtctcatccagatctcaagatctatcggagatgtatatctaaagaaaccggagtataacagagaacctcttcacagcaagtttcggcttcgagaaaccttccagaagccgattcttagttctgaacctcaaattactgaacaccgaatacagccaaacgatcagtttgttatatttgcttccgatggtctatgggagcacctcagcaatcaggaagctgttgaccttgtccaaagtagtccccgtaattgtcctttccattcacttccgctgaacctgtaatttccttgcctt

SEQ ID NO: 15550 - DNA, 2945 bp, Zea Mays
tgacactcgaagtttgaaatgagagagctcatggcgtgagcgaggggttgcaggcagcgctcgcctccgcccttctggtataaaagcctctcacgccgcacccacatttctcacatcacagtgcgggcggcgggcgccactctcacacctaccaggaaaccaatcaaaacttaaaaccaatcgaaattagaccggcgacgaggattagcgctcgccggcgatggattctgactacggcgtgcctcgcgagctctcggaggtgcagaagaagcgcacgctctaccagcccgagctgcccccctgcctccagggcaccactgtcagggtggagtatggtgatgctgcaattgcagctgacccggcaggtgctcatgtgatcagccatgcattccctcatacctatgggcagcctattgctcattttctcaggaagacagctgttgtccctgatgctaaggtcatatctgaacaccaggcggtcagggttggcattgtcttctgtggcagacaatccccaggaggccacaatgttgtttgggggctctatgaggctatcaaggcccacaaccaaaacagcaaactcattggtttccttggtggatcagatggtctgctagcacagagaaccttggagatcactgataaagttattgcttcatataaaaatcaaggtggatatgacatgcttggtcgaacaaaggatcagattaggacgacagagcaggtcaatggtgctatggctagttgccaagctttgaagttggatgctctggttatcattggaggtgtcacttccaacactgatgctgctcaacttgccgagacatttgctgaggcaaagtgtgcaacaaaggttgtaggtgttcctgtaactttaaatggggaccttaagaaccagtttgttgagacaaccgttggctttgacaccatatgcaaggtgaacgcacaacttatcagcaatgtatgcactgatgctctatctgctgagaagtattactactttattcgcctgatgggacgcaaggcttctcatgtggcattggaatgtgctcttcaatcacatccaaacatggttatcctaggagaggaggtggctgcttccaaacttacaatttttgatattacgaagcagatttgtgatgcagttcaggcaagggctgaaaaagacaagaaccatggggttattcttattcctgagggccttgtggagagtattcctgaactatatgctctgcttcaggaaatccatggcctccatggcaaaggtgtttctgttgagaatatctcttctcagctttcaccttgggcatctgcactctttgagtttttgcccccttttatcaggaagcagctactactacatcctgaatctgatgattcagctcaactttcccagattgagactgaaaagctgctagcccagttagttgagactgagatgaacagacgtttgaaggagggcacttacaaaggaaagaagtttaatgcaatctgtcacttctttggctaccaagctaggggagcactgccttcaaagtttgattgcgattatgcctacgttttggggcatgtgtgctaccacatcatagctgccggattgaacagttacatggctacggtgacaaatcttaagaatccagtgaacaagtggcgatgcggcgcgactcctatttcgtctatgatgactgtgaagcgatggtcgcgtggcccttcagccacccaaattggaaagcccgctgttcacatggctagcgttgacttgaaaggaaaagcatacgatgtgttgagacagaattcttccagctttttgttggaagatgtctacagaaacccaggcccgctccagtttgaaggaccaggtgccgattcaaagcctatttcattgtgcgttgaggatcaagactatatgggcagaataaaaaagttgcaggaatacttggagaaggtgaagaggattgtgaagcctgggtgctcgcaggatgttcttaaagcggcgctgagtgccatgtcttctgtgacggaaacactgaacatcatgacttcatcttctaccggccagactccactgagtcattaggtaccatttcatggtatggatcataatccccacttttttcagtggtggcgattaacgagtttaggaacagcaaccctggtatcatacgggttattcttttgtagccttttggagagttctatcggttttggattcggtagtttatgaaggcttgttgatgagtttgagctcgaatagcttttgaaacagccggatgatgccatctttaataaaccaaattctgtgactgcattcacatttctgtcagtcacctgagtgagaaaatgtgataaatcactcagggaagctatgaagaatatgtcaattggagctatcaaaccaaaagaagatgaatatgaggtgcaagatatcagcatgccttttttatcaaatgtatcatgagaaagatgttgatgctcaagcaatggtacaagccaaagatgttgatgctccaaaatctttttaccaagtggttgagaaaagaaattcatcactactacaatcacatccacaagatctcatcattgggaatccttcaaaaggggttatttcttgttcaaaaaatgctttatttattgaacatcactgctttatttcttgtgttcttgtatagatgaggtgctacaggatccagactggtgaatgttatgcatgaagaattaaacaacttcatctagaatcaagtctagacccttgagaagcctctacacgatgcaagagtcattggaacaaagtgggtgtttagaaacaaacaaaatggtcaagaggtaattgtgcggaacaaggcaaggctagttgtaaaggagttctctcaaattgaatgcttggactttggagagacctttgcaccggttgctcgacttgaagccatccgtatccttcttgcata

SEQ ID NO: 15551 - DNA, 3979 bp, Zea Mays
gctagctagtccccttcccttctccaatctcgcatcgcaattcgcatcttccatttcgtccaccaaaccaaaccaaaccaaaccctactcgcccccgcccgcgccaccgccatggactcgatcgacgcggatctagcgcgcacgcaggaggagcggcgcaagatggaggaggcgctggcggccggcgcgcccatggccgtgtcctccgtcaccttcgacaccgacctctacggtggcgggggcgccgaccccaaccgcttcgcgggctacgacacctccatcccggcctccgaggatgacgccgcggaggacgacacggagttggccaaccccgcaccgcgccgcctcgcggcctacacgggccacgccatcgccgccgccgacctcccgcggtcagccgacgacgacgacgggctgcccaagaggtcccagcgcatcatcgaccgcgaggacgactaccgccgccgccgcctcaaccagatcatctcgccggagcgccatgacccgttcgctgccggggaggccaccccggatccctctgtgcggacctacgccgacgtcatgcgcgacgcggcgctgcagaagaagaaggaggacctgctcagggagattgccaagaagaagaaggaagaggaggagaaggagaaggagaggaaggctgccgcgcctgagcagccggctgctgcgacgaagcggcgtaacaggtgggatcagtcgcaggatggcgatgctgctgccggtggcaagaaggcaaagacatcctcggactgggatgcccccgatgcgactcctgggattgggcgttgggatgccacccctggacgtgttggagacgccacaccctccgtgagaaggaacagatgggatgagacaccgactccaggtaggatggctgatgctgatgcgacgcctgcagctggcggtgccacccctggggcaactccttctggggcttgggatgcgactccaaagcttcctggtggtgtcacgccaacacctggtaagaagcagaggtcaaggtgggatgagacgccagcgagtatggggagtgcaacccctggtggtcttggtgctgcaacacctgttggttatactcctggtccaacgccatttggtgcagagaaccttgccacaccaactcctagccagattgcccgtggaccgattactccggagcagtaccagctcatgcggtgggagcgggacattgaggagaggaacaggcctctcactgatgaggagctcgatgccatgttcccgcaggaaggatacaagattcttgagcccccggcttcctaccagcccatcaggaccccagcaaggaagctccttgcgacaccaacacctctggggacaccactttatgctattccagaggagaatcgtgggcagcattttgatgtgcctaaggagctgcctggtggattgcctctcatgaagccagaggattaccaatactttggaactttgctgaatgaagaagaggaggaggagctatcgccagaggagcagaaggagaggaaaatcatgaaactgttactcaaagtgaagaatggtacacctccacagcgtaaaacagcacttcggcaattgacagacaaagcccgggagttcggtgctggaccactgttcaacaaaatcctgcccttactcatgcagccaacactggaggaccaggagaggcatcttctggtgaaggtcattgatagggtactgtataagctggatgagctggtccgaccttttgtgcacaagattcttgtggttattgaaccactgttgattgatgaggactactatgctcgtgttgaaggcagggagatcatctcaaatcttagtaaagcagctgggcttgctactatgattgctgccatgcgaccggatattgataacattgatgagtatgtgagaaacaccactgctagggcattcagtgtagtggcttctgctttgggcatccctgcccttttaccattcctgaaggctgtctgtcagagtaagaagtcttggcaagctaggcacactggtatcaaaatcgtgcagcagattgctattctcatgggttgtgctgttttgccacatctcaagtcattagtcgagatcattgagcatggtctgagcgatgaaaaccagaaagtccggacaattactgccctttctcttgctgcacttgctgaggctgctgcaccatatggtatagaaagttttgataccgtattgaagcctttgtggaagggtatcagatctcaccgagggaaagtccttgctgccttcctcaaggccattggtttcatcatccctcttatggatgctctgtatgctagttactacacaaaggaggtgatgcaggtcctcattagggagttccaatctccagatgaagaaatgaagaagattgttctcaaggttgtgaaacagtgtgtcagtacagagggtgtggaggctgattatatccgaaatgacatccttccagatttcttcaagcacttctgggtgaggagaatggctctagatcggaggaactataagcagcttgtggaaactacagtggagatagcaaacaaggttggagttgctgatattgtggggaggattgttgaggatctgaaagatgagagcgagccttacagaagaatggtgatggaaacaattgagaaggtagtggccaacttgggtgcttcagatatcgatgctcgtcttgaggagctgcttattgatggtatcttgtatgctttccaagagcagactagtgatgatgcaaatgttatgcttaatggttttggagctgtggttaatgcacttggacaaagagttaagccttaccttcctcagatttgtggtaccatcaagtggcgattgaacaataagagtgcaaaagttaggcagcaagctgctgatctgatctccaggatagccattgtcatgaagcagtgccaggaggagcaactcatgggtcacttgggtgttgtgctgtatgagtacttaggagaagagtatcctgaggtgttgggttcaattcttggagccttgaaggctatcgtcaatgtcatcggtatgactaaaatgactcctccaatcaaggatcttcttcctcgtctaacccccatcttgaagaacaggcatgagaaggtccaagagaactgcattgatcttgttggtaggattgctgatcgtggagcagaatttgtgccagcaagggaatggatgaggatttgttttgagctgctcgagatgttgaaggctcataagaaaggtattaggagagccactgtgaatacatttggttatattgcaaaggctatagggccacaggatgtgctggccaccctgttgaataatttgaaggtgcaggagcggcagaaccgtgtctgcacaactgtagcaattgccatagttgctgaaacttgctcacctttcacagttttacctgcccttatgaatgagtaccgggtcccagagctcaatgtccaaaatggtgttctgaagtcactctctttcctctttgagtatattggtgagatgggtaaagattacatatatgctgtcactcccttacttgaagatgctttaatggatagagatctggttcaccggcagactgctgcatctgctgttaagcacatggctctaggtgttgctggcttgggttgtgaggatgctcttgttcatctgcttaactatgtttggcccaacatatttgagacatctccccacgttataaatgctgtcatggaggcaattgagggtatgagggttgcgctaggtgcagctgtgattttgaattattgcctgcaaggtctcttccatccagcaaggaaagtacgtgaagtttattggaagatatacaactctctgtacattggtgcacaggattcacttgttgcttcttatcctgccctggaagacgatggggataacatatttagtcgcccagagttggcaatgttcgtctgattaacattatgcagctcaaatctat

SEQ ID NO: 15552 - DNA, 3403 bp, Zea Mays
ttcactccccttgcttcctcattggaatttcgttgtttccatgccagatcacagtttacttggagcagcacatttaccgggacttaagaagtgagcagtacggctttgcaaaagtggtgatgttgatatatcgcagactgtcggtttcctgtaaagaacagatgcctctgtttgcaagtagcctattaagcattgtgcacactcttttagaccaaaagaggcaggacgatttgcgcattgttgggtgtgaaaccttgtttgattttactgtcaatcaggtggatggtacatatcagttcaatttggaagggctggtcccaagactgtgtgaaatagcccaagaagtaggagaagatgaaagggcaagtgccctacgagcggcagccctgcaatctctttcagctatgatctggtttatgggggagctttctcatatctcgtcagagtttgacaatgttgttcaagttgtactggaaaactacaaacctcagaagatgcaaaatgatgatcaaagtaccaatgatgctgacaaccagttggtgcaggaagaccagaaggctgagcacccgccttcccctttcattatcactccggccccctcttgggagaacatagttaatgccaagggaggaatcaacctgccagaggaagatgttagggatcctaaggtttggtccagaatctgtgtgcacaatatggccaagctttctagggaggcaaccacattccgccgcatcttggaatgtttgtttcggtactttggtaacaatagttcatggttatcagaaaatggacttgctttgtgtgtcttgttggacatgcaacttttagtagaaagttcaggacaaaatatgcatttaatgttgtcacttttgataaaacatattgagcacaagacaatgttgaagcagccagacatgcagcttagcatcgtggaggtggcagctacccttgcagaacaatccagtgctatcgcttcaccagcaactgtaggtgccataagtgatcttgtgaggcatttgaaaaggacattccatattactcttggcagcaaagatatggaattagtaaaatggaacgaaaaattccggaagggcatagatgaatgcctagttcagctgtcaaagaaggtgtctgatgctgggccagttcttgacatgatggctgttatgctagaaaacattgcgagcactcctgttgtagctagatcaactgcagctgctgtttatcgcacagctcagataatcgcttctgtgccaaatttgcaatatcagaataaggtgtttcctgaagctctgtttcatcagttgctgttaacaatgatccaccccgaccatgaagctcgtgttgctgcacaccgcatatttgctattgtcttagtcccatcttctgtttcaccttcgattcaagccagtccctcaggccaggtaaagaaacatgacatgcagaggacactctctagggccgtctctgtgttttcttcttcggctgctatctttgacaagatgaaaaaggacaagcactcagaaaattcacaaggagaaagcaaggacaatagtttgcatagcgttggtgaagggaccggacaaccaaagaatcaaaaccttcatgtgtctcaaagccgacgtagtagcatgagaatttctaatttttccatgaaaagaggcccttcaatggccatgagagctccttcagtagctatcagagctccttcaatatctctgagaggtccttcaatgtcttcaagagcatcttctgtgtctgtaaaggaagaccaaatttccccaaagaaatccgacgaggaaacggaatcagtgttggtgaagctgagcgcccgtcagatcacacttttgctatcatccatttgggctcaagcaacatcccctgaaaatactcctgtgaactatgaagccattgctcatacttacagtttgcttctactgttctctggatccaaggcatcaacttttgaggctcttacccagagttttcaggttgcattttctttgaggagctatgcgctcactgaagcagattcattacaaccgtctcggcgtcggtcattgtttactctgtcgacagccatgattattttctcgtcaagagcttacaatgtgttgccactcattccaatctgtaaacaaatgatcaatgatcgcgcggccgatccattccttcgtttggtggatgagagcaaacttacagctgtcaaggattgttcaaatgatccttcaaaaatatatggatcaccagaggacaacgctaatgcactgaagtccctctcagaaatagaactgtcagaaagtcaatctcgagaatgcatagtctccacaatcatgaacaacattgcaaatatgatggatgcggagttgcataatgtgagaagccaactgctaagtgatttcactcccgatgacatgtgtcctacaagcactcagttctttgaaatgcatgttgataatccttcagggtttcatgagactggtcaccatgaagagggtttgctgattgacctggggaatgaccatgatgcttttggggaagcttcggaaggcgcagaagctcgcacatcttctgtacctgcatcagatcttctgagtatcgatcagctccttgaaacggttggtgcagaaccagcacctcaggctggagtagtgtcggcagacattggattcaaggatatgactagccactgcgaagccctgacgatcgggaaacagcagaaaatgtctgccttcatgagcttccagcaaagcgtgcaagctgcaggggtgccaggcagccagcccaaccagacgacggagctggaccttttccaagacctgcagttgcctcaggccggggcgcagagcacaaacccattctctgatgagagcgttcagggatacccacagtacatgaacgggcccaacggcgacaacgcacagccaggccaggacttccaacagcagtctctgaagctaccggcggcgagcccgtacgacaatttcctaagggctgctggctgttaggagtccagttacatggacgacaaccacctcacctcaagatagtcccaacggaagatcctgcaatttttccacattttgcagggaaagaagaggggtatgtccgcgtgtgaggtcttagctagagactcaaaccgggttcgacacccattctttatgtatagctgtacgtggttgggctttgagccctttgctgctgctgctgttgttttcaccaatgcaacgtgtagagagggactgtgggggagcagtgccttctaccagactgtacatgtaacatgttgcagaaatatatgaagaaaaaatgacgtttgaaggatagatctggtgtagctcgtcgagttaccagatgatgggatcaaagaagcctttcatatttgcggtggaagttcgtt

SEQ ID NO: 15553 - DNA, 1386 bp, Zea Mays
cggaagaaaaagaaaaaaaatagagagtaattaaaccccgtcggacccaaacctctgaaagccccaaaacctaaacctagcttttcgtcagtacaacgcctccgccgctccttccattagctcagacatggttctcggcctctacaccttcgccgacatcgacgccgacggagcaccccgcctcgaggttgccgatggcgaggagttcgtccgtgtcgatcgcgttgtcgagcttgccctcggtccccgggtgctgaaggcccctggaaccctttacctcaccaccaggagggtgatttgggtcagcgatggcggcgagggctacgctgtggacttcgttgccatctcgctccacgccgtgtcgcgtgatcccgaggcgtatccatacccctgcatctacacacagattggagtgatgcacgtgaaggtaagtgttctaaatggttctggttagtcataatgctactagtttatttcacatgagagttcgtttatgctgattttggatgttatttgatattacaattgtgatgttcatttggcaagtacgttttactcgtagctcttttgttttgtctattgtattttatttttgaacattgtagttctagcttttgatttgcacttcttgcatagaaggaagtttcaatatgttgtaatgtctatcttttctttctataaaacataagtttttggtttctataaataaaagggctgactattgtgttaaatgttcacttggtatatggggagccttatagatttgggaggaccattccaattacacgcgagctatttttctttggtccatgtgtaccagtgtattatcatcttttcatgtctttcctctttttgtgatgattcttcgggcctggtgggagtgggactacttcacactaaaattccaccttggagaggtaactgaggtgcttgccttagaagttggctcaaacttcagcaatgggaggttttgctgagaatgatcgagacggaagctatttctgacgaggagtctgatgtgtcagattctgaaacaaatggagaactcgagctctcaaaagttatggaaatgcgcatcataccttcagatcctggtcaattggatgaactctttgaagcattctgcaattgcgctgagcttaaccctgatcctagtgctgagagtgatgaagaacatggctgggttcatggtgatgagggttatgaagatacggtagatggaagcgacactgagttttcagatgtcaacccaattggtcaaactggtgagcaggatattaaccatgctgtaatcgaggactgtaatatttgaagttcagatatagcctcccttggtagcctaagccattggatctgggtccttcgacgtttccaagttgattggta

SEQ ID NO: 15554 - DNA, 1973 bp, Zea Mays
ccgcacacgtgttcctggagagccataatgttatgctcatcgacaggcctagatggggatgacataccagagcacgggaggacaccatcgctgctcacctgttcctggagagccataacgttaggctcatcgatagtgaagaacaatttggagtataagtaacatgattcctgagcatccattaatgagagcaaggggaagatctatacttggtggtgagaagcaatcatttcaagaatacacagaatctggagctgcttcaagatcagatggtcttgggggcacttcaacctctaatgctcgaagaataaggcgtagaagcattagcatcacccctgagattggagatgacattgtgagggcagttcgggctatgaacgaaacactaaagcaaaatcgccttcaaagggatcatgtcgaaggttcatgctcatatgttacggaagaccaaagcaacgccaatgactgcccaaataaagatgatgcatctcggataattggtgctactgacagtgactcaagaaaccgaactggtcctactcaaaaggccatgtcattgccttcttcgcctcatgaatataggggtcaagatacccaaaaaggtgatgattttataagtaaagagaagatggcattggcatggaacaaagttttccagagctccccatttcttaacaagcccttgctgccgtttgaggaatggaacatagatttctctgagataacaattggcacgcgggttggaataggattcttcggagaagttttccgtggtatatggaatggaaccgatgttgccatcaaagtatttctagaacaggacttgacaactgaaaacatggaagatttttgcaacgagatatacatcctgagccggttgcgacatccaaacgttatattgtttcttggtgcatgcattacacctccacacttgtcaatggttactgaatatatggaaatgggatcactgtattatctcatccatatgagtggtcagaaaaagaaacttagttggcgtaggaggttgaaaattattcgtgatatatgcagggggttgatgtgcatacaccgcatgaagatagttcacagggatctcaaaagtgcaaactgcctggtgaacaaacattggactgttaagatatgtgactttggtctatctcgagtgatgattgatagtcctatgactgataattcctctgctggcaccccggaatggatggcccctgagcttatacggaatgaaccttttacagagaaatgtgatatattcagccttggtgttatcatgtgggagctgtgcacattgagtcgcccatgggaaggcatctccccagttcaagtggtgtacgcagttgctaatgaaggttcgcggcttgagattcctgaaggacctctcggcaggttgattgcagattgctgggcagagcctgagaatcggccgagctgccaggagatcctaacccgtttgctggactgcgaatacactgtcagctgaaatggaagctgctcgctcgtccactcaattcctgcacaggtggaaacatttcttgtataaaacctgtaaaaaaggctgccgattctgcggacttgaggtcacatatcgaagcgctgtgtttttttttaaacaatggcgaccctttctcaaaaaaaatgtaaaaatgattccctggttatagaagaacatgtctgattcgatagacgtgccttgcatcgcagggcaagctggttgttgtaccttattctagataagtagcacgcccgcgaatgctgttcggctttcaaatagctgcagctgcaaatttttacctgttgctacagtatttcctttctatataaccaggcggcagcagcagccgaatgttgccagtacgttggagatggcataagcaactccatgttgtgaactgttccctcgcgaccataaagaacatgccatcctagatttggaataaaaatattgtcaaaatttgtat

SEQ ID NO: 15555 - DNA, 633 bp, Zea Mays
atatgcactgctcagtacgcagccgctcccactactagattcaggtgagctcatcattagtgccccggcccttggtgcggtgcggccaacggccatggcgaagcttgccgcgcagctcaagagcaagttctttggcctcgtcggccgcatcaccagctgtggccgcgccggcgccacccacaaggatgccgctggtgcgacagaggccaagtcatcagtgggatcccacctgttgagatcaggtcaaggggaggtgctcctcccgttgatggaggggccaagggtcacatcaacagtgacaccatctagaggagagggagaggagaagagaagagatcgaagagaagagaagaagctcaccgatggtgcttggacttggacattatctgcagcttagttaccatgtttgaaagaactgaagctgtaaatcgcagtcgtcgttgcttgtgtgtgtgtgtttatagttcctccatggtttaccatcgttttcagcttttctagtatatctggtgcttgctatgtttcataatttcgggctatgttgtttcagtgtacggtatttctgttcattttcttccactattatataatctagcttatggattatataagcaattattgacctgcttatgg

SEQ ID NO: 15556 - DNA, 791 bp, Zea Mays
cagagaaaaaaaaagaagagaagctaagagcttgggagttcagctccaagccgttcgacgagagagacgaccgaacccggccggaaggggaggagcgggaggaccgcctgcgccgtcggtgagattattgatgccctagactatgggatggcaaaaattgcagattcgatgatgaagcatattctggttccagcaatcagtaacatacatgtgtcagtgcttgtggaatgtggtccagaacacactgtatcagtcttgagtgtagtccattccgaggaaaacaaagacaatagagatggttcaaatctgtactcaagaatagttgatgtcatcaagtttgtgtgcaaattcatctgcatggaaaatagcaagtgggttcaattttttgcgaagttaacctggccaagaatttctgatctagttatcacacactttctctccaaggctgtaccaaatgaggcatccaagctaattgagttccaagatgtcgtgcaaagtacaactgaattcgagaacaaacttaggagcatgatgtttcttttgcctgatagaaaggatggcaagctgacccaatttgttgatgatgttgaagttcattttgctgtacggaagagaagtgaaatcttggtgaaagcaaggaacattcttgtacaatatgattatgatagtcctctggaatctggtgaccaaggtgattctgttgttgatctactttttcagccagagaagtgttttacatctaaatcagcacttctagtaatgaaattggttcatggagccctcaagagcag

SEQ ID NO: 15557 - DNA, 99 bp, Zea Mays
atccagacgtgccctccgccagaaggcttcgggcgcaacttgcgttcaaaaactcgatggttcgcgggattctgcaattcacaccaggtatcgcatttt

SEQ ID NO: 15558 - DNA, 137 bp, Zea Mays
ggaggatgctgcgatgtgttcgtgagaggtctaggccgttgtctcccagccaactttgggttgctggaccgttatctccttataatgtaattatttatttattttgtatagaacttctgttatatagtaaagatgtg

SEQ ID NO: 15559 - DNA, 705 bp, Zea Mays
atggattgtttcagcttcctgaccacacaagggacagactgaaggaggaagaggaagaaattgaaatgttattggaaaattatcttcaacgatgtgaatcatgccatggtcaagcagagagacttctgaattctgcaagagagatggaagactcgatttctgtgaacttaagttctcgacgacttgaagtaagtagagtggagctgctgcttcaagtgggaacattttgcgttgcaataggagcattaattgcaggaatatttggcatgaatcttaaatcatatctggaaacaaatgcgtgggcattttgggtgacgactggtggaatagtagttggagcagtagctggatttttcgtcgtatactcgtatctaagggctaggaagatattgtgaaccctgtaacatctgtatgttaggatattttttggagctgtaaataatgtcattagcacatccagtgagggatatgcgtgttccaaactctgcatggtttgtgtactctgtactcttgcgagaatgttgccaccctatgtatttgtagttgcccgttgagacggaaataggttagaactcagaaacaaatatttggtttccaccctagacgatttctcgtagctgcattttactatcctgtattgaaaattcgtgtcaacatctgtcttaatcttctaaattttggtaatgcactaaatgcttggggacc

SEQ ID NO: 15560 - DNA, 662 bp, Zea Mays
gtcttcttccccaatttctcgcggcgtcgttccgtcccaaatatcgccccgcgatcccccacctcgccgactggctcccccgctccacctcgtcgacgggcagaggagacccctcagggccgggatcggactcctctttcaccgatttttccatgcactttaggctaaaaatgctttggtctgaaacctatctgcccttttttctggccgccaacggtttcagccaacgcataccagtgatgaagatcttccgctgaagcttgctcaagctgcaataaagcatgacggtggacctagttttgaggtggatgcgctgagttttgaaggtggcgagggatctttgctgcggggttctatttgttctcagtgatttttggcaaacactctttggttagattaagaatcatggaaaggtacaaattgatacggaagataggtgatggaacctgtgggaatgtttttatggcttctaatgtagaaactaatgaaattgttgctgttaaaaaaatgaagagaaaattttgtcattgggaagaatgtattagtctgcgagaagtgaaggcccttcagaaactatttcaccctaacattgtgaagctgaaggaagtgacgatggaaaaccatgagctgttcttcatctttgaacacatgctgatttttct

SEQ ID NO: 15561 - DNA, 842 bp, Zea Mays
aataattatggccaccgatttttctcaacatatctgatcacctgggcggtggtccaaagtagtatgtcgatgacggaaggcccttttggcaacatatagtgagctcatctaccggctgctcagatctacagtatttcgaggaactgtaccagtactacacaactgagaaggcctggcgtctctgcgacccagacgctggacgtgttttcgaggcgctgaggagggctggcgtcaaaacagccatcgtgtccaacttcgacactcgtcttcggccgcttttacaggcgctgaaatgcgacggctggttcgacgcagttgctgtgtctgctgaggttgcagcagaaaagccgaaccccacaatattcttgaaggcctgcgagctgctaggagtgaaacctgaagaagcggtgcacattggtgatgaccgtaggaacgacttatggggagcgagggatgcaggctgcgatgcctggctttggggcagtgacgtttactccttcaaggaggtatattttttccttcttgttgttgaacactctcatcgatttccatggcgctggatctaaaatctacctagcacaaatcaaatccgccacttaccccgggcgtcttgtacatattcccaagagaaataacaagagcatcagtttctcctgtgtgcgactgtgccaggccttttgtagcaaataccgatgtgcatttccacgcttccctgtagcaaatactgatgtgcaggagctctgtccgggttgaattcacagagaagagggtaccaaaaaggacagctaaaatgcaatacagagaaacaagaacagcaaactcacacaaataatggcgaaagc

SEQ ID NO: 15562 - DNA, 866 bp, Zea Mays
caccaccttcctctgctgtatgttcagtgcctgcctggtttctgggtttctccccttccctcctcgacctctcttccagcttccaacgcagctcatcaccagacaccactacttccccagttcccctcaccgtccctgcgctccatcgtctttggtgtccatagctttaaatacgaccacgaagccggtgcggcgactcggcgatctctccatcactgctgcggtgctgcctagctaccttctcggcctcgggtgggggcggcattgtcggtccagactccagagcgcgctgcttccggagctggccgcttgcgctgagccctctgccggaggcaatgaggagcggccgtgcctgctccgctctcgcgtcgctcctgctgctgtggctgggcgtcgccgccgcgcagaaggcctcgtcctggaagacattgagcggcaaggctccagcaatcgtagccaagggtggattctccgggttattccctgattcaagcgaatacgcttatcaatttgcgctgctcgctagctcgccggatacgatactgtactgcgatgtgcggctgaccaaggatgagattggcatttgcctgccggacatcaagatggataactgcacgaacattccagatttctatgcgcagggtcagaagagctacctcgtcaatggcgtgcctacttcgggatggttctcggtggactacaatggcactgagcttgaacaagtgactctcaagcaatcaatcaattctcggacacccagatttgattcaagtttctttccactacttgctgttgaagatgtgcagtccaaattcaaaccttctggaatttggctcaatgttcagcatgacagtttctacagccag

SEQ ID NO: 15563 - DNA, 690 bp, Zea Mays
ttatcacccagccagaccaggcctgcaagagatccattgttgcaagggaagcccaacctaaggcctaacccgcacagggcatagtacccatcaattctttgctggcggcctaagaagaaggatgtgctccgccatactctcgatccaacaaccaggtcgttcagccgcagattagcaggccgcctgcgctcccaagctcctcctttcccctcagcctcccctcctctccggtgtacgtctccgtcgagatggccgccccgctccggcggagcctcccctcccttggccgcgcgcttctcacgccggcgccggcgcggatgctctccgcggaggcctctgatgccctcgttgagatcaagcccggggagatcgggatggtctccggcatccctgaggagcatctccgccgtaaggttctaatttattcaccagctaggactgcatcccagcaaggttcaggcaaagtcgggaggtggaaaattaattttttgtcaacccaaaagtgggagaacccgttgatgggatggacatctactggggatccatatgctaatgtcggtgaagcaggacttacgtttgacagtgcagagtcagcaaaggcgtttgccgaaaaacatggatggaattatgtggttcggaaacgccatgcacctcttctgagggatgtggataaggacaagctgctagggc

SEQ ID NO: 15564 - DNA, 1371 bp, Zea Mays
aaagcagtgcttcagagttctctcatgatctaaaacgattttggacaaatgccagcttggtgatatagttcggcaaaacccaaagaaattggactccatagttgtagagaatggggaaaattggagtgttgggcagagacaactattttgcctcggaagggttctcctaaagcgaagcaatgttcttgttcttgatgaggcaactgcttcagttgactcctccactgatgcagttatccaaggaacgatacgcgaggaattcaggaaatgtacggtattgacaatagctcacagaatccacaccgtaattgacagtgatctcattcttgttttcagtgaaggaagaattatagaatatgacacaccctcaaaattactggagaacgagagctctgaattctccagactcataaaggagtactcacggcgatcccatggcttcagtggaacagcaaacaattgaatggcgacaagagaatgaatccaagatggtgaaagtagatacgaaagttgattaccccacaatattatatctatatatgacaagcaggaaccaaaacaacacggggcagggtttacaagggagggcgcttccgtaattaagatgattcagcaaattggagtaatgcaatgtactatatagtttatagcagattcgggacatgactgaaatggggaaaagataacttggtagctattccgtataaattgtgcactgaggtggatttaaacctctctaatccccttctggattggtgtaaccgaacaagccctgaggtggattggagaggagtagacttgatcccctctaatccacctcaaaccgaacaaagtagacttgatcccctccaattcctctcaatccacctcaaatcgaactagccctaagtggtatcttccaccctttatatagagctagatatctagatcgattatgataacccacatctatagtacttacctacaaatgtaagataaaacattaatatgcaagcaatcatggtattgacaaaaatagtttacaaatattcgtaccttgtagttgatgaggaaactccttttcattaacccccatatcaaacaaacgtataataatgtcaaataagatagcaaatatgagattttatacaaacacaagtaatagtacaataatacataaccatcatcaaatgagatagcagatacaatgatccattgagtctcacataaagaaatgaaagtaacaagaaacaaataagtctcacataacgagataaaaaaacaaacatttacaactcatatcacacccatggccctttataattaccatacttggttatgtatttccctgaaagccagttgaatctatgttcggtaagaaaggtcatgaac

SEQ ID NO: 15565 - DNA, 5010 bp, Zea Mays
ttatactataaattttattttgttttccctcaatctctctcctcggctgctcgcctggcgtcgcgtcgcctgcttcctcgttcccgcatcgagacgccgcttcccgtcccttccccctcctctctctctcctcccggccaaccaaaccctaaccctaaacccctcccccaccaacctcggcccagtctccccacccccactgacccggctccccacctccgactcgccacgctggcccgattcgatcgatgtacgtgagcgagctcccgacctcatgatggttttggctgcggggtgaaaagaggcacagcaagcgtcgatggcattgggagatctcatggcgtccaggctcgtccactcctcgtcctccaggggactgtcgtcctcgccgacgccgccgttgcccaatcaacaccaccaccagaaccacaaccataccggggatggcctcctggctgccagcgggccggagcccaggaacgggctggaggccgacgaggtggataagtcggcgcccgtgccgtacctgccccagctggtcgtgctgtgcgagcagcgccacgagcctgaggggatcgatgaggctgcggccgcagccgcagggccctccaccagtggcctcgtctccaagtggcgccccaaggatcggatgaagacaggatgtgttgcacttgtattatgtttaaacataagtgtggatccacctgatgtaattaaaatttccccttgtgcaagaatggagtgctggatagatcctttttctatggcacctcctaaagcccttgagagtattggaaaaacgttgcattcacagtatgagcgctggcaacctaaggctcgatacaagcttcagctggacccaacagtggaggaagttaagaagctttgcaatacttgccgcaaatatgccagatcagagagagttcttttccattataatggccatggcgtaccaaagcctacatctaatggtgagatttgggtgtttaacaagagttacacacagtatattccacttccaattactgatcttgattcatggctgaagacaccttcaatttacgtttttgattgctcagcgtctggaattattgtgaaagcttttctagagcgcctagattggagttctagctcctctgcatcttcacggaaggactgcattcttcttgctgcctgtgaggcacatcaaactcttcctcagagtgcagaatttcctgccgatgtgtttacagcttgcctcacaacacccatcaaaatggctttgcactggttttgtaagcgatcattactccgtggttctctggatctttctcttattgaccaaattcctggaaggcaaaatgaccgtaaaactcttcttggggagctcaattggatttttactgctataacagatacaattgcatggaatgttcttcctcatgatctgttccaaaggcttttcaggcaagatcttcttgttgctagcctctttcgtaacttcttgcttgctgagagaatcatgcgatcagcaaattgttctccagtttcttatccgttgttacctccaacacatcaacaccatatgtgggatgcatgggacatggctgctgagatttgcctttccaagcttcctcagttaattgctgatccaaatgcagagtttcagccaagtccgttttttacggaacaactgacggctttcgaagtgtggcttgatcatggctccgaggacaagaaacctcctgaacagttacccatagttcttcaggtcctgcttagtcaatcacacagatttagagcacttgttctgctcggaagatttcttgacatggggccgtgggcagttgatttggccctgtctgtcggaatatttccttatgtactcaaactgcttcaaacaagtgcaatggagttgcgtcaaattcttgtgtttatatggacaaaaattctctctcttgataagtcgtgccaggttgatttggttaaagatggaggacacacatattttgttaggtttcttgacagtttggatgcttacccagaacagcgtgcaatggctgcttttgttttagcagtcattgtggatgggcataggacaggccaagaggcttgtatgaatgcagggcttatagatgtttgcttgagacacctgcaacctgagaatcctcatgattcacagacagaacctttacttctacagtggctttgtttatgccttgggaaactctgggaagatttccctgatgttcagctgcttactttacaaacaaatacgccagaaattgtactatgcttattgtcggagcctcaacctgaggtcagagctgctgctgtttttgcacttgggactctcctggatactacatcatcaaatggcgctgatgatgattctgactatgatgaaaaggtgaaagctgaaataaatgtagttcgaagccttctgcagatatcttcagatgccagtccccttgttcgatctgaggttgctatagcgcttactcgctttgcattgggtcataacaaacatctcaaatctgttgcggctgagtattggaaacctcaatccaattcattgctgaagtcactgccatcattggcaaatataaataacccaaacaatgtttacagtcccaacaatattctacaaggcagcattggtcctgtgctgagggttggcagtgatagcagtgctgctggtcgtgatggaagaatgtctacaagtagcccaattgcaacaagtagcatcatgcatggctctccccagtcagacgattcttcccaactctctgattctggcttattactgagagagaatgctagtaatggtggtcccggctacactaggtccaggcctgttgataatgtcatttattctcaatttatatcaactatgtgttcttttgctaaagatccttacccaagaattgcaactattggtcggagagcactgtcccttataggtgttgaacaagtagtcatgaaaaatactagatttaatagtggaggtgcacatcggggagagacatctgcttcaaactttggaatggcacgctcttcatcctggcttgatatgaattctggaaacaacttgataaaatttaggacccctcctgttagccctcctcagcatgattttcttccaggattacgccgagtgtgttctatggagtttggacaacatcctataagttcacctgatggcttagctgttccccttttaagctccgctgcagctaccagtaatgctgaactaagtatactccctcaatcaacaatttataactggagttgtggtcacttctctaggcctcttttaattggctctgatgataacgaagaggcaaatgctagaagggaagagagagaacgacttgcactagattatatcgctaagtgccagcgctcctcttgcaagatgacaaaccaaattgctagttgggatacgaggtttgagttgggaacaaaaacagctttattgttgccattttctccgatcgttgttgcagctgatgaaaatgagcaaataagagtgtggaactacgacgatgcgctgccagtgaactcttatcaaaaccataatttgtcagacagagggctatccaaacttttgctgattaatgagcttgatgagagcttgcttttagctgcctcaagtgatggaaatgtacgtgtatggaaaaattttactcaaaagggaggacaaaaacttgtaacggctttctcatccgttcagggacatcgaactgctggtcgcagtattgtgattgactggcagcagcaatctggttatctttatgcatctggtgacatgtcttccatcttgctatgggatcttgacaaggaacaacaactcagcactattcagtcatctggtgatagtgccatttcttcactgtctgcatctcaggtctgctctggacattttgctgctggttttgctgctggttctgtcaggatatatgacatacgctctcctgatagggttgtctatacggccaggccacacgcaccaagaacagaaaaggttgtaggcatagggtttcaacctgggtttgatccttacaagattgtaagcgcatctcaagctggagacattcagtttcttgatgttagaaggtcagcagaaccctacctgactattgaggcacacaggggttcacttacagcattggcggttcaccggcatgccccagttgttgctagtggctcagccaagcagatgattaaagtgtttagtcttgaaggagagcagttgacaataattcgctaccagccatcttttatgggccaaagaataggcactgtgaactgcctttcttttcacccatacaaatcactcctatctgctggtgctggtgataatgctcttgtctctatctacgccgaggaaaattacaagtaaggtgaggcctacatctcatgacaatgcagccacaaggcaaccggcaggcctggtgttttttggccaagtgatgctcccccgcagcatggtccagctacaagatccaagatggtgtgaagaggctcccggtgcgtattgcctgttgttggacgacgtgtgcaatttgtaagatagagccaagattcgttagccgcctccttgcagaaggtttgtggaacccctaccctgatcatgtcattgaacttggaggctccccccaaataattaatcatacctaggttaaccaaaatgtaaatagacaccgcgtttcgggttgtcggtggtcagcattcctccttttgaagatgcttgtgatgatatgagaaatcaggtttggtaggggctgctgcctgggcaagtggggtttgtgcatatgggcccaggtagtatggttgcacatgtctgctcacagatgctgttgaatggaaggaatgttgtctagtcgcttgcattgtaaccattggagattgtccatttgtatgtatggatcttgtctgtacatctgtaatccgtgcgatgatgtgttttatggaacagtccaaggcttcaggtcttgtggatgcctgctgtgcaattgtttcgggaaa

SEQ ID NO: 15566 - DNA, 848 bp, Zea Mays
tatccagcctatagatgtggaattattaacaacttttactgttgaccatctatttttttgggatcctgtattttgtttgggctgtatgatctgagctagctcagtttgtgggaatactcacaccactcaggttcgagttgtatttggcttgaatatgatcaacctgcaggggggtaagacaactccgggcattgcattaagaagaacttctcacacagagaggattttcctaaccctagactgaatatcctttcttgtgggagtcaaactcagctatatctgaacagtcatcagaatcttcaagcgcatcaggagctgactccagtgagaacgccaatggaagtcctgagtggagatcatttgatatgcattctgtgattgcagctacagaagacctatttgatttcattttatcgaggaaaggatggcgggttcgggttttccttgtccaggacatcgttaatgcttcagacgtgttccttcaagaagcgacattcccatatgtatatgcgaaagtgggaaagataggggacctaaatccagagagaagtaagatgatcaggaggctggtgaatactgtgcaatcgttccgccaagctatcaatttggctccagatgcttggagcgccatgctaatccgcactttgttgaaacctgaatcacaaaaatttgttcttgatgtgtttttggccctggctaaccattccagttacaagattccagaaacattctggctatttatgtcaagatttctaaattacttggacaaacaagatatactttaggaacggttaatatatcaattcctttttttttgttatggcttgaatttatttattttagatcgg

SEQ ID NO: 15567 - DNA, 1001 bp, Zea Mays
tacctcgtcgtttgctcagcgacatcatcgtctaggtggatcaacttgagggtaccgttccaggaagtgtacggggacgtccgctgcaacctgaaggaggcagtccagctggccgggctcacatgggaggggcgcgctcactgcgggctcgacgacgcccgcaacaccgctcgcctcctggcacttctgatgcaccggggcttcaagttctccatcaccaactcactggtgtggcaacctgccgccgctccgcagtcaaccgccgccacctgccacttctccccggaccgctctccggacccagtcgtcgtccagctccagcaccagcagcagcagcacaagccgaaggaggcgctggggtctcccgcgtcgctggtgaacccatcgtacgccacccccgcgggagggaaggacagagccatgtactgctactgcggggtgctgagccggtggagcgtcgtgcgcaagccgggacccatgcaggggcgctacttcttcgggtgcgggaactggaccgccacccggcgcgccatctgcccgtacttcgcatgggcctcgtgaatagcaaagcaagcagagatctgggctggtgctttaaccgagggaggcgcgccatgttgctgcggctggctgctgcgcctcccagttccgtatatattattattgttattattatggtataataactttgctcgcgagacaatggaggttatctaggtagtgtctctaacctgtcgtactgacttctgtcgatagaagagaatggggccagatgctgcttaggtgtgatctatcctatccatccatggataataaagaagtttgtggattgctgttttattaacttgatggaactcctccgtaggtgtggtttgtgcaacttggattttgaaggcttgtgcgtctgtgagtgtttgatcaaatcgaaggtggtgtttgtttgctgaatgaaatggttatggaaggtgcctattattcctgacaagctctgttcagtgaga

SEQ ID NO: 15568 - DNA, 811 bp, Zea Mays
gatgacgagcctgatgtggatcttcatggcatgggtcccatgggaggccggggtctttcaacaatgaccagaccaaccacatgatcaccattgggatggccaacccttccaagggagtcacatggccctaggagactgcatgttgactgtcgtttcccagcaaaactgtttaaagataattcaagcatttgatctggatctggaagactattatatcctgagccacaaccaaaagcttggtggctgcattttttccccgaggagcgttgagttaatgactcagcaaggtcgtgaaaaagaatttattgtttgaggtcatgtagcttcacatgtacagtaaaagcaggttggttcttgcatacagttgttgtaactagtgcgttcagggcattgaagataggatgacagtagatcacagacgttgctgggctgcgaatagcgtaaggcatctgctgtaactgtaacgaaataatgaagcgcagtgtcaggaccctggatagatggcaagtgggtggcatgtgtgcctataaaaagggagaacgtatagaccaagggatatgaaagaaccatttgaacaaactaaatcctctctacctttccattactgttatctcttcataatctctcctctcatgtatcctgtttctctaccttctagaacaatttggctatcagatatcaaattagatcgtcttcctcgctgctatctccttcttcaacccttcttctacctgaacatctctcttctctccgatattcccttctgtggcgctaacacgcaggcatgtaacatttttgtgttattcttttg

SEQ ID NO: 15569 - DNA, 2039 bp, Zea Mays
gccctgctttgctctctccaactccagcatcgccccaaacagcggagccagcaccaccaccaccgcggcggcgcgagcgtcactgccctgccctctcctcctcctgtcctactgctctaccgtcctctcccccccgcgccgctgccgcaaccaaaaccctaaaagtcgctttctatccacttgctccgccgcctccaccaccgggcgccatggcggacacagtgcagtaccgcctggagcggatgaccgacgaactggacgacctggagcgccggggcctcttcacgcgcggcgagctagctgacgtcgtccgcaaacgccgcgacttcgagtaccgcctccgccgccactccccgctccgccaggactttctcgactacatcgcctacgagctccgcctcgactccctccgcaacctccgcaagcgcgccatcatacgcgccgccgccgaagacgacgacgacgagcctcagcacgacgctcgcagcagcgacgacgagggaggccggaggaagaggaagaaggataaatccaagaagaagtggaagaagtccgtctccgacgtcgcgggcgtcctccgcgtcctcgacatctaccggatggccaccgtcaggttcaagggcgatctcgacctctggttccggtacctcgagttctgccgcgacaagcgacacggcaggatgaagcaggttctggcacaagccattcgcttccatcccaaggttcctgggctttggatctatgcagcagcatgggaattcgatcagaacctgaacgttgccgcggcacgtgcactgatgcagagcggtctcaggtcttgccctcagtcagaggatatgtggatcgagtatcttcgcatggagcttacctaccttaacaagctcaaggctcgaaaggttgctcttggagaggatgtcaagacgctgcaaaagaaagacaacgatgcgagccagtggaaagaggaaaacaaggaactgttcatgccactgaatgaacaggtcaaagatcctaaggagccaggctcggctggagatgccctggaggagaaggaagacctgttttggcgtcaagggttgttaatcattcagaccatatatcatggtgccgtggaagctcttccgtcaagcttaaccttgcggaagaaattcttggagatactaaacagtgttgacttggcacattctgatgagttaaaactggaggtcctggatgaccttaagagagatttctctcatagcgaggactactgggattggtttgctaggcttcagcttagcaacttgaacagttccagtaattcgaatagaaaggatgctatatcaaacaagttgaacagatcaattcaggtgtatgacgaagctatcaggaagctaccaaattccaaaatgtactcattgtatgcaaagttttggatggatgttatatatactgacagagaagattcagtcacattattccaggattctgaatttgatgcttcagagttcacttcatccatactgaaagtttatgaaaatgcagaatcatgtggatgtcttactgaggatcttgcttgccaatacatatcactttacttgaaactagaaagactggaggaagctaagactctcgcagaaaagctttgtgatggtcctctttcaaatgctgcaaatttgtggagcctgagatttactatggagataaattcaattgcaactgctcctggcagttcttccttgagcaaggagaacctgagctctctgcttgatctatttagcactgtactctccaagttgtctgtaactgaggctgagagactgtggcatatggccatgaagttgttttcccatgataaggtctgtttcgagaagctggtgaagtgtgcgatgctatcattaagtctggcaggtggcagtgattcaggagcatcagtttcttctgctatcgttggatggtatttgcaaagagatggtgtgaagcatgctaggaagatgtataagagatgccatgtatctggctgctgcttttgtgttacattgaaataacatctgttatgtgtg

SEQ ID NO: 15570 - DNA, 75 bp, Zea Mays
ttgacttgtgtcaaggatgatccttagttcgttttatatttataatttattttgtaagtcttacgctatgtaata

SEQ ID NO: 15571 - DNA, 162 bp, Zea Mays
atacctgtagaggagtgatgacaacagcaaaaccattaatcaagtagcggtagctgtacagctttatataacgctctccccttagagtcctcttcaataatgaattttggaggtggacaatataagagccataattcataggtttgggtgaaccctgtctgc

SEQ ID NO: 15572 - DNA, 334 bp, Zea Mays
ctcctcgggtttccccgatctcttcctccccctctatctctccctctccctctccctcttcctctctcctaccacatctccagccctcttctcggcccgacggcgttccaccccctaccctcttttcccgccagcgccgttccttcctctgcggtagccctgcgtgaagcacacggcggtggtcctcgtcaaccaaatcgtcgccacatcgcgttctccccggcgaggatctgtaggcgagctcgccgtccatatccgcccaagccacccccagctcgtcgcagcagatgcattggcttgttgggcattgatgatgatatgcagcatggtactt

SEQ ID NO: 15573 - DNA, 1684 bp, Zea Mays
gtcgccgagccgtcctaactcagcgagagggtttcgaattggcgccaagccgccaaccattccccccaatcccgcctgccagccctagggttcctgctacgccatggcgggaaccgccgccgccgctctcatggacatcgacgcagccgcgccgcctcccccgccgcctggtgcggcggccaagggcaaggcgccgctctccgctggcggcagggcagcgccctgggtcgagaagtaccggccccagtccctcgctgacgtcgccgcccaccgcgatatcgtcgacacaattgacaggcttacaaacgagaatagacttccacacttgttgctatatgggccacctggcactgggaaaacatcgacgattctggctgttgcgaggaagctatatgggtctcagtatagcaacatgatcctggagctcaatgcgtcagatgaacgtggcattgatgttgtcaggcagcagatccaggattttgctggggcacgcagcctctcttttggagcaaggccttctgttaagctggttctcttggatgaagcagacgcaatgacaaaggatgcacaatttgcattgagaagagttatcgagaagtatacaaggagcacaaggtttgcactcatatgcaaccatgtcaacaaaatcatccctgcgctacaatcaaggtgcaccaggtttagatttgctccactagatggcagtcatgttagagagcgtcttcaacatataataaaatctgaggggctcagtgtagatgacggtggcttgacagccctagtgcggttaagcaatggtgatatgaggaaggctttgaatatattgcagtcaacgcacatggcatcccaacaaatcacagaagaagctgtctatctttgcacaggaaaccccatgccaaaagatatcgagcagatagctttttggctattaaatgaaccattttcaaccagcttcaaatatatatctgacatgaagatgagaaaagggctggccttggttgatatcatacgggaggttactatgtttgtgttcaaaatacaaatgccatctgatgttcgtgtaaagctaatcaatgacttggctgatattgagtacagactaagctttgcatgcaacgataaactgcagctgggcgcactgatctcaactttcacggacactcgcacggctatggttgctgctgccagctaattccagtaatgtgaaggatctttctgctgctccctctggaatctgaagatgaagcgcagctacattatggggtcaacgtcttgcctgtagttagcaagctgaaaggtttggtgagggttgtcttagatctgtatgtctgctggacgtgatgtggtaactgcctggaacttgggagtactcgtatgactgaacgctgccaggcgttctcatgttatgcgtgtaagattctatccagtagtataaaccctagtgccgttctttgacgaagttacatatttttgcaaatgccacggagatttatggtgttagactatggatgcgtgttttttttttcacgcacttacgaaaacactaggatcaaatgcgtggttaggatcagtaaactggaaaagttgatcctgtacctttattttacaggtgaagggaatcgttgctcgtaaccctcgaagaaaacgccgggctattagctactatctcttaacaatgtactac

SEQ ID NO: 15574 - DNA, 497 bp, Zea Mays
gggtgggtgggggcgaggtgtgctttgcaaagttttatgatccttcctgtttcccacccccaaaaaaaggctgctggagttcgacgagtcaaaagctgaggcggaggaaggcggtgcagaaggagagcaagatggtgatggttccaaagccagcaaaaaggtggactagcatgatttagttccgggaggtaaaaaagaggacagggagacatttttcgtgtaaggtcgtcttgcagctagctagctaaacgggcttgttgccctctctaatacttacttgataacttagaaaatggttcaacatgatactagttttttgtttgtttgttttcctttgcggatcatttatttggctcgttaaggaattctctcaccagtcgccagaaccctgactgggcccgccgcgacgcattcatgccatgcttactttgcttctttgcaggcaagaatttcattatggactatatttttaccgccgtgcttaattatgtagtcac

SEQ ID NO: 15575 - DNA, 2225 bp, Zea Mays
gcagcacaagggactaactttcaaagttccaatttacatggcttggctcttatcaccatgaaagaggcattgttgtggacggatggccgctacttcttgcaggcaacacagcaactgagcgatcgttggaaacttatgcgcatgggagaagatccaccagttgaagcatggattgctgataatctggctgatgaagctgtcattggaatcaatccatggtgcatctctgttgattctgctcaaagatatgagaactcattttcaaagaggcaccagactttgtttcagctttcttctgatttggtggatgaagtatggaaggatcgcccgctagttgaacctaggcctgtaattgtacacccagtagaatttgcagggcgcagtgtaccagaaaagatgaaggagctaagagaaaagcttgtgcatgaaaaagccactgccattataataactgctcttgatgaggttgcttggttgtacaacattcgaggaagtgatgtggattatagcccagtggttcactcttatgctattgtaacattgcacagtgctttcttttatgttgataagagaaaagtaactgtcgaggttcagaaatacatgtctggaaatggtatcgaaataagagagtatgaaactgttcaatcagatgcaagtttgcttgcatctggcaagctacaaagttctgtacatgtggaaaagtatatggatgaggtggagagttcaaaaatttggattgattctggctcatgttgccttgcactctactcaaaattgagtccacatcaagttttgacgcttcaatcaccaattgcccttccaaaggctgttaagaaccccacagaactggatggattgaggaaggcgcatattcgagatggtgccgctgttgtacagtaccttgcttggctggataatcagatgcaggagaactatggagcttctggttatttcagtgagataaaagggtcgcataaaaatgaacatttagcaaccaaacttactgaggtgtctgtgagtgacaaacttgaaggcttccgtgcaacaaaagagaactttaaaggtttgagttttcctacaatttcatctgtgggaccaaatgcagcagttattcactataaacctgaagcaagcacatgttcggaaatggatgctgataaaatatatctttgtgactctggggcacagtacctggatggtacaacagacattacaagaactgtacattttggtaaaccctcagcacatgagaagtcatgctacacagcagttttgaaaggccacattgcactagacattgctgtgtttcctaatgggacgacaggacatgctcttgatattctttcacgagcaccactctggagagagggtcttgactatcggcatggtacaggccatggaattggatcttatttgaatgtccatgaaggtcctcatctaattagcttcagaccttctgctcgaaatgtaccgctgcaagcatcaatgactgtgacagatgagcctggttattatgaagatggggcctttggtataagattggagaatgtacttatttgcaaagacgccaatgctaagtttaattttggagataaaggttatttggcatttgaacatataacatgggctccataccagaccaagctgatagacaccgggcttctgacccctgttgagatcgactgggtgaacacgtaccactcagactgccggaagatcttggagcctcatctgaacgagcaggagaagcaatggctgatgaaagctactgagcccgtagctgcaagaggctgagccttttcgtcaacgttgcatgccaccgagcgccaggctcatcttctgcgtggcatacatataagattggctgcccccgctggttaaataataatagcggcgaaggaacaggatagcttgttctcaacgctgatcttcgccgctaaagtggagtgtttggcaggatgctattttctttcccattagggtacgttcgggttttacggaacggtaggtttttatacggaacggtgggtacaacaattcctagagccggattgtttctctaattatttatataaggtttgatcaattgaaataattttggatccattcttgacaacctaaggcccataagctgatttgtacagttattctgggaagtcgcttccaactgaatacgctgctaattgtttcgcccaaaccggatagccttctttgacgctaaataa

SEQ ID NO: 15576 - DNA, 1815 bp, Zea Mays
tctggttcctggtcttgaagcacagttgttaacttgacacttattgatcttcctggactgacaaaggtcgctgtagaggggcaagcagaatctattgttcaagatattgaaaacatggttcgatcttatgttgacaagccaaattgcatcatcttggctatctccccagctaaccaagatatagcaacgtcagatgctatcaagcttgccagggatgttgatccttcaggtgacaggacatttggagtcttaacaaagcttgatttgatggacaagggtaccaatgctgttgatgtacttgaagggagacaatatcgcttacaacacccctgggttggaattgttaatcgctcacaagctgatatcaacaagaatgttgatatgctttcagcaagacgcaaagaaaaagagtactttgagagtagtcctgaatatggtcacttggcacataaaatgggtgcagagtatcttgccaagcttctgtcacagcatttagaggctgtgatcagggccaaaattccaagtattatagccttgattaacaaaacaattgatgaaatagaagcccagttggatcgacttggtagaccaatcggaggtgatgctggggctcagttgtacacaatcttggatatgtgtcgtgcatttgaccgtgtctttaaagagcacttggacggagggcggccaggtggagatcggatttatggtgtctttgacaaccagttacctgcagcactgaaaaagcttccatttgaccggcatctttcaatgcaaaatgttcgtaaagttatttcagaggctgatggttaccagccccacttgattgcccctgagcaaggatacagaaggcttatagatagttctttaagctactttaagggtccagctgaagcgtctgttgatgcggtccatttggtcttaaaagagcttgttcggagatcgattgcagcaacagaggaattgaagcgatttccaacacttcaatcggatatagcagctgctgcaaacgaaagcctggaaagattccgcgaggatggacggaagactgttcttcgtctagtagagatggaagccagctacctaacagtagaatttttccgcaagcttcctactgaaccagagaaagcggctgataagaacactccagtgagtgatagatatcaggacaatcatctcagaagaataggatcgaatgtgtcatcttatattaacatggtctgtgagactctgaggaacacaattccgaaagccgtcgtacattgtcaagtgaaagaggcaaaaagaaatttgcttaaccgtttctatgctcatgtgggaagcaaggagaaacagctgagtgcgatgttggacgaggaccccgctttgatggagaagagggatgccctggtcaagaggctagagctgtacaaatctgcaaggaatgagatcgactctgtcgcatggaaatgattggtttgtgacagccactggtggatcgtagaatgtacaaccgcagcagcacacgtatggattgcagtagaatgatcaattctttttttacatttgaatttaccctggaggccttgcacgtgattttcgcgagtcttttgccgaacacatgcttatttggccgtcttggcccattcacgcgattgtgttatgggaggatgttctggtctccagttgatataagagtatatatgtattctttgttgattttactgccttgatggcctccatacttttattgggtggggtgccaggctggacaatctgtcagatgctacaaaatgaaattgtgggataggatgaccaactgtacatttctggttttgg

SEQ ID NO: 15577 - DNA, 2348 bp, Zea Mays
aaaatcgaattgcctctaagggggatacactatttcttttctttgaaacaaaaacaacaacctcaatgcaaggtgatattggagttgcaagaagctttgaccaaggtgcgacgtgggaatttcttggcatcgctctagatgaggcatggcatctgtcatatccttttgtgttcaagtatgagaatgagatttatatgatgccagagggaaacaaaaagaaggagctgcgcctttatcgtgctattaagtttccccttgaatggacattggagaaggttcttgtcaataagccactcattgatgcctcattaatccaatttgagggatattggtggctatttgcctctgattttacacggcatggcgttgagaagaacgcagagcttgagatttggtacagtaactctcctcttggtccttggactgagcacaagcaaaatcctatctacaaatcagacaaaagtctgggagctcgaaatggtgggaggctctttgtttttgaagggtcattatatcgccctggtcaggattgcagtggtacttatggtcggagggttaagttgtacaaagttgaaaagttaagcaaggaagaatacaaagaagtccccgtaaatcttgggatagatgaaccaaagaaagggagaaatgcatggaatggcatgaggttccatcacatggatgcgcaacgacttgcatctggtgcatggattgctgtgatggatggtgatcgagtcccttcaggcgattcaaccagacgttcgctcattggttacatagctttcctgctggccagtgcccttgtcatttttgtgggttttatgaaaggtgcaatcacttgctacattccttccagtttatgggttcctcttacaaggagaacagaattaccccgcatcttctctgtgcaccgcttcaaccagaaagtccgcagatattctaccagtatcagcagatatatctctgcggccaaaactaagctcggtgaaaagacctggtccaacatgcttttcttctgcgtagttgctctatttactattgtgaatgtctgcattgccgtgcatttcttatacggtggcaatggtgctgaagaggcatatacgtatcaagggcaacactctcagttcaccatggtcacaatgacatacgaagctcgactctggaatttgaaagtattcattgaacactactccagatgtgaatcagttagggagatagttgttgtctggaacaaaggtaaccctccaagcagtgacgcttttgactctactgtgcctgtgaggatacgagttgaggagatcaattctcttaacaacagattcagggtcgatcctctgataaagacccgtgctgtttttgaactggacgatgacatcatgatgacttgcactgacttagagaaagggtttagggtctggagagaacaccctgaacggatggcgggcttttacccccggatgatagatggcaaccctctgcaatacaggaacgagaggtatgctaggggtaagaacggctacaatctgatactcacaggtgctgccttcatggacagcgagttcgctttcaagacttactggagcgagaaagctcgtgaagggagggactatgtgcacaagaacttcaactgtgaggacttgctcatgaattttttgtatgcgaacgcaagctccacaaggactgtggagtatgtccaccctgcgtgggctatcgatacatccaagctttcttccgtggccattagccgggacacccagaaacactacgatatcagaacagattgcttggcaaagttctcctccatctatggccccctccctcagaaatgggagttcggcatgcgtgaagatcattgggacaaataggatggcaatggtggtacacaacggactggttaaacctttttttgttaatcccctagaaagttttgtagcttggggtctacggtgaagtttgtaggtcctttgggcagaagtgcccttggtttgtgatgtacctattatattcgcctagaagcttagaatctgatcaggaattcaggatagacaattgttcaaaagtttttgaagttaatgctgaaacagaccaaaggcagtgcagtatctgtgaattgtgaaaggcagagacagagagggaatttggagactgcatagggattagtgggtaggaagttcagacttcagattgttgggttcccttgtctctgcagtttgtgtacatgtcttcctttctaagattggactagcgtgttgtgtgattttttaccgtaagaattctttttacagctcgtagtgtttttttatttcggtctaatgaggactttctgaaccattggctatttttggtccgcg

SEQ ID NO: 15578 - DNA, 1363 bp, Zea Mays
gggcatgatcacgtgaacatgacggcgaactcctcgcacttggtcgctctagtgaatttgccaaatacgtctgacgaaggaaggcgatcgttgaggtgggtgttctcgttgagagaacttcgatcagcaacaaacagcttcaattacgataacaagatcggagaagggccacttgggagcgtgtattgggggcaagtctgggatggttctcagattgctgtcaagaggttaaataacgcaaagaacggcacagaagccgaatttgcttcagaagtcgagatactgggaagaataagacacaaaaacctcctgagcttccgtggatactgtgcggacggacccgagcgcgttctggtgtacgacttcatggcaaactcaagcctgtatgcacatctccatggaccgcattccgcggagtgtctcctcgactggcggaggcgagcgtctatcgccatgggcaccgctcgggctctcttgtaccttcatcgccacgcaacgcctaagataatccacggaagcgtcaaggccaccaacgtgctgctggattcagacttccgggcgcacgctggcgatttcggtctggcaaggcttattcccgacgacggaacggaccacgaaaagatagccagcagcgagagccagcgaggctaccttgctcccgagtacgccgccatgtccggcaaaccaactgcaggctgcgatgtatacagcttcgggatcatactgctggagcttgcgagcggcagaaggccagtcgagaagtcgggttctggcaaggcttgtggaatccgaagctgggtgctcccgctcgcaaggcagggcaggtacgacgagattgcggactcaaagctgggcgacaagttctctggacctgagctgagaaggatggtgttggtcggtctagcgtgtacacgttcagaacctgaaaagagacccacgatgcttcaagtcgtgccgttgctgaaaggcgagtcgaaagaaacgcttgttaagcttgaaagggaggagttgttcagcccagactcgacgacggtgagttcgcagggaacaccgaccccagatgggagcacggactctgcgccgccgctgaagaaagataaagaactggttggggcgtgagttgcgatatattgctgttctaggagattgtagagtgcgtatttgtggtattgatgattagtctgtgcggtttgacgtgaatgggaattgtataggcattgtttttttctaagttttttttttctgtcccttttgagggagtaaggaagagccggcgggctggagtactctgttgctttgcagctttttggttcattatgcttcgtctatcgagcttgtcgccgagtctggcccctcccttgcc

SEQ ID NO: 15579 - DNA, 968 bp, Zea Mays
aagctatctagtgatttagtagcagaaaagatcaagaggggacatttatgagcatgctgttgttttgagtgtgaaacttgaggaccaagatgcgtttgaacgcgatttctgccagctgaagccttattacatggatacatgtggcataattcccgcctcgccagaggagtacccaattttgggactcaatcttctgaggctgttggttcagaatagaattgccgaattccacactgagctggagcttttacctgccaaggcactcgagcatccttgcatcaagcatgctgtagagcttgagcaatccttcatggagggtgcctacaaccgagtgttaagcgctcggcaggctgtgccacatgagacctacgtttacttcatcgaccttctcgccaaaacagttagagatgagatcgctgggtgcagcgaaaaggggtatgattctctatctgtgagtgatgcaaagcaaatgcttatgttcagttctgaccaagatctgcacgagtacatcactgaggagcacccggaatgggagattaagaacggtgctgtcttcttccagaaggcgaaggaatcacagccctgcaaggagatcccatccttgcagcttatcaaccagacgctcagctacgccagggagctggagcgtattgtatgatttaaaccaatccctggtggttctttccccccctgtggccgcttggcatggcttgtactgtcctttgcatttgggatgatctttgatcgcagctctcatctgactgaaacatcatgtgaatctctgaagggctcagtctctccggcattggtctgttaactccatttgtatttcaccacattaactgcattgcttgaaaaatgccggcattcactgctgctgtgaacttttgatgggcttgatattgaattactgcctcggaattccactgacctctgcaggcttctgacgtcacgttttcttctgcatc

SEQ ID NO: 15580 - DNA, 60 bp, Zea Mays
gctgctacagtgctacgtacttgtattgtacacggcgtggtttgacttcggttccttccc

SEQ ID NO: 15581 - DNA, 1011 bp, Zea Mays
tgacaatgatacttatgagcactcggatgatgaggaatagaggagcatttggctcgtcagcgcatttcaaagcgagaagttgataataatacattgatatccccattagaagatgacaactcaagggaggtatttagtctaataaagaagctcaatattgctcctaaacctaagatgagaggaaagcaatcaacatcaaatcatgaaatgcttatggctggaaggaacaccattgcttcaaagtcatcgtttcttggacgaacagccagtggttcactggcatcttctcacagatcagtctatagatcctatgtatttggtcgtgatgacagcaatagcagcagtaggagctgcatttctacttcagagagtaatttagatctggatcagaccaattcctctcaacccaagaaggccaagttcagttcacagccgaaaccagaggggacaagggcaactccagagtgtaacacgagttcaggtgtttccctcttcgacgtcctgcgcaggacttcagagcagagcagtcaggaaagctgtagcacaatcacagaaagtcaagctgtgcaccagttctcggcattcaagttatcaaggaggttttccaaggtgggttcaaaaaattgacaaactctagatggctgttagtatcgagagggttactgttggagcttatggggcaacgcgttgagttagtttcgagcttcaaaccgccaaaatgttccggattgcaccatgagcgccaggtgttttatgcacgaactgagaatgctgagacctggccctgttgtagattatgaaacccagaatcttgttgtgtgtactcgtatgctcttgagaacgcacgctgagtttcctgagatgtttaaagtggagtgtaatgtttgcttattctctctgcattgtctcatgagataggtagatgttgtaaggcttttaccaaaaccaaatgttcgaaatattagatgtaaccatacattctgttcatggatgcctgccgatgttaccatg

SEQ ID NO: 15582 - DNA, 165 bp, Zea Mays
aactaagggggtgtttggtttctagggactaatttttagtccctacattttatactattttagttccaaattgccaaatatagaaactaaaactctattttagtttctatatttagtattttatagactaaaatggaataaaatgaagggactaaacattagtcc

SEQ ID NO: 15583 - DNA, 446 bp, Zea Mays
cacttcggggtcaatcagctctcaggaacaataccgagccagattttcaactcaaatatgacgctgatacatgtgcttcttgacaacaacaacttcaccggacgcattcctcctactctgggccttctcaatacactagaagtcatgcgttttgataacaactaccagctgactgggccggttcctagcaacatcaacaacctcacaaaacttgcagagctccatctggaaaacaaccagctgactggtccactgccagacctcacagggatgatcgcgctcagttttgtggacatgagcaacaacagcttcaatgcatctggtgttccttcctggttcaccactctgccatctttgacctcactgtaccttgaaaacctgcgtgtcacagggcagctgccccaagccctgttcagccttcctgcagttcagacactagtttgcag

SEQ ID NO: 15584 - DNA, 2253 bp, Zea Mays
tgcagataagtccctgatccggtccgatgatcccgagtggttcttcttcgcccccaaggaccgcaagtaccccaacggtagcaggtctaacagggccaccgaggcgggatactggaaggctactggcaaggacaggataatcaagtccaagggcgacaagcgcaagcagcataccatcggtatgaagaagaccctcgtcttccaccgcggtcgtgcccccaagggcgagcgcacggggtggattatgcacgagtaccgcaccaccgagcctgagttcgagtccggcgagcagggtggttatgttctttatcgcctcttccgtaagcaagaggagaaaactgagcgctccagcccagaggaagtggatagaagtggctactcacctactccttctcgttcttcacctgacaacctagaggcgaatgaggaagctaatacaccattaaataaggaatctccagaatctgctctgcatgaaagcccgattgagctgccaaaatctgttgaaaccaatggtggttcaatgacaaggtggctggcggacagaaatgataacttgatggttactgcaccagatgtttcccatatacctttccacggacatgctgctggtgtagctaaggttgatccttctgttggtgcttcaggccacttagttaatccccacaatggaaatgatgattataacaaatttgtgtctgatttcactcccattctaccacttgaaaatgcattcttcactgatatacaacaaggagcttttggttttgatggcatcatgaatcctcttgatccccttgatgctttcttgaatcaaacacttgttgatcctgatgaacattcatcaacaacatcaaaagttcagtatgattctgacattccaacagaatttgagaaccattggaatatgaaggttgagcctcaagatgatcaatgctggtgggcaaacataggatttgagccagacgaaccaaatcctctgcttccttgtgacaccactgaccaagacatactttctgttgactctggtgctgattccttcaatgagcttttcaatagtatggaagagactggaattattgttaggcctcaacagttggactccactgtgcaaccaaaccatgtgttcgctagccagggcaatgcagcacggaggctgcggctacaggttgagtctagggagatcataactaaagatgagagtgaagatgaagtatcatgtgttctaactccagactgtttgaacgattctgttgaggagtccactgcagagaaggatgtggcttctgatggggatgaggctgagtcaacagggattgttattagaagccatcaccctgctccaagatcaagctcagagagttcattcactcaacagggaactgctatgcaaaggctgcggctacagtcaggccttaacaaaggccagcgtcctagtactgatgattcatcaagctgcattatagacgaaccaggaagtcagcacaaagcagaaaaagcagagattgaagaggatgcgagtacaaacctcgctggaagtgctgatgatctacctggtaatatccatgatgatgagcaaaagaacatccctgaacatggtgctgaaatgacttctccagaagccaaatctgttctgaggttgcggaagacttctgaggaaggcaacaaggatgtcaagcaggagagttgtctcgagccacacgtgagagcaccaatgcagaagggaggcttccaatcatacatcatctggctggttcttccggtggctctgctcctgcttctctgtgttgggacatatggatggccgtaccctgcagtaagacatcccggcattgccaaggcagctgaaaaataaataaaaaaacaagtggtagaaatgacaaggtggaaaagagcgaggtgtgttattgttggttttagtacatcgtagtcttcttttgctgttgttgtagatgtcttgctaatgttgtcgctgttgtgtagttgcaattcaagcccagggctgccagttttatttcctaatgtaatgtagcaagagcgagaccctgttagacgggtgcgctgaaattctgaacctctgtaatatctgatgttcttgtggatacctgtttcagaattttcggttcctgaacccagttactgatggcttgttgatctgttggcgtgttcgaattcgtttggacatgccacagcatggtctgaggggatacaaggactgaatgcgttggtttataattttataatgaaatactg

SEQ ID NO: 15585 - DNA, 918 bp, Zea Mays
ttcaacgagatacgactctattctccagtcatccgtcaggtcagctgagacgcaggtgacaaatgtgatttcaagccggagctcggtttccttccagagccacaggatgacttctgtatccatccgttcaagaccaagttctcttcgtttcaagatttgctgttcggctaagaaggagacagtcgacaaggtctgtagtatagtgaaggagcagctggctcttcccgatgggactgctatcactggcgaatcaaaattcgccgaacttggtgctgattcactggatacggttgaaattgtgatgggcctcgaggaggcgttcaacataaccgtcgacgaaacaagcgcacaggacatcgcgacggtgcaggacgctgcagacctcatcgagaaactcatgctggaagcgcctccaaaggttgtctagatcgatccatcagtcttgcgattggcgacttggcgttttatgttaaattgttcatgttacccaatttgttctttattgatggttcaagataagatttttgtatggatgttgctgaggtataaattagatgctccaaaggctgcatggagcagatgaagacgatgtattccacttcccatttgcatgttgtacttccatagagagatcaatgaactgttatgaagagtcactgcaactgtggcttttgatctttgtgaagtcacatacagtaattgttgttagatttgcaaatacaaggctgtctgtcaggtgctaacgcattgtggtgtttcaccacaagcgttgatgaattcccttcgttgtgattgattggctgattgctcgataacaacttgacttttggtaaatcagatcggataggatcacgttggatttatgggattcaattaaattatagaaaaatcacaaaaacccatgtatgacaagggaga

SEQ ID NO: 15586 - DNA, 792 bp, Zea Mays
ctggttaaatggacagaaccagtcaccatgtagtgattaaacaggctaaactgctgttcaggcgagcagagaaaatggttatgtctttgtcatgcgataaggctgtttggaatgctgtcatgaataatgaggcagttcaagatttcaggagatctttacacgatggaaaagaaaatgatagaaacgaaaacactggtggtcctgctgaagtgcttaagtggatcctggaaagcgcccaggcaaaaatagttgaattcctagagaatgttcagaagataatcaacatgctgatccacactccagaggatgatgataatccagatggatacagcgatgcagttaaggtgtcgttcatgctcacggtattcgtcttcatcgtggtggccattgctcgtatcaattatgaacattgggattacaaagtgtggtgaggcgagattctggcatcctacaagcccgtctatatatgttttgtagaacacaccaaagttcgataacttatcctacacacagttttactcaatgctttggctgtatcatttcatcccggcagatcatgcaagggaatgttgttctgggtcatatttgtgttgttcgactttggagccggatggacctctgtagctacacttccttactccagcagtccagcgccagcaaatttcatgtttgcagtccattttaagcatacagcattaactgttggaatagcctgtataaatgttacttgaggaaattattttacagggtgtttggatccattcatttcgagggaattaaaattatttaata

SEQ ID NO: 15587 - DNA, 992 bp, Zea Mays
gagaagagcgtcgcccttgacatcgcggagctggcggacaatctccagctcggccccaagttccatctcatcggcttctccatgggcggcgagatcatgtggagctgcctcaagtacatcccgcacaggctcgccggcgtggcgattcttgccccggtgggcaactactggtggtccggcttcccgccggacgtgttcaaggaggcgtggcgcgtgcagtttccgcaagaccagcgcgcggtctgggtcgctcaccacctgccgtggctgacgcactggtggaacacccagaagctgttccgcggatccagcgtcaaggacggcgaccctgccatgctatccaaggaggacaggcttgtagctgacaagttcgagaagcgaacctatgaggcaagcggccattggcgtcgtaggctattgaaatcatgatctctgaatccaactctgctctatttttcttccccttcagaagcaggtcagacagcagggagagcacgactcgctccaccgcgacatgatggtcggtttcgggaagtgggactggagcccgctggagatggagaacccgttcgccggcggccaagacgaggtgaaggtgcacctgtggcacggcgccgaggacctcatcgtgccggtcagcctgtccaggtacatcagccagaagctgccgtgggtcgtctaccacgagctccccaagtcgggacatctcttcccgatcgccgaggggatggctgacatcattgtcaagtccctgctgctcggagacgatcatctgtcgtcgtcggcctcacagcctcctcattctccatgaatccaggtcgtcacgtgtagtccgttcgcatttcgttgcccgtctctcactgtttctgtaaagggaccgatgctgcaggattctctagcgttgtagctaggatgctctgtttttttaaataatggaactaagttttagcctatatatatatatcatctgagaatgttacataatgttggtc

SEQ ID NO: 15588 - DNA, 3618 bp, Zea Mays
cggggaagggggaagagaggggacgaagagggagaaggaactgggacttgccgcccccgcctccgaattccccactcctccaccaccgccaccactcaccccttgctccgctcggcctcctgaatccggcgtcgtcaagcaaccccactccttctgccgttatcagaaccctaaccgatcaatccgtccgattcccagctgccggtttcgcgttgggagcgccggagcaggggaggggcggagggtcggatcggcagccgcaggagcattgagcgatggctgccgtgtaggatgcagctggactccgccggccgccgcctagctgctgctgttgttgctgaagttccgatgcttcagcaaccgcgatcttaataggagcggagggtggagtaccggtggagtgggccggacggctggttgatctccgtgagctccagcgcctacgcactgggaggtggggaggtgattgccggaggcgtatggaggaacctgggagggagggggattcccccgggccgccgtgggcgccaagtgagtcctcagctttccgggcgttcgttacggcggtgggggagcgggcggtggcgtcgccttcaggctcggacaatggggattccgtctgctcaagcaacctccgcgccgtcaggaagagaccttttgttgcaagattaaccacatatatcatccaaacttttgaaaaatgcaatcctgagtttaagtactcagagtcactaaaccccaagcgctttctcaccaatcccgcagttcctgttcacaaccatggtcttgacaatgcaaactctgatctcatattgtatgtcaacctggaactgcttaataaaaagtcaagccggaggtatgttgtccaagaaatgcttggccaaggtacctttggacaggttgcgaaatgctgggatgcagaaactaacagttatgttgcagtgaaggttataaagaatcagcctgccttttaccagcaggctatcatggaggtctctttattaagattgttaaatgagaaatttgatcctgatgatgaacatcacattgtccggatgctggattttttcctctaccaaaaccatttgtgtatagcctttgaaatgcttggtaacaacctgtatgagctgttgaaaaggaatagtttaagaggtttgcaaatgaaatatgttcgaactttctcaagacagatactggatgccctgattatcatgaaagatgctggcattattcattgtgatctaaaaccagaaaacatccttatagctccaactgtaaaaacagcagttggagtgaaagtaattgattttggatcagtgtgcatggagggtaaaaccatttattcatatattcagagccgttattacaggtctccagaagtacttcttggttatccatatactactgccattgatatgtggtcattcggttgcatcgttgctgagctatatatagggctgcctttatttcctggtgcatcagaatatgatgttctttgccgtatgattgagattattggtgggcaaccaccagatgatctgctacgtgaggctaaaaacactgggaaattttttaagcatgttggaagtatctatcctagtagtgaggctcggaatggcgctagcagtgcatacagaattttaagtgaagatgagatcgaagcaagggactccaagaaaccgaaggttgggagatggtatttccctcgtggaaggcttgacagactcatatatacatacccctggaagaatttgagcgagggaaacttgccagagacagaaaaggctgattgcttggcattagttgatttcttgagaggacttgttgagtttgatcctaataagaggtggtcaccgctgcaggcctcgtatcatccattcatcactggtgaagccttcactggtccttacgagcctgttcaggagaccccacgaattcctgttggacgtgctgcagtagttgaccacaatccaggaggaggtcacttgctgggtgctggtctttctcctcaggttggaagcattaacagatgcttacgatttaacaacgctttgcaaccaaatatgcctttttcatatggaagcagttgtggcagttttgggagccatggtagctttaacgataatgctggctttagctatggaagctatgattttaacagtgtcgacatatataattcaccaatggatccttctgggtttaatttacgttcacaacttggaggatcgtttctcggatctagcccacatattcgacgaagacctcatctctcacatggtggtggcattcggttaagccctggtggtccagggcatatgtctcttggggccagtccatcacaatttacaccgccaaattcccagatgcaaatcccaacaggtcctaatggaaggtatggtgcctctccttcaagaggtggacatggctcttcgttgggaaaggttgctgttgtaggccaatacaataggaggaggaatcagggttatccacctatgccaatgccaccacatgaacacacatctcaactgatccaggggcaccaaggagatggtgtcagtactgctcgctttggtgcatatgcccaaggaaattctacctacctacataatgcactccctaattctagtcattatagttggagatcgcaaaggggatctggcagtggtttacctttggacccttcttctagccgtggttcttttccacccaccaattactatggctttcctttacactccgatgcgtcagcagatacattgccctccacctcatcagtatcagatccagccgattgggatctcaactctagtgacaagtcactcctgcaagaggaccgaacactgtcagctgggttaagtgatcttcgcttgatagacgcaagtggccaaacaaacagatctagcagattggctcctttccaaagtcatgatattttaagttcaaacccttcgactatgaatcaaagaaatggacacctatttcatgcatcatctctgggagagagtacacatactccaggtcatgtcacattggatggatacgaacacacaacttattctcagcgaagtttcccaatctatcgtgggcaaccatttcagcagtacaacaacatgacttccagttacatccgaccgatgagggctcatcacaatggtcagcctgtctggtctaattataggctgacagaacctccaccaactacaatgggtgacggaatgctctggggagggaggggtggccattcgtttgcagcgagcggactgccacctacacttaggaaagattttgggagaatcttttagtcctgaatccggaggaatgccgaatgccaccaaattgatggcatcagttgtttgcatctgcaattccgggttggattatttgctgggggtgcctactggtattgcaatttgttgtgttcctccgatgtctcccaggatgttcggttcaaatgattatatgagggttaagttcctgaaccttaacatggctaagactgaagtgaaggccacgtggtcgtggtgacatgatttcgttttcgtgatacttgaggagccgactatctgtttttaagcatctttctgttgttgttttgctacaacaggttttctaagggcg

SEQ ID NO: 15589 - DNA, 1592 bp, Zea Mays
gtaagtttgatagttatgcatcaattttgtatttgcgacttccgacttacttccaaatgattttgcgcggaaaagagattgaacaccataatattgtgactgacatgatgttgaagaaagaggtcacctacaggcctgtggcacctaatggacatccgaaggattcaaatatggtagctgatgtaacaattgggtttgtaaaagatgcaaaacatcacatcgacgttcaaggatttaatgtataccacatgaaccgtttgataaagcctttctggagagtgtggactgctgctggaagtggaggtcgtggtgtcataggtgttcttgaggcaaacttcattgaacctgctcatgataagcaagactttgagcggacaacacttctagcaagacttgaagcacgattagttcaaatgcagaaggattactggtctgggaatgctcatcgaataggatatgttgcaccacgatttggcaggaatactgaggcaggagatggagaagactctcctgaaaacacagcaagtgcacaaccatcaccttatcattctggtaaagggtacacacatgcaaaagacttgagtaataatatcaaaaagggtggtaaggcaagcacatcatttggtattcagcaaagagctgagaagtccgcaaggactaaacgatctacgaagtcaatactgcacgggctgtctgatagtgataatagtgattctgagtttatgggcaccctgtcgaggtcaagatcgcacaccctgaagacaaaccgaaaattgtttcaaaatggcagtactggtttgataacacctcaatccagtggactgatagaaagagagagggtcagaactaaatcccagccattggacccaaaagcaacaagcaacggagatctacatactatggatgagtatcagtctgttatcatgcagttaagggatgaaaattcatcactaaaggaaagattatcaaagatggaagaatcgatgtcgcaagagctagtggttgagtgtgacaagaacaagtctttgacagagagggtggaggatctgcagagacaacttgagtctgcaaccaaggaacaggaggcgctgatcgacatcttctcagaagaaaggaaccgacgagaccaagaagaggagagcctgaggaagaagctgaaggacgcatcttccaccatacaggatttgctggagcaactgaatgctgccaggaaaggccgcaaagtttgaggaaataaactagtaacgttgctccttgcgggcatcatcttagattagagtttgagggttagctgcatctacattgtgctccaggtcgtttggagcatcccatgtacagccaagcagtagtgaccactgaagaacacgttatgctttatctgcagttagcagttaccctacaagaaataacttgcgtaattatctttttatcctgttacgtcatctcttgattacttgtcggtttctgtgctctggttgctgctgctttgggcttcgggaatacttgtactaccagttggccatggttggtttgaaaggttatgttactgcaagccatggatctgtagtgtctacgaggtcctatcgaggtcg

SEQ ID NO: 15590 - DNA, 169 bp, Zea Mays
gtccctgcacatggcaaccatgctgtggggagtgtttcccagtgtgccagcacaacaggggcttacaaacgtggctcccaagtatcaattccacactggttcatctgcacagttgagacaccgaacctggtccaatagcacaggtacaacacaattatctaattatgtc

SEQ ID NO: 15591 - DNA, 2284 bp, Zea Mays
tggccaacccacaccaccgcaccacgcacctccaccaccagaagaaaaaaccaaggcggagggcggagaggagagcaaggagggtgaagggggaaaagggtaataaaaataaaagaggagaggagaagcaagacgaggaggaagagggagcacccagaggtaggggagggggaataattccgcaggggctgagggatctcggcgagtccggccgcggagcagcgcagcgaggcggcgatccgagggcgatcggaggcgggcgggcgtagacgccggcgagatttgtgttggtgacaagccatgaacagcgcaaccaccagttgttaagtaaccctcctgtaaacttgaagcaaccgaagcggagagcagaaatggtgttccaaaagaggtcctcgtcagagttggaggcgtccggtggaggccaagtcgcggagatgccgcgcgttcccaagtctgcgaggggcaagagatcggtcaggaagaaggaggcccagaacccgccccagatgtcagcattcgaccttctcgcgacggtggcagggaagctgcttgatgagggggtgggctcgctggggaacatgagcgctggtgccccagctttgactgcatgcgcgaaggatgtccgtgtgaagaaggagcagtgtgacgaggaaatgaagcagttcaagcatgaggtgacagatcaggatagctgcaatgagagtgcaattctcccgcacattgtgttccagcgggcggtgaataatgctcggaatgaggatcctaaggcgaagtctgaggcccaggacaaggaatcctccatgatcagctgtaccaaggctgaactgggttgtaattttggtgtgattgcagataggtggtcgcctgaatccgtggaatcaggagccttcacaggagatgcagtggcgagcctgatgccacctgccccagcaggatttcataagaatgcacccgaaatgtataatttgcttgattcaatggatgtggatgtcaagcctcctcctttggtcagctctgacagcaccggcgagatgccattgtatggcgataaagttcaccgctcaacctccttaccaagggtctcgaagggagtggggttttttgctgtagatagagatgatgacgacgataagtcctctgggtgcactcatcccagcaccaccactaacaaggatttcaggtccaattgtacagctgagtatagtagggtaaggaagttgctcaccagtaagtacaggaaagttgctccagcgagggtttacaaatctgatctttcctatagtgatgttgatcggaagccttctttccggaacaaaaaaatgcattatacacgacagaggacacaaaggagtacattcaagcgtaggaagctctttgatcgccattcagttctagcatctgaatttggtaccgcacatggaaagggaaacacgaagaaggttaccggaagagactcccatgctgtgtctttggaagcaaacaaggggactagttcaacgccattccagaaatctcgtgggtcaaatgattgccatgtgaaacttaaaattaagtcttttaaggtgcctgaacttcttgttgaaatcccagaaagtgcaactgttggctcactaaagaaaactgttctcgaggcagtgactgcgattctcggaggtggtctacgtgttggtgttcttcaccatggaaagaaagttagagatgataataaaacgttgattcaggctggtattggtcaggaggatatgctggacaaccttggcttttcacttgaacccaactgtacacaaaacccacaagtccaagctcctgaagatatcagtttcctggaaaccattgatactgctgaacccctcgcaaggattgcacctgctgactcgtcttctaagcatggtgaagttgacctatcacaggagtttgcattaaccccattagcaatgaactaccagggcagtgatcatgattctgtgcactcccctgggggcgtctcatcgcccgataaagtctccacaaactcgcgagctttagttccagttccagctgcagatcccaatgcaggagctatagttccagcgaataagtctaagaggtcaccagagcaggggcaacgcagaatcaggcgcccgttctctgttgctgaagtagaagcacttgtgctcgcagtcgaaaagcttggaaccggaaggtggcgagatgttaaacttcgcgcgtttgacaatgcgaagcaccgtacctatgttgatcttaaggcaatggattaaccgtgtcgaaattgtggtgcgaacag

SEQ ID NO: 15592 - DNA, 1443 bp, Zea Mays
ctccgttctgttccgccccgccccgccccgaagcagcgcgaaacgacacacgcgagctatcccgacagtaggaagcgagacggggccagtaggaagcgccaagcagcaacgcagcgcatccactcgtcatcggcaaaccaacacccccggcccggccgcgggcggctgcgctcacactccactcccctgacggcctgaccccgcgcgcacaagcaacagcagcccgatggccgcaccgtcctccgccgccacagcctgcttcgtctccccgctcccgccgcctcgccgcccgccggccacatcgtcaccaatttccatgtcatccgtggcgcgtcagaccttagggtcacacttgctgatcagtcagtgtatgaagcacaagttgttggatttgaccaggacaaggatgttgctgttttgcgtatcgaagcaccaaaggataaactaagacctatacctgttggtgtgtcagcagacctactggttggtcagaaagtatatgccattggaaacccatttggccttgaccacactcttacaacaggtgttatcagtggattgcgccgagaaatcagttcagctgccacaggacgtcctatacaagatgtgatacagactgatgctgctatcaaccctggtaacagtggtggtccactccttgatagttctggaaacttgataggtgtaaacacagctatatactcgccctcgggagcatcatctggtgttgggttttccattccggtcgatacagttgggggcattgtggaccaacttataaggtttggcaaggtgacaaggcctattttgggagtaaaatttgcccccgatcaatctgtggagcagcttggattaagtggagtgcttgtcctggatgctcctccaaacggaccagccggcaaagcgggtctgcagccaaccaaacgagatccctatggtcggcttatcctgggtgacataattacctctgtgaatggcacaaaggtgacaaacggaagcgacctgtaccggatactggatcagtgtaaagtcggggaaacggtgaccgtggaagtcctgcgtggcgatcataaggagaagatccccgtggtcctcgagccgaaggccgacgaatcatagcgaacccagacgcgcaaatacacaagggcgcgtgtcctagcattttcgccttcgttcgctgtacataattcctgctggtctgctggagaagaaggggggtactatccaggtcgccgcccgtaatgccgtctcagcattttctgtgtgtgtgcgtgtgtgctgtagcatgtcggcatcctacagtgctttagagtttatagatagatggcctacccttattaatacgagatgttgatcagatgaccatccatccagggaagggaaactgcgggtagaggaccaatgagcttactgatatcacggatcacctaaacctttttgacc

SEQ ID NO: 15593 - DNA, 6754 bp, Zea Mays
ctattgtgacgaaccacttagttctgcgtggaacttatcgcagtctcacccttgtaatttatggcaataccgccgaagaccttggtcaattcaacatagaactaggtctggaccattctcttgctaatgttgttagctctccatcagagggaaagcttgaagaccttccaccagcgctacattcatccaagttgtcatttgaagaatcattatcatcattgaaaccatcgagttttcatgccactgatgtcgacttatcaattgaagcgaagaaagtcttgcatttggctctgaaaatgtaccaaatatctgatgtggagaatcttattcccaacctaagaagtgcagttctctcagctatttcaaaatatgtgactgctagtacaaatcatattctacacactttgagtcaagattcagcaaatgcgtttatcaacagtgattttgattctcaggaaattaacaaaattcttgctgaagctggtaaggagctctctgaaatttggaagaatgtccatgctgttactgagagtaatcttttcaatgataatggttttaccattggagtagatgaagacttgcccacgaccaagattctaattgagttgtttaaccattgtttcccatattacaagaaattatctttacttgatctacaatgtccttctcagagcaaatggttggttctgtctttgagtttggttctcctgctatgctcctcaaaggagagttgcttttattttgttgatactggtgggatggagcaaattattaatctgctttgctggaggacaccaaaatctgcagctaccacattgcttctcctaggtattgtggagcatgctactcggaatggttttggatgtgaagcttttctgggatggtggccacgagctgagcacaccagcatacctgttggcagcagcgatggttattgctctttactgaagcttctactggaaaaggaaaggcatgatattgcctctctagctacatatgttctacagcgcttgcggttttatgagatactatctaaatacgagtctgcggtagtcaaagtgatttccaatattcaggcagataaactttctactgatggagttccatttcttatttctgctagtgttgaacttggtgaaatgctgaaattgataattttctgtggccctattgaagatccatcaccagtggctactgctagtagaatatttaagtctgaacatttagaaggcttgctttcgtacaaagcaacaattgatcttataacttcgtccaaatacagttttttgcagtatgatacggatccatacttattgtctcttatccaggaaagaagtttttttcctctgtcagcggccttattgtcatcacctatattgcatttaccaaatggccctgccgccgaaattttgatggggatagcatcatcaattgaatctattatcctctccctcctcttttgtcgttcagggttatcgttcttgctcagtcagcctgaagcaactgagcttatacttctttctcttcaagatgcagaaaaaatgaataaatcagaatgcataactcttcgacaggcttttgttcttttatcaaaagggttcttttgccgcccaaaagaagtgggattgataacagaattacatcttaaagtgggaagtgctgccactaggatcctctcagttcctccgaattctgatgaacttttgtgggttctctgggaactttgtgccatttcaaggtctgattctggccgacaagcattattagctcttgggtactttcctgaggcaatatcagttctactgagatctctctcttcatataaggatcttgattcagtcatggctgagaatggagggtcgcctttgggtcttgcaattttccattcagctgcagaaattcttgaagttttggttgtggattcaactgcttcatcgcttgaatcatggattgggtttgctgttgatctgcacaaggctctgcattcatcttctcctggttcaaacaggaaagatgcaccaacaaggttgcttgaatggattgatgctggtgttgtttatcagagaaatggtgctcgtgggcttcttcgttattctgctattcttgcatctggtggagatgctcatctttcttcaggaaatgtgcttgtgtcagattcaatggatgtagaaaatgtagttgcagattcaaacagtagagatggtcaggtcatcgataatcttcttggtaaacttgttgcggataagtattttgacggagttgctctatgcagcacttctgtggtccaattaacaacagctttccgtatcttggcatttatttcggatgataagcctgtggcgtcatccctttttgaagaaggcgccataactgttatatatgttgtcctgatgaactgcaagtctatgcttgagcgtttatcaaatagttatgattaccttgttgatgaaggggctgaactgagttctaccacagaattacttctagatcgaactcatgagaaagctattgttgacctcatgattccctcacttgtcttgttgataaatctccttcatatattacgtgaaacgaaagaacaataccgcaacaaaaaacttcttagttctcttctgcagttgcaccgagaagttagcccgaggctagcagcttgtgctgcagatttgtccttcatgtttcctacttttgctataggttttggtgttgtttgtcatcttatcacgtcagcacttgcttgctggccgttgtataattgggcacctggtctgtttcattgccttcttgaaaataccgaggctactaatgcgtccgtaccattgggcccgaaggctgcttttagtctgctttgtctcctgggtgatctgttcccagatgaaggcatatggctatggaaagttgaacttccttctctcagtgccattagatctttgagtactggagcagtgctagggcctcaagtggagaaaggggtgaactggtacctgcatcctgaacatgtgaccatattacttgtgaggctgatgccacaacttgataggcttgctcgtatcattgataactttgctacttcggtcttgatggtgatacaggacatgcttcgtgttttcattgttcgtgttgccttagaaaagattgagtgtgcagttgttcttctacgccctatatttatgtggttagatgataaagttgacaaaacttccctgtcagagagagacacctttaaggtccatcagttgcttcagtttactgtaaaattgtctgagcatcctactggcaaggcattgctttggaggatggggttcacaaggattcttagcaagttactacagaattgtagccgagcatctttcccgtatgataatcagacttttggaagggcgcactctaagaatgaccttatgctcaaatggaggatccctttgtttaaatctattgcatatatctttagtatcgacccatgtaataatgagaaggctgatgttgaagagtccctgaatgagaagtctgttcatgaatgctcttctgtcatgcatgacctcatgatgttctgccaggttttgcctgttggccgggaaatgttagcatgttcgttggcgttcaaggaattggtttattcttatacctgtagaagtgcagtaactttgatactttcacaaatacatacttccaacaaagatgttcttgaaaaagatgagagtgaccctaaccataactcaccatctctggatggttggaattgcttttcctcattgttcaagtgctggaagaagcttgtaaagtatgttggttctaatgaacgaacagattatttagtagaaactatttattccttgacactaggtgctatcaccctcagccagtatggtgaaaatcttgagggtctgttaatactgaggtatctatttgggctcccttctgatcctagtggttccttggaatcatctggtgagagtccaagtgagattgagttattcatgaagacatatgaagagaagatatgccagggcattgaaaattcagcgactgctgttggaaagactcttttacgcaagctactgaattcgatcaaattactacgctcaattcttgagaattctggtcaatccgcagatacagttcagatggttcttgaagaaggcactgactcactgtctgaaattgctcgctctgttgttatgacagctcatcttatgccatccctagccaatgtgtcagtaaatgatgaatctccttttctcttctctaatatgtggaaggttattgttgattcagaagagcctcttgactgccaagagggtgaatttgcaaagaggctagtttgggagttgcctgattcttctcttgatagacaactagcacctggccaatctgccaggaggaaattagcactgggagagagtgcaagtaggcgtgtaagggataatcaactgcctgaacccactgggcagttctcacgaggtttaaatacatccaatgcttcttcgggacatacacgcagagacactttccgtcagcggaaacctaacacaagtagaccaccttcaatgcatgtagatgactatgttgcaagagagagaaacatagatggtgcaagtagtgcgtcaaatattgtgaactctaccccacgaggaacacttagtggaaggcctccatccattcatgttgatgaatttatggcaaggcagagagaacgtcaaaatcatgcgccagccccaactggagatgcacctcaagctaaaagtcagacaacaagtttagatgacagtcttcgtactaagccagagaacttgcgtcaacccaagactgatctcgatgatgatcaagaaattgaaattgtctttgatgaggaatcaggttcggatgataaacttcctttccctcaaccagatgatagtctccaatctccacctgtcattattggggaaaattctcctggtcctgttattgacgagacagaaaatcaggagaatgaaagagttccctttttccagagggccacatctatcccgaaggacgatgaaaatcttggcattggcatttcttcccagactgcaatgctctcagaagctaacagttctttggaactgaaacattcagtttctagcccagggaagaattcttttcgtgatcatgctgaagagtctaattatgattctattggtgtatctgggagaccatctttacaagcagatcatcaacaattatctcgtagacatgaaaagagaagtccacgaaaattttctgagacttctctgtcaaatggattccatgggcgtgagcatagacattccaataaccatccacctctgccaccaatgccacctccaatttcatccgtgtccatgcaaaatactgattcagttaataggcagtcatcttcgttcagtgctcgagatcgaccaacacctaatccttctggttatcctacacaatcttttgactctagtatgcctagtgctttcacaggccttcagggtcaaactcaatacatgcttgcaggcgctggcagttcatcagcgaatgagttacccaatgtggaggccaagcttctatggaacacatttccagcaaataggatccctctggagaccttcagctcaggtttacctgctcggccgatgccaccccttacaccttattcagctgttgctactcagcacgctacgatgaactctggctctcctgcaaacctgtatagccagggcagtgttgtccagccttctccaactgcttctattattagtgattcaaatttggccatgaactccgcatctggcagcatgcttgcatcgaatctgctgccatcatttgcatcacaatttctgatgagcaggccttcaatgcctactccgttttttggcacgcctcttcaacaagttcaattctcatccggtcttccacaaaatatttctaaccctcagccacctgtctcaatacaaccacggccacccccacccccaccacccccgcagcagccacatccttctcagacactccaacaacttggtgctatccaattaccacaccaagatcagcagcactcatatccccatagtgctatcttgccacaagttacgttgcagtttcctaaccagctacccattcctcaagtacaattgtatcatcaaagccagcaggaatctgggcaaacactgaggcaagttggtgaacaatcacaacttcagaaccagggtatgcaagcagatagtttctctcaacagcagcaagactcagggatcaacttaaaccagttcttttcatctccagaagccattcagagtctacttagtgatcgtgagaagctctgccaacttttagagcagaatccaaaacttatgcaaatgctccaggatcgcattggccagttgtagtcgcactggaggtgctattgtgaaagtgaaatctgatgctggtcgatcgctaggttcctagagtatggtgttgttttgttttcggctatggctgtagctagatgaaagcaactgccagcttgctagtcgccgaaatgtattcctatgtacattatatgtaactttgttctgtaatgtgaaaatttgtaatgttagtgcgtatctaatttatagttttaagtttaccttagtggttagatcgtgtgacatgcgcagcgacgggaaaacgacgccgccttttgtctgcaaaggcatttgacgctaactacctgtagagttctgaatatcctgttgcactcttgtgtgtatctggttgctttaatgctcgaaaatgaatatcctaa

SEQ ID NO: 15594 - DNA, 1404 bp, Zea Mays
cccgcgcgcggcaggccaacagctctgcaagcttttccgggatggcaggcgcgatatatatcaaaggcattcctgtgacgaattataagagatccgttgttaattccgaagaggagtggccctccaaacactctaaattctttgctgagcttgatgatggtttggagttctctttcactgataaacggcgctttgcaagagttcgtttgtttgaagatcctgaaaccttacccccaatttctgagttaggcccagatgctctgtttgaaccaatgtccgtcgatagtttcttggactccctgggtagaaagaagatagggataaaagctcttctacttgatcagagcttcatatcaggcattggcaattggattgcagacgaggtgctttaccagtcaaggatccatccattacagattgcttcgaatctacctagggagagttgtgaagcactgcaccagagtatcgaagaggttgtcaaatatgctgtcgaagttgatgctgacatggaccgctttccgaaggaatggttatttcatcaccgttggggcaagaagcctggcaaagtcgatggaaagaaaatcgagttcataacagctggtggcaggaccactgcctacgtgccgcaactgcaaaaactggttggaacccagtccagcaaaacgatatccgtggccgagaacggtgatgccaaggattcagggaccgagggagaagatgcagatgcagatgttttgaagccaagaaagcgagccgcgacctccaggggacagcgaaacaaagataccgccggctcgagaaaagcaagaggaaatggcgccgatgctgaggcggctgaaccagcaacaggtgtcgtcggaagcaacagtgagcaagcttttggccaagccaacagtgacgctgtcgataaatcagatcgggctacaagacgatcgtcgaggaaagtgaaagcccgcaagtaaatctgaacaaggtagccagggatctgtccatggagtttcatactggccagcgtatttgcgcctctgagtaatgtatcttaggaacagaagattatattcatgctgcatattcctgggggattcgctccggaccaacgtttgctctgttccctcggtgctatggatagtagcatatctaggttgtgcataaatgcactgaggtttatgtactctttccaatcttccatgatgctatggaagaggtgattaggtgaaatgatgtttcccctggcgcgtgcggttccacgcatagttgccgtaaagtgaaaaaaatacagattgcttaacctctgctgaataaagatttctaaaggtagaacttgcatggacgaaaccatgcatgcatgcatggcagcaatcagctggtgtacgttgggtgacccaaaagaattgaagaaggagc

SEQ ID NO: 15595 - DNA, 1058 bp, Zea Mays
atcgctctccccctgaacccccaacactactccacaagaccacaaccccgaacccggccggcggcagcacaacatgagaacagcccccccccccccccccccccccccccccttctcgcgcctcctacctctctccagtcggttcccacgccttgccgcgctttacctctgcggcgcactcccgttatcatataacccgcgcgccggctccggcgagattcgaccaaactccatggggctcgagatggtggaggtcatgtccgagactgttcctacggttgtgcctgcggcagcgagggagaacggggtggatatttacccgctcagccgctactacttcggcgccagggacgccgccggcgtgccccgcggcctcgagaccgccgctgaccgcgcgctacggctcaaggcaaacttcgcggcgcacgggctccgcacgagcgtccacggcgtcctcctggtggagctgttcgatcacccgcacgtgctgctgctgcaggtccggaactcctccttcctgctcccgggaggccgcctcaggcctggcgaggaagaggtccgagggctcaagcgcaagctctccagcaagctctccgttgtcgatgatgtggaggccgttgaagaagaagactggcagattgggcagtgcatcgggatgtggtggagatctgaatttgaggccatcccgtttccctacatgcctccacgattccgtgcggcaaaggaatgcatgaagctgttcctgatcaggctgccgatgtcccggcagttcatcgtgcccaggaacatgaagctcctggccgtgcctttgtcccagattcatggcaatgctcaggtttacggtccaattatagccgccattccgagcctactatccaagttctccttcaacgtcatcagcgactgaattgtggaaaccaaccagaatgttgaggggttagtagacgcatgcatacttggctagttgaagtcatagaacagtgtgcgataccgatgggagcttgtattgagaagtagctcatctgtttttgttttttttttttttgaacgtccaataa

SEQ ID NO: 15596 - DNA, 136 bp, Zea Mays
tagcggaagacttattacaaaataaaagataaaagtaaaacgaactaaggatcgccgacgccaatgtcaactgagaaacgccacctagatcagatcaaactcctcaccttatggctcctcctgaaccacctgctct

SEQ ID NO: 15597 - DNA, 968 bp, Zea Mays
ggagcaggaagccctgccgaagccctccaaggtctcaatgaatacgaaaatgaggtccaatgcgtttgcagcttatggtgctttaagtgcatatggtgttggtttgcagcgcactgcttttattgagcagatacatgctacccttccccgtctgatcctccatcttcacgatgatgacctaagtgttcgtcttgcctgtcggaacacattccagctccttgcgacattgatggaagtagagggcttgtctgtgctcctcagcaagcagtattttgcttctgatcgccgttctgactatgaggacttcattagagacttaacaagacaactttgtcggttgtctcccgccagagtcgacagctacctagaatcggctatccaggcattcgatgcaccttggccagtcataagagcaaacgcagtttgtttggtgagttgcatgctatcctttttggatgatcagcgattcattgctccttatttctcccaggtatttgctacgttggttggtagaatgagccaatcgccagacgcaattgttcgagcatcagcatcgtctgcgctgggcattctgatcaagagatctaacatgctgaggtcactggtttcacgatatgatcgagcagattcatcacgcaattcccagagcggtgattctaacaccaagacaccatcagagtttcaagaacaggcagaaggaaatccgaatgatggcgcaagtggagcggcaataaaggggactgaagccgatcactgatgtaaatttactcgtatatacgtatagtgttctagctatgcatgcttgtgtatatgctgtacttccctcgcaaataggaacaggagagcaaatttatgctgccatgtcaatagatcttcagtacacctgtaaagcaaccactcacagttagatgattatttattgaatcaaatattatttatatattgaattgaattttcttcgatgcagt

SEQ ID NO: 15598 - DNA, 84 bp, Zea Mays
gtgttacactcggcaaagtgaccaggatgtctcttttttatttgtttttgctgttccatccaaacaaacaaaagatatatatca

SEQ ID NO: 15599 - DNA, 175 bp, Zea Mays
actatacaccaggaccttcgccattggtttctagtgtttgaccttctcgaatccattggcgtagcatgtgtccatgatgaacaaagaagagtgtgccacgcccactgaggcctgtccaagcctccaaggggcttccctaaaggcatgatgcacgtgatccacctacaaagagcaa

SEQ ID NO: 15600 - DNA, 889 bp, Zea Mays
cttattttccattgcaatttgaccatgcatctgatcatattgcgacttcatatgctgagctcagggatggtagtgcaaatgcaaagtctggtggaggtacacttccaattacagcaaggacattggaaaccataattcggctatcgacagctcataccaagatgaaactgaggcatgaggtactgaaatctgatgttgaggctgcattgcaagttctaaattttgcaatataccacaaggaattgactgagatggaagagcgagaacagagagaagcggagatgaaacagcaagctgatcacgatgcagatgcaactggtggcactgtggatggacatggaagctccggaaatgatccaatggatgtggatgttgggaacacttcaaacgatcagaatgttcctttagcgagaatggaagcatttgaagcatttctgggtcagcatgtgttggcaaaccatatagatcaaatgtcaatcgatgaaatcgagcaggtggttaatagggaatcaactgcaccttacaccagaagccaagtagagtttattttggagaggatgcaggatgcaaacagggtaatgatacgagatggtgttgttcgaatcatataactgccagtctaccgggacgtttacctgtggattccctggtcatgctggatcaagttggctgtctgtctgtaaccaacttacctgttgaagtatttgtttgttaatttttgtcaacaaaggattgggacaatcattggtccccttggtacttctagttcatctaatgtattgcttacctgacctagtgatattagtacctagtcatatctatttgtgttcgagttaatttgcaactcgtttgcaatggcattctgacgagtaaaattcacacattgagg

SEQ ID NO: 15601 - DNA, 1296 bp, Zea Mays
gggcaactatgtaatatcttggatccaggtagataaagcaatgatgaatgagttgaaagaagtaaaaaaagcagtgaatcctacagaagttcttcttgtggttgatgccatgactggccaagaagctgcagggttggtcagctccttcaatgatgagattggtataactggtgctatactgacaaaactggatggtgactcaagaggtggagcagcactgagcgttaaagaggtgtctggaaagccaattaaatttgtaggacaaggagagcgtattgaagatcttgagcctttctacccagatcgtatggcacaacgtatcttgggaatgggagatgtactttcatttgttgaaaaagcacaagaagtgatgcgccaagaagatgctgatgaattacagaagaagatcttgagtgcaaaattcaactttaatgacttcctgaagcaaacacaaatgattgcaaaaatgggttcattcagtcgtttgattggcatgattccgggcatgaacaaggttactcctgcacaaatccgtgaagctgagaagaatctcaagtttatggaatcaatgatcaatgtgatgactcttgaggaaagggaacgaccagagcttcttgctgaatcacgcgagagaaggaaacgagtggccaaggactctggaaagactgaacagcaggtgagccaattggtcgcgcaactcttccaaatgcgtgcaaaaatgcagaaaatgatgggcgctatgcaaggaaaagagtcaccagacatggacgagctcatgggatcgatgaaagctgaggagcagtctgctgccggtactggacggcgtagaaggaagtatggcaacctgaggcagcggcaactggatgccatgcgtggtttccgcagacggtgagatgttcattgccgactagcactggcggtgcctgcacgaacgatggcatttagggacttgggctcggatatagaagtggaagaagatgaagtgcttttgggtgcaatggcaatcatctgggtacattgagttgagtttgcatattcatgtgcagtgtcctattttgtcatattagctgtattattatctttcttcggagcaagaactcgcaaaattgcgtcatctgaaccctgtccaccgtcgtggaaacgagtgcacttcggccatgctagcaaatacaaattcggatctggatcatacatgtggcacataactctgtggaagaattttgcgagaaaaaaaaatcaccaataagcatagctaactttgcttttagtttctcattctttttaattaagtgctca

SEQ ID NO: 15602 - DNA, 794 bp, Zea Mays
gtaaaaagcgatgacttgttgggtaggcccgatcttggagggtcttggtagctgcggtgtttatactggcatactttagcgatatttgtgttggtgcgatagcttgtcgcctggagaagaaggaaggaggagcagtccgagtttatatcatgaccttgggtgtactggcaccgtatcggggtcttggtattgggacaaagctgctgaatcatgtgttcgatctctcagcaaagcaaaacatctccgagatatacttgcatgttcagaccaacaacgatgatgcaattgctttctacaagaagtttgggttcgagataacacagacaatacataactactacatgaacataacgccaccggattgctacgttcttatgaaattcattggccaggctgctacaaagaaatgagaagcagcccgcgcagctttgagagaccactgccactcaagttatggtggagatagttgggatccggtcacagtttgtgctgtgctttcatttttgtgatcttgaacgctgtagactcctgagtagcctttgctatcatttacattgggagtcatcttgcttcagggcatggattcgtgcctgaacaatttcttgagttgctgcttttgtgggacagctgtgatcttgtaggtctgtatgcccaatcgggcttgtatcttgatggatcacgatgtcaggatgttctgcatgctcattttggttgaggtgtgacgattcagttattcatgcctaccattcttgtgcgtagacatgataagataatccccgagcttgaaatactgc

SEQ ID NO: 15603 - DNA, 1155 bp, Zea Mays
tgattactccgtgtttctgaaacagttcactgacgggaacggagaggtggagctgagactggacatccaaaagctcggcatagcgagttcaaaagatgttttcgttgatgtcgatgacacatccctactcatcagagccaagtctgacgggacactgaggactttgatgaacgtccaaacactgtttgataggattaagtcttccgagaccatatggtgtgtatcgatcatctagtgccgcgctcttaccctgcgaggacgcatttattcgctcactctacgtggcaggttcatcgatgaggaccagttggtggtgaatctgaagaaagtagagcaagagttgaaatggcctgatgtagatgaatcctgggaatccctcacttctgggatcacccagctactgacagggatcagtgtgcacatcgttggtgattccacgcacattaatgaggcagttgctaaagagatagccgagggcatcgggtaccttccggtttgcactagtgagctgctagagagcgccactgagaagtcgattgatacatgggtggcttctgaaggagtggactcggtagctgaagcagaatctgttgtcctggaaagccttagcagccatgtccgcactgtagttgcaactctggggggcaagcaaggagcagctagcagattcgacaagtggcagtaccttcactctgggttcacggtttggctatcggtgtccgacgcaagtgacgaggctagtgcgagagaggaagcccgaaggagcgtgagcagtggaagcgtttcttacgcgaaggcggacgtggtggtgaagctcggcggatgggacccggagtacacgcgggctgttgcgcagggctgcctcgtcgcactcaagcagctcaccttagcagacaagaagctagcagggaagaagagcctctacatcaggcttggttgcagaggcgattggcccaacatcgagcctccaggctgggaccctgaatccgacgccccaccgaccaatatctgaaacaatcctccgcccagttgtattctaggagaattctctgcatcaccattccggactagttttttcagtgtaataaataagagaggaacttgtcatctgtctgttgatgcataaaatgaactcgactaacgtttagtggggta

SEQ ID NO: 15604 - DNA, 634 bp, Zea Mays
gccgtgaacaatgcagtggatttgttcaagtattttggcagcaaagggagcgtcatccggaaaaggaaggaatggtacctgtatgagcctgttgttgatgtggtagctaatgacgaagacgggaaagaggaggctaataattctagcaggccgaagaaaagagccgacgaagagaaagctgcaagccttcagtccctttgaacacaagctgctgatagttctaaccaaggagggtttctcttgccaatcccagcagatgcctgcctttgacattcgtcgtaggatggcttcatcatagctacatatttgtatgtaagcggtgtgagagcgtgttattctctagagttgagttccacaagagtcttctctagagttgagttacaagcggctcttaatttctctacacaagacaaggaagaaacactagctgtagaattccaaaaggctcttaatttctcttaatttgtctacttgcataccttttggagaacctctatgttttcttggatcaccagctttaggagaaggcttctttgttgcactttttgataagagcatgttgattcttggagaaccccttccaaacatgttaactgatattatataacacaatattaaaccaaatttctatgct

SEQ ID NO: 15605 - DNA, 404 bp, Zea Mays
gcggctccactccgccagcgccctagaccagcagccagctatcctccacctccactgctctctattttgatcatttgttcaaggcgaagggcattggcatccttcaagtctggagataaactagctgcttatcgttatgtgaggcagtctaaattattctcacaaagccggagcagatgcacacagttgttggaaaggattgaagaagtcatcagcctaattgctagtgctgaatcaaataagaaggtttatgaggcaatacaaattggtatcctggcaatgaaggacaacactgtcagcatagatgaggttaacatccacatgaaggagattgatgagcttgttgctgcacaaagagaagttgatgctgcccttgggaacacacgacgtattgcgcccctacc

SEQ ID NO: 15606 - DNA, 692 bp, Zea Mays
ctctaatcaaggtcaacctggtgttaaatctcataggtactgcaagaacatcattggttgtgacaattggtccatctccaagacatcgtggggaaactaccagtacaataatgtttggacaaagggcaatgaaagttgagaacatggtgaaattgaaggaagagtttgattacaagagcttatgtaggaaacttgatattgaattggataaattaattgcagaaaatgaaaggcaaaggaaacattttgacgatgaagttgagagaataagagctgaagctcaatgccgcattgctgaggctgaaagggaatgcaaaatcacattagagaatgagaaaatgaagtatcatgaagaatacttagactcaataagaatactggaggagaagtggaaagtacatcagcaatcacccaagaaacaaaataaagaggctgagtctacatccaatgatactggagaagtgcataatttactgcagaatgagaaaatgctacgtcaatcggctgaagatgaggccagtgacctcaagaatcaaatatcacactggaaaaagctggaggctacagctacagctgagataataaaactacagaaaatgctagatgctgaagctagccagaaagagaaacttgaagaagaaataggtgttttgagaagccagttattgcagatgagtatggaagccgatcag

SEQ ID NO: 15607 - DNA, 5961 bp, Zea Mays
cccggatttatctcgtgttttctgggttgacaactgggcactgacgaagtggatactctgctctgctctgctctgctcgacgagttttaacatctgagtatggctgcggcgttggcgtggcggttcaatggcaccaatggtggcgcccatggcagcgcagatctggaaagacacacggacaaagttcaagactcagagccacaaactcctatgtcaatcgtgaaaatgggcaagaaccgagttaatgtggaggacgaggagacactttcaagcgttgctcaatgtattgagcaactacgacagagttcttcatcctcacaggagaaagagagctctttgaagcagttattagatcttgttcaaactcgtgatactgcattcggagctgttgggtcacattcacaggctgttccgatacttgtatctctccttaggtctggaccatctggagttaagatgctggctgccactgttcttgggtctctttgcaaggaagaggagttaagggtgaaagtcttacttggtggttgcatacctccattgcttgctcttctcagatcgaagtcagctgaaagccaaactgcagctgccaaaaccatatatgcagtttcacagggtgggataagggatcatgttggatcaaagattttctctacggaaaatgttgttcctgtactgtgggagcaacttaaaattagtctcaagaatgagagtttggtggatggccttctaactggagcactgaagaatttatcaaagaatacagaggggttttggtcagcaactgtgcaatgtggtggagttgatatacttataaagctggttagttctggacaaacaaatactcttgcaaacacttgctatcttcttgggtctttgatgatggaagactcttctgtttgttctaaagttttatctggagaaacaacaaagcagctcttaaagttacttggtcctggcaatgagacttctattagagctgaggctgctggggctctcaagttcctttctgcacagagtaaagaggccagacgtcagatagctaattctaacggtattccttctcttataaatgctactattgctccatcaaaagagttcatgcaaggtgaatctgctcaagcattgcaagagaatgcaatgtgtgcattagcaaatatatctggtggtctttcctacgtaatctcaagccttggtgagagtctcgagtcatgttcttcacctgcacagattgcagatactcttggtgcattggcctcagccttgatgatatatgacacaaatgcggaatctatcagtgcttctaatcctgttgacattgagaagacacttttgaagcagtttaagcctaaggttccttttcttgtgcaggagcgcataattgaagctttggctagcttgtatggtaacccggttctctgcaagacactagcagattctgatgcaaaacgcttacttgttggtttaataaccatggcagctactgaggtacaagatgacctcacgaaatcactttttgctctctgcaagaaggattgtgatctatggcaagctctgcaaggccgtgaaggtgtccagctattgatttctttacttggtctttcatcagaacagcagcaggagtgtgctgttgctctacttgcgcttctttcaaaggagaatgatgagagcaaatgggctatcactgctgctggtggcatacctccacttgtgcaaattttggaaactggatcttccaaagctaaagaagattcagcaaccatccttggcaatttatgcaatcacagtgaagacataagagcatgtgttcaaagtgctgatgctgttcctgctttactatggcttctgaaaaatggaagtgataatggcaaggagatagcttctaaaacactgaatcatctcatccacaaatcagatactggaactatcagtcagttatctgctcttttaactagtgatcagcctgagtcaaaagtttatgttctggatgctttgaaaagcttgctttctgttgcaccacttaatgatattctacatgagggaagtgcagcgaatgatgcggttgagacaatgattaaaattctaagctcacccaaggaagagactcaggctacatcagcaactgctcttgctggtctatttcattgccgcaaggacctgcgagaaactcatattgcagtgaagacactttggtcagtcatgaagctgcttgatatgcagtctaacaaaatactaacgggggcctcatgttgccttgctgccgtttttctttcgatcaaggaaaataaagaggttgctgcaattggccgggatgccttaaacccacttgtctcacttgcaaattcttcagttatagaagtggcagaacaagcgactagagctttggcaaatcttttccttgatcaggaattgtccctccaggtgccttttgaagaaattctcttccgtgtaacacgtgtactaagagagggaactattgatggaagaactcatgcagccgcagcaatagctcgtcttttacagtgccgaactattaatcagccactttcagatactgttaaccgctctgggtctgtccttgctctagctgggctcttggaagctgcaaatggtgaagctgctgcaacatcagaagttcttgatgcactggtgctgttgtcgcgatcaaaggcgtcaagtgggcacaccaaggctccctgggcaattcttgcagaaaacccccacacaatacttccccttgtttcatgtattgctgatgctgctgcctccttacaagataaagctatagaagttgtgtcaaggctctgttccgacctacatgatgttgtcggtggtctggtttctgaaactccaggttgcatgtcatccatcacacggcgcatcattggctccaacattcttaaagttaaagttggtggttgtgctcttctcgtctgtgctgcaaaagagtattgtcagaagcaaatagaggttctgaatgatgcaagtctgtatattcaactaattcattctttaattggtatgatccatatggcaaacacgcaagctgaaaatgtcagcagtgaaagcatatcagatattagaatttccagacactccaaagaaaacaacagtgatggtgaaactctgtgctgtactgctgtcatctcaggcaacatgattccactatggctacttgctatcttttctcgtcatgacagcaaaacaagagcagaactcctggaaatgggagcagttgaaatgctcatcgagaagatttcacaaaatgcattccaatatgtgggtgaagaagataacacctcatgggtctgttccttgcttctcactttgctattccaagaaagagagacaattcgatcaaactcagcattgcattccattcctgtgctctcaaacttgttaaggtcagatgagccagcatacaggtactttgcggcacaagctttgtcaagtctggtctgcaatggtagcagaggaactcttctggctgttgcgaattctggggcagccattggacttatatctttgcttggatgtgctgatgttgatatagctgatcttttggaattatcagaggaattcatgttggtgcctaaccctgatcaaattgcattagagaggctattcagagttgatgatatcagggttggtgcaacttctagaaaatctattcctcttcttgttgatctacttaaacccattcctgaaagacctggtgctcctttcttggccttgggtcttctgacccagttagccgttgattgccccccaaacatgctgctaatggctgaagctggaatcctagaagcacttaccaaatacttatctcttagtccacaagatgcaacagaagaagctacaactgaattgctgggcattcttttcagtagtccagaaataaggcaccatgaatcagcacttggtgttgttaaccaacttgtggcagtccttcgtctaggaggaaggaattcacgttatagtgccgcgaaggcattagagagtttattttgtgctgaccatgtgaggaacagtgagtcaactaggcaggctatccaaccgcttgtggagattctgagtactggcatggagagggagcagcatgcagctatatcagcccttgttaggcttctttctgacaatccttcaagagcacttgcggttgcggatgttgagatgaatgctgtggatgttatgtgccggattctttcttctgattgttcagtggagttgaaaggaaatgctgcggaactatgctgtgttctatttaccaacacaaggatccgttccacaatggcagcagctcgttgtgtggaacccctggttggtttactggttagtgaagctaaccctgcccagctttctgtggttcgtgcattggataggcttctagatgatgagcaactagcagaattagtggcagcaaatggagctgtcattcctcttgtggggcttttgtatggcaaaaactacatgcttcatgaggcagttgctagagctttggtgaaacttggaaaggacagaccagcttgcaaattggaaatggtcaaggctggtgtaattgagagcattcttgatattctccatgacgctccagattttctttgcattgcattggcagaaatgcttcggattttgacaaacaatgctaccatagcaaaaggtccatcctcagccaaagtagtacaacctcttttctctttgctttccaaggcggacatgggtcctgaagggcagtatagcacattgcaggttcttgtgaatattttggagcatcctgaatgccgtgctgattataacttgacacctcgccaaactattgagccagtgataaccttactgaattcatctccaccagctgtacagcaattagctgcagaactcctatcacatcttcttctagaagaccacctccaaaaggacacagtaacagagcaggcgattactcctcttattcaagttctttcttcaggtttgccaaatttacagcagagagctataaaagctctagctaaccttgcaatagcttggccaaatacgattgccaaggagggtggtgtttttgagttgtctaaagtgttgttgcaatctgacccgcctttgccgcatgttgtgtgggaatctgcagcatctgtattgtctagcattctacagtacagtactgagtttttccttgaggtacctgttgcagtactagtgcaattgctcaggtcaggaactgaaagcactgttgtcggtgctttgaatgcccttcttgtattggagagtgatgactcaacaagtgcagaagcaatggctgaaagtggtgctgtggaagcattgcttgatctcctgaggagtcatcagtgtgaggaaactgctgccagactaattgaggcattgctgaacaatgtaagaataagggaggcaaaggctgctaaaaatgctattgcaccattgtccatgtaccttctggatccacagacacaatctcaacagggaagattgcttgctgctcttgctcttggtgatcttttccaaaacgaaggtcttgctcgttctactgatgctgttgcagcatgccgcgctctagtcaatcttcttgaagatcaaccaactgaagagatgaaagtggtagcaatatgtgccttgcagaatctagtcatgtacagccgagcaaataagagagcagttgcagaatccggtggtgtccaggtcctgctggatcttatcagttcaagcaatcctgacacttctgttcaggcagcaatgtttgtcaaacttctattcaataatcacactatccaggaatatgcgaccagtgaaacagtcagagttataactggtaaacaatatccctttcttgttctgtcatattcatttgcatagcaaattcatatttgtcaatgcctgtcatagttcttaaggcggtaaggcgaggcacggcgagtgacccctgcctggacgcctaggcggacacctagg

SEQ ID NO: 15608 - DNA, 1648 bp, Zea Mays
caaaggtgctgtatctgctgtgccgctattcaaggtcatctactgatagctttctggtcctaagatcacactgataaaaggactggctctgaattactgccgttgcattctatgatgcaccattgcatgttgtgagcctgaacattgtgaaaaactttgttttatttggtgatattcacaaaagcatatattttcttagttggaaggaacaaggttctcaattgagtctgctggcaaaagattttggttcacttgattgttttgcaactgagttcttaattgatggaagcaccttgagccttgtagtttcagattctgacaagaacgtgcagattttctattatgcccccaaaatggtggagagctggaaggggcaaaagctcctttccagagcagaatttcatgttggagcccatgtgtcgaagtttctgagattacagatgttgcctacacaaggattagcatctgagaagacaaatcgttttgctcttgtatttggaacgttggatggtggaatcggatgcattgcacctgttgatgaattgacatttcgacggctccagagcttgcaaaggaagctcgtagatgccataccccatgtctgtggattgaatccaagatcgttcaggcatttcaagtcaaatggcaaggcacatcgtcctggaccagataacatcattgactttgagcttctttctcactatgagatgatgtctttagaagagcagctcgagattgcgcagcagattggaactacccgctctcagattctttctaactttagtgacttttcactgggcactagtttcttgtaagtggtaacctgtggctaagtaacaccatgcttctgatgaaagtggtgcttgccattcattagccacgtcaagaattaggcccaattccatcaacatggtcacttccaccagttttattgtaaagatggctgctgtaatttagatattaatggtgtaactggaagttgggcgcttggcaactgattgcaaccatatttgtttcgttggactgaagtagtattggaaactgcactgaaaatgaactatctgaagagtttctcgacaacgtctcagcataataaggggatgtttgaatgcactagaactaatagttagttggctaaaagttggtagtagaattagttagctaataaataactatctaactattaactaatttatcaaaaatagctaatagttgaactattagttaagttgtttggatgtgtcaactaattttatacattaactaaaagctatagtgcattcaaacactccctaagtcatgtttggcttagcttttagctaaacaacgaagaccctgtttggaagcaatattatttttaagttaggagaggctaccttggtttttaagaaactgagaatcaaatttttataaactgagtaataaaacttatgtttagaaccatctcaatttctataaactagtgtgttaaaaattggatggtttctataaactgagtcataaagtttatataataaagtttatatgaaaagcatggttttttgagtttggaaaactaatagtatcatcgaaaatctaccattagcttctcaaaataaaaaacctaacaacacttttttttaaaaaaaactttaatagctgagcttca

SEQ ID NO: 15609 - DNA, 974 bp, Zea Mays
cctcaggtagcaaactcattgatagctgtcatgctagttcagctgtatatggtgaaggctggcaagccatttaaacagtctgggaaatcatctaaggatcagaaagagacaaaatcatcaaaggattccaaagaaccgaagccatcaaaagatgcaaagcaaccaaagccatcaaaagatacaaaggagccaaagccaccaaaggtttcaaagtcacccaaggactccaaagaacagaagaaggcaacgctgaaagatccgaagaaagcaccaaaggattctaaaggactgaagaaagcgcttaaggatccgaaagaacaggaatcattggaagacccaaaggaacatacagcaaagaaggccggcaagcgtgtgacgttcgccgaggtggagcctgagaaggagctcaaggcctcgaacagtgactggcacccatcctctgatttccacgcggcgtaccctgagcagaacccatgggctagcggcttcatgatctttgaggatgaaaacagctactggaaccgaggacccctagactgctgagatcaaatgtatcgaggtggacactttttggtccgctagcagtgcaaggtcccaccagttcatcttcagccgaggagatgggtctcactcgcattatggcgacttgcgcctggtgtctgactctcggtcctgtaacatatttgtccgacgaatacctgtaggttgtagtgtagaattatcaattatgcagtgtggatggtgaaccggtgatattgtgtttcaggcggtgaaccttgttagttaggagaattgagatagtagcagtgtggtgctaaaccttatctggtttctggttgtgttgcttgctgtgctccctggtgcgtttccagtatctgcacaagtgccacaaaagtctgaccgtgatgaaaagatccgtaaaatcgtgcgaacttgccgttaccaatgccattttggaacctgaaatcttcttg

SEQ ID NO: 15610 - DNA, 100 bp, Zea Mays
cggctctcggatctggggtgcccttgaggctcagttcctcgacaaccgccagactcggattctgtacctcgagaccgccttctggcagcttgctcaaggc

SEQ ID NO: 15611 - DNA, 827 bp, Zea Mays
gactaactttaggcagccacaaaaagtgtggcgaggttccctgagcttgccatactttttttcgccgcatctggggcgctcgttttcgatgccccagcaccgctacgcgccgcacttcgcccccttctctccctctcatgccgctggttgatctctcgtcatctcctcctccaagcacggatcttctcgtcgtctcctccaagcacggaccaggagcactgaaattctatctcaaccggttctgccgactgggtaacttgaattctaaagatgggtgtgaaggagatgtatcttcaatattacaatagttacatccagtacctacgaagaagaagggtgcttatttacattaccatttgtgtggtttttctttggtacaaactgaatagattacataggaagagtgttaaatatggtcctttgttacaacgagatttggaacgagagaggcggctcaaccggttgtataatgggacagaagccaattgtattagtgagttgcgcatgcgcaaatttgttttccataggttatgtagccatttaaggtctcgtaggttgttagaggatactgtcaatgtctctgttgaagaacaagttgctatgttcttaaagtttgttggtcatagatggacaaataggtcagttgggtttgaattcctgcggtccggagaaacagttagcaggtacttcaaccttgttttagatgctctatgtgtcatgtcacgtgacctcattaccatgagaaccacagggacacatccaaagatatctagtagtccgagaagatttcacccgtactttgagttgaaagacattacaggcattat

SEQ ID NO: 15612 - DNA, 2464 bp, Zea Mays
cggagacgtagcggaccagcagccggacggccgtataaaacataccaaggccgcctcgctcgctcagcatacggaggcagccgccggacctcgagttattaagttgggcgaggagaggtggttcattccagcagggatccttctcgtgagcccagtcgatctgaccgtccttggtatctggggggggttgttctgtactctctctttaatttggacctccaaagtagtgctgggatgtatcgcctttgggattttctgggtgatggccgtcttccccaccgtcccgttcatgcctgttgggcggacggctgggtccctccttggtgctatgctaatggtcctgttccgcgtcatctccccggaggacgcgtacgccgcgattgacctcccgatcatcggcctgctcttcgggacaatggtcgtcagcatcttccttgagagggctgacatgtttaagtacctcgggaacctgctctcgtggaagagcagaggcagcaaggacctgctcttccgagtctgcatcgtgtccgcgtttgccagcgcgcttttcaccaatgacacatgctgtgttgtcctcaccgagttcatcctcaaggttgctaggcaaaacaacctgccaccacagcctttccttctggcccttgccactagttcgaacatcggctctgctgccacgccgatcggcaaccctcagaaccttgtcatagctgtcgagagtgggatctcatttggccagttcttgctgggagttttcccagctatgatcgttggggttctcacaaacgctgctatcctccttttgtacttctggaaatacttgtcggtggagaaggatcaggagggtgggcagcccacaggaccagaggtggttgccgacgatgaggttacttcccatcggttcacaccggctagaatgtcacatgtttcttctctgaatccagatgacatggattgcgtaagcgaaccgatcatcaggagcaacagtgtcagtactactgggaatgagaacctgagaagcagaagcatcaattctgaggctgacattcagcttgcgatcaagtctctgcgggcatcaagcatgtcgcatgagatggtagaggtctcgacggttcctgatcggagagatgaaggtgcatcctcaaggaagttcacaaggactgctagccagcaaaggagcgtgataatagaggatttagcaccctccccagagattaatggggaaaaggagaaagaaactgaagttgcagagaagagatggaaagtacttgtgtggaagactgctgtttatcttatcactctcggtatgctcattgcacttctaatgggactgaacatgtcctggactgcaatcactgcagctcttgttcttctggcactcgattttacggacgcacaagcttgtcttgagaaggtgtcatattcactgctgatctttttctgcgggatgtttatcactgttgatggcttcaacaaaacgggcataccgaacacactatgggagttagtggaaccatattcacgaatcgatagtgcgaaaggtgttgcacttcttgccgtggtgattcttatcctttcaaacgtggcctctaatgttcctacagtcctattgctcggtacaagagtggctgcatcagcggcttcgatttctcatggttcagagaggaaagcctggctcatccttgcatgggtcagcaccgtggctgggaacctcaccctcctaggctctgcggcgaatctgattgtctgcgagcaggccaggcgggcccagttcttcggctacaacctcaccttctggagccacctccgattcggggtcccgtcgaccatcatcgtcacggcgattggtttgctcatcgtcatcagttactgaaacagctgaaggcagaagagcgtagtgtaagagaagcagaatggataaaaatccttccaataagaagtacatgtaaattaggcttgccctataactcaagtgtgtatcggtacgttatgtctccgtctgtgctcttgctcgtgagcaagcagcacatggctgaccgtgtagcttgcatttccattgcataataggcttatgaagaatgctttggtaatatgattttacagtctgacaaggattgtgaagcagaggcagtgtaccatcaagataatacttctggaagcatataaaaaaatttcgtatatttggatttcaaatccagtctgcttcagactggaaattcatattatcttctggaatcgtgctttattgtcagaaacatgggctaaaattggaaagtccgtcatttattgggcttgcaatgggacaaccttttgggtctgttatatatcactataaccagtgacaactttggttcgcaaactcaaaccagtttctaatctttattttatgatttttatataaagttcttaataggtcctcttgctattttcaatctaaattctaaatactaaaaaaagtttctgtgaa

SEQ ID NO: 15613 - DNA, 881 bp, Zea Mays
cagggccaaatttccctgtgctcctctccatccaggtctcctcttgctcataccgcaacgctctatctctttcgccgagctcctcgaaaccctaggagcgtgcttgaccggcggcggcgaggtgatggcgatggaccctgacgcggtagcgaaggccttcgtggagcattactaccgaacgttcgacaccaaccgcgcggcgctggttgggctgtaccaggagacctccatgctcaccttcgagggccagaagttccagggcccctccgccattgccggcaagctcggatctctccctttccaggcctgcgagcatcagatcgtcaccgtagactgccagccatcgggtccccagggaggcatgctcgtcttcgtctccggttccatacgcaccggccccgaggagcaccccatcaagttctcccagaatgacatgttccgcctgaactatggctaaagacacccgatactcttgtgatgaaggaattgattaagggtttcatgttgaaacgatgaatacttaatgttgccgctactctggtctcttttgtatcttctttgttggctgcttcactgtattacaagaaattgctagacttggattatttcagttgttttgaatcatgtactggttgcaccatttctttgtggaatgtgaattgaaacggtcgtagctacttgatacgcattttgttacaacagcaggcattcgagtttctggtgcttgtacctggagctgttggaaattttcggttcttctgcagaggggaagtcttcgggcaagatgtggtaaaccccccctcgattttgtatgtctggttaacgaggttgaatcgaatactcttgtgtctatgactaataaaattgaattcagtgtgtac

SEQ ID NO: 15614 - DNA, 1825 bp, Zea Mays
gggaggggggcacaggcacacgcatatccaggcttgccatatttataccaccacctcacctccctcacgcgcccgagacacacctcggccgttcttatccccagaagcttccgatcgtctcccacacccgaccgcctgccaaacccgacacactcgtcgcggcgcggcgcttctctcctctcctcttcatgcgccatcgccgccgcctccacctctgcgacgcccacagataggcaggaggaggagggggcgatgccttcgatctcctgccacaatctcctcgacctcgccgcggccgacgacgtgcccctgccgtcgcccacgccgctccgcctcccgcgcgtcatgtccgtcgcgtccccggcctcgcccacctcgccgcccgcgcccgccccgccgcgccgcgtcatcgtctcccaccgcctgccgctccgcgcgtcgccggacccggcggcgcccttcgggttcgccttctccgtcgacgccggcaccgtcgcgtaccagctccgctcggggctgcccgccaacgcgcccgtcctccacatcggcaccctcccagccgccgcggccgaagccgcctcagatgagctgtccgactacctgctagccaatttctcgtgcctgccggtgtacctccctaccgacctccaccaccgcttctaccacggattctgcaagcactacctctggccgctcctccattacctcctcccgctgacgccgtcgtcgctcggcggcctgccgttccagcggactctataccactccttcctctcggcgaacagggccttcgccgaccgcctcaccgaggtgctgtgccccgacgaggacctcgtctggatccacgactaccacctcctcgcgctcccgaccttcctccgcaagcgcttcccgcgagccaaggtggagcagggacgcgccatgggatacctccgggttggccgccgacttcgactggaagaagaccgcggagccggtgatgcagctgtacacggaggcaacagatggctcctacatcgagcacaaggagagcgccatcgtgtggcaccaccacgaggcggatccggacttcggttcctgccaggccaaggaactgctcgaccatctcgagaacgtgctggccaacgagcccgtggtggtgaagagaggccagcacatcgtcgaggttaacccccagggcatcagcaaaggcgtggtagtggacagcctcctgtcgtcgatggtgaggacggggaagccgccggacttcgtgctgtgcatcggcgacgaccggtcggacgaggacatgttcgagagcatcgtgtgcccggcctccaacagcggcgtgaagctgccggccagcagcgaggtgttcgcgtgcacggtgggcaagaagccgagcatggccaggtactacctggacgacacggtggacgtggtcaagatgctggacggcctggccagcgcgccgtcgcagcagcggtccaggccggcggtgcagctgcgggtctcgttcgaaggctcgctctgagggggaagaggagaacacacagcgctagtagcagcagtaaacagcaaacatcgagcaaggataaccagtggtgatgaacacaacgagattcagcagacggcgtggtgtaggattgattagctgcagtttacaggatcgacaatttttttttgctttcttctacattgctacccccaaatctttcgtgcctgtatatgcccgcatggtaatatgcaaagaataacgtttcgaccaccaaccaaaccaccattgtacatgtagttgacgatgacgacgagatcagaaaaggagaagtggggaaaatgattctttcac

SEQ ID NO: 15615 - DNA, 3627 bp, Zea Mays
ccggcgtgtgggagagaagagagagagaccacctcctccgctctctctctcttactctgactcgcccgctccggttcgccgctccgccatcgccggcgatcactccactccggcaacgccgcgtctccgacgatcccaccgacgccgggccccgcgaccccattcctccgattgcctcctcacgtcttgcggttctcccccggcgagggtacgtgctcttgcccagatccgccccgcctccccgcgccccgccacgcgcgccgatcggcaagctgcgtaggcttcgctaccgctgctgcgcgagcgagcgtcgcagccgtcgatccgcgcgcccgccatggacgacttccagggcctgctggcccgcgacttcggcctccgcccgcaggggaaggccgcgcccatgtcggccgcccgctcctcgagtccctccggatccgcctggaccaataccagatccgccgtggggtccgccgctccctccgcgccctcctacgacgagctcttcgggtccgccccgccgccgccgcccaaggccacgccgtcgctcgataacatcttcaactcgttcaaggagcccgcttccaccgcgccgccgcctaagccgaagcactcttccgcgccggtgttcgacaagccggtctacgatgatgacatcttcatcggggtccctggggttaagagctcctcggtgccctatgacgatgtgttcggtggaagccagagccgcgaggcgccccccgcattcgatgacctgctcggtggatttggtaagagctcacaggtgagggaagaggtggatgacaagaggaaaccagaggcacctacggctgtggcggctactgggttcgattatttgatcccaagctttggcgggagaagctccccgcggcaaagggatgctattggtgcaaaacaaaagaaagtttccatgtcgacatctaagcaatcagctagcttaagcgaccccttcgttgttctcgaaacaacttcatcctcagcccatccattcgcagatcccttggatgaatccggtaaagctgcaaaatatcaagggaaaaaccgtgaaagtactagcgttgggagcagtctgtttgaggattcaagcactttcaaccaggctccaaaatttgaacctttttttaccccagaggtggacaatggatcgaaagataggaatgagtcaagcagagcccaaaactcaaaccctgtacaggatttttctaaaagaaactcctcccaacaaccttctgttgaggattttgaaaatatctttcctaagtcacagtctgccagatattctgatgtccatgttgacattggctcagagaaatatagtgggaatggtataaatgatcagtcacctagatctgatgaatccgaagatgagatatggcttacagcttctgagattcccctcttcacacagccaactagtgccccaccaccttcaaggccaccgccacctcttgcagttaagcaaaaacatggatcaagatcaacaagaaaagatgaacatctgcggcggtctaggaaaaacaatgaccatcaaaggagtttctcaaatcaggctggtgtttctacagtagatggactagaagattttaccatgggtaagtctcagaatgtgcatacgtttaatgaggaagaatttgagagaagtacggcagcagcggctatgaaagaggctatggataaagctgaggcaaagttcaaacatgccaaggaagtacgagagagagagcgtgatgcaaagcttagaaatagagaacaacaggaacgagataatgtaataaggtcgtatgcccaggatcgtgaggacaaagagagaaatgaaagactagaacaagaaagagagatgaagcaaaaagaggaaaaggaaagagagcaacgaagacttgaagaggagagagaacttgagcgacatagagaaagagaaagagctaggcaagcagtggagagggctacaaaggaggcacgagaaagggcagcttctgaagctcgtgcaaaagcagagagggaggcacggaaacgttcagaacgtgctgctgtgcaaagagcccaacaggaagcacgtgagagggcagcagcggatgctaaagatcgagcagagagggctactgcagaagcaaacgaaagggctgctactgaagctaaggagaaagctgctagtcaagcgagggatagggctgcagcagaaaaagctgctgtggagagagctcagcaagaagtgaggaagagagctgaacgagcagcagtggaaagggctgctgctgaggctcgggaaagacaggctgctgctgctgcagctgcaagagaaaaaacaagcaaaccagatgatctagaatccttatttggtatgggtgcccgagctaatagtgctccgaagcaaagggctccaactgtggattctatgtttgattctcaaacgcaaaatagagggacttccacttcgacatcaatgaaaaaggcatcatcaacagcaaatgttgctgatgacttgtctgcattatttggaggagctcctacgtcatcaaatgaatttcaagaagttgatggggagagcgaagaaagaagacgtgctaggttggaacggcatcaaagaactcgtgaacgagcggcaaaggctttggctgagaagaatgaacgtgacatgcagcaacaaagggaccaggctgagagacataggcttgcggaaacactggacttcgagattaagcgctgggctgctggaaaagaaggcaatttgcgtgcattgctatcaactttacaatatgttctttggccagaatgtggatggcaacctgtatcccttaccgatttgatcactgctgctgctgttaaaaaagtgtacagaaaagcaacgttgtgtatccatcctgacaaggtgcagcaaaagggtgcaaatctccaacagaaatatatcgctgagaaggtttttgatctccttaaggaggcgtggaacaaattcaactctgaagagctcttctaaacagcctcatgactgaacatagcatgacccatcagggtctgcacaaggtactctgggaaggaactcacaagctggagcagcctgaggttggtcgggggggaaggggaaccatgaagcgaccaagcgaaacctgaactatggttataatcacagttgttttgtttcactcccccaattttctttcccaactatctgttgattggatgacaactcacagcgacatgtggcagctgcccaagctgaacctcatccagtaggtgcacattagtgccctgttttgtactgtttgtcctcggctgtatgtaccgtcagagctgaggcttctgaggtcagcgttgtgattttggattaggtacagggcttatttaccatggagagaatgaaaacaatagagatgacccataataatagattgattgattagagagatctatctatatttttatataaatatataggggagatttcgtggcttatgaaaacagaaccaaacgagatatttccttatctctgtaaccgtatataagggctggccggctatatctattatgtacatatctcacggttttcaccgattttccatggtttcatatttaatatttaaatggtaaaaaactgaaattgtacataaataa

SEQ ID NO: 15616 - DNA, 873 bp, Zea Mays
cccacctcagctgctgcataaaaaaaccaccggcccctagtcggctaatcttcaccttatcccaccctcgctatgcacatccaccactgcccatgctaggctcgctgcggtgccgcgtcatgccgcgcccgcgcaccgccaccagtgtctcatcacacatcaccgagctccgtcgagcgctggagaatggacatcagccacccccatccgaaggcttgcagcgcccgaagctacgccagagcaccacggacatcgacgcctctgactgcgatccattttcgagcttcaaggaatcgacagtcaagcttcggcaaccaagtgatcgaatttttcgagttctacaaagttgaagaccctgagcatctgtttggtgaatgcaagtgtcctctgtcccattatgtcccatttactttataatacactgtcccgcatactatgaacaacttaaggatttactagctttctatttacctggtccttgattaccttttgggctactatggttagattcatgctattgttttactttaatcaatgaacatgatgagatacaatgatgatactatgattttattctggatatgatgatatacttgtggcatttaggggactcgggctgtttcccgagtacctctccgtaaggacctgttcgttgagagaccaccctggataacagtgcaactatgagggtgaaatgggatgcccttagctaattaattagaggaactagaggtgtagttgcttcgccgtcgtgccgtcaatggggtccagacacagtgcttgctttgccgaggctgagtgccgaggttctttcgttttgcttttgttagtcaccctcctgcggggagaggtactgtgtttgtcaaactggag

SEQ ID NO: 15617 - DNA, 1152 bp, Zea Mays
agctgccacagtgccataagtgagtgttgccccgtcaatgtcgctggagccaagaaaagcaaggcggctgcaatgggaggtagcggaacgctgatctcggtgtaccccgatgagctcaccttcctgtttgagctggagaagccgtgctattgcaatctcaaggtggtgaacaacagcgagcaccacgtcgcattcaaggtcaaaacgacatcaccgaggaagtattttgtccggccgaacgcgagcatcgtccagccatgggattcttgcacaataacgattacgctgcaggcacagaaagagtacccaccagatatgcaatgcaaggacaagttcttgattcagagcaccaaggtggctgccagcaccgacatggatgagatcccccctgatacgttcaacaaggaaaccgacaaggtaatcgaggaaatgaagctcagggttgtttacacgttacctagtggtggaggttcagatgactctagcgtatcgtctttaggaagccggagcttcaaagcagcgtctgacgatctgatgatgctgaagaatgcaagcatcgaagagatccagacaattcagcgggtgaaggaagaaagagataacatgcttcagcaaaaccagcaaatgcaacgtgaattggatgtgcttcggaggcgtaggagccgcaaaggtgacgcaggtttctccttgacgtttgctgcgtttgctgggctaataggtgtcctggtggggctcctgatgagcctcatcttctcttcgccgccggttgatgcataagatgcgagaaaaaggttgcagcctatggaagcattaattgttcagaccgacatggggagaaagctcgctcggcaaaagaagaagatgaaacttttgtctagtctccattttcattcttttgttgtttgcaccgtagttatatgaaacgatgataacgggttgcagatctttgatctttccacccgtgcttggttcatcctccatttgtatttgcccctcgttttcttattctttctgtatagtaagtatatcaggacggaagctgtatccattcagcgatttgggtagtgaggaactagtccaggagtatcaagaaagagcgttgatcatgtctactgtattagcagcctctttggaacaaagagaagccctttg

SEQ ID NO: 15618 - DNA, 3843 bp, Zea Mays
tgagggcgaagcgcaccggcacacgcggtgacgtggaaggcgaatcggtatcctcccgggcccggcagccggctcctgccgtcatattctctccccttctccgaccgatccccacctcacacgatactttccccctccactagggttccccgtccgttccccctcggccgcatcagatctccgcggcggagtttcgtaccgtatttgtctttgcaacattcgagttgattattttggaggagtcgctctctagggttgattgagcgctgttgttttttttgtgcgacgacggtggtgtgttgattggatgttgaaagaattgtagctgtttgaggcggcaaccaagggccgcggaagcatctgtgtcgagccatggataaggggatcttcaccaacgatggctccttcatggagaggttcaagcagatgcagcaggaggcgcaggagaagaaggccgctgctgcctctgcctcatcggctcccaagcatgcgaaccccaagcaggggtttgctgttgcggcaaacaagaggccattcgagctgaagaacgctgctccggtagcctcagctggtaagctggcctttagtctcaagaaggccaaggtcgccgttgcacctgtgtttgcagccgacgaggaggatgaggatgctgtggatgttgagagggaggagcccgccaaacgccagaagtctgtgcaagctgatgctcctgcggcagctgccgcgtccggggctgttggtaattatttatatttattaatttcttgctgttttactgttagcttgtttagtgaaggcgttctatgggttgtagtttccaattttccatcgcatgattaggtttaaacatgtgataaggcttctaattcagtaaccgagacagaacatcagtgatatattaccttatagcttttcatgcaattagtgttttttcatcgaattcagtcacggatttagattatctcattgaatttgacgcaaatcatttcacacgcatgcgacataccttagtatttttactattgaagtgagttctaatttctgatatctgttcccaaagtattacagctggtgcagatgattgcattatcagtttctatgtagagtttttttattccatttatttgatggtgttgtcctggaagtattgcgattctgaacacatttgataatgaaactaagtaataactatatggtttgaatttaattttcttacatactgattattgaaatctctaaaggaccgtttggatggtcggtaatatttgagttctttatggttactaaaatataccataacatttaaagcttcaaggtgtttcgatacaacgatgtagttttacatccaattaccatgttattttgagttcttgaagaaaacctattcaaaactcattttccccatttttttttaaaaatcaaagcacacctcacattacctttggcaccattgtgagttatgaagcattggcctgtctaatttcatgcgaaagggcctccagctgagttggttaggtggtctgattagcactccttaggtcctgagtttagctccccgtgggagcaaatttcagtacgattttaaaaatcccctcgtctgtctcacgccaaagcacaagtctagtgcttggccctggtcgtggttgttcagcgaggcaggggttcggggggttttctcgacttgtatgaggtattcttagtacaatgtccaaggctgtctcacttccgcaggttgagttttttttttattttcatgcactagcagtacacattcctaatgtatatacttgtattgtgtacattcgttttcgattgtccacagggtacttaagcccttttcgattttccatatataaactattgctatgtatcaaagctagtagtatctatatatatgtctagctttattatttttcttctggtgtttgattatatagtatgatgtatatttgatcacaaaggaaaaaaacactaagccaaaaccacaaaatatgttattgttttttctatgtattattatattgtaaaaacagtgttctttttcacaacctatgtcatttcattactcgtgtattgaaactatgggtttgaaatgttctaatgtccagacattccataaccataataatattgaattcatgcatttatactagtgacaatgaatcttgcaatgcattttagcggtggaatttgtcaacatcgtttaaatttttagaaataaccattgaaattgcttgctgttgcaccaaggtgctgtgaacttttttgtttttgttttatgcatacatttttggtttacaaaagaaacatctccctctcatcatctgcatccattattagtcactattgtcaccagaaagtcgtgaaggttgtcttttttttatgactgcagcttatagttaactaaattgacattgctgggaaggatgtgattgagggagttggaggctctactgcagtaatttgcattgccttgtcatgcactagatattaatcagttctttaagtgacatgcagccccacccccaccaaatgatatgacagtgagacaagtcgctgacaaactggcaagctttgttgccaaaaacgggagacagtttgagaatatcacacgacagaggaatcctggagatacaccattcaagtttctatttgacaaaaactgtccagactacaaatattatgagtttcagcttgctgaagaggaaagggctcttgctcagtcaaaggaggctgaagcatcgaaagctaactctggcactgcaagcttcaaggcaccaggtggtacttatagaagctcatttgaacagaagtctaactatcagacacctgcatcagctttgtacggggcatatgagggtagttcttcccaaggaagctcttctagttatggtgatcatacagctccaccatcagatcctgtagcattgatggaattctatgcaaagaaggctgcactggaagaacggaagaggccaccaaggcagtcgaaagatgaaatgccgccacctccttctcttcaaggtcctcctaagaagggacaccacatgggtgatttcattcctcaagaagaacttgaaaagtttatggcacggtgtaatgatgctgcagcacaaaaggctaccaaagaagccgctgagaaggctaagattcaggcggacaatattgggcacaaacttttatctaagatgggttggagggaaggtgagggtcttgggagcgagagaagaggccgtgcagatcccgttatggctggagatgtgaagaaggatcatcttggtgttggggcagtccagcctggtgaggtcacatctgaagatgacatctatgagcaatacaagaagcggatgatgcttggataccgctataggccaaaccctctgaacaatccaaggaaatcatactactgatgtgggggagttcgtctgaggggagatgtaaggcgctgctttgctgcaattttgctcacagaactaatggttaggggatatcactaacagcattgaaagtttttgttcatcaacagaaatgtcaagaagttcgttattcagcatatttcttggaatgccacagatgcaaggcttccgggggttctacaaagctttgttctttgtgtagtgtgtttatctttgtgggtttaaatgtctgttcaaacgtgtatcatgtttcagactgttgtattgctttcttggatcacccttttttctgatctcatttcagttacaagttggaaccataaggtacaaaatttgtgttgggaggggttatattttagaatggagtgtgaataactatagctagcataaggctatctccagcagattagccatcctcacatctaac

SEQ ID NO: 15619 - DNA, 1809 bp, Zea Mays
aatggcagccacacgcgctccactacaaaacaggccggcctcgcgtgccatgcgatgttgttccccaggcgcagcagcacggcagtcctccgtttcctcctcgtcgctcgccccggttgtctcctcctcgacctcccccgtcgcgacaccgcccgatctctctagcgcacggcggacggagaagaggaggagggggggacgatctcattcatcggaccggcgtgcctggaataataacaacggggcgagctcctcgtcgtcgaggctggacccggcggcgccgctgctgccgcgccacggcagcagcgggggccgcgagggtggtggcctgtcgtcgcagcccaagacgttcgccaacgtcttcatcgcggtggtcggcgccggcgtgctggggctgccgtacaccttctcgcgcaccgggtgggcggcgggctcgctgctgctcttctccgtcgccgcgctcaccttctactgcatgatgctgctcgttgcgtgccgccgccgcctcgccgacgagcaccctaagatcgcctcgttcggggacctgggggacgccgtgttcggcgcgcatgggcggttcgccgtggacgtgatgctggtgctcagccaattcagcttctgcgtcggctacctcatcttcatctccaacaccatggcgcacctctatccgattaccgccgcggcctcgtcctcctccgcgctcctctcccccaaggcgctcgtcatctgggcgatgctgcctttccagctggggctcaactccatcaagacgctgacgctgctcgcgccgctcagcatcttcgccgacgtcgtcgacctcggcgccatgggcgtggtcctcggccaggacgtcgccgcctggctcgccaagcccgtgcccgtggtcgccttcggcggcgcaggcgcgcttctctacgggctcggcgtctccgtgtacgcgttcgagggcatcggcatggtgctgccgctggaggcagaggcggcgaacaagagcaagttcggcgtcacgctcgggctgtccatggcgttcatcgccgtcatgtacgggctgttcggcgtcatgggctacgtcgcgttcggcgacgccacgcgggacatcatcaccaccaacctcggagccgggtggctgtcggccgccgtgcagctggggctctgcatcaacctcttcttcaccatgccggtgatgatgaaccccgtgtacgaggtcgccgagcgcctgctccacggcaagcggtactgctggtggcttaggtggctgctggtcgtcgtcgtcggactcgccgccatgtacgtgcccaacttcacggacttcctggcgctcgtcgggagcagtgtctgcgtcctcctcgggttcgtgctgccggcctcgttccacctcaaggtattcggcgccgagatggaatggcccggagtgctgtccgatgtcctgctggtcgtgatcggcctcgcgctcgccgtgttcgggacgtacacgtcgctgctgcaaatcttccaatcgtcaagcgcttgatcgacgcgcgttccgctgcgcgtcgatcatcgcattctccagggcaactacgatacatgtgttgagtgttgttcgtgagtggcttgtattggacgggggaaatctgtacgcttttcgtaccacagatttcagttactcccggtagcagtgtatgtgtatgcgtcctagatgttcctcctgctgtgcacgatgggggatacgatgaaaggacaagattttcacttcgtggaaaaagcttattttgctgttaaataaaaagatacttaattcataaaattacattaattaaaaaaataaaa

SEQ ID NO: 15620 - DNA, 746 bp, Zea Mays
ggcctccacgggcctgcctccaaagatctgtgatgttgtaaggtaccggattcaccgcatgaagaaaaaattgaaggatgaattggacagcagaaatacaattcaacactatatatgtcctagctgcaataaaagatactcagccttcgatgcactacaactggtaagctacacggatgagtacttccattgtgaaacttgcaatggtgaactggttgcagagagtgacaagcttgcttctgaggaaatgggagatggcgatgacaatgttagaaagcgcaggcgtgagaaattaaaggacatgcagcaaagaatagaagagcaattgaagccattggttgcacaacttgatagagtgaagaatattcctgcaccagagtttgggagtctacaaacatgggaaagagcaaatattggtgcttttgcaattggtgaccctgctgcagctgattcttctaggaattcacaagggcagtatggtacaccaatgccatacattggagagacaaaggttgaagttgatctgttgagtgatggtgtgaaagaaggtgctgaatcaggtaaaactgattctgaactgaaagttttacctccatggatgatcaaggatggcatgaatcttactaaggaacaaagaggagagataattgcgccacaaaaacttgagaaatctgatgccggagatgacaagaagcatgacttgaaagatgatgattgttttcgctcagctcaggaatgaacacata

SEQ ID NO: 15621 - DNA, 1088 bp, Zea Mays
cggaacgctggtccacggggatcggagcccggtagcaacaggcataaagcaccagcaggcagcaggcctaggagggccccggcccgggggtgcgctgtgtccacgtggcgttcaccatttcggcagaatccgatggcgcgcgctcctcattggccggcgctcaatccatccaaccgccgccgagatttccttcccgcgggcggatcaaaacttgtggctgccccgtgccgcggcgccgctattaataaaaaatctgacgacgtcctccttctcctgctcccttcaacggacttgaccactaaaagctaagcacacccccggccatggcgctcgcgtccacctccgccaccgcgcccgctgccgtgctcaagaccccggcgccatcgcgcccttctccttcggctcgctgctgggcacgcagctgctgctcatggggtgggtggagtcgaagcggtgggtggacttcttcaacccggactcgcagtccgtcgagtgggccacgccctggtcccgcactgccgagaacttcgccaacttcaccggcgaccagggctacccgggcggcaagttcttcgacccgctcggcctcgccggcaccgtcaaggacggcgtctacgtccccgacgtcgagaagctcgagcggcttaagctggccgagatcaagcacgcccgcatcgccatgcttgccatgctcgttttctacttcgaggccggacagggcaagacgccgctcggcgcgcttggcctatgatctgcatgctgccgcccacgacgtgtgtcgtatcatcagtcatcctgtttctcgattgcgagcgtcgtggtacggctgcatcggatcagacgcatccaacaaaatgggggagttttttttttgttcttcttcttccgtgtatgtaccatgtagtgtatagtagtctggatcgattcatgggaccaattaaggcagaatgagtgagcgagggacatttcgttacattaatctctcattccgccttgctgaattactatcgtctttcagaaacatggcgatattcctccgaagaccaattcatgaatcactagaaattcaaagttaacacggtaagatc

SEQ ID NO: 15622 - DNA, 1162 bp, Zea Mays
gagaaagaatccaactcgcaatttatgaatgggaataaagatgagcccagtgcctcttcatttttatgcacgcccagcacgcccagacggcggaggaagggggaaagaggagggcagagcagcaacagtacatcgagcgagggagtagagtaaattgaatcaggtttcgtgtcgattcggaggctttcgcttctgcttgcggagttgcggtggagatttgaggcctgcggcgaagatggcacctgcggaatccggggagaaggcgaccagcttcgccatggcctgcagcctgctcagccgctacgtcaggcagaacggtgccgccgctgccgatctcggcctcgctatcagagctgaatccgatgcaaagaggacgtcgacggacatggaaaagggggagacggggaaggagaccatggatctcttcccccagatcgctggattcggctcggaggccgccacgaaggaagcccctgatgcgagatataccgcaggctcccaaggcatctcttcgcaggttccttgagaagagaaaggatcgccttactgcgaaagcaccatacccgggttccccttcagatgttacacctgtgaagaaggagatgtcggatggtcagccatggcttgggctgggacctcagatcgccaaccctgatctgagcttgtccaaggaggcgagccagtgatcgatgatccagcatcaccatcttcaaaactgcgatactcaacagccatgtgtggaagtgttctgttttgggcccctatcattccgggttttttttcgcatggataaataggttgtacgaaagtaaagaacacagctaatgacggacttcagtaaggattaccggcgctggggcaggtttggctgatcagcctttgctggcctgacccaagtggccattttagaaagatgaaaatgtaatgtagtagttgctagaacaagttggcatcttgggatgttctgtgttgtttggctttggcactggtgcgtgtcagtgtcacaaagctatttattttcacagatacatgctatatgattttttttattatcttctggttgtctctgtagggttatgaaatatcacagcttttctttctaagtgattgtgatcaatgcccctggactatcagaatgttgttctctgaagttacaatctac

SEQ ID NO: 15623 - DNA, 939 bp, Zea Mays
atcgcgacaacgagcagagaggaagcgagaggcgaggagagagaaagttctcgagctagacgagcgccgtgcgaggagagaagcgagatgagcggtgaggcggcggccgtgggcggaggcgaaggagaggcgaatggcatcccgccgaacgtcaccatctatatcaacaacctcaacgagaagatcaagctcgaagaacttaagaagtccctaacagccgttttttcccagtttgggaaaattcttgatgtgcttgctttcaagactttgaagcataaaggtcaagcttgggttgtcttcgaagatgtcgcatcagctactgaggctctgaagaggatgcagggctttcccttctatgacaaaactatgagaattcaatatgccaagaccaaatcagatattatagcaaaggctgatggcacctttgtacctcgagaaagaagaaagaggactgatgaaaaatctgaaaagaagcagaagcgcgagcatcaccatgatgctggtgctagtcaaattggcatgggtgtaactgcttaccctggtgtttatggggctccacagctcacccagatacctatagcaggaggacaaagggtcatgatgccagagattatcgtaccaaacaacatcttgtttgtccaaaacttgccacacgagacgacgcccatgatgctccagatgctcttctgccagtaccctggcttcaaggaggttcggatgatcgaggcgaagcctgggattgctttcgtggagtatggagacgagacccaggccactgctgccatgaacaaccttcaaagcttcaaaattacaaaagaaaaccagatggtcatcacatatgcgaagaagtaatgagctcccgagcaatgtttacctgatgtgtgagatgttgtattccgagttttacacaactgaacgttctgttcgacctgatctagg

SEQ ID NO: 15624 - DNA, 1384 bp, Zea Mays
cgttactgttattgcaggcggctaccgccgtagccgcgtagtaatggcggtggtgggttggcgaggcgggcgctgaaggcgttgagggggctggtgaagctgcaggcgctggtccggggcaacattgtgcggcggcaggcggcggagacgctgcgatgcatgcacgcgctcgtccgcgtccaggcgcgcgcgcgcgcgtgtcgcgcaattcgctcgcagcatgtcgcggctcatccggatccgccaacgccggagaagtacgatcaggcgggtgcccccaggcacgcccgttccggctctctgaaggcaaactcttccaagacgccgggcggcgagaggctgggtagggagaggtcggaatcttgcgggaggaactggctggaccgctgggtggaggagaggtacacggacgacgagaagaacgccaagattctcgaagtggacaacggcaagccagggcggcacggttccaagcggcgcggcggcaaccatcaccagtcgccgtgctcgacgatgacctccgagcagaacagccggagctacgcgaccatgccggagtcgccgtccaaggactcgacgaccgcgcagcagtccgtgccgagcccgtcgtccgtgggcatggctgccgaggccctgagcccgctgcgcgtgccagcggacatcgccgagctctgcgacagcccccagttcttctcggcgacgtcgcggcccgggagctccaggagggggggcgcgttcacgccggcggccaagagcgagtgctcgcgcagcctcttcggcggctactccgactgccccaactacatggcgaacacggagtcgttccgcgccaaggcgcgttcccagagcgcgcccaagcagaggccgcagcagcagtacgagaagtcgggctccctccgcagggcgtcggcgcacgccctcgcggcggggccggcagcggcacagaggtcggtggcctcgttgcacgccatgaaggcgtatccgggctccggcagattggaccgacttggcatgccggtcaggtactgatccggatcctacctagctcgcttcaggataatgtggtgctgcgcctgaactgattgatacccagtgtctcaactcaagcgatgaggatgaagtgaattctactagtggtcgttattagatcttgttccttcggtggtgcctattaccgtcaacagttttctgtttgttgctttgtgtagcgaagtgtaagttgctggtacgtagctggtaatactatgcgtgcttaaccgcaaaaacgactcccctctacgtgatctccgtggtatatagctgctgccgtcaaaaccatgcatgtgaattggaaccaaatatattaagttaggagtactatgctgtatcagcgagcagtgcctct

SEQ ID NO: 15625 - DNA, 638 bp, Zea Mays
ggtgggaactataaaaagaagacgtctccgaatccgtctccgcctttcctgtctcctctcgctcgctctccccgtctcccgcacgcccacccgccgccgccgttcgccatgggcctcctcgactcgctgtaccgcgtggttgtagactacggagttcacaagatctgggagatgaacaacctcgggaaaaggtacgaagacataccagttttggggcagaggccagccgaagaatgatatactttggtcgccatttagctccggtttaaccgtttcattttcgcacaataataagctgtgtaaacttcttactctgctgctgagagctgcttcccattcattttactctgaacatgctgtgagggaatttcgtggtgcatggctgaaatctgttatatagagcatatgcaaatacgtctagaggattcctctctctgcccagttcgacattatccgtgcacgtatcctgccctttcaaaatgacaaaggtttctacggactaatttttagcctttctgttttagtccttaaattattaaatacagtgactaaaagagagattatctctattttagtccttatgtttggcaatttagagactaaggtgtcgtttgattcacatatttgtaatgtgatgg

SEQ ID NO: 15626 - DNA, 66 bp, Zea Mays
gcttgagaatccaaaggtggtggtgtcctttcttcggtgacttctatttcttcttcacgttctaac

SEQ ID NO: 15627 - DNA, 523 bp, Zea Mays
ctgttccactggacccaagagtgaactgtttgtttgcttactaggacgaacaagagttgatggaaaggagttctttcgtcatgtcagaaatcggttgtcgtatgagcagtttggtgcattcctggctaatgtgaaggagctgaacgcacacaggcagaccagagaggataccttaagaaaggctgatgagatctttggtcctgaaaacaaggacctgtacaccgtttttgagagcctaataactcgcaacattcgctaatctcctcaagggttgaagcattaccaatgattactagtgattcatgttttaccggtatattttggttacaatgttcaacactttttttgtatttgaagtctgtagtctgttgtggattcttggtatatagtctatagttctttctttttttttcatgctaatgtccatgtagagtcctctgtttctatgtaagctacaacttatattctaatacaaatgttgtctgatatttcttgaacataaataatagactagaaatgtgaa

SEQ ID NO: 15628 - DNA, 719 bp, Zea Mays
ttcagaacggtgatcggtatgcgggcgagtactttggggacaagatccacgggtttggcgtctaccgcttcgccaatggccactgctacgaaggctcctggcacgaaggcaagaagcagggatttgggatgtacacgttccggaacggcgacaggcgatcgggggactgggattctgggactctcaagacccccttgccccccgctgatccttccgtccagcgtgctgtacaggccgctcagcgtgctgcggagaacgcatttcgcctgcctagagttgatgagcaggtccacaaggcggtcatagccgccaacagggcggccacggccgctcgagtagcggcgatcaaagcagttcagaacaggatggatgggaagttttgcgatacctgtgtgtgaatcgctgcgtgcgagaccatgttctttttgtttctccttctaatctaactgtacattagggtagtgaaggacaataactaatcagagtgaggtcagacgaccggggcagcacaaccgcgtgctccgagtcagggttcatcaacgaacgggagcggacctggcaaaaaaaaaacatttgcgagaaacggctctgatcctgccatatcgccatggccatcggaggttcccttcctccttccttgcaacaagctgtaactgtacatagatccaagtgttgtatcaatggaagagcgagtttttccagcgccccttttcagtgct

SEQ ID NO: 15629 - DNA, 2314 bp, Zea Mays
tgatttgccagtaggatagaggaatcttttagaaggttgccctcttgagtgagtttgtcgatatctacggacaagtaagaaaagatggcgctgccatccatgagtcttgtggcaaagggtgtgcttcccttctcagcacgtacctcgagtggtgtcacacaaaggccggtgtcagtgactgcttccttggagcacaaaaccagcgatgccagaaggaagttcctaaaacttgcgcttgggaaccttggagttggactgcccaccttgttgggcgctaagaaagctctcgctgatgagcaaggcgtctcgtcctcgaggatgtcttattcgaggttccttgagtatcttgacaaggatagagtgaagaaggttgatttgtttgagaatgggacaattgctattgtggaggccatttctcctgagcttggtaaccgcgtgcaaagagtccgtgtgcagcttcctggtctaagccaggagcttcttcaaaagttgagggagaagaacatcgattttgctgctcacagcaaccaggaggactctggttctcttctgttcaaccttattggaaatttggcattcccgcttatccttatcggtggtctgtttttactttcaagaagggcacagggtggcctcggtggacccaatggtcctggctttccccttggttttggtcaatctagggccaagtttcagatggaacccaacactggtgttacatttgatgatgttgctggtgtcgatgaagcgaagcaagacttcatggaagtggttgagttcttgaagaaacccgaaaggttcactgctgttggtgctcgcattcctaagggtgttctgcttgtcggtcctcctgggacgggtaaaactttgcttgccaaggcaattgcaggagaggctggcgtgccatttttctcaatttcaggttctgaatttgtggagatgtttgttggtgttggagcttccagagttcgtgaccttttcaagaaggccaaggagaatgctccttgcatagtgtttgttgatgaaattgatgctgttggaaggcaaagaggtacaggtattggtggtggaaatgatgaaagggagcagactctcaatcaactactaactgagatggatggtttcgagggcaacactggaattattgttattgctgccactaaccgggctgacatattggattccgctttacttagacctgggcgttttgatagacagcaatgagaacacctgggttcagcggagcagacttggcaaaccttctgaatgaagcagccattctggctggaagacggggaaggacagcaatttcttcaaaagagattgatgattctattgacagaattgtagctggtatggaagggaccgtgatgacagacgggaagagcaaaagtcttgttgcttaccatgaagttgggcatgcaatttgcggaactttgacgcctggccatgatcctgtccaaaaggttaccttagttccaaggggtcaagctcgtggtcttacatggtttatcccgatggatgacccaacactcatctccaggcagcaactttttgccagaattgttggcggccttggtggtagagctgctgaggaggtcatatttggagagcctgaggtgaccactggagctgctggtgacttgcagcaaattactggcttagccaagcagatggttgtgacattcggtatgtctgaaattggtccatggtctctgatggagggtggagcgcagagtggggacgtcatcatgagaatgatggcaaggaactccatgtcagagaagctcgcggaggacattgattcggccgtgaagcagttgtcggatgaggcctacgagatcgctttgaggcacattagaaacaacagggaggccattgacaaaatcgttgaggtgctcattgagaaggagacagtgaccggagacgagttccgggcgatcctttctgagtttgccgagatccctgttgagaaccgggttcccccagccacaccggcggccgcgctcccagcctaaaccctagccttgtaggggaggattttcttgttgtatggtgttcatattttggattcttggtgtacactaactctactaaatctgccggattttcggtacacgacatgtaagatgtaacttactcatggtgaattaatagtaaaatgtaattagattaaaataataggcctggcgcaacattttcagtttgtagcttcgcttctggcgagcgaaatctcttgctatatgttccacggttcctacttcataaaactatatgttctaattaagaacttgccattttgtttttggaactg

SEQ ID NO: 15630 - DNA, 3247 bp, Zea Mays
gcatccacgacgacgcccccaacagaatacaaaaataataataaaaaaacccacaggtcacgaatggataggtagatcgctcgaagcgattgaaaaatctgcctccgacaattcctagcgcgattcagcagctgcctcggatcggatcggatcggattggaccggcgccggaagaggagaggaggcgtgggggggttcggggcctgcctcgctgccgcccatgtcccgcatgaaacacctgctacgcaagctccacctcgccgggggccccgccggggccggggccgggggcgcggcgcccgaccaccaccgctcgaggcaccgccgctcggggcatccgacgccgccgccgccgggggcggcggtagcggcccccgagccgccgcaaccggcggttactcctgccgcggctgtgtcgatcgcccccgcggtggaggagcctagaggcctcgaggcggaggcggccacgacgcggctggaagaggactaccaggtgcgcctcgcgctcgccatctccgcgtccgaccacgcggggctcgtcgacgcggactccgtccagatccgcgcggcagagctcatcagcctcggggccggcgcggggtccggacacgaccggagccccgcggaggccctctccgcgaggtactggaaccacagcgtagtcaactacgacgagcagctccccgatggcttctacgacgtctgtggcgcgcagctgcatcccggattccaggccaaattcccctcgctcgaatacctcagggctgtcccgcttgggcgtgatgccccgttcctggccattttggtggatcgggagcacgaccctgccctaaaacgactggaagatagggctgcacagattgctgcgcagactagggcaggacatggtggtgctgcttcagctgagcttgcgcagaagattgtgggtctcattgttaatgcgatgggcggtctggttgaggatgctgatggtatgaacagggagtggagcatcaagagccacgagctctctctccagctaaacagtgtcgttcttccacttggctcgcttcgggttgggctgtcgcggcacagatcactgctatttaaggtacttgctgaccgagttaacctaccatgtaagcttctgaaaggaatatgttataccgggacagatgaaggagctgttaacttggtcaaagttgattttgacagcatggaatatattattgatttgatgggagctccaggcaccttaatcccttcagacatttctgggagtcagtttcaggactccaacaatagccaattgagcagtgatgccattgaagagagtgtagcagaattgtgcttagcccttgagcagattaatggtggatatgagaacaaaaatactattggaggatgctcatctggtcacagttctattttagcgctcacgagttcacacctgggagatttatctcagacagaacttaaacaaaatgttgtttctgagaaaaaaaatgatggggatatttctgagcatgttaaggtcgatgatgtttccaagtatattgtgcctgaagtagtggacccacagtttgcacaaaatttgcatgacttacttttggagagtggtgcattgctaccctcggatttattatctgatcaaaataatcatgacattcacgagaaagagagtacaggatggttattagttgctcaaacaacacaaaatttgccaaatgcttttgtagctaaagattcgtcatcgcctgatgaagatgaacaaccccgtgcagaaaatacagaagcagccatcagagatttggatttgcatggtcatactgctagtgttatttccaatgaggatcaaatggttgctggttctttggtgaacatgtcaggaagtagcaatggaaatttggacacgttgagttggtctagtgtaaaaacgatcagctctgttatagatgatatcgctgaatacgaaataccatgggaagatcttgatattggagaacgtattggtttaggatcatttggggaagtttatcgtgcagactggaatggcacggaggttgcagtgaagaaatttcttgaccaggatttatcaggtgtttcactagagcaatttaaatgtgaagtgagaatcatgtcaaggctaaggcatcccaatgttgttcttttcttgggatatgtgacacaatcgcctaatctctctatattaactgagtacctcccaagggggagcctatatcgtctgttgcataggccaaatagtcgaattgatgaagtacggaggctaaaaatggcattcgatgtggcaaaagggatgaactacctgcactctagccatcctaccattgttcaccgtgacctgaaatcccccaatcttttagtggataaaaattgggttgttaaggtgtctgactttggcatgtccaggttgaaacatcatacttttctttcctctaagtcaactgctggaacaccagagtggatggcacctgaggtactacgaaatgaaccatctaatgagaagtgtgatgtctacagctttggagtaatcctgtgggaactagcaactatgcgtgtgccatggagtgggttgaatccaatgcaagttgtaggagcagttggattccagaacaggcgactagagatccccaaggatgtggatccacaggtggctagcataatatcttcatgttgggatagcgatccgagcaaaaggccgtcgttctcccagctcttgtcccctctaaagcaactacaacatttagttgttacagaaagctgctgacatgcgtttcctgggacaaatctcaggatacatatattcaagtatttaagctctgttacagggctaaaattttcttttttgaagctcgtggaggagtctctgcggtatagatgtgtttgggcgaaggttctgcacatcagtaatcatcaccttgtgaaaatgcgagtctctgaagccgtgcaaaggcgctgctggagaaagcgtagtgtgtagtctcaagtgaagaaaagtggtgcgacacaaagtgttctgtgccatggtaaataattgttcagttctggatttgaacgggtgataaattcaccacaaagataggatcttgaagttttttccccttgccttacaaaagatggaaagtgaagtgaaaaaaaattcacggtgtctgcaaaaagtcgcagcccgatgccacgtgaaaatgtatatgatgtaatacagttgctttggaaaggcaaacataaagttcacagttttgttcgataa

SEQ ID NO: 15631 - DNA, 1883 bp, Zea Mays
gcacgcactcgctcgctcgctctcatacccagctgacaacgaagaggtttagagagagagagctgagagaatggccgacagcaggagaagtgtagtgtacgatgctgaaggcggcgacgatcatgagagggacggcgtggacggcgacgtcgcacatcgtggcggcggtggtgggctccggcgtgctggcgctggcgtggacggtggcgcagctggggtgggtggtgggtcccctcgtgctggtgggcttctcttgcgtgacctactacacgtcggcgctgctcgcagactgctaccgctacccggaccccgtccacggcgccgtcaaccgcgagtacatcgacgccgtccgatgctacctggaccggaagaacgtggtgctgtgcgggtgcgcccagtacgtgaacctgtggggcactctcgtcggctacaccatcaccgccagcgcaagcatgatcgcgattaagcgcgtcaactgcttccaccgggacggctacggcgccgccggctgcaacccgtcggggagcacgtacatggtggtgttcgggctcttccagctcctgctgtcgcagctgcccagcctccacaacatcgcctggctgtccgtggtggccgtggccacctccctgggctactccttcatcagcctgggcctgtgctccgccaagtgggcctcgcacggcggccacgtgcgcggcacgctggcgggcgccgccgccgtggccggccgggccgacgacgacaagcaggcggccttcaacgtgctcctcgcgctcggcaacatcgccttctcctacaccttcgccgacgtgctcatcgagatccaggacacgctgcgctcgccgcccgccgaaaaccgcaccatgaagcgggcctccgcctacggcctcgccatcaccaccgtcttctacctcgcgctcggctgcaccggctacgccgccttcggcgaccacgcgccggggaacatcctcacgggcttcgccttctacgagcccttctggctcgtcgacgccgccaacgtctgcgtcgtcctgcacctcgtcggcgcctaccaggtcttcgcgcagcccatcttcgcgaggctcgagtcctgcgtcgcctgccgctggcccgacgccaagctcatcaacgccacctactacgtgcgcgtgccgccatgcctcctcctcctccgcacgtcgtcgtcctcgtcgccgccgcccaccctcgccgtcgcgccgctcaagctcgtcctgcgcaccatcgtcatcatgttcacaacgctcgtcgccatgctggtgcccttcttcaacgccgtgctgggcctcatcggcgcgctcggcttctggccgctctccgtctacttccccgtcagcatgcacatggcaaggctcaacatccgacgcggagagatccgctggtggatgctgcaggccatgagcttcgtctgcctcctcatctccgtcgcagccagcatcggatccgtgcacgacatcgtgcacaacctcaaggccgccgcgccattcaacactgcaaactgattaataaacatgcatttactagtatatatacggatcggatcggaggagtgatgggttaattagtttcttaattagctttggctactatatctatcagtatcagagtcagaggagcagagggccggccacatgcatggcctttttgtgtttcttgattatatatctggcaaatttgatctgtcgagcagattttcatgcatgcatgcatgctgctaattcggacgtacgttgaactagtaataatattattatttgtaatgtaaccccagcaatgcaatgcaatgcaagaagcaacaataatatttgccaaacctcgttctcattattatccgctagctgctagtagtgttgtgtcaatctcac

SEQ ID NO: 15632 - DNA, 822 bp, Zea Mays
ccacccgctccctgggcggaagccctcaggaagccacgcgcacaccgcaactggtcgacgacgacttcctcgtctctctcctccggcctcgagtcgcctccgatccgtccgagaaaacaaaacaaaccgaaagaagaaaggcgacgaggaagagaaggctctccgcgagatctgggggagctcccattctcaagatgcacgacttctgcttcaccatcccctacgggttcgccgtgctggccggcggcgtgctgggctacctccgccgcggcagcaccgcctccctggcggggggcgccggcgccggcgcgctgctcctcctcgcgggcttcgtcagcctgaaggccttcgagaagagacgcaactcctacgtcgccctcgcgctcgagactttgtgcattagccttaactttcgttatggggcaaagattcctcgagacttcgaagattatgccagctggtgtcgttgctggcctcagtgctgtgatgtccgcgttttatctgttcaaaattgcaagcggcggcaaccacatcccaccaaagaaagagtaaactggactctaacttgtaaagtatgttcgattgaactcggaagactacgagccactgcgttatctagttgcatggtaacttcaggtactagcatcttgttctccatttgtggtgtggctagagtgtaccatggtttgtgaacattgtaaaagaaataagtatgcggttcacggaaatgaatatgaacttccctgtggcggcaggcgcgaaagaattaagaggtctaaacgtggaatatgtctaaaagtgtgtgaattatgttaaaataaa

SEQ ID NO: 15633 - DNA, 1232 bp, Zea Mays
ccggaccggcgtggatatatgatttctgtcctacccggccgtgacggacttcctccagtcggggctgttccggtgggccggcgacgccagctcgttcacgggcgacgcctacatcgagctggtgtgctcgccgaacaaccccgacggcgccatccgcgaggccgtcctgccctccggcggctccggcgtagcggtccacgacctggcctactactggccgcagtacacggccatcaccagacgggccgaccacgacatcatgctcttcaccgtgtccaagagcacgggccacgccggcacgcggatcgggtgggcgctggtgaaggaccgcgacgtcgccaagaggatggccaagttcatcgagctcaacacgatcggggtctccaaggactcgcagctgcgcgccgccaaggtgctcggcgcggtctccgacgcctacgagctcccggaggcggcccagcaccgcctgttcgactacgggcggcgcaagatggtggagcgctggcgcgtgctgcgcgaggcggccgccgcctcgggcgccttcagcctgccccacgagacctcggccttctgcaacttcaccaaggaaacggctgccactaaccccgcgttcgcgtggctgcgctgcgacagggaggacgtggaggactgcgcgagcttcctgcgcggccacgggatcctgacgcggagcgggagccagttcggcgcggacccgaggtacgtccgggtcagcatgctcgaccgggacgatgcctacgacatcttcgtcaagcgcctctcctccctgcactgaacaggccgggtcggctacacgcatgcatggcatggagatgggaggaggatcgatgccatgccgcccggccggcgtcggcattgccggtccgtggaacagtgtgagcatgcgccatgatcgagtagtagagggcagcagtgttggtacttggtaggaacaagggcaggaggagcaacgctttgttttgctcttttctcctctatatgctgtgtgttgttcgggatccttataatggtttcatttttttccccttgctgtttgattgctatgtgagactgaaccgacgtaacaaaaagtagtcaacataaattggacaaaggacaataaaagattgttggaacatcacaatccaaaccaaaaaaaaaaaaaaataccggtacactctgttcgatcggaatgcttggcgctctctgaccagtagttttagccttctgctgta

SEQ ID NO: 15634 - DNA, 1258 bp, Zea Mays
atctgggcgctggagatggatttgtggtcaacaggacagtggaacaacgcaaaacagtggcaaaactgattatgatcgcactgcatccattattgatggcaagtccattgcagaggacatgaggttacatattgctgaagaggtctgtcaaatgaaatgttcagttggacacgtgcctggtctagctgttgttttggttggtgatagaagagattctgaatcatatgtgcgatacaaaacaaaaggctgtgaggaagttggtattaaatctttgttggcgaagttgcctggaaactgttcagaagatgaagtgatggattcagtgtcaagatttaatgaggatccatctgttcatggcatcctagtgcagttgcctctaccagagtttatggatgaggaaaagattctgagcatcatcagtctgaataaggatgttgatggtttccatcccttaaatgttggcaatcttgcactaagaagccgaaatcctttgtttgtgccctgtgctgcaaaggcttgcattgaattattgctccaatctgggattgaactgatgggcaagcatgtatctgtcattgggagaagcaaagttgttggattgccaacttccttacttttacagcggcatcatgccactgtcagtgttatccatgccttcacaacaaatccagaggctattacccgcgaatctgatattgtgatatcagctgctggagtggccaatcttgtaaggggaagctggttaaagcaaggtgcagtggtgattgatgttgggacaaatccaatcgaggatccaaccagtgactacggttatcgcctaactggggatgtctgcttcgaagaagcagtgaatgtggcctctgctataactccagttcctggcggagttggaccagtaacgattgccatgcttcttggcaacacacttgattcagcaaaacgcgtttatggcctaagtgactgaaactgacccccctctgaactgtaattttgtcgtgcttgtcctttgtaaactagttctcttctcttttcaacctcccgtcgctctctattttagctgtaggaggagggctgggatgtaccatattcttgctcaataagtattgtattagctgtgtccattaggtaagtttttttgtgtgtgaccatattagcctgttacctatataaccaacacacaatagcaggaacatgtcttcagacacgatttatttgcatttttttataagagaaataggcctgactgacaacattattg

SEQ ID NO: 15635 - DNA, 2016 bp, Zea Mays
ccaaaaccctaacctgccgcgcgatcaaaggatgccggagggccacgtgccggcgcctcccccgccggccggtccaggccgtccgtttctccggtggggacaggacagggacgactatgcagccacagctcggcggtcgacgcatcacacgggcgcaacagtattttagctgctgctcgtctcatctctgagactctgacccagtgaccatgatcacctagccgagctccgtccctccatctgcctctctctctttcttcccgcggcctgtgcccccagattgccgcggcctccggctccgcccctctcctccagcaccagcagtccatctccggctctcttccctctcgttaggcgctagctaggctctagcccctagtctggtcctgcccgctgtgcctgtgcggctgtgcgtgcacagcgaaggcgcacagctagcggcttctggccactgggcgtcgccataaacagtggagattcccgcccccattttcccaattatggatatccagcggcgaccgggggagcactgctgaggccgctcgcccgcccgcacgccattgctcccgtcgagggtcacaacttatcctacacatcgtagctccgcgacctgttcggcaaaatgaggccttcagatggcaggacgcagctttcaggctttgcacaatcagatgaatcaacacttgatgtggaggggcattgctaccaccagcagtcattcccttcctctccatcgatgcaaccgattgcttctggctgcacacacacagagaacagcgctgcgtacttcttatggccaacatcaaacctgcagcattgtgcagccgagggacgcgcaaactacttcgccaacctttcaaagggactgttgcccaagtctggccggttgcccaagggccagcaagcaaatagcttgcttgacttgatgactataagagctttccatagcaaggtgttgcgttgctttagccttggaacggcggtgggcttccgcatcaggaaaggggctctgacagatatccccgcgattctttgctttgttgctcgcaaagttcacaagaagtggcttaatccggaccaatgccttcctgccattgttgagggtccaggaggtatttggtgtgatgttgacgttgttgagttctcgtactacggtgcaccagctcaaaatccaaaagtgcaaatgttcactgagcttgttgataagttgtgtggcagtgatgaatgtattggctctggctctcaggttgcaagtcaggacacttttggaactttgggcgccattgtaaaacggcgaactggcaacaagcagataggtttcctcaccaaccgacatgttgctgttgacttggactacccaaaccagaagatgtatcacccattgccacccaaccttgggcctggtgtttatcttggagctgtcgaaagggcaacatctttcatcacagatgatgtttggtatggaatctatgctggaacaaacccagagacatttgtacgcgccgacggggcattcatcccatttgctcacgacttcgacatctccacagtcacaactacagttaggggtgttggtgacattggggatgttaaggttatagatctgcagagtccacttaatagcctcatagggaggcaagtatgcaaaatcggcagaagttctggtcacacaactggaactgtggtggcttatgcccttgagtacaatgacgagaaaggaataagcttcttcactgacctccttgttgtcggcgaaaaccgccaaacttttgatctagaaggtgatagtggaagccttattatcctgactggccaggataatgagaagccgtgtcccattgggataatatggggtggcacagcaaaccgtgggaggctaaagcttaggtgtgaccatggccctgaaaattggaccagtggagttgatcttggccgccttctggatcgtcttgaacttgaccttatcataaccaatgaatcactcaaagataactgacagaatttatcctcgataaa

SEQ ID NO: 15636 - DNA, 1099 bp, Zea Mays
ttaacccctgcaggcatgtggcctgtgctatctaccgttacacggcgagctacagagttgtcgccacaacattgtagtgtccgcagaggatggtgccgacatggcaagataaaatcctggtccagcaagatccgttcttccaaatgggatcaggtgattggctccagctcctcctcccctcagcaccaccagtccccctctgctcctcctttcagtctcagcccaatgacaaagttctaagcagagtagtgcacgggcagcacggcaacggcatagcacctccctccaccgatcatccagttccgcttgcgtaacgacttcccttcgcaagcaagcttcccgttcagcccacccgcaggccgccgtgctcgcgcgaccatggcgttgctctccgccacttcgcccgccaaggcgcacctctcggcgctcctctcctgccacgacgagccgcagcagcaccaacacgcgctcccggtcccgcacccgcgctgcttcggcggcggcaaggccaggcggcgcgcgcggggcaggtgcgcggcgtcaatgcggccgcccgacgcgtccgtcgctcccgcgtccgcgcccgcgggcgaggcgcggcggaagaagaagccccgggtgctggtggccggcggcggcatcggcgggctggtgttcgcgctggcggcgcggcgcaaggggtacgacgtgacggtgttcgagcgcgacatgagcgcggtgcgcggggagggccagtaccgcgggcccatccagatccagagcaacgcgctggccgcgctggaggccatcgacatgtccgtcgccgaggaggtcatgcgcgtcgggtgcgtcaccggcgaccgcatcaacggcctcgtcgacggcatgtccggctcctggtaccgggtatttctgggccacaaacagtacttcgtctcttcggatgtcggtgccggtaaaatgcaatggtatgcttttcacaaggaagaggctggtggcactgaccctgagaacggtgagtgcttagagaagttttcaagcttaactagtgaaataggcactgcctcattgtaagttgtgatgaaaaatgagaacaaaacttctcaccccacaagttcac

SEQ ID NO: 15637 - DNA, 2891 bp, Zea Mays
ggacaagatgcaactgcaaaggccttccaagcagaaggaaaggtctcttcagatccagttgccattgatgcacccggtggctttcttttcgagtggtggtcggttttctgggatatattcatagcaagaactaacgagaagcattcagatgttgcagcctcatatattgagactcagctcatgaaggccagggagcaacagcagccacaaacacctcaacagaggcagcagcaaccacagcatatacaaatgcaacaaatgctgttacaaagagctgtgcatcagcagcaacagcagcaacagcagcagcagcaacaacaacaacaacaacaacaacaacctcagcagcagcagcagctgcaacagcagcgcagagatggttctcatcttctcaatggttctgcgaatggaatttctggaaacaatcctttaatgcgacaaaaccaaagtactgcaaatgttatggcaacaaaaatgtatgaggaaaggttaaaggtaccttcccagagagactctttcgaagaggcatcattgaagtatggttgcagcaaagatacggagagaacgctgggcaactacttgattcaaatgaagcatcattgttgaaagcagcttcaagtgcacaatcctcagggcaaattttgcatggaactgttggtggcttatcaggcactctgcaacaagttcaggccaggagcccccaacttcctgggcctgctcagggtatcaagacagagattaatcacgttctgactcccagaggtgcaggcccagaagggtcatttataggtgtccaaggatctaatcaagctgggaacaatttgactctgaaaggatggccactcacgggacttgagcaacttaggtcaggaattcttcagcagaagtcatttatacagaatcaacagcaattgcaccagcaaatccagatgctgactccacagcagcagcagcagcttatgctgcaggctcagcaaaatatgtcttcaccaacatctagtgacgtcgacaacagaagattgaggatgatgctaaatagaaatgctgttcttggccgggatggacagacaaatagtggtagtgatattattccaaatattggctctcctagtcaaagtggcggagatatagatatgcttataaagtagaagaaacttgctcagcagcagcaactattacaacagcaaagcaatagccaacagctcccacagcaacatcagcttcagcaacctgctgtctctagccagcaatctcaaagttcaaatcaacatcttcaacaagaaaaactaggaattggaagtatgcctgttgatgggggcataccaaactcatttgggggagctgaacagacagcgaaaaagagaaagaagccaggctcatcctctggtagagccaatagttcaggcacagccaatactgctggtccctctccaagttctgcaccctcgacaccttccactcatacaccaggagatgcaatgtctgtgccacagctgcagcagaatggcggttcagctaaacccatggtaatgtttggctctgatggaactgggagcttgacatctccagcaaacccattggatgatgtggaccgtttgctggaagatggctcattggatgataatgttgaatcttttctatcacaggatgacatggatcctagggacaacttggggcgatgcatggatgctagcaaaggttttggtttttctgaggttgccaaagcacgtgcaagtgcagccaaagttgtctgttgccacttctcagctgatggtaagctgcttgctactggtggtcatgataaaaaggttactttgtggtgtacagattctctgaagcctaaatccttcctggaagagcactcgtttcttatcactgatgttagatttagcccaagcatgtcgcgccttgcaacatcctccttcgacaaaactgtgcgggtttgggatgcagataacactgactattcactccgaactttcacgggccattcagcatctgtcatgtcacttgattttcatccaaacaaagaggatatgatatgctcctgtgatggtgatggggaagtgcgcagctggagcataaataatggtagctgtttgacatgtgttaaggtgtttaaggcaggtgctactcagatgagatttcaacctcgtaagggaaagtatctagcagctgcctcagagaaagcaatctacatacttgatggggagacacaacatgcttgtagaagccccttgcaggggcacaataagaatattcaatcgctttgttgggactctgctggtgaatatctggcttctgtcagtgaagactcagtcagaatatggtcattcagttctggacgtgatggtgaatttgtgcacgaattgaatcgcagtggaaatcagttccactcatgtgttttccacccaacttatcaatccttgttagtgattggttgttacgagtccttggaactttgggacataagggagaagaacaccatgaccttcaacaatgcgcatgacggtttggttgcagccctggcagcatccagtgcaacagggaaggttgcctcagtaagccatgataggactctcaagctctggaaatgacttgtatgaaacccatgttggacttctgtattctggctgttagatgatagacaaacaagactttgccaaaaatgaccacatgacgaaaaggttgctgacaagatactctggagccgcgtgggctcaagaactaacagtgttttgttttgtggtcgttgtatgctgttcagtatgccactgaagcttgtaacttgtaactcgtaatagaaactttggttgaagaaagattgtacctcggacaagtggcaaatatttattctctaaaatattctgcattttgttttttgaccttgt

SEQ ID NO: 15638 - DNA, 1008 bp, Zea Mays
gcccgattagcctcctccgttgcagctgcagggtaccatggcaagatcactctccaccgccctcgtgaggggacttatgagatcgtcccgtgcatcgacatcagctgctgtgtcacgaccagctatccagcagtttatgaactattcatcaggtcttagtggcactcctaatgcaaatggggactcagtgacaacacgagtagctgctgatcacgacacccatcaagattttcagccaacaagtaaaagttcagatatgtctttcagtgacattgttgctcaggatgtgaaggagcaccctgttgtcatctatatgaaaggttatcctgatgctcctaggtgtggtttcagtgcattagcagtgaaggtcctccagcaatatggtgtccccatcagtgctagagatattctttcagatctaaagctcaaagagagtgttaaagcatacagtaactggcctacgtttccacaaatatttatcaaaggagagttcgttgggggatctgatatcatactcaccatgcaccagaagggtgaactgaaggaactgcttggcgatattgcacaaaaagccgaacaaagtggttcttcatgaaacaagcatcagtatttgtgatgcaaacttcccggactggatgttccttctcagaagattttaggtgatcttgcattgttgccctgtggcttcggatttgaatacgttctctgttttgttctgttctgttcttgccagttgtgatggaagatccactcaaggccgaattgcaggagtaaccaaagttatagttctcgataaataaatgccaatgctcgacactattcttttatgcatctagctgcctgccttagcttaagcttgggtgctttaagttgcttttaaactgaacggtgctgttgaaacatgtaattagtatgtgacatgcttatacgctctatgttttgttcttttttgacatcaactctgtttgcagttctactcaaatagatgtactgctttgttccaccacc

SEQ ID NO: 15639 - DNA, 137 bp, Zea Mays
gcgccgacgacggctgccgggggcgcctagggcccccgggctttggtcgccggcgcgggcgacaacggtccacgccccgagccgatcggcggaccagcaggagccgttccgcatacggccggggcgcgtcgccagcc

SEQ ID NO: 15640 - DNA, 558 bp, Zea Mays
gttggtccaagctcctgttctaggtcttcctaacgacttcagcaagggtttcgtgctagaaacagctgtcttcatgcaatcgaagaatctcgtggcttatttgaataagcacctttgtccaagaaaccaagcttcatcgaggagtgtttggcaatctttatggcaattattgacgaatggcggccatacttgcagcaccgtcaaatcgtgattgtactccatcttactgagcagagggtgaccttacgtttgtagcataaagtcctgctcaagctcattgacttgcattatcaaattcgcacaaacaggcaacggctgtaccgagcgactgatttggcacatatatatataagccgagacagtgggagaggagagctggacaacaggcaacgaattgtaattgaatcttctgaatactaaaggaaagcggtcacatcccattaatttgcacggtctctgtgggctgattccccacccttactcatccttatctctcatttcaaacttgtaaacagtacagtctcccatttatatgaatctatcattatgtatacgacg

SEQ ID NO: 15641 - DNA, 2177 bp, Zea Mays
tttttttttttttgggttccgggaccttctggcgcgggaggatggcggtcgtggaccagtcgctgctgccccagatccatgccctcttctccgacccgcttcgcgtggtttcgtacaaatggctcagtcggaacttctctgtgtcatcaaatgatgccaagaggttgcttcaggactttgtcaacaaacatggaactgacctccaagtgatttacagtgtgtcggggtggttgaagagcaatccccaaaactattgtgtaaagctcatttcaggcccaaaacttgaagaagcaaggcaaattttcaaagattcttgttcagttcagatctacagtatccaggcctgtattccaaaagatacagctgtactttggaatcctgaatttgtgcaggcagaggagcttttcaaccagccttttgattatgagaactgtttgagagataataggttttgtggtgttttgaattcttttgtcaagcgaacatccaatggaaagcatgtgagttcattgccaccaaagcccttgaatagtgctgcagccgccgcgcagtctaagcctagtgttactccaaaggagcagtttgttactgctcgacggcaagatttgcctgtaagttcaaagcagggagcagacactaagtccgagaaggataattccacagtattagataaggctggcaatggtcctgttgtcaaagaacaatcagttgatgcccatgcaagcaaaagtaaagctcaaaatggaaaggccatgcctagtaatggtggatcactggctaacatgtggggccgtgcatcagcaaaacctaagcctccaagtaccactaattctacagctgtagcaagtgttgcagctactgctgatgcacaaatttgtgcaaaggaagaagcagatggaaatagcagcgatgatgaacatgggataaagtacaagaggggatccactaatgcaaataacagaaagagaagagcggtatttgattattcggatgatgaggaagatgacaatattgtaagcattgcatctcctgagctaccaaaacagcataccccagaccctgttgttggaattgctgaagacgctgaagtaaatcaaaagaacttggaaactgaacaccatgtaccaaacaatgggaaaggttcctcaacgggggtggattctgacttcacatctgaatgtaaaatcaaaacgatcgatcctatgaacgattctgggattactttaaaagaaaagagcagtgatcctccaatcaatgacaagaagcaggattctgctgctgagcctgcctccacctcaccaaagaggagaaaggttttgaagacacgcatagatgagaggggaagggaagttaccgaggttgtctgggagaatgaagcttctgcagatgacaaggcagagcagaatgtcaacactattgatgcgactgcaagcggggcgactgtcccaagcaaaccgaagcccgcaacaaacgctgacaaaagcaaagctccaagcaaaacagcagcaggcaacaagaaagctgcgaaggctggagccaagcaagggagcattatgtcgttcttcaagaaagcatgagccagcggggggtgcgcatgcaccaaaatgagacaggacttggttaagcaaactggcagtggcagttatacctgaacattgtcagtcaggccggcgagcaagaagggctgctccaagcaggcgaccgttagctgtatcgtttgttttagctagcgtagcgatggttgagtcaagcagcagagagcacgcattctagctgaggtagtactatcttgctgaagatgtacacgtacacatatacaataactgttgtctactgtgctgtctagaagagtaaaggtccaaggtggaagggcggaacagtttgagtacctgtgtctggttggtatggaccccactggaagagagtgcacacaccatcatggtcttggagggtgcgagctgggcaccggtggcgtagcaagccagcaaacggccgacagcaacgtagggagggagttggagagccagagccaccccatcgtatcggtatcgcgactcgtcaacacatgtttgctgttggtcctacaagatgacgattcatataccagcttggagttggagagccagagccacccctgcggccgaccgaagccagcggctaagcagctaaatgcctga

SEQ ID NO: 15642 - DNA, 1164 bp, Zea Mays
cattaccaataaggaaatttactttagaaggcttcattattgttatcaaggatctctcccaaaattgttggtgaaccgatggaagctaatagattttatgatgctgtcagttgtctgatgtcttatatgaatgataatggcggtttcgcgacatatgaactcacaagatcttatccctggttggagctgatcaatcccgctgagacctttggggatattgtgattgattacccgtatgttgaatgtacatcagcagcaattcaggccctgacatcattcaaaaaactataccctgggcaccgcaggaaagaggtggataactgtatcagcaaagcttccaatttcatcgagagtattcagaaaagcgatggttcatggtatggctcttgggccgtctgtttcacatacggcacttggtttggtgtgaagggactaattgctgctggtagaacatttgagaacagtcctgcaattagaaaggcatgcgactttctgttgtcaaaagaacttccttccggtggttggggagaaagctatttgtcatctcaagaccaggtttacaccaatctcaaaggcaaccggcctcatgcggtgaacactagttgggccatgctggcgctgattgatgcgggccaggccgagagagatccaacgcctctacaccgagcagcaaaggttttgatcaacttacaatcagaggacggagaatttcctcagcaagagatcataggagtgttcaacaagaactgcatgataagctactcccagtacaggaacatcttcccgatttgggctctgggtgagtaccggtgtcgagtcttgggggctggcaagccttggcggtgaacgggaggtgtgtgtgtgtgtgtgtcatggatcagcttttgtgagtagccatgtggaagttggaataatgtagctacgttacgttcagggggttgcgttactagtggtcctagtaataatagtgatggtgatagtaatgtactcctcattattacaatctcaaagcggttcatgccattgccatgcacatctcagatccgagtcacgcacttgagagagttcaaggattgcaagtatagttgggagaatcaaatccaatcggcttattgtctgctcatctcaggtgtcaggtcttttcagccacacacacatacacat

SEQ ID NO: 15643 - DNA, 967 bp, Zea Mays
gcctagactccttgagccttctcgtctccccccttcgtccgcaccctataacctttgcatcatcttccttgcccgcgccctaacccttgcaccctcctccttgctgccgccggggccgatctccgctgccgccagccatggaggacttctgcgtggtgtgcgcagatacgctggagtgggtggcctacggtccgtgcggtcaccgcgacgtgtgctccacctgcgtcgctcgcctccgtttcgtgatggacgataagaagtgctgcatctgcaagaccgtctgccccttcgtcttcgttactaaggccatgggtgaatacactagagtggttgctgatttctcagtgttccccattggggtaaatgagggcaaagctggtgatttctggtaccatgaggatactcaggcatactttgatgatgtggaccactacaggatgatacgggcaatgtgtcgactttcttgtagcgtttgtgacaatgcagaagatcaggttgcccttgctgctcaagcaaagcgcagaagcaagttcaggagcatcgatcaactaaagggacatttattccatgtgcataggttgcacatgtgcaatctttgcttggaggggaggaaggtgttcatttgtgaacaaaagctttattcaaggtctcagttagctcagcatatcaagactggtgactctgaagtggatggctctgaggtagagcgcaatggttttgctggtcatccattgtgtgagttttgcaaaagttcattttacggagataatgagatttacatgcatatgtccagggaacactattcttgccacatatgccagaggcagcatcctgagcagtatgactattttcggaactatgatgaccttgagttgcattttcgaaaggaccattttctttgtgaagatgaagcatgcttggcaaagaagtttgttgtttttctgagtgaagcagagctgaagggcat

SEQ ID NO: 15644 - DNA, 1923 bp, Zea Mays
ttcgctgttcgttggcctttcctgccccaagggtgcaccggtgcggtacaggcagggcggcaagatcaaccaccagcaaatcacaagaacaagagaagaatcaatccgacagcacccctctccctcgcatctacttgctcgcccagcagccgccccaaccctcgcgtccgcatcgattcgaggcagctcgctcttatatatcccattccgctcggttggattcagcttcccctcgccctccctcgtcgataaaaccgatgcaccgtgccgcctcgcgaaccctagcggcggcgggacgaggggaagaaggttacaggcacggcgcgtgaagggtcctgtcctgcccagtcccgtctggtccgccgcgatgccgtggcccgagatgtggctgcctcccgcggccggggagggggcggtggcggcggggctgtttctcgatggcgtcgatgggacggcgcacggcgcgctcctcgcggccatgcccgggtgctccctgtcgttcgggcaccagcatcggcgccgacgtggggcgccgctggggtttctgtcgctgacaatgtcggtgaaggggggtagggggttcgcgccggccccggttgggttgctccccgacgcggaggagaaggccagggcggaggagtcggacgcgctggtcgcggggaagagggctgtggaagtggccgcggaggcggagggagtgattctgctgcaggagaaggagaagaaggacggtcgtgctggagctggagcgatgaacgtgagcaagcatctctgggctggagcagttgctgccatgatctcgagaacagttgttgctcctcttgagaggttaaagttggagtatatagttcgtggtgagcagaggaatctatttgagcttatgcatgctattgcaacaacacaagggttgaaaggcttttggaaagggaactttgtcaacatcctccgcactgctccattcaaggcagtcaacttctacgcatatgacagttacagaaagcaactgctcaaatggtctggtaacgaagaatctgcaaactttgagagatttattgctggtgcttttgctggtgttacagcaacgattatgtgcatacctatggatacaatcaggacaaagatggtagctcctggtggtgaagctttaggcggggtcattggtgttgcccgccacatgatccaaactgaaggattcttctcgctgtataagggattggtgccttctcttatcagcatggcaccctctggcgctgtattctatggagtgtatgacatactgaagatggcttatctgcattctccttaagattgttgaccaaggtggggtaccagcactgtatgctggtctaatccccagcttgttacaggttctaccatcagcatcgatcagctattttgtttatgagttaatgaagatagttctgaaagtggagtgaatacaaattcattggtgagcctacaagcaagttcaaatggctaccacgtatcttgatgaaattgccgggcatccccagtaacttatgctgtgagggtagtttcaggttggtaaaatggttgttcagctgaagctttgcacactagttgactaaattgcacacgcggtcctattcgagacccgattcagtggcttaatagaagattgttctcttcgactccgtcctagggaaaacatctcggccctgcccaatttccgttgacaaattttacatactttatcgttgatgtatgtgacacattgacagcaagccagagtgacatttgagtgatttcagttgtgactttctaattcacagttgagatagggattgggacatatatacaggtattagatgtgattgtagttgacgcacgttgggtctatgtgcagtttcgtgatcttgacctgtgagcgtcgggtacttaacgctgccacgctttgcagtt

SEQ ID NO: 15645 - DNA, 1602 bp, Zea Mays
gccgagagttgttgctgctccatttatgctgaaaatcactggtaacacggagaactttggagcggatttactggagaccttgctgaagatggctcccactaaggaagaggagattaaactgagagaattcaaagaggagtcttctccagttaagcttaacccagctgagaagttcctcaaggcagtgctcgatgtgccttttgccttcaagagagtcgatgcgatgctttacatagcgaacttcgatgcagaggtcaattacctcaagaagtcgttcgagacccttgaggctgcttgtgatgagctgagaagcagcaggctatttcttaagctactggaagcggttctgaagaccggcaacaggatgaatgttggcacaaaccgtggggacgcacacgcgttcaagctcgacactctgctgaaactggtggatgtcaaaggcaccgatgggcacacgacccttctgcacttcgtggtacaggagatgatccggacggagggcgcccgtgtgtccgccagcacccagacaactccaagaacccaggcgaaccctctacgagaggagctggagtgcaagaggctaggtctccgggtagtgggcggcctcgccagcgagctgggcaacgtgaagaaggcggcggccatggactcggacgtgctgagcagctacgtcgccaaactcgcgggagggatcgagaaggtgaccgaggtgctgcggctgaacgaggaggtcaagtcgagggacgacgcgtggcagttccacgacaggatgcagaggttcctgaagaaggcggacgacgagatcatccgggtgcagtgccaggagagcgtggcgctgtcgctggtgaaggagatcaccgagtacttccacggcgactccgccaaggaggaggcgcaccctttccggatcttcatggtcgtgagggacttcctggcggtgctggaccaggtctgcaaggaggtgggcaggatcaacgagcgcaccatcgccagctccgcgcgccacttcccggtgcccgtgaacccgatgatgccgcagctgttcccgcggctgcacgcgctgagagccgggttctccgacgacgagagctcagccgcttcggtgtcgtcgccatgaccgatcgatcgctggtagtcgttgttagtctgccaacatgattttttgttcgcgcggaccgtcggtggtagaagaacaccgcgccaggcggtagagggggattcgagtggtagcgggctgtcccttttttttttccttcttcttcttcttcttctcaccttttgtacctgtagattatatagaatgtacaatgttttttttttgttgttgttgcaaatatttatttttatatataagaagggatacaaatctagatcagaagaggaaataagcagttcgtatgtgaatgtatgcagcttttcagtctgtacatccatccatctcatagaatgacagaagagtgaagctaacaattcctcaaaaaataaaaaataaaaaacagaagaaattctgcagagctggaaggtagctggcctctctccctctctctctctgctgtacttgaagagaaaacgaaatccattaaactctgccgcagtaccaag

SEQ ID NO: 15646 - DNA, 664 bp, Zea Mays
tagtgctactacatggtggccttaagatgccatttgtgggggcaattgatgatgattgcaaccaaactggacaaatgttagctggattgctcaagtggccacaaggaacctttgcctccaaggttacattggacacagaaaaacaaaaagctactgttgagcgagaagttgatggtggaattgaaaccatctgccttgatctgccagcagtgatcaccacggatttaagacttaaccagccaagatatgcaactttgcccaacataatgaaggcaaaatccaaagttattaagaaagtcgccgctgaagaccttggcgtagatattagatcagacatggaggtgattgaggtcaatgaaccaccaaaacgaaaagcaggggtgattctttcatgtgtcgacgagctccttgacaagttgaaaaatgaagcacgtgtcctttaaccatttgtatattattcctcgctgaatatggtctgacgttcatttatttaagttctctctccaaatgttcagacttcagaccatttacaaataaaataagtgttaacatgaaccaattaagatactacccctgaaacatttacctgctgaattccttccaaatagctgtttacttgattgtgtacaggctaagctatctcttttctgaaatttggaggaat

SEQ ID NO: 15647 - DNA, 3112 bp, Zea Mays
cgcacggcctctctcctttctcgagagagcgaagtaaacgggacagcggctgcagccacccagtcttgcaaggcgccaaggacggacggaggcgacgactcgcaaggtagctctgctcgggcgaggcagcagcagcacgcagcagtactccgttcagaatcaggagagaagacgttgttctccgggcactcgagtcgaagtcctgacgagatggacggcaatgcgaggtcggcggcaacgaatcagaagaagcccgtcgtcgcggacgacgacctcgtggagctgctgtggcacaacgggagcgtcgtcgcgcagccccaggcgcaccagaggccggcgcccacctacgaccccgaccgcccgggcaccagcggcctcaccggcgaagagaccgccgcgtggttcccggacaccctcgacgacgcgctggagaaggacctgtacacgcagctctggtacagcaccatcgccgacgccgccccgcagcacgagggcacgctcccgggccctacctcgcagccttcgccttcgccgcccgttgggagcagcggcgtcgagtcgagctgggctggcgacatctgctcgaccttctgcggaagcaaccaggtgctcaggacgccggcaaggatcagggggaaggacgcggcattgcagtcggagttgccgagcaataccggcgcgcacgacggcacatcgtcatccggcgggtctggaagcaactatgggggattcgggctgcccagtgacagcgtccatgtacagaagaggaaggggaggtgtagagacgactcagatagtccgagtgaggatgccgagtgtgaggaggcaagtgaggaaacgaaaccatcaaggcgatatgggacgaaacgccggactcgtgcagctgaagttcacaatctttcagagaggagaagaagggaccggatcaatgaaaagatgcgcgcattgcaagagctcatcccgcattgcaacaagactgacaaagcgtcgatattagacgagacgattgagtatctgaagtccctccaaatgcaagttcagatcatgtggatgacttctgggatggcgccaatgatgtttcctggtgttcaccaattcattccacagatggctctaggaatgaatccaggttgcatccctgcagcacagggcctaagtcagatgccaagattaccatacatgaaccacaccctgccaaaccatatccatctgaactcgtctccagctatgaatctaatgaatccactgaacgccgcgaaccaggtgcaaatcggtcacctcagggatgcaagtagccacttgcttcacctagatggcgggcgagcagcagtggtacctcaggtaccaggaccaggaccccatgttcatggacatcaaatagcacaagccgaagaacacaataagatactggaagtggcagctagtactgttataccaacttctaaggcagggcaaccaccaactttacatagagtttagagtgaccaaaatcatgccttgagctgtatatctgtacagaagtgtcagaagcatattctttgacatgtaagcttagttctagagttattatcaggagtcttgtataggttacaagataacagcctgtctaccgccgtattctatctacggaagaactcagctgcatactgctgtgcagactgcagtacagcgttcaagagagaattgaatgggatcaagaaagggtctttctttttctgggaaccgctgaaaatactgacgtgatgaggagcggatggcatctctgtagctgcgctgcgctgcagtgtatctacatcaatatggcaatgcttgtctggacacgaatgctacatctacatgtaaatgcagagttgcaggtagatagcaacccctctcccctgagatgccaactccgactcctgtcctactgtatgtactgatctgtacagcaagcaatattcaatcagcagtcaattcctaggatgtcgtaaggtactgtggaaacatttttccttcgaatactgttatactaatgaaaaaagggagtgtcgaaatgtttgttgtcaactgacgaaaatccagccagcaggcccgtcctacctgcagacagaatggataacaagcttatgaatccgaagtgcatatttatatcgcatatcatatattaatcaatcctgtctttctgcctgctcctatttgtaggtcacgacaatgatcctatctaagtacataagtcgctaacaccatttcctgcttgtggaaaggtttggtcttgcaggagatgagctcgccagacagtccatcacactgccggcttgattgcatcttcacaggacgtggacttgtgggcacatgctccacgggcaacggttcggcatcctcctggcgttcttgtggctggcagcagccgcgagaatctgtgtggagccctgggctgggctcgttgcaagatatgccagcctctcatcttcagactggaggaggaggggggggttccctctccaggctttttccatgatgttacaggcttacagcattcagagtgcatgttacactcacggccctatcagcacatgctgtgggcagccggtgatgataggatcagatgctcatatctcctgcggttttctgtctaccgcatttggattggatttggaccccccctgtactgtacttcctccttgctcccctgctgcttggcgctttgtccatgtgcctggttggaattgctactatacatttttggagggtaattgtttcaccggaacatgtagcgtggacgtgtggtaataacaattgaattgatgcctttactgtctgagtaataacaaagggaagcgatgagcagcacatggtaagcttccggtgccggttggaggcttcgatgtcgatgtctgcattgagtttatttgatgctgtgtgttctatagctagactaggctagagtttggatagagttcatgggacaatgttgtctgcatcttcatctcccctttagtttaggacttatctgagaggtacggttctttgcatgacagaacaaaactagcagcagcaaaaaaaaaaaaaaaaggaaacaacgacaaaatataaaaaattggcttcgcccgggttcgaaccggagaccttcagt

SEQ ID NO: 15648 - DNA, 654 bp, Zea Mays
gataaaccacagagccaccccactaactactttcaccattgtttccagaaaaatctccgcgcataatatttctctagagcaaacgctctgtcatcacacaacactagttcgtccgcacgacactcccgcagttcctcgacaggggagaggtttccattccaggcggttgcggttgcggttggcggcggagatgagccgggggagcaagctccggtggctgtggcgcgcgccggcgcgggcgctgggggcgggcgcgggacctgccgacgaggacctgcgcgaggtggtccgcgccgcgtcgcagcgccgcgtggagcagcgccgcgccgagctgcaggccgtggcccggagccagagcatggccgcctcgctctccatggcgcgcatcgacgaggacgcgccgtgcgacttcggggcgcccggggcgctgtgcccgaggagccagagctgtgtcggcgacgccgcggggaggaggcccccaccgccgcggccacgggaaggtggcggccttgctctgacggagtcggagctgctgtccggccgccgccgtcggtggcacagtgtgtgagaatagcgatcgtgtcacgccatgtcttctgttcaaagtttgatcatgtcattactcgaaatgatggatgtttttgctgttaaaaa

SEQ ID NO: 15649 - DNA, 1987 bp, Zea Mays
agcacgagcagcggcgagcgggcgagagcgccaccaggcaccagcagacccctcttgtctctctcaccacgcttcctctccctcgttgctttactacgccttctctcctttgtctcttccctcctttttcacccggcgacgtcgagcgagaacggccgggccccaaaagaggccgcattcttggtgctttctgaaccttctttactttgtcctcaaatggcctcctcgctctcttcacatctcccttcaccataggcacaggcacctctccccccctgcaagctcctccctttctcgcctcctgattcttgctctgtcagcccagaggcagagcaagcaagcatcggcggccatggcggcgccaggtcgagcggcgctcctggccgccgcgctcctgttcggcactttcttcccatccgcgtcctctgcgtcctcgtaccccgcaaggattgcgggcaggctcctgtccaccacgtcgtcggcagtggccaagcagctgtggtcgctcaaatcggccgccaccaagacggcgacgacggccgtgacggggcggtccatggtgaggtacgagggcgggtacgcggtggacacggtgttcgacggcagcaagctggggatcgagccgcacgccgtcgagatcacccccgccggcaacctcctcgtgctcgactccatcaacagcaacatctacagggtacagctgccgttgtcaccatatagcagaccaaagctccttgctggttctccaaaaggtttatctggccatgtggatggaagactgcgagaagcaaggatgaaccatcctaaagggttcactgtggacgataggggcaacatttatgttgcagacggcatgaacatggcaatacgaaaaatcagtgatacaggggttacaaccattgctgggggaaaatcaattagaggagggcacatagatgggcccagtgatgatgcaaaattctcaactgattttgaaatcaagtacatcagcagtagctgctctctcttggtcattgatagaggaaaccaagcaattcgagaaattccactcaacgatgatgactgtgcatatcagtatgaagctggttttccactagggtttgcattgctttgtgctgctggcttctttggttatatgcttgcgatgctccaacgccggcttttaggaatgtcatcaacaacagatgatcctcaagcgcctccaagacccagcattgcaagtatccctccatcataccagaagcctttaaatccttatattcgtcatccattcatcccgagagaagaaactgcaaaacaggaaaccggagaggggttcttcaccacagctggcaaactcatgggaggggcaaaatcatctgtgggtgagatatttggtttcaagaagaagcgcctgagcagcccataccatcatcagcagcagcagcagcgaagagctaacccgtggccagtgcaagaaagctatgccatgacacacgatgaaccacctccagcactggacacgagagcaccaaccccgcagaagaactacagcctcatgagaaaggagcccgagaagacccactacgtccgccatgggcacccgtatttcaatagctgggacggtcactgtcacccccagcagcagccggaccagcagctgtatcgccagcagcagcacctgcagcagcacaggcagtactctgcaggcccacagacattttacgagcagagctgcgagcctacaaaggagatcgtctttggcgcggtccaggaggtggacagcaagcggcgcatggtcgagatcaaggctgtgaactacggagacacattctatgagcggtacggaatgcggtaccgcaacaatttcatcggctacaacaacaataacaactactgaacagcctgcctatttcttcaacttttcctgcccgtctagctgcgctggtgataaagcttctatctgcagtcagagcacagtggctgtggctgcaacacaggcacctat

SEQ ID NO: 15650 - DNA, 109 bp, Zea Mays
ctctctttttcttttttttttttttttttttttttttttttttttttttttttttttttttttttttttttattttttttttttttttttttttttttttcctctctgt

SEQ ID NO: 15651 - DNA, 2200 bp, Zea Mays
ttcttcttggcatcttccgtcaaaggtattgcggcatctgaattggtgagcgacatcactgttcgtatagggactacaaagttttaccttcacaagtttccgctcctctccaagtgtgctcgctttcagaagttgattccaaccactggtgatgaaaatattgagatccacatccatgatattcctggtggcgcaaaggcttttggggtctgtgccaagttttgctacggcatgattgtcacactcaatgcctacaatgtgattgcagcccgctgtgctgcagagtacttggagatgaatgagactgttgacaagggcaatctgatctacaagattgatgtcttcctcagctcaagcatattccggagctggaaagactctattattgttcttggtacaacaaaggctcatctaccttgggcagaggatcttaagctggttagccaatgcattgactctgttgcttcaaaagcctctatcgacgtttcaaaagttgaatggtcatacacatacaatcggaagaagctcccaactgagaatggtcatgattcgccgtggaatggagtcaaccagcggcaggttgttccgaaggattggtgggtagaagatctgacggatctcgacattgatgcctacaagcaagtcataacagcagtcaaaaccaagggtatggtggccaaggacgtgatcggtgaggcaattaaagcctacacttacaagaagctgccgtcactaagcaaggtctcaatgatccatggcgacgcaaaagttcgggcgatgctagttacaatcacatgcctgttgccatctgagaaaggctcagtttcatgcagcttcctcttgaagctactgaaggcaaccaatttgctgaagtgcggcgatatgtgcaggaaagagcttatgaagcgcattgcacggcaattggaagaagcatcagtgtcagatcttctgatccctgcagtggatgaggacaccagtgtttacgacattgacctgattcttagcattgttgaagaatttatcagacaggatagtaagaatgcccagagacataatggtggcgaagtgaatgaccatgtatcagctcctagtgcatcaatgattacagtggcaaagattgttgatgggtatctggcagaggttgcgaaggacccaaatataccggtctacaagtttttcagtctcgctgagacagtctcggccaattcaaggccagtccatgacgggctctatcgcgccattgatatgtatctgaaggagcacccaagcttgggcaagagcgacaagaagaggctctgtgccctcatggactgcaggaagttgtcgcccgatgcatgcgctcacgctgtgcagaacgagcgcctgcctctgagggttgtggtgcaggtgctgtaccacgagcagacgagggcttctgcagcagccaccgtccgagctgacagcatcggcatcggctcctacgagagctcaaggtcaggggccacaacaaacacagaagacgagtgggacggcgtcatggccgtggaagacctcagtctgtcgtccaagacgacgaagctagagaaatgtgacgcagctagcaccgtctcggagaagaaccacggcggcaacaagggtgccaacggcagggcgaaaggtggcgtgatgccgaagaaggcggtcgggaggacgacgatgtcaggcaacaaagggcaggctggggagcgcagcagctcggactcatccgacagcgccattttgccttgccagctggagcatcccaagagggccgcagcaaggagcaccaccaagtcagccgctgtgtagtagtagctgcccggccctttgctcagtgagatgctcaaggagcactaggttttagcagtcgtcgtccgttcttttctttgcgttatgaatgttgcatagaagcaaggaccatgttcttaaacgtcttgtaggccgggagcccgggatggtacgcgtacgttgttaggtgatgttgttagcatgtaggcttgccatgaaacctatgagaccttgggttgtgctgtgagggtttatgtcataagaagcctactttgttagagagttgaagcacgactgttctgcagctgtgaattcttggtgttctgctgtgagatctgttaggtcgttcgaatggtcatctgaatatctgatcacagtgacttgtagctaggggctgtggtaaagggccctaaat

SEQ ID NO: 15652 - DNA, 1295 bp, Zea Mays
aactacacccgcatccaaacaataacattggtattgtagatcaatttcatttctccttaaatttggtatttctagaccaattcaatttcaccacttgtaacgggaaaaaggcacttccccccgcaagccaaaaccctagcaagcaaaccaccggagcagcggcgctcgcgcgggcggagccatggcggacgacgattacaacgaaatcgacatgggctatgaggatgagcctccagaacctgagattgaggaaggggccgaagaagagcttgagaacaacgaagatgcccctgatgatgtcataggtggagagggtgaagataaggaacaggaaaagaccaagcgtgagcgcaaaacaacaaaatatatgacgaacatgaatgctccagtcatggttgagcttgagggagaaactgaccctcttgagattgcgatgaaggagcttagagcgcgcaagatacccttcacgatcagacggtacctacctgatggaagttatgaagactggggagtagacgagctcattgtggaggactcctggaaacgccaggttggtggagactgaagatgctgatctacttggcatggaaaggatgtgtagttacaggtcttcgttgcctctgagtggatgctgaacagtgaatgaaccaagacgaaacgatgctatgctagatgttaccttgacgtctgtggttgccttggaactctggaaccgtgatggctggtggacggtggttgagttatgcttgttcgtttcagtttcagacatgctgtgcagatgattcgtaaactgactcgtctttcattcatttggaagggtttatcgtatcttgctatcttttgtaatgagttgtatgctacatccggcatgagaccatgttgctgttgcttgtttcattaaactccaacggtttccataggagaggagcaaatccagatgggtagttcacagcatagctgagcggaaagtatgcagaccagagcatggcgtatttggtgtgttccatgctactgctctgtttaagactgttttgtatcagagtttgcaaagatggataccatgtatccagatcatcttgctcattgatgcgtttttactgtggtattctggctaaatacaggtatgcttcatgtatcacatgatgacaaacttgacagacatttgtgtggatcacgtttgctgctgctgcctccctccctcggattgagatggagctccttcatcattcctcggaatcagactcgagggggcaggagccgtcgtcgacggtggccagcgggtcgaacatgtcgga

SEQ ID NO: 15653 - DNA, 1004 bp, Zea Mays
cagtttttgagaaaaacaacaaggctacgattggtattgatttcctgtcaaagacaatgtaccttgaagatagaactgtgagactccaactctgggatactgctggtcaggaaagattcaggagtttaattccaagctatattagagactcttcagttgctgtcattgtattcgatgttgcaagcaggcagtccttcttaaatacatctaagtggatagaggaagttcgcactgagaggggcagtgatgttatcattgtgcttgttgggaacaaaactgaccttgttgacaagaggcaagtctcaatagaggaaggggagggcaaggcgaaggaccttggagtcatgtttattgaaaccagtgctaaggctgggtttaacattaaggcgctgttccgtaaaattgctgctgcacttcctggaatggagacgctctcatcagcgaaacaggaagacatggttgatgtgaacttgaggtccggcaatgcaaactcgtcccagtctcaggctcaggctgggggatgcagttgttagttgcagtctctgacacttgcttgctcatgatctttgggactctgagcatcagaaggcgttatcactgatgcttctctcgggaagaagagttgattgcctctcgccagtgaacacaccatagtctttacccggtgaatggaccgtttgcattggaacgatacgttttatgagttttctgttatttcctcagtggcctaagctagcaacagtgtatagttgggttgacacttcaaacttctaccattcgagttgggtattagaactagttattattggttcatgttgaacttatatatatttccatccttttgcagttagtttgagtcgtatttgctgtgtaccaaacatgtattgcaaatttggaatttttgtaagctataataaggccagcacggcaatatccccacatgataaccccgaaatttgtatcgttcaaagttcaaaccatggtatcctaattcaaaaattttg

SEQ ID NO: 15654 - DNA, 171 bp, Zea Mays
aggagaagaacaggtggttcaagaggagccacagggcgaggagtttgatctaatctaggtggtgttttccccaattgacttctgcgccaaggacgacccttagttcgttttatatttactattttattttgtaataagacttccactatgtaataaatgctctgattattg

SEQ ID NO: 15655 - DNA, 2934 bp, Zea Mays
cctccctcccctcctccactcctgaccctccaacgttccctccctggaagtgggccgcctcccgatctccccacaccgacaatgctgccgcgccgcgcgcgggcgcgcgggcgccggcgctgctaggatcctcgcgcgaccccgcgccacgccggcgagaaccccgaccactacccggcggggcgagggcgaccaatgcgcgagcgcgcccggcacgcgacccgggtgtcaccgatgccgccgcccacgggtggcgaggaccccgaggccgacgcggcgccctcctgcagtggctcagccgacgaagccgacccccacgagcaggtgctccccaacggcgacatctacacgggccagtggcgcggcgccgtgccccacggcgccggcaagtacctctgggcggacgggtgcatgtatgagggcgagtggcgccgcggcaaggccaccggccgcggcaggttctcctggccctcgggcgccacctacgagggcgagttcctcgacggcttcatgcacggcgccggcacctacgttggtgcctcgggggacacctaccgcggcgtctgggccaagaacctcgagcatggcgccggcgagaaacgctacgctaacggcgactgctacgacggcgagtggcgcgcggggctccccgatggttgcggacgctacgcctggcgcgacggcaccgagtacgccggcggctggcgcgctgggctcatccacggccgcggcacgctcgtctgggccaatggcaatcgctacgatggcggttgggagggcggccgaccccgcgggcagggcacgttccgctgggccgacggcagcctctacgttggcttctggggccgcgaggcgcccagcggcgccgtccaccagaagggcgtttactacccgtccccggcggcgatgggcaactccccccgggcgcgcgacccgagggaggtgtttgcacgtgacctgccggagtgcgtgcgctccggaaccgaggcccaatcagcgctcacgtctctgagatccctcaaatggctgatgcggtcggtcagcgggcgcggcagctcgtcgtctggctggagcaatggctcgggaggcagcctcgtgcacttctgggggtcggacggggaggtcaagtgcgaccttggggacgactggagacggcggagcgtcagagaagggagggggctgccaccaccgtcgcccgctctggttccatacctgcccaacggcgcgcccctgcggttgtccaagaagcagggggtgaccattgccaaagggcataagaactatgagctaatgctcaatctgcagctcgggatcaggcatgcagtaggaaggcaaggtcaagttttattagatctgaaatcatcagcatttgatccaaaagagaaagtgtggacaaaattccctcctgaaggctcaaaacatacccctccacacaattcttgtgatttcaaatggaaggattactgcccaaaggtgttccgaacactccgtaagctgttcaaggttgacccagctgattatatgttgtccctctgtggagatgatgctcttcgtgagctctcatcccctggtaagagtggaagcttcttttacttgacaaatgatgatcgttacatgataaaaacaatgaagaaaggtgaagtgaagatgcttttgaggatgcttcaagcttactacaatcatgtccgtgcatttgaggataccttagtgacaaagttctttggcctacattgtgtgaagtctggatcacaccagaagaaggttcgttttgtgataatgggaaatttgttctgctctgatcatactatccataggcgatttgatctgaaaggatcatctcttggccgtataactgacaagccaccagcagaaattgatgagtatacaactctgaaagaccttgatcttaactttatctttcggttacagaaacaatggtaccaagagtttcaaaggcaagtggacaaggactgtgagttcctcgagcaggagaagattatggattacagtctattggtgggtgtacattttagaggtgccattgacattgatggtgacaaacccgcaacacctcgcgtttcaagatgggacagagatcattttcgttctgatccaaataggtggtcaaaaattaagcttggagcaaacatgctgtcaagagctgaactgacaatccgaaagaacgacagtgatgtttttggagagccaaccggggagtactgtgacgttatcttatacttcgggattatagacatacttcaagactatgatattggcaaaaggctagagcatgcctacaaatcttttcagtatgattcgacgtccatttcagcggttgatccaaaacagtattccaggcgcttcaaagatttcatatacaaagctttccaagaagataaactagacagctgagaacagtgcattgcgacattggatttggcaggaattcggcagcttctttagggaaaggagtccgggtgattggggtcgctggagcacctggtggccccacagtttccaggaaacagattggccgtcatgtacatactacaaagcaacatgcacagatacggagtccagtcagtcattcacaaagagtaggaaatgtaacttgcagaatcaaattatacatagaaacatgtaatcgaatgtcccgagccgagccttcaggggttgtaaatgctctttgtttcagaggataccattcttgtcttgtatcggtagtcgttactttcttcgatagaattgggggccagttttgcctttgcactttcttttctttgaacaaagcacgacgtactgaggtgcttatttgattgatagaggcacgtcacacctgagaatattgtcagctgtacgaaatcctaatcgactccgttaactttttttttctgtaccattccagagaactccgtacttgctaccgcattagag

SEQ ID NO: 15656 - DNA, 1956 bp, Zea Mays
ttgtgcgatgcgacctttcccgtccctcgcagcaccgatcctgccgtccacctgttaataaatcgcctgagtttagtcgaaacacaatcgttaaaatgcagtaaagtaattcacgacccccgggcgcccccgtctccgctcctttattaatatcgccgcggcctcgcacctccatctgttctatatcgccccattgctcgctcgccaagagttcttcttgttaggcaaggcaaaagcagaagcaaaaagagaaagggcgctcctgagaaatggagactagtgaaggctcatggaacagctgtgggcctcccatctgatgatgacatgggcaacagtgaagttggtcacaatgcacttggtgctggtcgaattttcgcccaaggtgctaagcttgtcgatcaagctcttgcctccggaaagatttatgatggagatgggttcaactacatcaaagaatcttttgaaagtggtactcttcaccttattgggttgttgagtgatggtggtgtccactcccgtcttgatcaactgcagtattggtttcgtggagaccctagagaatgatcttttggagcttagagcgaagggtgttgatgcacaaattgcatctggtggtggaaggatgtatgttacgatggaccgttatgagaatgactgggatgtggttaaacgtggttgggatgcccaagtgcttggagaagcaccctacaaattcaaaagtgcacttgaggctgtgaaaacactgagagcacagcccaaagccaatgatcagtacttgcccccatttgtgatagttgatgacagtggcaatgctgttgggcctgtattagatggtgatgcagttgtcactatcaacttccgagctgatcgcatggttatgcttgcgaaagcactagagtatgcagattttgacaactttgaccgtgttcgtgtccccaaaatccgatatgctgggatgcttcagtatgatggtgagttgaagcttccaagccgttaccttgtttccccaccagagatagatagaacatctggggagtacttggtgaagaatggcatccgcacctttgcttgcagtgagacagttaaatttggccatgtcacatttttctggaacggtaaccgttcgggatactttgatgcaactaaggaggagtatgtagaagtacctagtgacagtggtattacattcaatgttgcacccaatatgaaggcgcttgaaattgctgagaaagccagggatgctctcctaagtggaaagtttgaccaggtacgtgtcaacctgccaaatggtgacatggttggtcacactggtgatattgaggccaccgtagttgcttgcaaggcagctgatgaagctgttaagattattttggatgctgtcgagcaagttggtggtatttaccttgttaccgccgatcatggcaatgctgaggatatggtgaaaaggaacaagtctggcaagccgttgctcgacaagaatgaccgtatccagattcttacctcgcatacccttcagccggtcccggttgccattggaggccctggccttcaccctggagtgaaattccggaacgacatccaaacccctgggctcgccaacgtagccgcaaccgtgatgaacctccacggatttgaggctcctgctgactacgagcaaaccctcattgaagtggctgacaactaaacactggccacctgtgtccaattttggttatatgtagttctgagaatggacattcaataatttatgtttgcaagcacgttgctcaaactcaccaaaacatcgagggatgccttttgactttggcatttacagcattttcgtttggctttaatccttatcggtttctattgcttctgtttcatttctatgtatcatagctgcagtagttcgaacaactgtctttgcacaactcattagatgctctatttatataccgttgacgattgcctcct

SEQ ID NO: 15657 - DNA, 131 bp, Zea Mays
tccaggtcctaggttcgatccccctcgagggcgaatttctggcttggttaaaaaatcccctcgctgtgcccgcccgctcccggtttacgtcctgcgcgccactctccggctggaccgtagcagagtgggcg

SEQ ID NO: 15658 - DNA, 3589 bp, Zea Mays
aatcaaaaatcaaccgaacttgccagccccgccgcccctccctgcctccatcgcgcactagggtttttcctcgctctcacgttcggccgttccccaccacttgcgcgttgtgccgcgacgctccggccatggcgtggggggaggacgaggccatcggtcccgacgtggcctcggcgggtcttcacgtctcggagcggatcggccgcgacgccgccgcgcagcccgacctggaggaggcccttgaagcctcgcgctacgcgtcccacccctactcctcgcaccccaaggagtggcctcctttggtagaagttgcagaaactcgtcaactccctcctatgttgattgaaagatataacacagctgccggtgaaggaacagctctttgcgggattttttctgacatacatcgggcctgggcaacagttgacaattcatttttcatctggcgatttgataaatgggacgggcattgccaagagcataatgttgacgagcaagcaatttgtgctgttggccttgctagggcaaaacctgggattttcattgaagccattcaataccttttagttttagcaactcctgttgaactgatacttgttggagtttgctgttctgctagtgctgatggaacagacccatatgctgagctttcattacaaccattacctgagtacatgattgccactgatggtgtcacaatgacatgcatcacatgtacagacaagggccaaatttttgtagctggtcgcgatggccatatatatgaattgcagtatacaactggttcaggttggcgtaaacgttgccgtaaagtttgtcttactactggcattggcagtcttctttctaggtgggtactgccaaatgcattcaaattctcaactgttgatccaattgttgatatggtcatggatgaggagaggaacactatctatgcgcgtaccgagggcatgaagttgcaattatttgatctaggagttaatggtgatggccctttgacaaaaattactgaagaaaagaacattgttgatccacgggatggaccttatggtggtcggaggtctaatgcgccaagagctgcacgatcaccaagaccatcaattgtttgcatctcacctgtatcttctgtggaatcaaagtggctccatgctgttgctgttttatcagatgggaagagattattcctcactacatctggtggaagtggttcttcagttggattgaacagtggtctgcagaggccaacctgtttaaaaattgttgctactaggccgtccccacctctgggggttggtggtgggcttacatttggtgctgtttctgtggctggcagggctcttcctgaagatctagcattgaaagttgagtctgcattctattctgctggtgctcttgtaatgtcagattcatccgctacagccatgtcatctcttctggctgtgcagaaagattcagctgcgcagctatctctccccagcacctttggaacagcttctagaacctccagagctctacgagaaacagtctctgctttacctgttgagggtcgaatgctttgtgcctctgatgtcttaccacttcccgatgctgcttacatgatgcagtctttatatgctgatgtggaatgtttcacatgtttcagaaaaccttctgagaaggcatgtataaaactgtgggcaaaaggggatcttcctacccagcatatcttgcctcggaggagggtggttgtattcaatactatgggtttgatggagttgatttttaacaggcctgttgatattctaaggaaattgtttgacgggaacaccctgagatcacaaattgaagaattctttaatcgctttggtgctggagaggctgcggcaatgtgcttaatgttagctgcgaagctactttatgctgaagatagtctgataagcaatgctgtttctgagaaagctgctgaggcgtttgaggaccctgggcttgttgggatgcctcaaattaacggcaccactgctttatctaatacacgaactcaggctggaggctttagtatgggccaagttgttcaagaggcagaacctttgttttctggtgcatatgaagggctttgtttgtgctcgtcaagactactttatcccatctgggagcttcctattatgtcgattcgaggaccgtctggtaataataaacgcgaggatggcgtaattgtttgcaggctttcagctggggccatgaaaattcttgagagtaagattcattcactggaaacatttttaagatctagaagaaacaagagaaggggcctttatggttatgttgctggtcttggcgattctggttccatactctacaaaacagggcctattattggccctggagggcatagcaatggaaggagtccctacaactcccaaattcgagatatgaaccctgtagataaatctgcatcgaataaaaagccaaggctgctttatacatcagcagaactagccgctatggaggtgagggcaatggagtgtcttaggcggttgcttaggagatctggtgaagcactgtttctgcttcaacttatttgccagcataatgttgcccgtttggctcagacactgggcaatgatttatgcaagaaatttgttcaattaacatttcatcaattggtatgttcagaggatggtgatcagctcgcgatgcgtcttatttctgcactcatggagtactatattggcccagagggcagaggaactgttgaagaaatcagtactaaattgagggagggttgccctagttacttcaatgagtcagactacaaatattacttggcagtggaatgccttgagagagcatctatgactaataatgctgatgagagagatattcttgctagagatgctttcaacctcttgactaaaattccagactctgctgatttgagtgccatatgcaagagatttgagaacctaagattttatgaggctgtagtccgattgcctctgcagaaagctcaagcacttgactccaatgctgatattatcaatggtcaaatagacccaaggcatcatgatacaataatgttgcagcgtgaacaatgctataggattgttatggatgcgctgtgcactctcaagggtgttgggcatagtcgaatgcaaagtgcagacaagtcatctgctctagcaactgctgctgatccagcttctcgaagcaagtatatcaaacaaatcatacaacttagtgtccaatggccggacacagttttccatgagcatctatacaggacacttattgagcttggtctagaaaatgagcttttagagtatggtggatctgatttggtttcttttctgcagagtgctggccgtaagcatcaagaagaggttcgggcagtttcttcagttacacctggagctgctaagatgcatgatttaggtgcacctatctcgactagtcaaacaaagtatctcgagctcctagctaggtactatgtccgcaagggggaacatattgctgctgccaggatgttgttaatattggcagagagacagtgctctaattctgaagaagctccagctcttgacaagcgtataaatttacttttggaatccag

SEQ ID NO: 15659 - DNA, 3213 bp, Zea Mays
ccctctccgctccgtcccagaaaacccggtatagcatgaaggaacgtttttttggcgtgttgatctctctcctcctccagtcctcccccgtcctgcaggagtaaagcctgttccaggggacgagaagggaagggttcttggggggagagggaagaagatggcgcgcaatgcggtggacaaggcgacgtctatcgatgcgcagctgcggctgctggccccgcagaagctctctgacgacgacaagcttgtcgagtacgacgccctgctcctcgaccggttcctcgacatcctacaggacctgcacggcgaggacatcagggagacggtgcaagaatgttacgagttagctgctgagtatgaaaataagcttgaccccaaaatgctggatgagattgggaatgtgctgaccagcttggatcctggagactccattgtcataaccaagtcattctcacacatgctgatcctggcaaacttggctgaggaggtacaaattgcataccgcaggagaataaaactgaagaagggtgactttgttgatgagaactcagcaacaactgaatcagacattgaggagacactaaagaggcttatgcatcagcttaagaaatcccctctggaggtatttgatgctctcaagaatcaaactgttgacctcgtcctgactgcacatccaactcagtcagtccggagatcattgcttcaaaagcatggcaggataagaaactgtttaactcaactttatgcaaaggacatcactccagatgagaaacaggaacttgatgaagcacttcaaagagagattcaagctgcctttagaactgatgaaatcaggcgggcgcctcctactccgcaggatgaaatgcgtgctggaatgagttattttcatgagactatatggaagggtgtacccaagttcttacgtagggttgacactgctcttaagaacattggcataaatgagcggttgccatataatgcccctatcattcagttttcttcttggatgggtggtgaccgtgatgggaatccaagagtcacgccagaggttacaagggatgtatgcttgttggctagaatgatggctgctaatttgtataatgcccagatagaagacctgatgtttgagttatctatgtggcgatgcagtgacgagttacgtgtaaaggtcgatcagttataccattcctccaagaaagatacgacaaaacactatatagagttctggaagcaagtccctcccagtgaaccttaccgtgtgattctgagtgatgtcagagataaactctataacacacgtgaacgagcacgtcacttattagctagtgggttttctgaaattccagaggaagcaaccttcaccgatgttgaacagttcttggagcctcttgagctctgttacagatctctgtgtgcctgtggtgatcgctctgttgcggatggaagccttcttgacttcttaaggcaagtgtcaacatttggactatcccttgttagacttgatatcaggcaagaatctgaccggcatactgatgttatggatgctataactgaatacctcggtattggatcataccgtaaatggccagaggagaaacgccaagaatggctactatcggaacttaatggaaagaggccgttatttggtccggaccttcccaagtcagatgagattgctgatgtactagatactttccacgtattagctgaacttccatcagacagctttggtgcatatgtaatatctatggcgactgctccctcagatgtccttgctgtggagctcttgcagcgtgaatgccatgtgaaaaaaccactgagagtcgttcctttgttcgaaaaactggcagatcttgagtcagcaccagcagcgttagctcggctgttctccgttgaatggtacagaaacaggatcagcggcaagcaggaagtgatgatcgggtattcagattctggcaaggatgccggtcgtttctctgctgcttggcaactgtacaaggctcaagaggagctcattaatgtcgctaagctgtatggggttaagctaaccatgttccacggacgaggcggaactgtgggaagaggtgggggccctacccatcttgctatactgtcacaacctccagaaaccatccatggatcacttagggtaaccgttcaaggcgaagtcattgagcagtctttcggagaggagcatttgtgctttaggacactgcaacgtttcacggctgcgacccttgaacatggtatgcaccctccaatttcgccgaaaccagaatggcgtgctttgatggatgagatggctatcgtcgccacaaaggaataccggtcaatcgtatttgaggaaccgcgctttgttgaatacttccgccttgcaacgccagagatggagtatggcaggatgaacatcggaagcaggccatcgaaaagaaagccgagtgcgggcatcgagtcgctgcgcgcaatcccttggatcttcgcttggacgcagactcggttccacctgccggtgtggctgggtttcggcgcggcgttcaagcatgtcttggacaaggacatacggaatctccagacccttcaggagatgtacaaccagtggccctttttcagggtgacgatagacctggtcgagatggtgttcgccaagggtgatcctggcatcgcggcgctgtacgacaagcttctggtctcagaggatctgtgggcattaggggcgcgtctcagagccaactacgaagaaacaaagcagcttctcctgcaggtcgctgggcacaaggaccttctggagggcgacccgtacctgaagcagaggctgcgcatccgtgactcgtacaccacggcgctgaacgtttgccaggcctacacgctgaagcgcatcagggaccctggcttccaggtgaagccgcggccccacctgtcgaaggacatcatggacatgggcaagccggcgtcggagctcgtgaagctgaacaccaccagcgagtacgccccggggctggaggacaccctcatcctgaccatgaagggcatcgctgccgggatgcagaacaccggctgaagccagtgtgcctgtcttctttctgtaggggatcatatcatatggcgtgatgaaccagtgaacacctggatatgtggggattagttacaccctgttgcactcgaatttatgccccgcttggccgcgcccttgtcgcatggtttccatatctctcg

SEQ ID NO: 15660 - DNA, 628 bp, Zea Mays
catgacttgcttaatgctatctggacgaggtggtgttatgaatcttgatttggtggctcggctatttcataggtctacacctagtcaaaatcccatcacatttgaagttattggaagaccttttgaaaactttggtgtttaatcgtagggcagcgcggttaaggctgtaaaaagaaaaaaaagagaatgtttaaagaaatatgggttcaaaagcatactggaagtggaggctttctcggtaaccaccgtctaatcatctcattgttcacggagactgagtggtgtaggttatttgtacacttcattttgggggcgcatcgtgctgaaagcagttggtaatatgctaattctgtagtttgtagctcctgctgaaatcagctttgtggattatgttgtgagcacgatgaacatcaaactctcgcaagtcccatcgaggcatcttgtcgaaaaacttctgctgtgcatactgaactaaattttgtgccggtgtatcatctgtcgactatcgtgttggtctatttagtatcccttgtgatcgtttaccttactgtgattctgatttccttttcatatatgtatgtgtatatctttatgttctccccacactcctgaataaaaaaataaagaa

SEQ ID NO: 15661 - DNA, 1566 bp, Zea Mays
aatctgcatgaatacggtgatgattgattttcaaggagctagctcaggcttatgaggtcctcagtgatcctgaaaagcgggagatttatgatcaatatggtgaggatgccctcaaggagggaatgggaggtggtggagggatgcacgatccctttgacatattccagtcattctttggtggtggaagcccttttggaggtggtggcagcagtaggggcagaaggcagcgaaggggagaggatgtggttcatcctctaaaggtttctctggaggatttgtacaatggcacatcaaagaagctctctctgtcccgcagtgtcctctgctccaagtgcaatggtaagggttcaaagtctggagcttcatcgaggtgtgctggttgccaaggttctggctttaaggtccaaatccggcagttggggcctggaatgatccagcaaatgcagcatccttgcaacgagtgcaagggttctggagagacaatcagcgacaaggatagatgcccacagtgcaagggtgataaagttgtgcaggagaagaaggttcttgaagtgtttgtggagaaaggcatgcagaatgggcagaagatcacattccctggtgaagctgatgaagcgcctgacactgtcactggagatatcatttttgttctccagcagaaggagcatcccaagttcaagagaaagggcgatgacctcttctacgagcacaccctgaccttgactgaatctctgtgtggcttccagtttgttgtgactcacttggataacaggcagctgctgatcaaatcaaatccgggcgaagttgtgaagcctgattctttcaaggcgatcaacgacgaaggcatgcccatgtaccagaggccgttcatgaagggcaagctgtacatccacttctcggtggagttcccggactcgctgagcccggagcagtgcaaggccctggaggctgtgctcccgcccaagccggtgtcgcagtacaccgacatggagctggacgagtgcgaggagacgatgccctatgacgtgaacatcgaagcggagatgcggaggcggcagcagcagcaccaggaggcctacgacgaggatgaggacatgccgggcggcgcgcagagggtgcagtgcgcccagcagtaggcagcagtttggtagcggtgataaaatatttgacggcggcggaaaaatttgtgcgactactgttaggtccaaccgtccaattttacacgcgcgtattaatgttatgatcatacttgtctttgtttattatgtatgttttgcgttacgggatctgtgcggattagttctaggcgatgtttagattcaatttggtgttgctactagcagcgatctccaacccatatgacagttggaacgtgactgtgcctgctatttcctcgatcctgatctgtccgtacaaagcccggaatccgtcgaaccttaaacctcctttggaatggataataaataaataaattgtataggattcaattcctttcctagcagagccttttgacatcctccatagcaatttgggaggaaaataagcatgtttttctgtgcataatcc

SEQ ID NO: 15662 - DNA, 1658 bp, Zea Mays
cagaaattgaccaccatgagagcaatgttcactttgattggtggagaaaaaggttgcaatcattgacggcgaggcatgtcgagttgtcaacttggtgtctatgctgatgcaaaaaggatatggcgggttttcttatttagtggagcctctttggtggataggcatgatttctatgattgtaggtgaaattgctaattttgctgcttatgcattcgctcctgctattcttgtcactcctcttggtgcactcagtataatcatcagcgctgcacttgcacatgccattctacaggagaaactgcacacatttggtatacttggttgtgttctctgtgttgttggatctatcacaattgtgctccatgccccacaagagcgtgacattgattctgtaaaggaagtttgggatcttgcaactgaaccagctttcctttgctatgcggctatagtagttgcagcagccttagtgcttatatattttgttgtccctcatcatggacaaacaaacataatggtgtacattggagtatgttctcttctgggatcactcacggttatgagtgtaagagctcttggaattgccttgaagctaacattgtcaggaacaaaccaattattctatcctcagacttgggcctttgcactgattgtagctacctgtgtgagcacccagattaactatctaaataaggcattggatacatttaatacagcagtagtctcaccaatatattatgtgatgtttacttcactaacaattatagccagtgtgataatgttcaaggattgggaccatcaaaatccaacacaaattgttacagagatgtgtggcttcatgactatcctatctgggacgtttcttcttcacaagacaaaagatatgactgatagtcctggacaatctttgttgacacgacggccaaagcatgctagtcagaatgcgtttgcaattgaagtgatgccactaaaatgtcaagattatatagatgacgagaccttgacgttatcacttcccaaggttgaaaatggttacctaaaggaagagtatcttcttagatacaaggactcgagtattgtctgatagataattcttcgccaacatttgacgggaagctcttgagaatcattctgcttccagacatgattgattgatgtagaactggagttggcagttttacctcaacctggccttggatagattgatattacagattgtaagttgtcaactgtggtttgtctacatctggatgatgttttgagggaaggagcatgccagaaggatgccacattgaggccaattaagtgctagtcatctaggaattgtggttccggaaaagaatttgaagtgtacttagatacaatggtgtcaccaactatactcttttcccccctcttttctctctcattttagaacgccatgtgatagctgcaatgtgatcttatctgattcataggacgacgccatatagaaatgtcaagcatcgttttttcctgtaattacatcaaattggccagttgtcattgtgtatacttagtctatgtaaagtatatcaattcatactttatgacaagggacccttaggataaactcttgatcattctaattcatatttctcacattgctaatattttctgagcatgtgcttcattgataacca

SEQ ID NO: 15663 - DNA, 1912 bp, Zea Mays
gctgtagctatttctgggcgcttcgctgttcggcctgctagcgtccgggccgtgacagctggggtgaatcgcgggagttcagggtccttgccccggctggatctcgagttcaggaaaccttgcgcccctcttccttctcgtttacgccgctagatttgggttgctgccgcttattttcttggattgagatcccggattcagacaggtgctaccattcgatttgatttggcgcggagcactttcctatggccgcctccatcgcggcctcgtccttctttccagggtcaccggcgccggccgctcctaagaacggccttggggagcgcccagagagcctggacgtccgcggcgttgcggcgaagccgggagcctcgtctagtgccgtgagggcgagcaagacgcgcgcccacgctgcggtccccaagatgaacggtgggggcaagtccgcggtggcggatggggagcacgaaaccgtaccttcttcggtgccgaagactttctacaaccagcttcccgactggagcatgctccttgcggccatcaccaccatcttcttggccgcagagaagcagtggacgatgcttgactggaagcctaggaggcctgacatgctcactgacacgtttgggtttggccggatcatacatgatgggctcatgttcaggcagaacttctccattaggtcctatgagattggggcagataggacggcatctatagagacgctgatgaaccatttgcaggaaacggcactcaatcatgtgaagaccgctgggctgctaggtgatggatttggctccacaccagagatgagtaaacgaaacttgttctgggtggttagccaaatgcaggccatcatcgagcgttatccatgctggggtgatactgttgaagtagatacatgggttagtgctaatggtaaaaatggaatgcgtagggattggcatatacgcgatcctataacaggcctcacgatactgaaggcaacaagtaaatgggttatgatgaacaaactcactaggaagcttgcaagaattccagatgaagtgcggactgaaatagagccatacttttttgagcattctgctattgttgacgaagacaaccgcaagcttccaaaactgccagagggacaaagcacgtctgtagctaaatatgtgaggacaggcctgactcctcgttgggctgatcttgatataaatcagcatgtcaataatgttaaatacattgcgtggattcttgagagtgcacccatctctattcttgagaatcatgagctggcgagcattgtgctggattacaaaagggagtgtggccgggatagtgtgctgcaatcacacacctctgtgcacacggattgcaacagtgagtctggagaaacaaccttgcactgtgagcatgtgctgagccttgaatcaggtccgaccatggtgaaggcccggaccatgtggaggcctaagagaaccaaggcccaagaaacagttgttccatcttcaatttgaattgtgtgagacgttcgggatggtgattttggcaacaaactactactatttggcaaaaagatcagaatggttactagcgtcctctattggaagcaagtcacacagggcgagacctaaactaatttaattatgaagtgtgaacaatagaggagatataaatagtgtgaacaatggactggaagagacagaagcggggggagatcgaagacaagggaggcctcatgtgcatgacaatcttcggtcgcacaaatgggtgttgtaagtattgatctgtaagctacaaatgtatgaaggggagtgagtgcttcccatacatgttccttctggggctatgtccatatgctataagcccctcgaaaacattgtcgcagccatatattcatgcagaggattttaatctcgtaaaaata

SEQ ID NO: 15664 - DNA, 2508 bp, Zea Mays
taatccctagtgggaggaaaaggtaaacaagtcagcagtgtaacttttttagcacccagatataatgatgctgaccccccaaaatacttcaaagctgttgatgggaggcctgccactgccagttataaccactttgtttaccaaggtcagaatagttcagttggatggattgcacaaagtcctctggaaccttctgttatcaataattttgctagagttgaccgtccacatcatttgaatatgggtacatttactgcccccgtctctattcctcaaatagacaatccttcaattgtctccccgatgggttcttgcacagcagacccaaggagcagcgttatcaataatcctgctttaattccaagattcaatgggttctcaactgtgaattcgtacaccagtcttagtgctgtgacgcagagcattggaacttcaatcccaaagctgataaatgtggataatgtagataaacgctatcgtggttttccacttgattcgttttccgtgtctcactcacgacatcaggtagcagtttcaagtaacctggagcaaaagaattcccagaagttggaagattcagatcaacagtcccatggcaagggtatgaagaacttcaatttgaatgagacactgtcagattgtcaggaagatggtcttgtagaacaagatgggagatgtgcttccagttttcagcatgataaagatggggggtcagtacttgggatctcttggctcaaaaaaaaacttatgtctgctgacccaacagctgtggagaagccagggaagatttttggacattcattgggaactgcaatagagctgaaaaatactaaagaccagaatgaaccagctgtgactattcggaatttgtcagattctgcttctacatctgttggctgtgcaattaagaaggataggccttcggataacattgttaccggaactctgcctgtctgtaataaagcccaagagggtgctacatgtttacctctttcgtgccagaagcatgtgcctaaagatggacaagccgctgaaggagccaccaagaaaagtggcgcccccatcaggaacttcatcgatctcaatgatgatgtaccaaatgatgacaattctgaggaatcagtagtgtcacacgaatgccacgtggaaccttcacggaacaaccatcctaaacgagcatttgtgattgatttagaggtgccggcctgtgaagaggacgcttcgtgggatattgatcaagaatgcgcgcagccgaaacctgatgcgtaccaggaagttgacgacggatctgatacatccgctctagctgcagccgagaacatcgtagcgttgtcaaggaatacgccaacagccgcagaggcatcggacgatacgttgcagtggtttgcagatctcgctgtattaaacatcaacgaccttgctgagcaagctgaactccaagcttgtacgaatgattccagtaactacgagtcggattcattcgagtccttgacactgaagctggaagagaccaagatcgacgatctctggagcaggccactggaacctgaaaccgcaaccgatgaacagacagtttcagctgctcaccttctcaccaagcccagaaggggccagcaaaggagacggcggcagaagcgagatttccagagagatgtcttgcctggcctttcgtcgctttcccggcctgagatcacagaggacgtccagttgctcgaggggttagtccaggcttccgggggatcctgggagtcgagcttgactaggcgaggacgttgtggtgggcgtgctagaggcaggaaacctcggaaaactgtagtaaccgtaattgtagaggaggaggaagaggaggaggtagaggttagcccaccgccaaaacctgctggcactggggaattggaagccgatggcaggggtatgatcgggtggggcagaacaacaaggcggtgtcgcagagcgagatgtccgtcaggtaacagcatggctactgcgtcttgagtgggagggtatttcttggcagcaagcattggacctgattaggtactgggtggttcacaattgttgtattgactccgatggatgggctggtggtataaggtgatcacactcatatgagtgtcggcctactggtctcagcacaactttcgtgcttttgggtcgaaacatggtttacgttcttataataagttcggtaaattagctggcgagacatttctgcgacagcattgtactaagctgttccaggttatgaggcccggtgccccggtatatattcattgtgagaaaaactgcaatgcatgtaaaccaccttgatctctgaagaatagctcatcacatgtgtaacaaaagggtgtgaatgaggctctgagcctgtattctttttgtagctgtatgccctgcctaattggcgctagtatccagcatgcgaattgctaatttagttttataccgtggatattgctcatatcgtgtcccaacgcttttcttccctatgggaatgcatatgccact

SEQ ID NO: 15665 - DNA, 922 bp, Zea Mays
gcccaccaccccctgctaggggtacggccgtactggagtggagaaaacagtgtggtcttgtggttgaacggcaaggccagccaagcttgttaaagattgtgaaatgacggctccagagacaactattctataccctaatgcaggtggtaacatccacacattcagagccatcacaccttgtgctctcttcgacgtcctttctccgccatactccgctgaggatgggcggcactgttcatacttccgcaagtctcaaatgaatcaaccatctgttgttttgcctgctgagatagatagcacacaagtagtttggttggaggagttggaggaccatcagcccccagaaggctttgttgttgcgagaggtatgtataaaggccctgtaattaggagataatttgctttggggcacagaatccaccaaactgcaaatcagctgaaagacgatattgcaagcatcctcaggtcatgtgcagcctacggtttactttgtacatgtcaaagtgacctgtgataattcaacagcagttttacaggacaagaatggatgtttttttgtttggttgcttttttaattgtgtcccactgctgtagtatctctgacctagttatggagctcttatcagaccaagaccgtggagcacctacttttgagcatagtctagcatattgtcatgatgtattgatgtactagggacatcaatggacaaccttttccatttggtgatttcagaaagagtttggttggggctaccattttgtctgtgtaatagcaccattactatttttgggcaagactgtaaattacgggggaggaactgtaataatatcgttagatttatcatgaaatatattttcacgatatacctatcatttttaataaaatcttaaacatcaatgttttttcataaactaagtcaaa

SEQ ID NO: 15666 - DNA, 2354 bp, Zea Mays
acctcccctccccagcgacatctcgtgtctctgttgggagctccttcaacatctcgtctctctcatcctccgacgccatccgctcccggcccggccgagccgcgcgttgtgtatggattccaaaagcaatcatacaggggctatggcgaggccttacaaacctaagaatatcctcattacaggagctgctggttttatcgcctcccatgtcgcaatccgcattaccaagaagtaccccgattacaagattatcgtccttgacaaacttgactactgctctaatctgaagaacctgcttcctagaacattgataccataatgcacttcgcggcccagacacatgtcgacaattcatttgggaattctttcgaatttaccaagaacaatatttatggtacacatgtacttcttgaggcctgcaggattagtggccagatcaagaggttcatccatgtcagcactgatgaggtctatggggagactgacgaggatgcagttgttggcaaccatgaagcatcacagctgcttcctacaaacccatatgcagccaccaaagcgggagcggagatgcttgtaatggcatatgggagatcctatggactgccagttatcactactcggggaaacaatgtctatggcccaaatcagttccctgagaagcttatcccaaagttcattctcttggccatgagaggggagcccctccctatccatggtgatggagtcaatgtccgtagctacctctattgtgaggatgttgcggaggcatttgaggtcattcttcatcatggagaagttggacatgtttataatattggaacaaaaagggagaggacagtgcttgatgtggcaaaagatgtttgcagactcttcaatcttgaacctgacaaagtcatcatgtttgtcgagaacagaccttttaatgaccagaggtatttcttggacgatgagaagctcaagagccttggatgggctgagcgcaccccatgggaagaaggcttaaaaaagacaatggagtggtatgtagcaaattctgattattggggtgatgtttctggggccttactgcctcatccaaggacattgatgatgccagggtgcgaggggtctgaggagattaaaggaatactcagccggtttaataacattcaaacaaaggtcggttcaacatcagataatgctccagaaccgcatgccttcaagttcttgatatatggcaggacaggatggatcggcggacttcttgggaaaatatgtgagaagaaaggaattccatatgaatatggaaatggccgcttgcaagagcgttcttcactcgtcctagacatccaaactattaagccaacacatgtcttcaatgccgctggtgtgactggaaggcccaatgttgattggtgtgaatcgcacaagccggacaccatccgtaccaatgttgtgggcaccttgaatctagcagatgtatgtaggaagcatggcttattgatgatgaactatgccactgggtgcatatttgaatacgatgcacatcatcctgaagggtcaggtatcggcttcaaagaggaagatacaccaaattttactggttcgttctactcgaagacgaaggcaatggtcgaggagttattgaaggagtatgagaacgtctgcactctgcgagttcggatgccgatatcctctgacctcagcaacccgcggaacttcgtgacaaagatcagccgttacaacaaggtggtgaacatccccaacagcatgacgatattggacgaactcctgcccatctcagtggagatggcgaagaggaacctgcggggcatctataacttcaccaaccccggcgtcgtcagccacaacgagatcctagagatgtacaagcagtacatcgaccctagcttcaagtggacaaacttcaccctcgaggagcaggcgaaggtcatcgttgctccgcgaagcaacaacgagatggacgcaaccaagctgaagaacgagttccccgagctgctgtcgatcaaggactcgttgatcaagtacgtctttgagcccaacagaaaggtgcccacagactgaagcccgaagggctggcacagctgataccgtacaacacagcaaccattagtgttagactatgtgtgtgggccagcactactttacttttgggctgtcggtctattagggttagagtcctgtgagtctatatattgtacctcatctcttatacaatacatttttgggctgtgagtctatatattgtcgaacagcagaggaggtcgagggcggggctgtccgcccagatccacaccgccgccgcttctagggcaggtcgtcgtgacctggacctcccccgcacggacatcgct

SEQ ID NO: 15667 - DNA, 1410 bp, Zea Mays
aaactggctaagttgctaagtcgagatagaagattgctaagtcgagatagaaggggcgagcgcgctgcgctatccatcccaccatccattctctgccaagctttccgactcccagccaacacgaaatggcggcggcggccgcacccgtgtccctggtcttcttgtgcacgcgtgggcagcagcagctggtacttgtcgacgccaccaagccccctctgcccctgcgcagccgcgctttctccgtccgcgccgctcagcagcagcagcagcagcagcaccgcgcccgcccacggccccctcgcaggaacaagccccccggacccgcgcgccgtccgcccagggtccctctggaccaagatgaatacgacggcggctatgatgaccgggaggaggggaggttcgctgggggcacccgggccgccgccatgcccaagccaccggccggcttcgtgctggatgaccagggcaggtgcatcgccgcagcatccaagcgcatcgtcaccatcatcgacgacaccaacaaccgccccttggagtgcataatcaggagagtattccggagctcgcaggaccacgactgcatgcttctctgcccagttgacatgcctgtgcaggtcctcaagagcacaaatttcagtggctgggtagctgtcgatgacgaccaactcaagcaaatcattccatctgttgcctatgcccttgccagagtacatatgcactttgtagaaagcggattctgttatacagcaaggggtggcttctgctttcctgaagaggccattcaagagtttcatgattccggtgaaggtgtgccttttgaaggtgtagagatttgctgcttcaatttggatggtgcacactatatgatttatacaccagttgatcctcttctttttgtcgcaatcaaggataaggatggtgtgctacgcatcgctgaggatgatctgatggaagaccctgcagttctggatgcggtagatgaagagacagaatttacagctctagtggaggaggaggaggcccttcttgaaacggtacttggtgaaaggtgatggatgccagggagtacttgtacaggaagaggaagagagactcgtctgattgtagtagaatagaatggaatggaatggaatggagtgcatttgcaactgtaagcagctgcaacctgcaatacttggagtggagtgatggacaacgcagttgataagcaactgctgctgctaatctttgtctagtgtaggatagatagctcaatgggacgatcaaagctatttatgatgtgctcatgtgtttgaattaattaataaaattaccccaatctgaatagaatacctggtggatggaagaaatgaagcaaaatacccccactgcaaccgttttttcttttgaattttcaagcgtattgagtcc

SEQ ID NO: 15668 - DNA, 2366 bp, Zea Mays
ttgttcctggaacccagacctcaagccttcgccaccgcgcagtgtccagaatcatcccccacccggtccgcggcgatcgtgcggaagctggcgacgcgggagagcgagtggcagcgagggttagctggagatgaacggggccgagaagctgcggtgggccttctcggacggcagcgtcaccgatctcctggacgcccgcagcctccacggctccccccttgatctacggtgtggagcaaagaagtctttagctgatctacccaaacatccattggcactgaagtcttgtgacattagctctgtctgttcccatcaaatccttgttggtgggagcgatgcatttgctaggttgtacgatagaagaatgcttccaccattgagctcgtgtcaaaccaaaaggaagccaccaccatgtgttaaaatgttctgcccattgcatcttgctgacagtaagaagacatattcacaccttacacatgttgcattcagcccaaatgggaaggaggttcttttaagttacagtggtgaacatgtttatctgttcgatgttgacccagatggtatgagttctagatacacagcagactatgtaagggaacaattatttgtacctccttttcacaaagtatcagcaaaaggacatgcaaaacaaaagaaggcttcagtaaatacaacttcaagaagtttgtctagggtagatatgtgcaagaaatttatgcaagtcgcaacaagatctctggagacaggtaagaacttaatgcttgggattgaagcatgcagtgaagtccttgaatcaatggaacctgatattgacgatgacacgaggcacgagtttttgtgtactcgagcagcattgtacctaaagaggaaatggaaaaatgatgtttacatggcgattcgagattgcaatagaacgtggaagattgatgtcacatcgtatcaagcacacttgcatatggctgaggcactattgcagttaggaagactgaaggaggcatctgagcatgcagaggtggcaaatggtcttcttccacctcattgtccattgagggagcaggtggatgatttcaagcaacgcatcgcttcagctgagcttgagaagaacagagcggataaaaatgggagctcaaaagctgatactcatggaaaattacgctcattgagtgagatactctttagacctgatgttggtggttcatcacaggagggacgagaagattcagattatgatgatgatacggaaatggactatgaaacaacggtatctggtcatgaaagccgagagaatgatcaaggtgtcttccggggtagtttaagtttccaatttcatcaaagagaggatcaaaccaatgtacacactgatgagaatgggtcagttgagtcccctcgaaaagatgattatgcttttcagtcagatgttgccattgatatgaaacaaagatatgttgcacactgcaatgtagggacagatataaaacaagccagttttcttggtgagcaaggggagttcattgccagtggaagtgatgatggtagatggttcatatgggagaagagaacaggaaggcttattaaaatgcttgcaggggacggagctgttgtgaactgcatacagtctcatcccttcgactgtgccgttgcaacaagcggaatcgataacacaataaagctatggacacccgatgcaaatgctacatcaatggtttctggacctgaacttgatgtattgagtgccatagagaataatcagcagaagttatgtcggaaccgtcactttgtactgccttctgaatttttagaacgatttcagatgcatgagttttcagaaggtttcgagtgtgcccagagctgatttactatcgctggagctgcttgaggaaaagggtaatacttggaagaatgatatcatccaagctacaagcagcctatgtttgaattagtgaaatcggaaggccttgttgccattatagagtgtagacgcacctggatagataaacaggtgtgccggtgctgaaactattgcttgagatgtcaataaacactggaattatgttgttgtttgggggtggtataatgattcatacgtgtgtaatgcagtgtggattcattcccttgtacagattgtagataggtgagattctgcaataagtgacaatcacagatgtacatgtgtggtattcttgtctctgcgtgccgcaggtaggtcatgctagtttgtggctgacgattggggtatatcttctcttaaagacttgctgggtctggatgtggtgtaggaactgtgttactttatgtttcctaaatatgttactctttccatcccaatttataattcatttaatttcttttgttcttcctgcgtgcat

SEQ ID NO: 15669 - DNA, 871 bp, Zea Mays
ctggagtgttcgaggcttcccctccccactagccacagtagcacctcagcccaggtccccgtcgcctccgctcaactgccgccgcagggcccgctgcaggcttccatgtgtggtagggcccggtgtaccctcagcccggccgaggttgccagggccttcggcttccccaccacctccgccaacgcgggcggcggtggagacggccccgctgtgccgacgctccatcttaaccggttccggccgtcgtacaatgtgttgcctggggcgtacctgcctgtgggcgccatgcgggcactaccaggttgcgcccacggaggaggaggttcggatggggaggggccggtgatccagtgcatgaagtgggggctggtgcccagcttcaccggcaaggccgagaaacccgactatttcaggatgttcaatgccagatcagagtccgtaaaagaaaaggtttcattccgtcgactaattcaaaaaaataggtgccttgttgcagtagaagggttttatgagtggaaaaagaatggatcaaaaaaacagccatactacatacatttccaagatcataggcctcttgtctttgcagccttgtatgatgcatggacaaattcagaaggagagatcacccatacattcactattttgactacacatgcctcaacttctctaaattggcttcatgatagaatgcctgttatcttaggcagtaaggactatgttgatgcttggttaaatgatgtttctgtaaaacttgaagaaattactgcaccttacgaaggagctgatctggtttggtatccagtgacatccgcattgggtaaagcatcatttgatggacctgagtgcatcaaagaggttgacaagtctgagg

SEQ ID NO: 15670 - DNA, 2179 bp, Zea Mays
gaagagcgtgcagagcgagacgcgtcgcctcctcccttcccccaccccgccgccgccctcgcgtccgtccgtccgtccgtccgtcgagaggaacattcctgaggatgatcctaggaacccagctgtgattgctgataatgtcggtgacaatgttggtgacattgctggaatgggatctgatctctttgggtcatacgcagagtcttcttgtgctgcccttgttgttgcgtctatttcatctttcggaatcgaccatgatttcactgggatgtgctacccactccttgttagctctgttggtatcattgtctgcttgatcaccaccctttttgctactgatttctttgaagtcaaggctgtgaaagaaattgagcctgcacttaagaagcagctcatcatctccaccgtcctgatgacttttggtattgctctaatcagctggttggcccttccagctaagttcaccatctacaacttcggtactcagaaggaggtttccaactggtatactatttttttttaatctttgccatttatttggtgaatgaaatgtaccgtcttgacaactgccatatctttgcaggggtttgttcttctgtgtttcaattggtctgtgggctggtttgattattggttttgtcacagaatactacactagcaatgcatacagtcctgtgcaagatgttgcggattcgtgcagaactggtgctgccactaatgtcatttttggtcttgctcttggatacaagtctgttatcatcccgattttcgctattgctgttagcatctatgtcagtttctccattgctgcgatgtacggcattgcagttgccgctcttggtatgctgagcacaatcgcaactggtcttgctattgatgcttatggtcccatcagtgacaatgctggtggtattgctgagatggctggaatgagccacagaatccgtgagagaactgatgctcttgatgctgctggcaacacaactgctgctattggaaaggggtttgccattggttcagctgctcttgtgtccctggcgctttttggtgcctttgtcagcagagctggagtgaaggtcgtcgacgtcctctcccccaaggttttcattggtttgattgttggagccatgcttccgtactggttctctgccatgaccatgaagagtgttggaagcgctgccctgaagatggtggaggaggtccgcaggcagttcaacaccattcctgggttgatggagggaacagccaagcccgactacgcaacctgtgtgaagatctccactgatgcttccatcaaggagatgattcctccgggcgctctggtcatgctgactcccctcatcgttggaaccctctttggcgtcgagactctctccggcgttcttgctggtgccctggtttctggagtgcagatcgccatctctgcttccaacaccggcggtgcatgggacaatgccaagaagtacatcgaggctggtgccagcgagcacgcgaggaccctcggtcccaagggatccgactgccacaaggccgctgtgatcggtgacaccattggtgaccccctgaaggacacctccggcccgtccctcaacatcctcatcaagctcatggccgtggagtccctcgtgtttgcccccttctttgccacccagggtggcctgctcttcaagtacctgtaaaagggacaacaccaagcacacagcagaagtatacgatctcccgaccgaccgtggacaatatcgaataactcctgccaaatcgccagttccttttgtgtactgtgcgctagccgccgcctagctgcactgctgtatttttgtttcaggattgctgctgctgttcgcattcaatctttgggcctcccggagccgccggaggcgcgttttactgttagccttactactcttactccctgtagctccacgtagaagaaaccgatgtcctgcgtctggcaatttttcttagtcccttgatgatggcgatgatgctgaaacctttttttgaacaatgatacatgatgattgttgcgttgtactggtggtaaatcacggtccgtattggcctgttctgttggtgcccatttccaatcatccaatgtcgtgctctgcgttatacgattgctgtttgtactgtcatagctgctgccgacaaggtcataaagaaccttaaacttgaagcc

SEQ ID NO: 15671 - DNA, 1061 bp, Zea Mays
gtgatagattgactgaccgagcgccgggcctccgagtttccccgggactatgatggtgcgtgcctgcagatgcggctgtcgtacagtcccgcagctcatatattcctcttcctggtgcagtggacggactgcagcctcgcaggggctcttggtctgctgagaatcctcatatacaaggtttatgtggatggcacaacaaccatgtcgactcatgagaggaaatccagcatcaaagaattctatgctgtgatatttccttctttgctgcaactgcaaagggggatcactgatgtcgaggacaagaagcagaaggccgtatgcatggagaagtacagaaagaaagatgaggatggacgggacaccttatctgatattgatgttgagagggaagaggagtgtgggatttgcatggagatgaacagcaaagttgtgttgcccaactgcacccatgctatgtgtatcagatgttaccaggactggagttcaagatcgcagtcctgcccattctgccgtgacaacctgaagaagacctgtcctagtgacctgtggatctatgttgaggaccaagatgtggtcgacatggagacggtgtcgagcgagaacctcagacggctgttcatgtacataagcaagctgcctctgattgtcccagacgtcatcttcagcgtgtatgattcccacatcaaatgacttccgacgcgaccttcccgacgaccttcagccagtgcccagctccagttaatcttatgcccccatgtcctccattttcatgctttgctcaagcttttggaagtgcctgaactgatttggaaccgaaagccttccggtggtgctttagaaacttgtttagtgcctgcatgcatctttaatcatatgcagccactctgtacatatctgacttggctcagttaataggggactgtgcttgccccaaatggaggcagggccgtttgtgtctttctcatgtttccattagcgaagcaacgcaaagttctgggcattggaaggtttctgctgcaatgttagaatgctctctatacttaattagtctggatctacta

SEQ ID NO: 15672 - DNA, 723 bp, Zea Mays
aaaccgcaggaaccaaaaggccactgcagcagacggaggacggcgacggtggcggcggggaagagccgaagaggacgacgagggatagaacggcgagggagaagctgtctctcttcacgctcgggatcgttaaccgtagctgacaaccgtgcggaaacaccggattgtgagggccgaggagagaggtgcggcgaggcctctcgaggaggcgggggcgggatggcgacgccggggaagggaggggcagcgcggtttgcggccgcgctcttcgtcctcctgaatctcgctgtggccattgctgggaagagctactacgacgtgctgcaagttcccaagggcgcgtccgaggatcagattaagaggtcgtaccgcaagctcgcgctcaagtatcatccggataagaaccccgacaacgaggaggccaacaagcgcttcgctgagatcaacaacgcgtatgaggtgttgacggaccaggagaagaagaagatctatgaccggtatggcgaggaggggttgaagcagttccaaggcgggagaggaagtggcggtggaatgaacattcaggacatctttagcagtttttttggtggtggtggtggtgggatggaagaggaggaacaacaaattttaaaaggtgatgaggtgattgttgaactggatgcttcattagaggacttgtacatgggcggttcattaaagtcatgcttgcgagaagggcaggcc

SEQ ID NO: 15673 - DNA, 2712 bp, Zea Mays
gtaactctgatcccaatcttggcagggttatgcgaataggttgaggtggagattgactcacacaagcaagaccaggagcacgtcccaactttgtctattgaagcaacactcattgataactctggactatctaacagtatagatgctgatctttcatccgctaatgcagtcaatttgaaaccgaagccaaaacgaactcgaagcccttgtcttggttttcatggttatgtacttggtggaaaaatagaaaatccaaaactttggtctagtgagcatcctaacttatacacgcttgttgttctccttaaagatgccaatgggaagcttattgactgtgaatcatgccaagtgggcattcgtaatgtggtcatggcacacaagcaaatgctcgtcaatggatgtcctgttgtgctaagaggtgtcaacagacatgagcaccatccacgccttggaaagacaaatttagaagcatgcatgatcaaggacctgattttgatgaggcaaaacaatatcaatgctgttagaaatagccattacccacagcacccaagcatggtggagagagataagaatcatgcatgcattattgtttggtctctaggaaatgaatcttcatatggacctaatcatgcttccatgtctggttggattcgtgaaagggatccaacaagactcctccattatgagggaggtggttccagaacatcatccacagatattgtgtgccccatgtatatgcgtgtctgggatgttgttaagatagcaaaagatccatctgaaacaaggcctctaattctttgcgaatattcacatgctatgggaaacagtaatgggaatattgatgcgtattggatggccatagacaacacttttggactccaaggaggttttatatgggactgggctgatcagggtttactgaaggaggactcagatgggtctaaattttgggcatatggcggcgactttggagatactccaaatgactccaatttttgcctcaatggcattgtgtggcctgatcggacgattcacccagctcttcatgaagtaaaataccttcaccagcctatcaaaatatcatcagcagataatatgcttaagattgaaaatggacacttttttgagacaacagaagctttggacttcagttgggttcttcatggagatggttgtgtcttgggctctggtccattgaatattccaactttggcaccacaaactagtcagctcatcaacatggaatcatcaccttggtttgccctttggagtgcctgtgcagcaaaagaagtatttttgtctgtgaatgtgaaacaaaggcatgaaacacgatgggctaaagctggtcatctcttggcttcagcacaactgtgtttgcctcagaaaaatggctttgtccccagcgtgatagcattgtccagtagccctttggtctgtgaacgcattggtgataatgtaaccatctgcaagaataatgcctggaaaattaaagtaaacagtcagttgggaacaatcgacagctggaaggtcaacgacgttgagcttatgagcaaggggatactcccatgcttttggcgcgcaccaactgacaacgacaaaggaggtttcttcaccaagccatatgactcgcgatggagagaagccttcctcgacaatgtctcgttccacagcagccagttctctgtcaaggagttgccggacaacaccgtggagttctccaccctctactacggtgttcccgggcacctacccaagcctgacgacgaagcctccgagtccattctcttccgggtgaagatggtatgccggatccacgggtcaggcgacgtggttctcgactacgaggtaaaccccaggagcgacctccctccccttccccgggtgggcgtcgtgttcagcgccgggaggtccctgagccacgtcacgtggtacgggcgcgggcccttcgagtgctacccggaccgcaaggcggcggcgcacgtcggcgtgtacgagagcagcgtggaggagctgcacgtgccgtacattgcccccgtggagtgcggcgggcgggcggacgtcaggtgggtggcactccgcgacgccggcgggctcggcctgtacgcgtcggcgcacggcggctccccgccgatgcagatgagcgcgagctactacggcgccgcggagctggacagggcaacgcacgtccacaggctggtgaagggggacgacatcgaggtgcatcttgaccacaggcacatggggctgggcggcgacgacagctggtcgccgtgcgtgcacgagcagtacctgctgccgccgacgcggtacgccttctccctgcggctctgccccctgctgccgtcgtcgtcgtgccatgacatctacaggtctcagctccccagctgatggtgccgtgtgccggagacccgtcgacgtcgagccttgggaaacaacaatgaacgcaatggcctggccagtgaatgaaagtatataatattgtaataaagcagagacgtattagctcctgcaacggcctcgcgatcgcctggatatgtctatgctgagggggtgtttagttaactaataacctaactacatatggcgccaagttactaaaacttaataaataactattactaactaataaatagtaactgaattcctaacttaataaatacttcctccgtttataaatatatgacaccgttgattttttaaaaacaacttaga

SEQ ID NO: 15674 - DNA, 1710 bp, Zea Mays
ctccggcgtcccggagcggtcgcgcaggcctaccggatctctccgctccggccccggcgtcgtgcttgcatgctggttctatgattgaagggaatgatccagtcacgggtcatataatctcaacaaccattggagggaagaatggagagcctaaaaagactatcagctacatggcagagagagttgtgggaactggatcattcggaatcgtcttccaggcaaaatgtctggagactggtgagactgttgctatcaagaaggttttgcaggacaagcgctacaagaacagggagctgcaaatcatgcgatccatggatcactgcaatgctgtttccttgaagcattgtttcttctccaccacaagcagagatgaactttttcttaacttagtgatggagtttgttcctgagtcactacatcgtgtgctgaagcactacagcaatatgaaccagaggatgccgcttatttatgttaaattatatacctaccagatatttcgaggtttagcctatattcacacagtacctggtgtttgccacagggatgtgaaaccacagaatcttttggttgatccattgactcaccaagtgaagatatgtgattttgggagtgccaaaatgttggtcaaaggtgaagcaaacatttcatatatatgctcacgttattaccgtgctccagagctcatatttggggcaaccgagtacacaacatcaattgatatttggtcagctggatgtgttcttgctgagctgcttcttggccagcctctcttccctggcgaaagtgctgtggatcaacttgttgagataataaaggttcttggtactccaacacgtgaggaaatccgttgtatgaatccaaactacaccgagtttagatttcctcagatcaaagctcacccatggcacaagattttccacaagcggatgcctccagaagctatagatctcgcttcacgtttgctccagtactcaccaaatctaagatgcactgctcttgaagcgtgtgcacatccattctttgatgagttgcgagagccacatgcgaggttgccaaatggacggccatttcctccactgttcaactttaaacaggaactagcaaatgcctccccggagctcatcaacaggctgatcccagaccatgctaggcggcatcttgggctcactttattgcccaccgctggaccataggcgaaggctctatggtgtttaaaccttgctctttctgattcttcgttgtgccataggcaattcaaggtgtagaatctgaccattattggaaagccaaacacgagctggcgccaatgtgttgcataaggagaggcggtatgttcgtgcagccagccttttgccgcctgttttaatgcaaaatctgattttacttaagcagtgtgaggggaagtgggttggtgtattgttaagctattgaaggaattcaatccctggtattgtattactttctccaacgttaaatgttgtagttcgcctgtaagtgttccacatcgcctgttatcagtccgcaatccttcgtgtaaatgttattaatgaaaaaaatacatcttgctatgttaccgatcgactcattccaatcacattccgtcctgttgcaaacaaattcttgttttcattgtcagtcgtgctgatcgggaattgtttccagcatcttcctgcaaggaagtgttaattctgaatggttgtaccacttccg

SEQ ID NO: 15675 - DNA, 1988 bp, Zea Mays
tcaaagttgacatagaaagaggtaaaaaatggtcagggcaagaagttacaatgtagtcactacatgcctgttgtgattcctgaaggaaaagctcttccttgtgtcatatattgtcatggaaacagtgggtgcagggctgatgctagtgaagccgctattattcttctaccgtcaaacattacagtctttacactggacttttcagggtctggactctctgaaggagagcatgtcactttaggctggaatgaaagagaagatctcaaagctgtggttaactatttgcgaacagatgggaatgtatcttgcattggtttgtggggtcgctcaatgggtgcagtcacaagtctaatgtatggagcggaggatccatcgattgcgggaatggttcttgatagcccattctccaacttggttgacttaatgatggagctagtggacacatacaaatatccactgccaaaattcactgtcaaacttgcaatacagcatatgcgaaaaattgtcaagaggaaagctagtttcgacatcatggatcttgataccattcaggtagcaaaacaatgttttgttcctgctttgtttggacatgcaactgaggatgattttatacttccccatcattcagacaagatatatgaatcatatattggcgacaaaaacattataaaatttgatggggatcacaattcaccacgtcctcaattctactttgactcaatcactatatttttccataatgtgctaaaccctcctgaagtggcagaggatcattatttcatgacaccacatggtagccttggtcagggtcattgggatacagaacaagacatagagtatcggttctctcaatcacctacagccaatgctactacaacagaagatgccattgcacagttgcgctctagaaggctcatgagtagaatggaggtcccatctggtgccaccaccgaagacaggactgatcgaactgagggtttcgatagtgatcttggtccctcttcatctagtgtatcaacagcaactcctcccaatggtcgcaacggaaggctgctgactccaacctctgatgatggcgagtatgtggagtactcatttgatagcttgtcagatatgcctcacaccgtggaagatgaagatagaatgctaatgcaagcaattcttgaatcactgaaagactatgaacagtcgaatacaaaaaatgtgcaatccactgcatctgatcctgcatctaaagccaatggtactgtaaaagactgcaatggtgttgctgcagcagcattggagcaagatgcatcctcatttgatgctcctgacaagcatacgaatgtccccaacagtggagaaaaagtcagcgaagggcaaagtacagattgcaacgccggaaagagcagtgcttcggtctctgcttctggttcctcagagcccctggcaccaacacagatggtgaatggacaacctgcttcggtagactcccagaaagtgacccagaatgccaatggagaggatggcacaagagcaactttggtagttcagaagagccggacaggcggcctgatagaaaaatggggttccttcttcaagaacaacgactaaggcgaggaaagatagacgatgacacctttgacaatacgtgttccgttgtgttcatagtcatagaatcgccgttggctgatgtccagcttgattggttttacgtgtaaaatggaaaggaaacaggtgatttcaggacgttcgtgtgtatatagaaggaattgtagcgcccccattgatttataccatctctcaacttccactactttcggttgcggtgaattggcaagacctttgttcttactaatgtgctgtagacttgtagcataatttgaaagctgattattttgtagttttttaaatagtaaagggtaatgtgcctcttaacgtagagttgaattcttacacgagcaatagggtcaattttttaaattgtatttaatgtccaaaaaaaa

SEQ ID NO: 15676 - DNA, 736 bp, Zea Mays
gggtgcaccctgtcccagaacgcgtgctggtcgcggttgctgcacaccgtggcgttgggcaggcagtccgcctcggcgccgaacctcccgcccccgcagcacgcgtcggcgacgtccgtgtaccccgacgcccccgggtcgtcgaaggtggccatcgacaggccgtagtagtcggcgagcgagtaggtgaagcccggcaggcgggaggcgaggctggcgagcaggaccgcgagggcgtcgtccaggcccgacgcgagctcgttcaggccgtccaagcacgcgcccgtcttcgtcccgccggacagccgcgccacggggacgcagccgagcagccccacgttgatgatggcgaacttcctcgcgcccatgacgcctgcgcggtggcgaagacgaataggtcgttgctgccgacgctgaagaggaagacggacctggagagcaggaggtgggtcgcacgggagcccagcttcgtgaccaactgtgccttggtggacttgaagtactgcacctgcttcgacaatgggatgttgttgcccgcgttctgcatttcagtggagtcgaggatcccagctcctccggaagcatagctgacaccgctgccacgagctgtgaggaccagacggccggtgctaggtgccaacgacaggtatggcggaggactagacgcgaaccccatgctctttgctgcacatccatgcaagcatgtatgtagcgcgtatacaaaaaaataaaaaca

SEQ ID NO: 15677 - DNA, 3923 bp, Zea Mays
gtccaccgcggcggcggcggggaacggcgtgagcgcaggacgaaacgaaacgaaacccatctccgcaagggcagcaaccctaccgggaccggcagctcgctcgccttgcgccgcgcattcccaccacgcgtctccccaaattcgcggccgtctatatatataaagaccccgcccaccaccacttttgccatcgcaacccctcgtccttttttgcacagcggccatgcctcccctcacgagctccctcctctcccgctccaccaccggcggctcctccgcccgcggcgtggcggtggccgcagcgatctccaggcccgccgcggacgccgccccttcctcctcgtccccgcctgcccgtccgaccccgaggccgcgcccaagcccggcgtcgcccttcgcgtccggcctcgcgggccgcctcttcggcggccaccgcgccgccacccgctccgcgtcgtctgcggccgccgtcttcgagcgccggtttgcctcagccgcgaccaggaactcgtacgatgaaatactgacgggcctcgggaggccaggaggcggagaggagtttggcaagtactacagcctgcctgctctctccgatccgcggattgatcggctcccatattctatcaggattcttctcgagtcggcgatcaggaactgcgatgatttccaggtcaccgggaaggatgttgagaagatcttggactgggagagaagtgcaccgaagcaagttgaaatcccgttcaagcccgcccgtgtcctcctccaggattttactggtgtcccggctgttgtcgaccttgcgtgcatgagggatgctatgagcaaactcggcagcgacccgaacaaaattaatcctctggtacctgtagaccttgttattgaccattcagtacaagtcgacgtggcaagatcagcaaatgctgctcaggcaaatatggagcttgagttctatcgtaacaaggaacggtttgggttcttgaaatgggggtcctctgcattccgcaacatgcttgttgttccacctggatctggcattgttcaccaggtgaatcttgaatatctggcaagggttgtgtttaataatggtgggatcctttaccctgacagcgtcgtaggcactgactcccacacaactatgatagatggtcttggagttgctgggtggggagttggtggtatagaggcggaagctgcaatgcttggccagccaatgagcatggtcttgccaggggttgttggcttcaagttatcaggcaagctgaggaatggagttacagccactgacttggttctaacagtaacccaaatgcttcggaaacatggtgttgtcgggaaatttgttgagttctatgggcaaggcatgagtgaattgtcacttgctgatcgggcgaccatcgcaaatatgtctcccgaatatggcgcaactatgggtttcttcccagttgatggaaagacgctggactatttgaagcttactggccgaagtgatgatacagtggccatggttgagtcctacctgcgtgcgaataagatgttcgttgatcacagccaggctgaagctgaaagagtatattcttcttatctagaactgaacctggaagaggtagaaccatgtctatcgggaccaaaacggcctcacgatcgagtgacattgaagaatatgaagtctgactggctttcttgcttggatagcgatgtaggattcaagggttttgctgtccccaaagagtcacaaggcaaagttgcagaatttttgttccacgggactcctgcaaagataaagcatggtgatgttgtaattgcagcaataaccagttgcacaaacacatcaaatcctaatgtaatgctgggagctgctttggttgccaagaaggcttgtgagttaggcctggaggtaaagccatggattaagacgagccttgcacctggttctggtgttgtgaagcagtacttggataagagcgggttgcagaaatatcttgaccagcttggcttcaatattgttggctatggttgcacaacctgcattggaaattccggggagcttgatgaatccgtatctgctgcaattactgagaatgatattgtttctgctgctgtattgtccggaaacaggaattttgaaggacgtgtgcatcccttaactagagcaaattaccttgcttcccctccattagttgttgcttatgccttggctggcacggttaatattgattttgagaaagaacctattggaatctcgaaagatgggaaagaggtttacttccgggatgtttggccatcaacagaagagatagccgaggttgtcaagtcaagtgtgcttcctgacatgttcaagagcacatatgagtccatcacccaaggaaatcctatgtggaatgagctgccagtctcaacaagcactctctatccctgggatccatcatctacatacatccatgagcctccttacttcaaggatatgacaatgactcctcctggcccgcgaccagtgaaggatgcatattgccttctgaactttggtgacagtatcacaactgaccacatctcgcctgccggaaacattcacccagacagcgcagctgcaacatatctgaaggagcgtggtgttgaaaggaaggacttcaactcatatggtagccgaagaggaaatgatgagatcatggctaggggaacctttgccaacattcgtctcgtgaataagttcttgaagggtgaggttggacccaagacaatccatgttccatctggggataagctttcagtttttgatgctgctatgaaatacaagaatgaagggcatgatactattatcctggctggtgccgagtacgggagtggtagctctcgggattgggctgcaaagggcccaatgcttcagggagtgaaggctgtgatagcaaagagctttgagaggattcaccgcagcaatcttgctggcatgggaatcatccctctatgcttcaaagcaggggaggatgcagacaccctgggcctaaccggccatgagcgctacacggtccaccttccaaccaatgtgagtgagataaagcctggccaagatgttaccgtgacaactgataatgggaagtcgttcacttgcacactcagattcgacactgaggtggagcttgcttactacgaccatggtggcattctaccatatgtcatcagaaagattgcggaacagtagattgagatgattgcgatgcggtgaatcgtaattggtgtaaacgacccatttttgagtacttataataacctctgagtttctcagagtgagctgtctgaacttttagtaaccttttgctttctttaagacactgttaataatatgttaactcctgcaatatctgaatatacatttggcagatgattccctatgttgtaaatgacactagttcataacactgacgcagttcaaagcggttcttgttatctggtggtactcaaattagtactgcaaacaatcgattagctgattttattttgagttttgtattacgaacctttttgactggtgaaacggttattccatttgcttcaagcgatttggaaatgattgttacagaaagctgtttgttacagtgagtgtattttgcctcttaccagctaacgtttcactttcacgagcgactggcaatgaccctgaagcaatgacaggatacataagcagcttcagcaggccaaggcaactgatgcgaggtcggtacgtgattttgggagtggctccatgatgggcaaaagcaaacgatgcgtagagaaccctttcagcggctgaaatatacttgatggactaaattacttggttcggcatttaacattgtaaaacttttcaaaatctagatataaatcttctatcttaaattcacacgttacgagagagaaaaaaagatttcatcggtgtccatggtctgtttcta

SEQ ID NO: 15678 - DNA, 866 bp, Zea Mays
attccctctcttcctcccgaaatttcccacctcagactccgagagaagcaaacacaagaagaagaagaaaaaaaaccgtccgcacaaaaaagaaaacggcagcgccagccagtgaggagaaaagcttcagatccagctccagctccaggtccccctcctccccaatgcctcgcccgtagccgcgtccgccgcacgtcgcaatggccggccccagcgtgcccgcagcggcgctggcggccctgctcgcggtcgccgccctcacgtgctgcgccatcccgccgggcacgctcggccggctcaccaacctccgcgtgctctcgctccgctccaaccgcgtcctcgggaccgtccccgacgacgtgctccagcttgccagcctcaaggcgctgtttctgcaacagaacctgctctccggccccatcccgacgggaatccagaagctcggcggcctcgagcgcctcgtgctctcccacaacaacctctcgggctccatccccttcgcgctcaacaagctcaccgcgctgcgagtgctcaagctcgacggcaaccacctctccgggagcattcccagcatcagcatcgcggggctcggcgccttgaacgtctccgacaacaacctcaacggctccatccccaaatcgctctcgcacttcccgcgggaatccttcgccggaaacctccagctctgcggggacccgctgccgccctgcagcagctcgttctttcccccagcaccatcgcccgggcttagccctggccccgcgacgggctcctccaagaggcggaagctctccggcgccgcaatcgcgggcatcgtcgtgggcggcgtggtggtggggctcctcctcctcatcgccagcatctcc

SEQ ID NO: 15679 - DNA, 1323 bp, Zea Mays
ttgagatgctctgacatttcttcctttccactttcccaactttacgccgcgtctcatccccacctagagtcctaatcgaaaaccctcgtttgttcgcttgaacagaagcctcccccgccgcacccgccaggcggcgcgggcgcgcggcaatggccgcgcagaacgctgggatcatcatcgattgtcgacaggcgatgtcccccgatcccccggccgtggagttggaggtcatcggctcatcttctccgtccatcacgccatgtcccgctgcagcggcgcccgccgacgccgatttcgatcatgacggatgcaccgcggaattatcttcttcaactgatcgagaattacaggaccatatcagacagtgggaagggtcctatgggcagggtgtactccgtaggatgccggatggtggcgagaagatgcattcacgtgtcctccggatgaagaaggagctcgagcggcggagggccagacagaggatggatgtcacgcccttgagacagacagtgcaagctaagcgtactggtggcagcagtggagaaatctacaacttaaagtctgatgatgagaccatggacagtacggctagcaaacactatccaaactcaagttgtactacatctacaaagacctatacccaggttaagggagctgcatatgaagaacaaagttctttaagccatggcaaatatgcttacccaaagaatggtggtcaaatttcaaaagagtcgttgaggcatcaatcaaaaacgtggaaccttgccaaaaataaggcctcacccttggagattaaaaaggatgtagttctgttggatgacgatgatgatatagagcctgctagatcagctgatgttcagatatctaataagtgggaggagtcaaatatccactatccttcaagcactgatccagaagcggttgaactgacctactctgacatgaaatgtcttgaaccagaagaatatttaaaatcacctgttataaatttttaccttcagtacctcaagaaggcaagacctcgcagggatttacacatgtttaacacctatttttatagcaaactcgaagaagcactatccatgccgaattcagcaagttacggagatggtggagaggtgtagatatttttaagaaagcgtacataattttgccgattaatgaatcgatgcactggagcttgatcattgtttgcatgcctacaaaagaggcagattctgggccaataatacttcacttggactctcttggtcttcactccagtcaaaagctttttgacatagttgcgagtgagacaactcccaccagtgcactaggcgtgtc

SEQ ID NO: 15680 - DNA, 3829 bp, Zea Mays
actccagttcccacacggcggcggccgcgcccgccatttactccgctccggcgtactcctcccactcctgagctgtcgctgacactgacagcaacccccattgactcccgacatccacagccgcacttactcacgtgccaccgacactccggtcccaccctatgaaccccctcccaccgccaccagggccccgccgcgttcccaccctactacctgtcaccgcggccgtcgtctcccccgtcctattcacgaattccgaattccactgcgctgcgcttctgctccccccttctctctccctccgtgttcgctccctcggatcccacgcggctgcgggctgcggcgggggcggcgtccgaggcttagggtttagcgtttggaggagtttaggggtttgtgaggaggaagaggaggaggaggaggaggaggaggagcggatggggacagcggggaagggcgcgtgggtggtgccggcgccggcgtacagggaggtggaggggtgggagggcgcgggggacgacgcgccgggcttcaggtgcgcccactcgctcaccgccgtcgcgcctaccaagggccacggcccgcggctcatcctcttcggcggcgccaccgccatcgagaccggcgcatcttcgggcctccccggcatcaggctcgcgggggtgacgaactcggtgcactcgtacgacgtggagacgcgcaggtggacgaggttacatcctgctggagagcctccgtctccgagggccgcgcatgctgcagctgcagtgggcaccatggttgttttccagggtggaattggaccagcagggcactccacagacgatctctatgtccttgacctcacaaacgacaagtttaaatggcacagggttgttgttcaaggggcggggcctggtcctcgctatggtcactgcatggatttggtagctcaacggtatcttgttactgtctcaggaaatgacggaaagcgggccttgtcagatgcttgggcattggacacagcacagaaaccatataggtggcagaaacttaaccctgaaggtgatagaccttcagcaagaatgtatgctaccgccagtacacgctctgatggcatgcttttactttgtggtggaagggatgcttctggaatgccactgtctgatgcctatgggctactaatgcatacaaatggccagtgggaatggactctagccccaggggtatctccatctcctagatatcagcatgcagccgtttttgttggtgctcggttgcatgttactggaggtgtccttagaggaggcagagctattgaaggagagggcgcaatagcagtcctggacactgctgctggagtttggttggatagaaatggcattgtgacctctcgtactttgaagtcatccaatgaacatgatgcttcttcggatctacttcggcgctgtcgtcatgctgctgcctcagttggttctcagatttacatttatggtggactcaggggagatatcctcctcgatgatttcctggttgctgagaatgcacccttccaatcagaaatcacttcgtctatgtacaatgttgatagagtccctaggggggaaactcaaaatagaaacaataattttcattcagattcacctgtccatcaatctacaaataacaggcaagaggcagcttctggtttcagtgcggacaagaagtcaattgacatgttgatagaggcctcaactgcggaagctgaagctgtcagcgctgtatggcgagctgctaaggaagcatctgcagcgtcttcggaagacagtctttcggagggaataggatcagaatccccattgagtgaaacttcaccaatgcctgaagatttcgatgatggggggtctctagaaccagatgtgaaactacattctagagcagttgtggttgctaaagaagcagtaggagatttaggatgcttggtcaggcagctctcactggatcagtttgagaatgaaagcagacggatgcatccttcaaacaatgaccaatcttatccaggccggagaacattaaatagacaacgatcaccacaaggtttgcataagaaggttatttcgttcttacttaagccaagaaattggagagctcctgctgatagaacattttttctggattcttacgaagttggcgagctatgctacgctgccgagcagatttttatgcaagaaccaactgttttacaattaaaagcaccaattaaagtatttggtgatcttcatgggcagtttggggacttaatgcgcctttttgatgagtatggttttccgtcaactgctggtgacataacgtatattgattatctcttcttgggagactatgttgaccgaggtcagcacagcttagagacaatagctttgcttcttgctcttaaaatcgagtaccctgaaaatgtacacttgatcagaggaaatcatgaagctgctgacatcaatgccctttttggcttccgccttgaatgcattgagagaatgggtgaaagtgatggaatatgggcttggacaagattcaatcaactgttcaattatctcccactcgctgccatgatagaaaagaaaataatctgcatgcatggaggcataggaaggtcaataaacacagtggagcaaattgagaaacttgagaggcctatcacaatggatgttggttccattgtcctcatggacctgctatggtctgatcctacagaaaatgatagtgtggagggtttgagacctaatgcacgagggcccggcttagtgacatttgggcctgatcgagtaacagaattctgtaaacgaaacaaattgcagttgatcataagagcccatgagtgtgttatggatgggtttgagcgtttcgctcatggacaattgatcactttattttcagcaacaaattactgtggtactgcgaacaacgcaggggccatacttgttgtcggcaggggcttagttatcgtgccaaagttaattcatccacttccacctcctgttaattcacctgagtcctcccccgaacgtggggatgccacatggatgcaggagcttaacattcagcggccacctactccaaccagagggcggccacaagctgccggtgataggaattctcttgcttacatatgatacttgacacgacagagccacctccatctgctggatatgtttgtttgtaatcagaaatttctttaccagtttcaaggtacatatggtatagccaagaagaacaatcaaccaacaggacatcatggatacacttgtgatcagttccctggtaatcctttgtgatgcatcggttttaactgtagttgtgtgctaccgtgacttcagctcctaactggggagctgcataatcagcatttcagatctcaagcaacattgtatgattgcgataccagtggacaataatcaagtctgatgtagttgtaatagctaatctgtaatttcagtgtacatggatagattgttctttcgtcagagtaggaaggtttccaaatgtttgcatactatgcatgctgcagcctgggacgcggtttaaacaggacagctatacaagttgccagatctgagctagattgggcagagaagatttgaaccattttatttgctctccgcggagcgcgaatgtaagaggttgtgttgtgttgtgaaatactgaattcgttataggtatttgtgcaataaattaagttttgcttaaatcagtgaatgctttggtttagtgacctgagttacaacgacaacaaagccctttagttagagatggcaacaagtacataccttatgggtattgtcatcctatgcccgtacgtgcgggttgcatattaccg

SEQ ID NO: 15681 - DNA, 639 bp, Zea Mays
cggacgaggccccctccccattctatctcattcccaattcctcatctgcttcgcttccccccaaatcgaatcctcatcgctccgtctatggcgactctaaccatgcagccgatcggtcccacccctgctccggctgcgcagcaagacccaagcaagggagagaatcctcctaccgtggatggtaccgatctgggtgacatcgactcgggctgggttatcctcaagaactcggatgtcgtttccgcggatttggcagccgccgccgtctgtggcggtcagcgtctaggctcttctacgattcctagctgggcacggtgggttctcggaggtgtggtttacacgctcgtgccgttctacaacagagttaggcatctcgaagacgagacggtgggattcgtggagaatgctgtggaggttgtggagcatttagctgaagtaacagagaagctagctgcgaatgtggctaagcaacttcctgaagatgggtctctgcagaaagcagtggaagaggttgaacacattgctgaggtagtggatgatgatgcggagaaggttgaagcagtcactgaaaaggtagtgttctgcacagaaatgttgtacaacacttgaaattgcttgcttggtgctgcatgagtgtca

SEQ ID NO: 15682 - DNA, 2514 bp, Zea Mays
cccagcccaaagggtcggcgggcaggcgaaagcaacgccccaaccacctgatccctccaccccatcgcacgccataacaaagcagagcgccacgccaccaccaccccagctcactcgtgccgtgcactcgacccgtcccccctccctccactcgatccacccgccaagacctcccattgccgccgccgagccagccagggggggagaagagaggccagccgcgtcgcggcgggcggaggaggaggacgagcgggagagccgagccgagccggccgggcaggatgttcgggcgggacccctggggcgggccgctggagatctccaacgccgactcggcgacggacgacgaccggagccgcgacctggaccgggcggcgctgatgcggcagctggacgagacgcagcagagctggctcctggccgggcccggcgaccaggccggcaagaagaagaagcggtacgtcgacctcggctgcgtcgtcgtcgaccgtaaggtcttcatgtggaccgtcggcaccatcctcggcctcggcgtcttcatcggcttcgtcatcatgatcgtcaagctcgtcccgcacaagcgccccccgccgccgccgcccgaccagtacacgcaggcgctgcacaaggcgctcatgttcttcaacgcgcagcgatccggcccgctgccgaagcacaatggcgtgagctggaggggcaactcctgcatgaaggacggcctctccgacagcaccgtccgccggagcctggtcggaggcttctacgacgcgggggacgccatcaagttcaactaccccatggcatggtccatgaccatgctcagctggagcgtgatcgagtacagggccaagtacgaggccatcggcgagctcgaccatatcagggagctcatcaagtggggaacggactacatcctcaagaccttcaattcgtctgccgacacgatagacaggatcgtcgctcaggtgggtgtaggtgacacctctaaaggcagcagtcagcctaacgaccattactgctggatgaggccagaggacatcgactacaagaggccggtcaccgagtgccactcctgctcagatctagcgtcggaaatggctgccgccctggccgcagcttccatagtgttcaagaacagcaagacctactccgacaagctcgtcaagggcgccaaggccctgtacaagttcggcaggctgcagcgtgggcgatacagccccaacggatctgaccaggccatcttctacaactccaccagctactgggacgagttcgtgtggggcggtgcgtggatgtacttcgccacggggaacaactcgtacctcaccgtcgccacagccccgggaatggcgaagcacgctggagcatactggtttggaagtccaaactacggagtgtttacctgggatgacaaacttccaggagctcaggttcttctcagcaggttgcgactcttcctaagtccagggtacccttacgaagaaatactgaggacattccacaaccaaaccgacaacgtcatgtgctcgtatttacctgtattcaattcattcaacttcaccaaaggaggattaatacagctcaaccatggaaggcctcaaccgcttcagtacgctgtcaacgcagctttccttgcttctttatacagcgactatcttgaagcggctgacacgcctgggtggtactgtggaccgaacttctacaccatagaagtcctccgcaagtttgccaggtcacagcttgactacatccttggaaagaacccattgaagatgagctacgttgtgggtttcggaaacaagtacccgaagcgccctcaccacagaggtgcgtcgatacctcataacggcgtcaagtatggatgcaaaggaggttacaaatggagggacacgaagaaggcaaaccctaacatccttgttggagcaatggtggctggccctgacaggcgtgacggctacaaagatgtccgcacgaactacaactacacagagcctacccttgcagcaaacgctggcctggttgcagcactgatttctatatctgatatcaaaaccggacggttcggcatcgacaagaacaccatcttctctgcgatccctccgatgtttccgacaccaccgccgccaccatcagcatggaaaccatagagagacagacctctgaatatccgccccccccccccccccccccccccccaaaaaaaaaagcatcaacacagggaagtggagcaaacatatgatcagttggtacagcaaaggccaggaacaggaaagcggacagcataagcttatagagcttctatttctgtaccagtgtgacagatcagtataaaatcctctgtcatacatagaccagaagttgtgtgcatcgcgtgaaagctaatttttggggtcttgttgctgtgggcattcctgctcatgtgtgaagttattttttgtagaaattgtacctttacaaattgttataggagtgacttttcatagtagtaaagcatttgtgtgacctgtaaaaaat

SEQ ID NO: 15683 - DNA, 1900 bp, Zea Mays
gatgtttgagccaaaaaaaaaaaaaaaaaaccctgagtcccgcaaaacccctaaaccctagcccctcacctctcgcctccgccctcatccgcgcgacttgcagcggttggaggcgaagccggctccatgacgaccctcctcaggcgcgcgtcgctgcggcgcgtcattgccgccgccgccgcctcttcttttcaccctgagagctataagcaagggatctgtggctccacatttcattgccgagagttcgcatcaaaagcaaaaaagaagtcaagtggaacagactctggggaggagaacatgtcaaagaaagacttggctttacaccaggctattgatcagataacgtctgcatttgggaagggggcaataatgtggcttgggcgttcacaaggccatagagatgtaccagtcgtgtctactgggtctttggatttggatatggctctaggaactggtggtcttccaaaggggcgtgttgtagaggtatatggtccagaggcttcaggcaagacaacgcttgctctacatgtcattgcagaagcacaaaagaatggaggttactgtgcctttgtagatgcagagcacgctttggatccagctctcgccgagtcaattggtgttgacactaacaatttactcctttctcagcccgattgtgctgagcaggcactcagtcttgtggacacactgattcgaagtggatctgttgatgttgttgtagtagacagtgttgctgcgcttgttccaaagactgagcttgatggtgagatgggtgatgcacatattgctcttcaggctaggttgatgagtcaagcccttcgcaagcttagccactccctttcactttcacaaacaattttgttatttattaatcagatcagggccaaggtagccacatttggatttggaggaccaactgaggttacttctggtggcaacgccttgaagttttatgcatctgttcgcttgaacatcaggcgtattggtttggtaaagaaaggcgaagagacaataggtagtcagattgctgtgaagattgtaaaaaacaagcatgccccacccttcaagactgcacagtttgagcttgaatttggaaaggggatatgccgcagttctgagctttttgaacttggattgaagcacaagcttatccgaaagagtggtggttcgtattatagtttcaatggtaaggctttcaatggtaaaagtaaccttaaatcttaccttactgaaaacaagagtgttgccaatgatctggagatggaactaaagagattgatgggaactgatgcgtctaaagagcaggaggcaggagacagttcgcagagtgattttcctgaagagagtgtcacacctgaagcatcgtcagaagaggatctgggagccataattgaaggttagccagtgatctgatgtgctggcaagtgggaacagaatttctggagcagttgttcctgtaaaacaatatcttgggtcctgaagtcaccaccgtttggatcgacatgcctgtggtgttctggtgatctcatcatagcagacttcagtctttactgtgcttatacagtagtgcagcaggaagagaattcacattgtgtgaaatcatggtgatatctgagaggtggaagttgtagtaagccgggaagggtgaggtattgtggtccgtggcatttaaacttcagtaagcaaacgccgtgtatatatgatgtgcacattttgaaaccgggcattctttattgactgctgctagatttacattgagctccctccacttccaatacctaccttttttttgcgtggagctagttttttggatggtgcttctgcggaagcctgttgctggaagatccaatgtcgtagagctggggcatttctgaccttggctgatctatgttcgccg

SEQ ID NO: 15684 - DNA, 553 bp, Zea Mays
ccgcatcgatcaccctcctcgctcccggtcaacagcagcggcgcagagcacgacaccgacacgcgccatggcggcggtgaggcaccggcagctggaggccaacggcatcacgatgcacgtcgcggaggccggccccgtgaacgcctccgcgccggcggtgctgttcgtgcacggcttcccggagctctggtactcgtggcgccaccagatgggctacctcgccgcgcgcggctaccgctgcgtggcacccgacctccgaggctacggcggcaccaccgcgccgccggaaccgaactcctacaccgtcttccatatcgtcggcgacatcgtcgcgctcctcgacgccctccacctcccgcaggtgttcgttgtcggccacgactggggcgccatcgtgtcgtggaacctctgcctgctgcggccggatcgggtgcgcgcgctcgtcaacctcagcgttgccttcatgccccggaggcccggcgtcaagcctcttgagtacttccgcgccgcatacggggatgagtactacgtctgccgattccagtgtcaagtt

SEQ ID NO: 15685 - DNA, 1458 bp, Zea Mays
tttctccgcagcaatagactggtcaccactcacgagagcagaaaacaaacaatgcctccttacctgctcgctgccggcgcgcttatcgtcttcctgtacatcatcaagaaccgcaggagcagaaagctcccgccatccccgccgtcgctaccgctgatcggccaccttcacctcatcggccgcgtcgcgcaccgatccttgctagagctgcaggttcgctatggcggcggcggcggtctcctcttcctgcaactcgggcgcagaccgaccttggtcgtgtccactgcggccgcggccgcggatctgttcaagaaccacgacctcgctttcgcctcccgcccacgcagcgtgggaggggataagctgatgtatgagtgcagcaacgtgtcgttcgcgccttacggcgagaactggcgccggggcaagaagatcgctgtggtccacctcctctctccacggcgcgtggaatcgttcgcgcccgtaagggccgccgaggtagccgcgctcgtcgcacggacacgccgcaccgcggaggctggggaggccgtggagttgagggagctcctgaacggctacgccaacgcggtggccacccgcgcggccaccggtgccgctggggcgacagcagagaagctgaaagagctgatggggaactccgagcccgaggcgctgatggcgggcttccaacccgaagacgtgctgccggacgcaccggcgaggttcgtgagatgggtgacgggcctcaataagaagctcgaagacttggtggagtcgtgggacaagttcctgtccgatatagtggccgcacacaaggagaaggggggtggcgacgcagaggaggatgaggacttcttggatgtcttgcttcggctgcgggaagaaggcgcagatgggctcgagctcacagacgatcgcatcaaagctaccgtcaaggacatgatagcggctgcaactgaaacatcgtcccaaacgctggaatggaccatggccgaactcattgccaacccgcgggtgatgagcaagctccaaggcgagatagcgcgagtcgtcagcgccgatcagacgaccatcgctgaaccggacctgaacaaaatggatcttttttttttttttgaaaatccttcactctttagtctttggccagaataatgagatgcccatgcatgacaattgccctacaccatcattagctgctaccagaatagaaattgttcatgtaagtgattgtaacagcgagtttaataaaacagccaacagccagaagtaagaacctctacagcctctctattagcccactcatatagttagctctccattattaatgtagtacctcatttatctctctcacaaactcaaactctcttggtttctgtatataagccgactgtaattaagacggctgagcctgcttctcctctttttcttcatctctcctcaacacaagcatttagcctgctt

SEQ ID NO: 15686 - DNA, 1627 bp, Zea Mays
gctggaaaccccctgtccggaggcagttcttcttggattgcaatgaaattgcagacctatgtgacagtgctgagcgaatattttcaagtgaaccaagtgttttgcagcttaaagctcctgttaagatatttggagatttacacggacaatttggagatctgatgaggttatttgatgaatatggtgctccttcgactgcaggtgacattgcttacattgattatctattcttgggggattatgtagatcgcggccagcatagtttagaaactatcactcttcttcttgcattgaaggttgaatatcctcaaaatgtacatttgattcgaggaaatcacgaagctgcagatatcaatgctttgtttggtttccgaatagagtgtatagaacgaatgggcgaaagagatggtatctggacatggcatcgaatgaataggctatttaattggcttcctttggctgcgcttatagaaaagaaaatcatctgtatgcatggtggcatcggtcggtcaatcaaccatgtcgagcaaattgagaatcttcaaaggccaattacaatggaagctggctcggttgttctcatggatcttctatggtctgatccaacagagaatgacagtgttgaaggactgaggcccaatgcccggggtcctggtcttgttacatttgggcctgatcgggttatggagttctgcaacaacaatgatcttcagttaattgtacgagcacatgagtgtgtgatggatggctttgaacgctttgcccaaggtcatctgatcactcttttctccgcaacaaattattgtggtactgcaaataatgcaggtgcgatcttggttttgggtagagatcttgtggttgtgccaaaactaatccatcctttgccccctgcaattacatcacctgaagcgtcgccggatcatattgaggacacatggatgcagaccaccaactccgaccagggggcgtccccaagcagtagctaatgaacggggctctctcgcctggatatagtagattcattacacattggttggtatgatccatatgaagcctgagtgatcaggatcttgttatttcatttgtgttcgggagaggggttggtccacagccatacggaaacgaaaggttgatgtacagggagcagagaggactaaagtcggtagaagtgagcttgatctaggacagtgctctccaattcgttccattgaacacaagtagcagtacaaatagaactcatcctaagatccttggaggcttcacttgtatatactcagctgggtggataggtggtgggtgtatggtgtgattttggcatccaattggaatggcaaaggtaatagtgttattgtactaggaattctttccctttttttttctttctcggggcctagaattctcatgttgcaaattatttttgagttgccacagggatttgccaggagggctcgaagtcctgttgttttgtataatagtgctctcagcctcattgtaatttcagacacatgctgatgtgtacaattttgtgttaaagtgagaattttttgggggtggagaatggacggcttgatttatagtggaggtaaagagctgttatttacatatttgatgtgcgattttactgtac

SEQ ID NO: 15687 - DNA, 119 bp, Zea Mays
ttaagcacgaaatatcagtggataacacggattttaaattttaatcatcctcgcttattgcgattttaatatcgcatctgttccgtttatcgcgagtgtgacatcatttttacttctat

SEQ ID NO: 15688 - DNA, 1209 bp, Zea Mays
tttcgctccacgagtctctgggctctggctgcctgttgtccgctgctcccccgccccccctcctctacgaactctctcaaaacaaaaaccgcagcgtacaagaaaagggaaaaatctcaccataccgcaacgcgccgctcccaaatctagggttcctttttgaccatggcggcggcggcggcggccaagtctcgcgcggagaggatggcgtggctggagaggagggattgccggagggggaggccaagggcgagggagaagagaaggagcaggagcccttcgccgtgcccacttccggcgccttctacatgcacgatgaccggtttcaggaggagaaccgcggcaggcgcaggcgaatgtttggtgcaaggaagttatgggatgctaaagatgatcaagcttgggtgcatgacagatttgaggagatgaacttgcatgatgatcgctatgaagaccagcggatgtctagaggtcgttttagaggtcgtggtggtcgaggtaaagcaagaggtggtggccgtggttttcccagaggtgggaagcagcccaattaccatgaagatggcaacacccaaaaccgccccccaaaggtagtgagagggaggggacctcgacgttatgaagctgttgcaaggagcagcagagaggttgttggatcccaacgaaagcactagatttcgagagcctgttccaaatgctgcagcagccagaaattctggtcaagtttcacatgcacaacaagaggctgctcctcccaaaaagaatgtcatcagctcaagcctgaattctgcatcccctccattttatccctctggtgcagcttgtcaagattttccggtagcaactcagaggagagacatacaaacaggaggttctaataagattcctccatcttccatgaagatggatgataactcaatattacaatctggttcaatggttagagggagaacagccatggattatggtgggcgtgataggtttcatgctgatggtcctgttaggtcatcccttggaagggtgcccaacggcgtcactgaattcaggatttacatcatcatttggtaaatcctacccaatccactattgtccgggcttcaggggggcaattcaaacattgtaatatcttcaaataatcagcctacttcatcgcttcaccaaacgtcaaggatttctacacatccacaaagtcatggaccaaagatgcac

SEQ ID NO: 15689 - DNA, 512 bp, Zea Mays
cttacttcttcgacttcattgggagtcatgatcagcgggggtgacagcatcatgctgtcacccccgctgatcatgactcccaatgaagtcgaagaaatcataagcaaattcggcgatgctctgaaggctacagaggaacggattggagaactgaaatccaggaagaattagccgatgctactggttgtaacgacgacatgcaattgaaaatgacaattgatcttttttatgggcgaagtgttgaagatggctttggtgaaggaaatgtcttgttagcatcaagtaagtggcgacatcacaacccctacaagcttgtgccttaaaacaaaaggatacaagaagttggagtgcttttgtgaaagcttttgcgaatcacttgaaacgttagtacttttgtgaatgattttgtaaagtgtttgcaaatatgtgcaaaacataataacatgtgtaggttttgtgaatgattttgttgtggtgcctgttgatggtttatgtatgtggatctatcatgg

SEQ ID NO: 15690 - DNA, 1739 bp, Zea Mays
cgatggccgaaaccaaactggtgctttttaccgtttcctttgttgcaaacgctaaatttctcacgaattcttccgtcgtcggcggcgcagattgaatgccaaaaccctagctcgccctccccaattccccatttcggccacaccctccttgcctccacggctccacccctgcttcaggttacctgtgccagcgacgccggtagaagccatggacagctctctcgcgagcgcggcggcgatagccgatcagcgccagaagatcgagcagtaccgccacatcctcgcctccgtcctctcgtcttccccaccggacatctctcaggccaagcgcttcctcgaccacatggtttcggacgaagttccgctcgtggtgtcgcgtcaattgctccagacgttcgcgcaggacctagggaagctggagtcggacgcgcagaaggaggttgcccactacgcgctcacgcagatccagccgcgtgtggtctccttcgaggagcaggtggtagtgattagagagaagcttgcagagctatatgagtctgaacaacaatggtcaaaagcagcacaaatgcttagtgggattgacttggattcaggaatcaggatgcttgatgacaccaacaaattatccaagtgtgttcaaattgcacgactctatttagaggatgatgatgcagtgaatgctgaggcttttataaacaaggcttcatttttggtcaccaacagccatcaggaggttctaaacttacagtacaaggtctgttatgcaaggattttggatctgaaaagaagatttctggaagctgcacttcgatattatgacatttctcaaattgaacaacgcaagattggagacgaagagattgatgaaaatgcactagaacaagctcttagtgctgctgtgacatgcacaatattggctggtgctggtccacaacgctcccgtgttcttgctactctgtacaaggtaagattgttgtagttttatctcaatgtccttggattacgtgctggtagtacccattctcagctgtgttgctactctgtacaaggtaagatttttgtagttttatctcaatgtccttggattacgtgctggtagtacccattctcagctgtgttttgcaattgtgagcatcggaatacaactatctagatgcattacgtgttaaatgccttggatttgttcatgtcatctatataaaaacatgtttcatgtttagcttatcatagtttatagttgagactgtaatactcatctctcacttgttttctgtcaaggtggtgcaacaaataccaattaatctggatgtttatggcttttctggtaaatatgggttgacagaaattatagcttctggcttgagctgggtggtttcagatcttgtccagtgccaaccagatgaaagatgctcgaagttgaaaatatacccaatactgcagaaggtttaccttgaaagaattttgaggaaaccagaaattgatgcatttgcagaggagctgaggccgcatcaaaaagctttattaccagataagtcgactgtgcttgaccgagcaatgatcgagcataatctccttagtgccagtaaactttacacaaatatcagctttgatgagcttgggacattactggggattgatccaaggaaggctgagaagatagcatctcggatgatttatgaggatagaatgcggggctcaattgatcagatttgcctttgtaagttgatagtgactggaac

SEQ ID NO: 15691 - DNA, 1160 bp, Zea Mays
taccctaggcaaatctcttttatggcgtagcacccggtgcaatgcaggcatacagggagtctatggaccgtctccttatttataataacaagaaaattggtgacactgtactcaaggatgattatgagccatcaacatatgcatctgtcacagatgtccctatggagaatgcatatggagatgacgaaagtgaggcacacacctacttattgcctggagcttataatggtggtttggcatcaaaaaatagtcacaaaaagaagcaccatttgcctcagaggatgaatggcgcaaggtcatatgaaattggtgttgacagtccttacgaaccactgtatttggaaagtaaatcaggaaaccagcaactcttatcgaatggcaaacaaacagacttcctctccattcctataaaacgcatccgcacagcagctaggcagcgggttgtgagtccatttcctgctggtgcttctgggacccctcaattcacaaataaaacggacgcatctagtggagatacaaactcctgtcaagatgatcaaagttcattacatggagggtcattttctaggaagaatgcagatatagagtccactgttgattttgacaggcaattgttgtatgatggtagtgaggtgtcgacaaaatctaaaaagaagaaaaagactaagcacccagggtacaaggcactaccaaatgtgtccgaatcttgttcgttgagggctcctggaaagggcaattatgatcatagatctcagatcgatatgatagctcagtatgagcagaaggattatattaaaaagagacaggagacaaatgggaattttgtggttaatggcctacatgctgctaagaagcctaaattgttgaatcaagcaccagatatttcactggaagctcttaaaccaattggtccaatggcctctcttgctgcatcacaaatgagcaacatggcaaatcctacgagggttataaaaatcagcacccgtggaagaaaaagtaaaggactcaagatgcgagctggtcattcaggtcctggaagtccatggtcaagttttgaggatcaggctcttgttgtccttgtccatgatatgggtgaaaactgggaattggttagtgatgcccttaacagcatcatccaattgaagggctttggatcttaa

SEQ ID NO: 15692 - DNA, 466 bp, Zea Mays
gcctctgcatattatgcgggttgtattggaaaatcaagtatattagtcgactggagtatctctggggggatataaaaaagagagaggttgaaattccagattttgttattgaacatgataaggttcttgagcaccggccactgactgattatggcatagaaccagatcccctacatcttgctgatgtacctgctgtgggatactcgcttggaagatatgaagataaatggactccagaagatcgatggtattcaaggaattacatgtgaaattttctgttgtagcttaaaagatgattgtatagtaacacggtactatgagatttgtattagattgctatgaaaaccttgtcaaggtcctgtatttccaactaaatttatacctgtttgaagatttttgagcagacgctatatgctgtctgtggttaacccgccgtataaaactgtggccgatgtgtctgcttatg

SEQ ID NO: 15693 - DNA, 905 bp, Zea Mays
gaagaaacagtattggggaccacctgccattgttttgtgaatgaattagtggtaatagaataaacatagaaggcactttctgtttgccgtgttccgcaaggaagagagctagttatagatctttccgagtgtacagtttatttggagggaagaaggataaagatgagaatggcgatgaagcgccatcgaaagcagggatttttggaaacatgcaaaatctctatgaaactgttaagaaggcccaaatggttgtccaagttgaggctgtccgggtgcagaaggagcttgcagcgactgagattgatggttattgtgaaggtgaactaatcaaggttacactttctggaaaccagcaacctattagagttgaaatcacagaagctgcaatggagttgggtgctgaaaaactttcggagctggtcaatgatgcatacaaggatgcgcatcaacggagcgtccaggccatgaaagagaggatgtctgacttggcacagagcttaggaatgcctgcgggccttggtgatggtctcaagtgatgctgcctgccattcgggaagcctttctaataatttttttccctcaattttgaatacgagccgtgtgggcacctctcgtagtcacgtagtaagaagtgtactcgtgaccagctgtttcgttcagcgttagctgtgattttgttttgtacaagcagatatatttgcactaaatcgtggtaacgtcgtcctatggaactcggatatcacatgtggtatgctaatctgcaagatataggggatatgcaccgaaaccaatttaaatcgtgtgataaatgatgtacattgtgtgtgtaacaaattaatgaattatgtttttttatacacccttttttttaacgtgaacgtaagggaccagattgtaaaatataa

SEQ ID NO: 15694 - DNA, 1084 bp, Zea Mays
agtacacagtgacacatgaaacaatggtgatatatgtattaaaaataataagcgtggcacaaggttcactcctatggtccaatggcccgataagtctgtttcattaggagttactcaagccttggcatggaaaagatctggccttatggtgagacccagcatacaagtcagtgtgtgccctacgtttggaggaagtgatcctggggtacgtgcagaagttgtccattcattgaaagaggaattgaatctgatgtgtggcctctcttgctcacagcgcccatcagcttatactgctctctctattggacgatcaaagtggaatggtcaagtgggcagttctggagtggtaatcaccttggaaacacctcttaataacattggaaggccgtcgttatctgttcaactgaatggtggttttgagttgtgatccttatgactcctgcactgaagctgtacatactattgtatatattgccatcactaatgttcgtgctccattgtcatggagacggctactcagctgatcaacctagaaaagtttgtggaagtgggctgcaggcttgcaggttgtttttgttactgtagtctataggtctaaagtctcaactcagcaaatcagctgctatggtatactcatgcgggcacagaactcaactgctttgttttccactcgaagaattataacaatccttgaagggattgcgatacttgcagcagttcagctcatattttcagaagttcatgaaagcggagggctcgctgccatggaatatgttcgtccagaatcacattttcttggagcaagactgactacctgtcgcaaactcgcagttggacattgttaacaattgtctgtttagtttgctttgttggatgttgagacaaacaagctggtgtatttttgtatttctctacatgcattgatcaatgaaccaaagactagcgatccctgttctactgttccactgacatgacaaatctgctgtcgatgttgtcccattacgtgctagtttcaaccttaacttatactagtttcaatcttaacttatatggaatttgactatgttgcagaaagaaatttgcc

SEQ ID NO: 15695 - DNA, 521 bp, Zea Mays
gagccctaaaccctactcgaaccaaaccagagcagcctccaccgccagcgccgacagctcgtgttcgaccttgcgcacttctccgcccatggctgaacccgaggtaggggtggccgcagacacagcgatggaaaccgaagctcctgaagcagccggtcagaagagggaacgggatgaagtaggtgatcctgctgctgaaggaggcgaggcggcggtggaggaagcggcggcggctaagaagccgaagttggaggaggagactaaggaggtagaggaggcgtcggaggagaaggcagaggagacggcggaggggaagacagaggaggcgaatgagaagacagtggaggcggagcgcaagccagtgaagctggggccaaaagagttctcctcatccgtcgagatgttcgactacttcttcggtctgcttcactactggacgccgcagattgagttcaataaggctgcggcagtaacaagcttgtagtgctagttaaatttcataagcttcagttgagttcggg

SEQ ID NO: 15696 - DNA, 866 bp, Zea Mays
gcagaagcggatgaggaagcagtgtaggagagccaccctcgcttcccacctccagtgtctcatccgttccgacgacaaacacctccctttccctgcgctcccgtcttccttccagagctgccttgtctgcacatgcagaagcgccaagagcgagcgcctcatctctttatattgctctcacaccctccgtttctcgctcccacccactgccactgtacttgtgttgtgttagtgctgtgctgcgagaagaaggagaagcagaggaagagcaggtgctgagaagcctgccggcgcgcgttacgacaagcatatatgggggagatcaccaatgtcatggagtaccaggccatcgccaagcagaagcttccgaagatggcctacgactactacgcgtccggcgccgaggacgagtggacgctgcaggagaacagggaggccttctccaggatcttgttccgtccgcgcatactgatcgacgtgtccaagatcgacatgaccaccaccgtgctggggttcaagatctccatgcccatcatggtcgcccccactgctatgcagaagatggctcacccagatggggagaacgccactgcgcgcgcggcggctgcggcaggcaccataatgacactgtcgtcctgggcaacttcaagcgtcgaggaggttgcctcgaccgggccagggatccgcttcttccagctatacgtctacaaggacaggaaggtggtggagcagctggtgaggcgagctgaaagggctgggttcaaggccatcgcgctcaccgtcgacacgccgcgccttggccgcagggaagctgacatcaagaacagctagctccatggaagcaagctgatcgtattcgtacgtgg

SEQ ID NO: 15697 - DNA, 2074 bp, Zea Mays
tgaatcgtgatacagttggttagaagcttcacgcttcagttagtgtggttcaattctcgactgccaatatggcagtcatttagattggggagcattagagcaattatcttggagttgcagatctgtacctgaagattcatattgaaatctggaagcttctgctgttgagtacagagaaatatttcttgccttttgaggaagactgcagagcccctaaatgtgaaacttgtttcttttcttgtctactcctgaatgctgacgaactcagcctctcacgttacttagctgaaggtcgtactggtacagacaccgaggatggagcaagcaacaggtgtaagtggtcctgaacacataattgatattccaagggaaattggtcctcctgcttcggtttctcgtagtgctggtagagagaaccatgaagaatcgaatcctgtggacaggccttcaacaagagctctagtacctgccttgcaggcaccatcagcaataggtgctgtacctattacagggcatacttcaggcactaggagaaatgacaactatgttcgtcggcacagaagcccattgaattctggactgtggatttcaattgaagttattgttaactttagccagattgttgctgccattgttgttctttgtgtgtcaagaaaggaacacccacaagctccattacttgagtgggtcataggttacactgttggttgttttgcaacgttaccccatctctattggcgctatatacaccgtaatattgtaaatggtgagcatgagtcatcacatacacctcaagggtccgctcataacaactcaaatgaagcgactcatgctgcaagtgcatcagaacgccgcagaaatgctgcccgaaatgctgtgcttgctaatcctaggatcaatgcgctgtttgaccacttcaagatggccctggattgtttctttgccgtctggtttgttgttggaaacgtgtggatatttggtggccgttcttctgctgctgatgcaccgaacttgtacaggttgtgcattgtgttcctcacttttagttgcattgggtatgccatgccattcatcctatgtgcaatgatatgctgttgccttccctgcattatatctattatgggttttagagaagatacaaacaatacaaggggtgcttcctcagaatctatcaatgctttgcctacatataaattcaaaatcaagaaacgtcgccatggttcaggcagtgaaactgaaggtcaggaaggagggatattggctgcaggaactgacaaggagcgatcactctctgctgaagacgcagtttgctgcatctgtcttgcaaaatatgcgcacaatgatgagctccgtgaacttccatgtgcacactgtttccacaaggactgtgttgataaatggctcaagataaatgcactttgccctctgtgcaaatctgagatagtgagctcgtctggtacttctgatgcccgccaatcagaccagaacaccgttcctgtgcaggagatcgaaatgcattaggttggtctgttcccgcagcttatcacataaggatacatctgatttgtggctctcaatcttcatgtataaagttggagattgatgtatggattgtagagacgcgtaggtttttttttgtatttaacactgctatcttggagaagttacagctattctcgctgtcacccaactatggcaagccaatactacccaggttttcccccatagcgtgggttgcaccttatgttctgctctttatgacattgcatgacttctttcgagtttctagagcgaaataggcagaagatgttggagatagtctaatcaagtggttgtagtgaaacattttcgtgcatgcaacttttgaaatactccctccattctaaactatactataggacggttggttttttctatatatatattgtttttgctatgcacttagatatatattacatctagatatatcatatatagttataatgtatttagatgaaattgtcttatagtttgggacttggaatggagggtgtattttcatgctacaaattgaagttaccgatatcagtttatg

SEQ ID NO: 15698 - DNA, 2107 bp, Zea Mays
cccggcgtgcgatagccattcgtatccccggccccggggcggccacacccccggccccgctccgaagaatcgcagtcgcagcccgcacggccgcaccgcaccactcccgcacttccgcgcggcgcgaactcggcttatcgacaccaccacggcaccgctacagcctacagctcgagagaggaggggaaaaaaatctcagccaccaccggcagccgcgggagcttcgcgtgcgccgcttgctcactgcccgcacacgtaaatatgagcattgctattctgcctatgtccgcagagtttggttggaacccacagactgttggtctcatccagtcatctttcttctggggctacctcctaactcagatagctggagggatatgggcagatactgttggaggaaagactgtccttggttttggtgtggtttggtggtccatagctacagctcttactcctgttgcagcacatcttggcttgccatttcttcttgttgtgcgggctttcatgggaattggtgagggggttgcaatgcctgcaatgaacaatattctttcgaaatgggttcctgtatcagagaggagcagatcattgtctcttgtgtacagtggaatgtaccttgggtcagttacaggacttgcattttcccccttgctgatacataagttcggttggccatcagtcttcttttcatttggatccctagggcttgtttggttcacgacatgggcaaccaaggcatatagttccccacttgaagatcctggaatcagcgctgcagaaaagaagcttattgctagtcagagcacagcaggcgaacctgttaaaacaattccatggagattaatactatcaaaaccacctgtttgggcacttatagtttctcatttctgccataactggggaactttcattttgctcacatggatgcccacatactacaatcaggttctgaaattcaacctcatggaatctggccttatctgtgttcttccctggttcaccatggcggtttctgcaaatgttggtggttggattgcagacacacttgtcagcagaggagtatctgtgacaactgttcgtaagatcatgcaatcaatcggattcttggggccagcattttttcttactcaactaagccatgttaattcgcctgccatggcggtgttgtgcatggcttgtagccagggtgtactgcttggtctttccaacacggctggggtcttagcgggtgtatttggcacagcagcaacaggatacatcttgcagcatggttcttgggacaacgtattcgagttatcagtagtgctttatctggtagggactttggtatggaatgtattctcaactggcgagaagattcttgattgaagggtgtatgtacacagtatgcttacagttcgtagtgacaaactcatttcggatcgacaacttgacccctggacataatacacttcaagataacaaatgtgtcatcgcgcagcacgagaagtatcaaccttaacatcccggatattaaattgcctggttgtgatgttgctctggtagagacgatttgaagcatatggaattatggatgagttgagcgatgcacccgttccgagcatgccactgtatattgtgttgagcataggtatcatgtacagcatggtagaaagattcgtcatacagagtagttttttttttacttgtacaatttttccctcttgaatagtttgttcctgtaacagcccgacgtagataaaaacaaggaaacctggggatgggggtactactaatgcaaacatttggtgaatatttatccatttgcggactgagtctttaggggtagtttgaaaacttaaatcctatctggattcctgatgattaaggaaaaaaattaagctattttttccctcaatctcaggacatcgcggaggaaatttaagttttcaaactatatgccaaattgttacaatatctgtatcgttgtttggtatttctttaaagatgaagtgaagttcaacctcaaatgtttgagtttgaccgtaggaattgagttgcttaaagatgtagtacagttcacccaataaggggcgtttggttgcttgtatgactgagtcaggcttgt

SEQ ID NO: 15699 - DNA, 332 bp, Zea Mays
tgttgagctatgatcttttgtgagctcacacttgcgatatataaaccccccacaggagaagaacaggtggtccaggaggagccgtacaacgaggagtacgatttgatccaggtggcgtctcccagtcaactttatgacgccatggatggacattagttcgttttatatttatcatttatttttgtaagactttcgctatgtaataattatttttatgatattgtgacatttatctctatacactctgttattatatgtgttgttctcgcacatatgagatgcacccgactttatcccttaaatctgggtgtgacaccaacagggctgtttct

SEQ ID NO: 15700 - DNA, 954 bp, Zea Mays
cagaaaaataatttaaaattgtataaattcaccgcaatgttccggctcttcctttccacgccaccaacttttccacctttggcaaaggaggacacctccttttcgcacaaaagcccccgcatttctctcaaattcccctctgttcccctcccaagaaaccccacatttgcatgggcaagcacctacctgccgccgccaccgccgccgccgccgccgcggttcgctcgtacgcccgcagccttcgcgtcccatccgataccgccgcatccgccgggagggcagataagacgccgtctgccccgctggatacgcccaggaaatccgctgccgccgctgccgcggccagctccgggcgggccgaggtgcgggatttggcggcggcgtgcgggctagaggcggacgagagggttccgctcgcggaggtggtgtcggactgcacgaggcggtggttccaggacgcactcaaggaggcgcgcgccggcgacatcaccatgcaggtgctcgtcggccagatgtaccgcagcggatacggtgtcaacaagaacgagcacaaggcaagagtttggatggagaaagcatcaagatatcggtctacagtatggaaagttagcaataaacgtccagggtacaatgccagtgactcggactcaggcacagatgatgctaaggaaacatgcaaataagaaaatttgagattttgacattaatggacgggagctgccacccacacggccacacatgcactgctgcagtgacttgaaggttcagatatcagttatgccaacggatccatttgtgctccccccccccccccggcctatttggcatgatcgctatatattgttgttatgttttcagtttgttttttcactatgtgagttacacactgtattatggcaatgttttagaggtttcctcgtttttgttgtcttttttttttgttaatcctttaac

SEQ ID NO: 15701 - DNA, 10260 bp, Zea Mays
tttttttcctttttccaactttcttcttcttcctcctccttctcattctgatctggaacaatggcgacagaagacgaagagcgagaagcagcagatgggacggaagtcccagtggaagctgtggttttgggaacattccatttgcatgcacacccagaaggcaagctttcatctctgatggatatcaagagcatgggagaaaccatcgattcaactgaaggaacgttgaagattccagaggatcaagttttagtagaagcaccctctgatgtccaacttcctccagaacataatctaaatggtgaagcatcttctttgaatggccatacagacaaagaagagaaggtttcagtcgagcagccacatgacaatgatcaggaagaagcagaactagatcagaacaacagaatcaacaaagaagatgcggctgatggtttaagtcatggagagagcacaacagaagacagctgccttctgaagcacaagaaagatgaagaatccaagggtgatgaacaacaagatttaggtgttacagtggatgatgacttggtgcaggaagacacgctgaaaactgacaatgctattgagcaaacagatgatggtcagcaagaccaggatcaagaacctgaaaaggcaaacgagaacacagaacctgcaagcatcgcaaacaatgacgatgttgagattgtagctgagacacctactggactccaagctcctgtggagtcacgtatgaatgattctgatggcattccggagactattgatgaagagacagaaacagatgaaccagctcaggcagatggcgttgttcatcctgaagacgtggccaaagtagaagatcaacagagtcaacaagatgacacggtggatgcagatgtggccccagaagaggttaaatgtgaagaaactgatcagcaggaagagaagcccaaatctgaagctcatgagccaacgattgatactcgagaagcgttgaatcaagaacctgctgaagaaactgatgactcgatgaataaaaagattgaagaaactgcacaccagaggaacatggcagctccaaaggagacaacactagaacatgaagcaacaatgagtgctacaccagtaaatacacaagtgcaggaccaggaaccattagaagaaatagaagataccgaaaaaggaatccaaccaagcagtggttctggggatgcaattccagaagatcaatctaatttaagtgttactatagacaatgacactgtgaatgaggatacagtgataggtattgagcaacaggatgatggtcagcaagatgaggatctagaaccagaaaaggcaactgaggatacacaacctgcaagcatgacaaacattccccaggttgaggttgtaactgaagcatcttctggagtccaaactcctggggacctgaatctcaacaactctgatgctgttccagatactattgatgcaaacacagaaacagatgagccatctaaagcacactctgttgttcatcctgaaaagaaagagagatttctagaagacgcaaccactgaggaacctacagaagaggtggtcaaagtagaagctcaacagagccagcaagcagatgtgatggatgcaaacatggtgcaggaagaggtgcctaaatctgaacatgctgatgagccagcaactgatgcttttgaagtgctgaatcaagaatctgttgatgagccagcaattcaagcacctgtaactattcaagtgcagaaccaggaaccattagaagaaatagaacttgctgaagcagttgatactgaagcaacagtgcaacaaagcagtgctgcttttgaggagtcggttccagaacatcaatgtaatttaggtgctacacataacacagagcaggaagacacgctggaagctagtgggcaatcaaaaggaggtcaggaataccaagacctaggaccagaaaatgcaactgaaaacacacaacaagcaagcatgacaaatattcttgatgttgaggttataactgaaacaccctctggaattcaaactcccatggagatcaatctggttatctctgatgccattccagatgcaactgatggaaacacagaaacagatgaaccagctaaagcacacactttcgttcatcctgaaaagaatgaagtctttccagaaaatacatttaccaccaaacctacagcagaggtagtcaaagtagaagatcagcagaaccagcaagatgatgcaatggatgcagaagtggtgctggaagaggtgcctaaatctgaacgtgctgatgagccagcaactgatgctcttgaagtgcctaaatctgaacatgctgatgagccagcaactgatgctcttgaagtgctgaatcaagattatgctgaagaaaccaatgacccagtgaatgaaaagactgaagaaacaggcaaccagagcaacatgccaccatctgaggagacaacaccagaatatgacacgacaacaagggagccacctgtaaatattcaagcacagaaccaggaatcattagaagaaagagaagctactgtagaagaaagtgaagttgccgaagcagttgatactgaagcaccagtgcaacaaagcagtgttgctcttgaggatgcagttccagaagatcaatataacttaattgctacaaataacacagtacaggaagacacacaagaagctattggacaaacaaaagaaggtcaacaataccatgatctaggaccagaaaatgcaactgagaacacagaacctgcaagcacggccaacactcctgatgttgatgtaataaccgaagcaccttctggaattcaaacttctattgagatcaatctggacatctccgatgccattccagatactaccgatggaaatgcaaaaacagatgaactagttaaagtagatggtgttatccttcctgaccacaaagagagcttttctgaagacacatgtgttgtagaacctacagaagagatgatagaagtagatcaacttggtcaacaagctgatgcgatacatgcagaggtattgcaggaagaggtgcctgagatgatagaagtagatcaacttggtcaacaagctgatgtgatacatgcagaggtattgcaggaagaggtgcataaatctgaacagtctgatgagccaggggtcgatgctcaagaagtgctgaaccaagaatctgctgaagaaactgatggcctggtgaatgtaaagactgatgaaactgagcacaagagcaacatggtggtccctgatgacacaattccagaacatgatgcacaaacgagagagccacctgtaaatattcaagaacaaagccgggaatcagtaggagatgctgaagcagtcaatactgaagcagaaatgcaacaaaacagtgttgcttttgaggagacaactccagaaaaccatgtagcaacctcagagccatgttctgaaatccaacatgcacatcatgtggaaccagaggaaatcaatggccctgaagatggcaaagatgatgagatcaccaacatgagcagcagagaatatctagttcgagataatgttctgcagagtggaccaataatagatatacaaccagttcaggagttggaacaaattaaaacggatgaagcttctaaccagactcatgctgttatcttcaatgacctagctcaggaagatgctacagcaacaagtgaaccacaagtgactgaaacagaactaaaggacattgaagccactgaagctgaagaaatcaccaaacttgaccatgttactcattccaaggaacttgcagtagaaaatgattcaacagcagatgaaccacataagggtgaaatccatcaaactcttgaacaagatttagttgaagttaaggacactggaacttaccatgaaaaaacaatatctacttcagaggacacagtacaagataatttgacagaagatgagccaagttttggtagtcaagaagtagatgatgcagagtcaacagaagaaactaagcaaaacatagctgagaatattgcagaagtctctgatgtggcgattgttgatgacgcaattgaacagaatgtgctacagactgaggatatcgttgaaatgcataaacaggagctggaacgagaagaaacagagagaatagaacctgttgaatcagaggaagcttctgatcagaggaatgatgcaccattcgattattcagctcgagaagataatacaaaggaaagtgagatacagcagacagaatcagcaacggaaacaaatgaaattgaacccactgaaattgaagcagttcctcgagaaagcaatacctgtgtttcagaggagccttctcaagaagatcatataaaagaaagtgaaacaagttttgacaatcaagaagtgaacatcacagaatcttcagaagtaaatgatagtcacaaagatataatatctggaggaatctctgacccaagcaacacagcttctgctggggattcatctgaaggaagcaatgtccctgaaggcgagccacctgaacaggctgtgcaggaactgggatcagaggagataaagaacactcaaattgatgaagtgaatgaaacatcccttgaaatgaatgctactgtctttcagataccaagtcaagaagaaaatccagacacaaccaaattgcatgaatcaacagaggtgagcaacattgaagccacagaaatgcacggaaacccccaccaaagtgatctggctgctcagtcagaggagcaaacaacagaaggaatatcaagtggtctgaaaccagaatcaattgaaggtaatgatacagaagccaaaaaatgtcaaagtacctctcaggaaaaaacaatctctgcctctgagtctgtcccagaagatgcaaccactgaaccagatgttgatcaccaacaacttcaggatcaagaatctgccaaactcaaggaaaccgaagctgataaatttcaagaaattgtctcatctaacactctttcttctgaggagttcacatcaacagaaccaagttctgacaccgaagcagacaattcacagttagcagaagaaactgaggacaccgaaattgtgaaaagtaatactgctcttgctgaggcagcagctccagaaacagatgcaactgctgatacatcatctttccatgagacagatctagaagagaacaaggacacaggaacaattgaaacagaggatggtatggtatcaagtgactatacatcagaaaagatggacacggaaaccatggagactgaagcagtccctcatgatagtagtgatgcaaatataaaagaacacactgaagacgatacttcaacaccaaatgccccacatgctggtactgaacctgttcatgagctagaatcagttgaagtcagcgctgacacaacggaacatccaggagagacccatgactctgcttctgatgagcttactccaacagaagaaaatacagcagtaacagaaccatcttttagtacacaggaagtgcagaatctgacatctcaagaaatcaaggacagcgaagatgacaaaactgatgaattctcagatatcaatagctttcctattcctggagaggcagaccaagtaccaagaagtgaaacaactcctgatgtccaagaagtggaagaactgggtttaacagaagaaacaagagacattgaagccatagagcctggagatcagcaagaagacatagtttctacccttgagaagccagaaatagacggtgaaccaagtgctgataatcagcaggttcatgaggacaaactaccagaagtggaagacaataaagcaattgaagctgaagcctccaagcaaagtaatattgccactcctgataatgcagctgaagaaaggaatgaactggaaagtgatccagatccatatgcccagccagcagaacaggtagaattatccaaagacaatgagaacagccagcttgtgaagacagaagaaacctcagaccaaagcaattttgtcgtccttagaaggactacagaagattctgttgcaagagaaattgacccacctgttgccattaaacaagagcaaccagtggaagaaatcaagggtgtcgatgccactgaagctgaagaagactttcgtacaacccaagctgttgcaatagagaaactagcttcagtcaataaaatagcaacagtagaaccgacttatgatattcagcgaatggatgacttggaagcaacagaggaaaagaagcacgctgaagccattaatgaaggagatcaatccaatattgctgtttcagaggaacaaactccaacatataatggagaaacaccagaagatcatcatgtagaatcaaatgaaggaacgatggggaatgaaactgacaatatcattttggcacacggaatcaaagatgaaatacagaagtcagcagaactaaaggacggtccatgtgatttgtctgaaactgttttaacaactcggagaagtgagaacatgattgatgaagataatgttcaaacttatggcaatgatacagtagaggcttcaaacagtatccatcaagtcaaagaagagccagatgctggaaccgaacataattcaagccaaatgataagtgaatgtagtggagagaacgaaactcatgtccaagatagagatgtagacatgtggattctcacagaaggtgtcattgcagaagcatcacaggctttattggaaaatgatcctcaggcagcacaagatactatagaaaaggatgatacaacgaaaagtagtgagccaatcagtgatcacgatagcaggcaacattgtgatgtagaagcacttcaacaacaaagttgtgagacagaggccttatccattttggaacaagatgaggctctgcaaaagattgactcagatcaaaagcagaaagaagttgaggagattgaaagtcagaatgatgaacttcaggtagatgaacagaaacatgaagacaagagggatgatttagccaaagaaccactagtggagtaccagaatttcgaaaacagagcttcaaacaacacaaaagacaatgatgcattcaaggttgaacaaacagaggcagccaatagtgagattctcaagaataaagccctacatatatccaaggaatccaccccaagcattatggctatgaaggttgaaaacattaaggaaacaagtgaaggaactgaagaagatgatgctgccaaaaatgataacaaagatgaacaggagaatgcagaaaatgttgatatagtatcaaaaacttctactaatgaacaaggccaaacaactgatgaaattagaaaagaagaggatcctgttcacatcattcaagcatcagagaaagagatcgcagatgaaatagaagaaagtaaagaaatacatgaagacaatgctatttgtcatgataaattacagacaaattctgaaaaggaagagtcacctcaaccgcattccaatgaaccatacaatgtggatgctaaaattgatgatacaacatctctatgcgaagaaataatccatgacaatacaagtataaatcctagagaaattgaagagataggagaaaacaaaggaccagacttcacttctgaaccttctgtagaatcatccatacagaacaatgttgaagactcaagcagtcatcacaaggttgaagatgaaaagctttcaatgtctgagaaaaatgatgtagatactgaagctatgcaagaaataaatgatgaatctggcgcggatataaaccaaacagaacaatgtcaagaagaaattactgcagatgatgttctgcaacttgaaacagaaggaaattcatttgacaagattgaagagactgcttcaaatgaggaaacagagactagtacagcagccactgaagcagtaacgttcaatgaagatattactgacaaggttagcggagctgatggagcaccgtctaacggaagtctcaagacctttactgacactggaagggatattgatgttccattggtaattacaacatcaaaggaagaaagtgtgaacgacactatggaaaacctcaatcttgaccttcctggacatcaggcacaggatggcaacaccgctgaaaaggtgctcagcttagaggaaagagaaagagagatgccttcatcagagaagctccttcaaactgaaccaggagagaatcaaattcccaatgaacaggatgaaaaggacatacgagatgagaatcaaactctaaaagaaaaggatgaagatgacatgcaagatacagaatttggagaggctaagaaagaagttcaacaagaattacctgtctcccattttctgatgaatctaatattgggaaaagagagcagtgatgcaaatgaagattcagaatctgaggctgcaaggaagcaaggtgaagcgacagaagatgacagctgcacgttcatttctgaacaagaagaaagtctggggtcacttcctacagaaaataaggtggatgacaatcccacctttgttgaacaagaaaaacatgaagttaaatgctctgaagaaacacaggaaatggtcgaagaacaaagtgatgatcagctgcacacagaaagatcaattgaaattgatgaggatatcaaaaagaacactcgtgctttagaaataccagcataccaagacaatccccaggatggaatttctggtgaattgcagacagaagaagcagctggtgtttctacaaaaatggtaactagagatattgatatttcgagtgttgtgctggacaacagaacagttggtactgtgtgtcaggaaaaaatggaggtatcaacaaaaaatgaaaatggaagcttgaggagcagcctgaatgactcaacaaacacaatggctccccaagacgatactctaggagaaggacaatcaaggctcgtgcttgaacctttacctgaagacaaaagtgttgatgtagtttctgagcaagcacctttgttgacagaatcaggaatgactgacgcgaatgacttatctagcgatactacaagtgctcaaaaccctgtgtctacaaaacccactgaatctgccagagttgaggccacatattctactgatattcaactggagaatgaagaagtagataagaaagaagaggaccagcatgcaaacacaaccaaagatgaagtttctaaagagattgtagaaagttcacatataaatctgcagaaaataacaaggcctgaagaaaaatctaatgagctagaaactcaaattaccgaaccagtttgtgacagtcaggcaattttggcccatgaaaaggaaatatctgaagaaaactttccaacagcagtcgaaattcaggctgatggtccaaacatgcagatcaaccaagataagcaagatgaagctgctgacatcgaaactgaaatgaagccagaaaaattaggggaatctaattttcaggaacaccaggacaatggtactgagcaaaagtctcctaaagagactgatgaaggagaccagcaacttgtggccaagaaagagattctgacccaagaaatggatgtgcatgagacagttgaaagacctcagcaagcagttgaaagtcctcagcaaacagtgagcataacatccaatgaagaccaggaactgtttgattcaaaggtccaggaacgtgatctcaatgtagtttcacccagagaagcttctgaggctgaagaaaactttgtggacgtaaccaagccagaattcagcacagatgaagaacaaagtccaaaggctgatgcagaagagaagatttatgacgagaagataaaggacatagagggaactaagaatttaactgatgaagcagcaataaaaactgaagcaccaggagcagcccagaagacacgtaaaaaatatagcctattgtctggcgtgggatcgaaggtaaaacaccaactcgcaaaagtgaagaaagccattgtaggcaaacctgggcacacaaaaccagtatctccgacggcataaaactccagtcaccttagaacatgtacattattgtattgtttgtagtcttgtgagccatttatttcggtggtagtgtttgcgatgggctaggagaaggtcctcttcacaaccatagcattggaattctatgatgttgcacatgaaacaccccccccccccctcgagagtatgttgaagatgtttgtaaatatgtctagtgtgtaaattcaagtttccctgaaactttgaggtagaatcaaggacatgtaattggtcaattgtttgtattcttcgttgaaatgcacaagcagtttgtggtcatgatgcagcttgcagcat

SEQ ID NO: 15702 - DNA, 1726 bp, Zea Mays
gctgccggtagccaatgcaagaaacttggaagcacgcactgagcgcagcatacaaagttgagagatggatgtggtctcgtggtttagccaggtctcggtggtggtaggcgttctggccgtgtgctggaccgtggtatggcagaacctgcagcacatccacctgcagcagttcttcgcgcgcagcttcaaccgtcgcgcgcggcggctcgccgcggtggtcgacccttacctgtcggtgaccttcgaggagtacgagggcgggcgcatcaagagcagcgacgccttcgacgagatcaagtcctacctcaccacggcgagcacgcgcgacgtgcgccacctcagggccgagtctggcggcggcggccgccgggacgccgccgccaccgacagggacaagctcgtgttcagcatggccaagggcgaggaggtcgccgacacattccggggcgccatggtctggtggtcggccgccggcgtgccgccgcccagtgacaccgtgccgtggagccgtgcctcacgcgccgagcgccggttcttccggctcgagttccacgagggccaccgcgacctggtgctcaacgagtacctcccgtacgtgcgcaggcagggccgcgccgtcatggccaagaaccgccagcgaagactctacacgaacatcctcagggaaggctttgacgacggtttctaccgagacgtttggacgcatgtcccgttcgagcaccccaagacgttcgacaagctggccatggacccggcgaagaagaaggacgtcatcgacgacctcgacatgttcaagcagagcaaggactactacaaccgcgtggggaagccgtggaagcgggggtatctcctgtacgggccgccgggcaccggcaagtccaccatggtcgccgcgatggccaaccacctcgggtacgacgtctacgacttcgagctcacgtcggtgaagaccaacaccgacctccggaagctgctcatagagaccaagagcaagtccatcatggtgttcgaggacatcgactgctcgctccaagtgaccggcaagcgcaaaagcaaggaggaggaggagggttcgaaagacgggaacggggacgacccttatgcggcgaaacagaaggaggaggaggaggacgccaagagcagcagcaaggtcactctgtcgggcctgctcaacttcatcgacggcatctggtcggcgtgcggcgaggagcggctcgtcgtgttcaccaccaaccacgtcgacaagctggacccggcgctgatccggacggggcggatggacaaaaagatcgagatgtcctactgcgacttcgagtccttcaagttcctggcccggatgcacctccgcgacgacgtcgtcgaggcacacggggcgcagtgcgaccgtgttagggctttgctccaggaagtgaacatggtgcccgtcgacgtcggcgagcacctcacgcccaggagccccgacgaattcgaagacgctggaccgtgcctcgcgaggctggtcaccgcgttggagaaggccaagaaggaggctgctatactaccgaagccacaggcccaaccggatgtcagcggcatcgttgtggacgatgatagtaataactagggtccgctagggctactccgatgaccccaccatgttggttcgagctgtttacctttctacagtgcatatacacttgtaataatgttattatatataaataaagtatatttgctgcaaaaaaaa

SEQ ID NO: 15703 - DNA, 1856 bp, Zea Mays
gtggcttgaaggcagtgccaatgggcagtggtggatagacagtattggcaaaacacttgatgagggaatatccttccacagagttggttcaaggcagttggcaggactacttattgctgcatgggcaacgaatgaccttaggccacatgttggtgatgttgatactgctgcagtgccatgtggctttgggcgtgctattggcaacaagggtggcgtcggattaagaataagagtctttggtcgcaggatatgttttgtaaacaatcattttgctgcacatcaagagaatgttagccgccgcaatgctgattttgaccgcatttatcggacaatgactttcaccaaacctcagggatctgcaggctaatgaaaatcaagcagatgaaggtaggcctgatctggcagaagctgatatggttatcttccttggtgatttgaactaccgacttgatggcatcacctatgatgaagcaagggacatggtctcccagaggagctttgactggcttagagaaagggatcaacttcgagcggaaatgaaggcgggaaatgtgtttcagggaatgcgtgaaggcccaatcagatttcctccaacctacaagttccagagacaccagtcgggtctctcagggtatgattcaggcgagaagaagagaatacctgcttggtgcgacaggatactgtatcgagatagccgtcctgtaccaatagctgaatgctcattagagtgccctgtcgtcgctgcaatcacagcgtacgaatcttgcatggatgtcacagacagtgaccataaacccgtgagatgtacattcagcgtcgatattgcaagagtagacgagctgataaggaggcaagagtttggaaaaataatcgaatctaacaaaaaggttcgctctttgcttcgagagctccgttctgttccggacaccgtcgtcaacgcgaacaacattacattggaaaatcaccaagaagatgtcatcctccggataactaataactgtgaaaccagcaaggccgcttttgaaatcctgtgtgaaggccagacagtcagaaagcagggcggaacccaatctgaggagctgctcccaagggcgtcctttggcttcccactttggcttgaggtccaaccatcgatgggtctcatcggcccaggagaaacagcggaagtcgtcgtgcgccacgacgacttcctgacgcaggaagagtacgtcgacggagcacagcggaaccggtggcgcgaggccacccgagacctggaggtcgtgctctcggtgacagtcacgggcagctccagctcctcggccgaggccgtcgcgcacagggtcaccgtccggcactgctgcccggcgcctccggctcccctgcccgccaaccggcgctctgccgctgcctcgcctcgtgacgacgttgccgcgtcggataaccagtcgaaccacctgcaccgttccgatctcgccagcttcggtagctcggaggtgcgtgacctgtgcgggggcttgtgaaagcgagtttcgctgcctttgcttcatcgtcctgcattcctgctccttacatgtgcgtcgtcctgccgttctttgcgtgtcgaatcaaaaagcgagagagaaagaaagagagaggaaaaaaaaggaagaaagaagagagtgcaattgttgtaattacctgtagtaggtaaaattttcaagctaaccttttttttttgaccttcttaagttaagtagtagatgtggcattgaaattgtgttggtgcaaagtggagtgagtgtatggttgtatgtatagtaatggaggttgtatgcttgtatagtctattgattggacgatgctttgctcctactgcaatacagcgcaacgagaac

SEQ ID NO: 15704 - DNA, 1129 bp, Zea Mays
ctttacaaatgctggtacttgccatgtcacaagaagggaactgctttagaatacgagtggtggttccattcttgggttgcctcttcttgatccactagctggacttgttgtctctggcatgattctgaaagctggtattaagactggatatgagagtgttctggaattagttgatgctgctgtggatccttcacttttagaaccaatcaaggaaactattttgagggttcacggtgtgaagggatgtcatcgattgaggggaagaaaagctgggacatcattatatcttgatgtgcatatagaggtatatccttttctgagtgttagtgcagcacatgatatcggtgaaactgttcgtcatcaaattcaaaaggagcacaatcaagttgctgaagttttcatacacatagatccctcgtacttagtaggcccgaccatggacctaaaaaggatcctgaaggactctgatggaacaaattcagaagctatcccacggcaacaaagtgcagaagccatcgtgtctaatattatttcatctcatttttcggagaaaatggcgctcgaacatctaatgctgcattacgtgcaaggaagagtgttgctccaggtccaagtttcaatgtctccagaaattttgattcgggatgcaatggaagtcgcgaagcaagccgaagaggagatactcagggctgatgccagcataagccaaatcagcttgcagctaagattgggccaacaaatcaagcaacttcagctagcatcgcaagaacgtcgctgatctacatgcaggagatcactgatccatttgctggctgcttcatgagtctactcgggagtatttccttttgctaatttttctgacatacatgagcttggtctgctgatgaggcagtaggctataggattctaggaaccgactgtgtacattgtaatcagagtgttcggagacgtgaagctgagtttgtaataatacacaagcagccttgctcagaaatgtactgggcaacaaattgtctgccacatactgtcaatgtaaaatgtatgaacaagttcctcactggccccgctataataacaacgaaccatggctactgatgcaaaataaaatgaatattgttttttttctgtg

SEQ ID NO: 15705 - DNA, 2182 bp, Zea Mays
gtttttgctcccctcctacgtcgtcccgttgcctcgtgaccgcgcccagggtccgaactcccgaagcgtcgcgccgccgcccatcacggacatcggacaggagaagagaagcgggagcaccggagcaggcaccaccgccgaggcgacgaggtcgccgtgctccccatccgctgagtacgtgtccgccgtctgtttccactcaccgtgtgatactgtgatggtggacttggacgagccgctcgatgcggctgtaactgcggagaagggcaaggcggcgctacaacggttacttgaggctgaccctgcactcttcctctccccctctgcggaccttgctgctgccgcccgagcggcctcgcagcacatctactcctcactggtgccactctaccctgctcagcctccaccgctccctaccctcctcacggaccctgccttcgatgccgagcagatttggtcccagatcgagctgcttgcccgcccactcctccctcagctgggccgccagctccgtcgcatcgtgcagcaaccctcctcgcaacagcctcctttgaaaatgcctgctgtcgcggagggtgagcagttggaggaggatggagaaagtagcgattcagaggaattgaagaatgcggaggagttggaggggacagaggatggggaggagttggaggggacagacgatgaggaggaaatgggtgacaaggaggaggaagaagcggagctggatgggagaggagggaatggtgtggaggatgaattcctgaagatagatgaattgacggagttcctggagaagggtgaagaagaggagtatggtgatggagccaaacggagagagaagtcagtgaaaaactggatggttgagagtgacactgaggatgaagatgaggatcaattggatttagaagattttgaggatgatgacgaggatggtgaagcaggcggtggagatattctgtatgaagatttttttgagaatggacacaacaagcaagctaagaagagagatggttccacaaagaaagttcaattcaaggatgaagcacatgaagttgaactccatgacagtgagaatgatgatggaaatgatgaacaagaacatggtctctcaactcacgaaaaggagcgtctgaagatgcgtactaaaatagagcaaatggagaaagctaatcttgaacccagcacgtggaccatgcagggagaggttactgcttctaggaggcccaaaaacagtgccctagaagtggaccttgattttgagcacaatgtaagacctgcccctgtaataaccgaggaagtgacagcttcccttgaagaaatgataaagaaaagaatcgcagagagtcattttgatgatgttgagaagccgtctctcttgccatctaaagctccaaaggagcacaaggaactggatgaaactaagagcaagaagggtcttgctgaactgtatgaggatgactatgcacaaaaagcaggcattgcacctgccccactttctatttcagatgaactaaaggaagaggcaaatactttatttaagaggatatgtttgaaattggatgcgctatcgcatttccactttgctccaaagccagtcattgaggatatgtctgtgcaagcaaatgtgcctgctttagccatggaagagattgcacctgtagctgtttcggatgctgcaatgcttgcccctgaagagatatttgaaggaaaaggtgatgttaaggaagagggggaacttacacaggctgagcgcaagagaagaagagctaacaagaaaaggagatatgcagcatcccataaggagaggacagcgccagccaagttgcagaaagattaaactcaatgtttttttctcactagtttctaaatggtacaagagcgataaactggcaatacatattttccaaattttgtattgtaccctctgctagtagcttttacatgaacagtaaaatgtgaccatttatatttctacagaagcacacaagttcgagagttttgatttgctgaagtgcaattttgagagtgcaaaaaaagacttgtctgttgaaccctaggtatcggtagaaacatcatcctacgacctaaccgacctaaccgatggttatggttatgagtataattttctttccagctattgcaattgaagtcggtcatattcaatctaatttatttctgcacc

SEQ ID NO: 15706 - DNA, 4943 bp, Zea Mays
tcaataatattggagaacagatctgcaggtaatacccattggatgggaaaagttaattttgtggagatacgttcattttggcacatattccgtagtttcgacagaatgtggatcttcttaatattgtccttacaggccatgataattattgcttggaatggtggaacaccaagtgatatttttgatgctggagtatttaagaaggttttgagcatatttattactgctgcaattttgaagttgggtcaagcaatcctagacctcatatttggttggaaagcaagaagaaacatgtcatttgcagtcaagctgcgatatatcttgaagttaatatgtgctgctgcatgggttgtgattttacctgtgacttacgcgtacacttgggagaatcctactggacttgcaagaacaataaaaagttggcttggtgatggtcagaatcagccatctttgtacatattggccatagtgatatatatggcaccaaacatagttgcttctatgctatttcttttcccatttatgagaagattcttagagagttcaaatgttaaggtcataacgatcataatgtggtggtctcagccccggttatttgttggcagagggatgcatgaaggtgcattctccctcttcaagtataccatgttctgggttcttcttttagcaacgaagctgactgtaagcttctatattgagatcaaacctctggtacagccaaccatagatataatgagggaacctatcaggactttccagtggcacgaatttttccctcatggaactaacaatattggtgttgttatatcactgtgggctccaataattctagtatatttcatggacacccaaatttggtatgcactgttctcgacattaattggtggtatctatggggcttatcgtcgtcttggtgagatacggacattaggaatgttgagatctcgctttgaatctttgcccgaggccttcaatgaacgcttgattccttctgatgcaaataagagtaaaggtcttcgtgctgccttttcaagtagacccaagaaagagaaaagagctgcaaggtttgctcaaatgtggaatgtcattattacaagtttccgtgaagaagacctcatagacaatagggagatggatctgctactggttccatactgtaaagaccgtgagctcgatatatttcaatggccacctttcttacttgctagcaagatcccaatagcactggatatggcagcagacagtggcggaaaagaccgtgatctgacgaagaggataaaatcagatccatacttttcctttgctatcagagaatgctatgcttcattcaagaacatcatcaatactttagtgtttggtcagcgggagaaagatgtcctagcacagattttcgcagttgtggatcagcatatagaagatgaaactctgataaaggatctcaatatgaggaaccttcctgcactgagcaagaagtttgttgaattacttgaattactgcaaaaaaacaaggaggaagacttgggtcaggtagtcattttgttccaagatatgcttgaggtggtcacaagggatataatggaggaacaggaccagctcggcacactgttggaatctgcacatggtgcaaatagtagaaaacatgaaggaattacaccgctagatcagcaagaccagttgtttgctaaagctattaagttccctgtggatgaatcaattgcatggactgaaaagataaagaggcttcatcttctgttaactgtgaaggagtctgctatggatgttcctactaatcttgatgctaggcggcggatatcattctttgcaaattctttatttatggatatgcccaatgctccaaaagttcggaacatgttggccttctctatcttgactccttattacaaggaagatgttctgttctcattacaaaatctagaagagccaaatgaggatggagtttccattcttttctacttacaaaaaatttacccagatgaatggaaaaatttcctcgaaagggttggctgcaagaatgaagagggactccgtgaagatgaagaactagaagagaagcttcgtctttgggcgtcgtatagggggcagacattaacaagaactgtaagagggatgatgtactatcgaaaagctttggagcttcaggcttttcttgatatggcggaagatgatgatcttatggaaggttacagagcaacagaagtaatgcccgaggactcgcaattaatgactcaatgcaaggctatagctgacatgaagtttacatatgttgtctcatgccaacaatatggaattcagaagcgttctaatgagccttgcgcacatgatattttgagactaatgacggaatatccatcacttcgggtcgcctatattgatgaagttgaagcgcctagccaagatagaaacaagaagattgaaaaggtttactactcagtgttggtgaaggcttctgttacaaaacctgatgagcctggtcagagccttgatcaggtcatctacaagataaagctaccaggtaatgccattttaggtgaaggaaagccagaaaatcagaaccatgcaataatattcaccagaggcgaatgcctccaaactatagatatgaatcaggagcactatatggaggaggctttgaaaatgagaaatctgctgcaagagtttgagaagaaacatggagtgagatatccatcgatacttggagtcagagaacacatatttacgggcagtgtgtcatcccttgcatggttcatgtcaaatcaggaaactagtttcgtaacaattggacaacgagtgcttgccaatccgttgagggttcgttttcattatggtcatcctgatatcttcgatcgccttttccacattacgaggggtggtgtgagtaaagcatccaaaattatcaatctcagtgaggacatatttgcaggattcaattccacattgcgtgaaggcaatgttactcaccacgagtacatgcaagttggcaagggaagggatgtgggtctcaatcaaatatctctgtttgaggcaaagatagcaaatggcaatggcgaacagacgctgagccgtgacatctaccggctgggtcatcgctttgatttcttcagaatgctatcttgctactatacaacaattggtttctacttcagtacaatgtgtggactgtatatgttttcctctatgggcggttatatcttgtacttagtggacttgatgaagcgctggctactggaaggaggtttgtgcacaatgcacctctccaggttgcgcttgcatcggagtcttttgtgcagcttgggtttttgatggcgctacccatgatgatggaaatcggtttggagagaggattcagaacagcattgagtgacttcatactgatgcagcttcagttggcctcagttttcttcacgttctcattgggaacaaaaactcattactacggaaggacattactccatggaggagctgaatacagagccactggacgtgggtttgtggtgttccatgcgaaatttgctgacaactatcgactctattcccgtagccattttgtcaagggcattgagctgatgattctactagttgtgtatgaaatatttagccagccatatagaggggctgtaacttacatcttcatcaccgtgtccatgtggttcatggtgggcacttggctctttgcaccattcctgttcaatccttctggatttgagtggcagaagattgtggacgactggaccgattggcacaagtggatcagcaatcgtggaggtatcggtgtagcaccagagaaaagctgggagtcatggtgggaaaaggagcaagagccccttcgatactccgggaagcgcggtactgttgttgaaatactgcttgcgctgcgtttctttatctaccagtacggacttgtgtatcatctgaatataacgaagaagataactaaggacaaccagagtgtgctggtttattgcttctcatgggttgtaatttttgtgattttgctcgttatgaagaccgtatcagtgggcaggagaaggttcagtgcagagttccagctagtgttccggttgatcaagggtctgatatttataacatttacagccatcgtggtaatcctaatagcgatccctggcatgacggtgctggacatatttgtttgcatccttgctttcatgcccactggatggggtttgctgctgattgcccaagcgatccggcctgtgatccacaagactgggctctggggctcgatcaaggctcttgcccggggctacgagatcctgatgggacttctcctgttcacgcccatcgccttcctcgcctggttcccgttcgtgtcggaattccagaccaggatgctgttcaaccaggcgttcagcagaggtctgcagatctcccgtatcctgggaggacacaagaaagaccgagggacccggaacaaagaatagggctgggctgctgctgattcaaggtttgtgtgcgccactagtatttatgtgtgaatgggtgggtagcatatggctcgagagtatctcctgaatggagattgattgatcctgaagagtagaagagactcgagtgatgtaagatgctgcaggcttgttgctttgttacctaggcgttaggcagaacagatgttttcaggatctctggcctgttaaccacatcttcccctgttcagagtgaattaattcctaatggaaactgatttgtgaattacttcctaatagaggagtgcttccaaactgatttcatgtgtgtgctgtgatattgtttagcatatagtattttaaatgtagctttgaattttcattctttcgcaacaaaaaatgaataggacaagctggtcaaacttgaaaaaaaaagttaaacgggttataatttgggacggagggagtatgatttgagaacctcatcaaatagtcttgcca

SEQ ID NO: 15707 - DNA, 1307 bp, Zea Mays
tcacctgcaccgcgttcgcgtccaagtccaagtgaggccggccgccgttgggcgggcccaggacggctgtagacctgtacatgtcatccaatcaatccgtcacacgattcagactgcattcactcacctccggcggcctcccacgaagaattcgctcgctttccccggttgcccgtcaccactgacgcccgcctcccccgcggcccttcccatcgccgcgtataaaggttcgctgccggcaacgagaagatgcagctcaccgccacctccacgctcgaagctcctcccgaaccggccgcatcgccgccatggcagccgccgctcctgcaagctccgtgaaggaagtgctgccgtctcccctgacctccgcctccgagccccctccccttttcgatggcaccaccaggttgtacgtggcctatctttgcccgttcgcgcagcgcgcttggattgctagaaactacaagggtctgcaggacaagattaagatagttgccatcgatctcgctgacaggccagcgtggtacaaggagaaggtttatccagaaaacaaggtgccttctctagagcacgacaaccaggtgaaaggagagagcttggatttggttaagtacattgacagcaacttcgaaggtccatcgttgctccccgaggatcatgcaaagcagcagttcgctgaggagctgctcggatacactgacgcattcaacaaagcattttactcatgtttagtcgacagggaagatgtgtctgaggaagccgttgctgccttggacaaaatagaagacgccctggggaaattcaacgatggcccgttcttccttggtcagttcagtctggtggacgttgcgtatgtaccgttcatcgagaggtttcagatactctattccaatataaagaactatgacgtcacaaagggcagacccaaccttcagaaattcatcgaggaagtgaacaagatcgatgcgtacacacagactaaactggacccgcagtttttgcttgagcaaacaaagaagcggcttgggattgcttaaagcctgtgaccaaggacgagactttcgccagaagcaccagcgtagtagatcggagctcgttttagtcggttgtgtgcttggatattacatctggtcttcaataaggcatggccttctgtaatggctgtgcttctgaaaataaataaactagttgtccagtgtgttctgtgcaaatgttgccgagatgaaggatcagtgtccatgtagacattcatgtattgctcatatcgtgacacggcgcatgaaaggtttcggcccctaccacgctca

SEQ ID NO: 15708 - DNA, 3490 bp, Zea Mays
tgataagcgcggttgtcattatcctcggcgtgagcgtgagggcgcctccgtcgccttcgtcttctccaatctccacacacactcccactgcgcaaagcgagcgggcgggcgggcaaccaaccaaccaaccccactcgcctccctctccctcgccgttgccgccgagcaccgcgccgcggggtccccgtcgccatggagagcgcccacaagagcggaggcggaagcgcgcccggagcgggagccggaggggagggcgtcctgtgccacgcgtgcgggtaccagtacccgaacgggcacccgagcgccaagcagcggcgcgcgcaccggaagcactgcggcaagccggcgtccgccgcggcggcggcggagggctccggggagcacgaggccagcgagctgcttctaggtgaggtcggagccggcgcggcggaatgcggcggcggttcgcctggatctgcgcacgagcacggggacgcggcggagggaggggacagcgcagatccttcaggtaatggtgctgggcatcgagtcgttggagacacatctgctgaagattgcctcatcagtggcagtagcgttctttctgaaatcacatctgagtccagcaggactgatgatggtactctgactacagtggctacacagtactctgaaaaaggatcatctactgaggatggggatccatctgatccagcagttggttctgaacagatccaggacgttcctacgtctgttgttccagcagagcctgaagaccgtgctaaattcagttctgaaatctctgaatctgaaatacagaacccgagtattgtgcgtccggaatcagacgcagctggaggtggaacttctgaactgacggatgatgtagccagacagcaggatgaggttgccgtgactggggaagatgctgtgttcgacgccatagatggaagcaaatctagtgaaaggaattctgtgcaaggtgatgagcttaatctctcctgtcaagatatactacaaacggagactggtggggggcacagtagcactgtagtggaggaagattcaggtagcaaggatcctactgcaagtgacggccaagaaatcctgatcgaagaaactgaaccaaatcagcagagcaagcatgcgttaactggctcatttgagaaagtccctgacattgagtctgttgggtcttctgctgagaaatctgtcggtacaggtgatgacttgcttcaatctggtaaaggtgcttgccactcagaaataccagtcgatatcatagctcagctgcaacttgaccctacctctggaacggcagatcatccggcaatctccaaaggggcagacaattttgaaggacaacattatcatacaacagatgaaagcatcggagcaataccaagtacatttgaacctgctgttggtgccaaagttgtatcagttgatgtcactgctgaccttacagaggatgtttgttcgtctgacataacaatagatgacggcatgcaggaaaatgtgacaagtggtactattgtaccatctcaagttgatatactggattcgagtccttccgctacagcacatgaagtcaacattgtcggtagcataaacgatgatgacgaaaagagtcaggatggaaaaagcagtgcagatcttgcttcatacgaggtaaaagagatggttgtcaaggataactttgaagaaaagcagcagaccaaagaggtcattgtagatcccactccacatgaagccaacaactttcccagtaccgataatcacgaggaaaatgagcagaacaaagaaattgttgcagacaccacttcacacaagataagtgctgtacaaagcatgggtagtactgaagaaaaggaacatattgaagatttcattgcgaaactggcttctgaagagatcatttttacaagtaacagagatattgtcgagcagcaggatgagactgatatgaaaacaaactatgaaatagacagggcacgcaacttagaagctactgaagaaattgctgctggtggtgagagtaacacgggaaccatcacagatgttgttgaagacaaattccctaatgaagaaattactttaggcactatctctcttaacatggcagacagcagcgttaaggaggaaaagatgcatgacgaagaagtgaacgaggatctagattctcgtgatgatattatggtacatggtcctgataatgtcaaagagaagatgtgtgaggagaccatgtcaggtcccaccttagacaagttcagtttgcctacatctactgacagtcctgaagagggtaataaggacgaaagcacgcgtgcagaccctatgtcgcacgagaccaatgtggcgcaaaccagcgatggtgctgatgaagagaagaagatcagggagcttgctgttgaccctacttccagcattggtaccatgggcaacataggcaacgctgaagacaagaagccgagtgaagaaactacaacagatcctagacctgttgagaacaccacaacacaaggcacagaggacgcgacagatcctaaacctgttgagaacaccacaccacaaggcacagaagacgcggatagcagcaagcagaatgaaaacactgcgagcgtaggtggcgttgaaggcaagaagcagggtgaagaaactacagcggatcctagatccgtcgaaaacaccacagttgaaggcaagaagcagggtgaagaaactacagcggatcctagatccgtcgaaaacaccacagcacagggcacagaggatgcagaaagcagcaagcagaatgagaacacaaatgtcatggaagaagaaagggtgacggtggaagatacaacctcaagggagatcagcgccatagaaagcacagatgacctgaagggcaaggctaccaacgagaacgaagagatagccgacaaggaaatggtcaccgactcagacaagaaccatgtctcgctgaaggtcctcctcgcggacaagaacgtggaagcgaaagagaaggagaagaaggcgactagcgccaaggaccgggtgctgtcgttcaggcgccgggtatccaaggacaacgtgtcgccgccggtgaagccaggctcgccaaccaaagacaaagatggctcagggcagcaggactggaactccccggccaggttgcccgtcgagaagaaacccaaggggaggaaacagcaatgggtaccgtttatttgctgctcgtcggtacagtaatccgtttgccagcatcagcttggggcatccattgttgtgtttgtacttgtacgctgatggtagtagattgagtaggaccttcgttccaggattggaccttggcagctttgctactctacttggattgtgaacccggctctgccgtttttgtatgttataaatatctgccttgatggaggggaggagggtatgccccaaactctggtaaagtaggaaggttatgataggactgacgagttaacttttaaacctagctattttaattaaaatgaaacccgaa

SEQ ID NO: 15709 - DNA, 1249 bp, Zea Mays
catgcggcaggagaaggggatcaaggctgggacagccagcagttgctactggtctaagttttactgtgattcttactagggatggacaagtatatacttgtggaagtaatacgcatggccaacttggtcatggtgacaccatagacagggccactccaaagcttattgaattgtttgaaggctccactccggtggtgcagattgcagccggtgcaagctacacgtttgctgtaacagatgatggaacagttcattcctttgggtcttgtactaatttctgccttggacatggggatcagcatgatgaacttcttccacgtgcaatccaatcatttaagtggagaaacattcatgtagtccgtgtttctgctggagatgagcatgccgtggctcttgatgcactaggatatgtttatacatggggcaaaggatactgtggagccttaggccatggtgatgagaatgataaaactagcccagaattgatcagcagcttgaagggccaagttgctgtgcaggtatgtgcaaggaagagaaagacatttgttctcacggacaagggctcagttgttgcatttggatggatgggctttgggagcttagggtttcccgaccgaggaccgttggacaaagtaatgaggccccgcgctcttgagagcctgcaggatcactacgtctcccaaataagcaccggactgtaccacactgttgcagtgacaagtaagggcattgtgttcgggtttggggacaatgagagagcccaacttgggcaggagtacattcgtgggtgcttaaaacctactgagataatgttccaaaagagcatggaagacataccgattgcggcgcctagtggttgacttgaatgccatcattttggacactgttgcctacatgtgttgtatttatatcggaattcttgtcggcaagtgtattttatacttcgtgctttgtgagtaatctgggtgaacgggggaaagacggaagtggttggaattggaggacagtgttgtgtagccaaagaagcatatagtttagtaacgtgtaatgtatcgaataattcaacccaccatttttcttctgtacaaaatttattggtgtgtttgtatttttttctctcttgtccccttcatgttttcttggttctgtgctagcaactgttgagtaaatagcgtttgctcccctggaacttgttatattagtgcctaatcttgctagtttctatcgccttcaacaatgtcaattcgtc

SEQ ID NO: 15710 - DNA, 117 bp, Zea Mays
ttggcgacctcttctccctcctaggcttctgctacttgccgccgctatgcttcaccccgtgcccatgcttgtcgcggctccaggcaccctctcgcggcctcatctctctcccttcct

SEQ ID NO: 15711 - DNA, 719 bp, Zea Mays
ttcaacactcatgccatcccactttatgctgaatcagaagcgagcatagacggaaaccaatggatagctccagtcctaaagggtctgagaagatcatctccaactgcactgaagatcaccctgagatcgatcagagaaggtcgaaaacagagtttgcctgaatgtttgactaaggaatttaggcttacaatgaatatactgcggtctgttgtcaatggggatgtttatgagggcattagagctcttagcatcgataaagacaatgcccctaagtggaatcccactacccttgaggaggtgaagtacgaggacatcgaccgtctgttccagccgttcagtccggagctggaacttcaggtcccatctgatgattccaacaggtggagcggcaaatacgagaacacggtctatggcagagcttcccagtgactgtatacaagatcccccagccttttgttattttcatccgaaccactgcattacggaatattcagtttgcggcacgtgtgtatttcgagtgtttgtgtagcgcgacgttccaatgtatgaactgttgcaaaggttacacgatgacatgaagtttgatccaacaccaaaaccatctattagatgggaaagttctgcactttggatgttatatcgccaatcagaagctcaaacccttgcaaatcaggagtactccaactccatgtagtatagtagtttctcttgtacttcgc

SEQ ID NO: 15712 - DNA, 2529 bp, Zea Mays
ctccttggctggactggacccccaacccaacaacagcagcaggaacaggaaaaagaaaaaactctctcccattcccatctcgcctcccacctcctccgcctcgccgccgcggcaggcaccgccaccaatcttctcttccgccccctcgttcgttcgctcgctcgctcgccaggagatcgactcgaggcgaggccatgaagtacgtgctggtgaccggcggcgtggtgagcgggctcgggaagggcgtgacggccagcagcatcggcgtcgtgctcaaggcctgcggcctccgcgtcacgtctatcaagatcgatccatacctcaacaccgatgccggaaccatgtccccattcgagcacggcgaagtgtttgttttggacgatggtggtgaggtggacttggaccttggaaactatgagagatttctggacatcaagttgactcgtgacaacaacataaccacggggaagatataccagtctgttattgacaaggaacgtagaggagattacctaggaaaaactgttcaggtcgtgccacacatcacagatgaaatacaagattggattcaacgtgtggcaatgaatccagttgatgacaccgaagagccagctgatgtttgtgtcatagaacttggtgggactataggggacattgaatcaatgcctttcatagaagcactaggccaattttcataccgtgtagggcctggaaacttttgcttggtgcatgttagtcttgtaccagttctaaatgtagttggtgagcagaaaacaaagcccacccaacatagtgttcgcggacttcgaggacttggactcatgcctgatattttggcatgtcgcagtacacagccacttgaagaacacgtgaaagtgaagctcgcacaattttgtcatgtcccgataccaaatatcattaatctccatgatgtcaccaacatttggcacattcctttgttgctcagagatcagaaggcccatgaagctattttgaaggtgttagaccttcagtgcgcgagtaaagttgctcgagaaccccaattgtctgaatggactgaaagagtcagcagatgtgacagattgaaatctccggttaggattgcaatggttggaaagtatactggcctgtcagactcctacctatctgttataaaggctcttttgcatgcgtcggttgctttggacaggaaacttgtggtggactgggttccttcctgtgatcttgaagattctacagcaaaagagactcctgacgcctatgaaaaggcatgggagtcgttgaagggtgcagatggtgtgttggtgccaggaggttttggagacagaggagtccaagggaaaattctggctgcaaaatacgcgcgagaaaacaacgttccatatcttggcatttgcttgggcatgcaaattgcagtgattgagtttgcacgctctgtcatgaagttgcacggtgctaacagcacagagtttgatccaaccacaaaaacaccatgtgttgttttcatgccagaggggtccaaaactcatatgggagcaacaatgcgccttggttcaaggaggacctttttccaggccactaactgcaaatctgctaaactgtacggcaatgcttgctacgttgacgaaagacaccgccacagatacgaggtgaatcctgacatggtcccagaatttgagaaggcagggctttctttcgttggcagggatgagagtggcgaacgcatggagattatcgaactaccaactcataggtttttcgtcggagcacagtttcaccctgaattcaagtcaaggcccggcaagccatctccgcttttcttaggattggtagcagcgtcatcaggccagcttgaccacttgctccaacgtggccttaccagttcagcaggcagagacatctgcggcaaagggggagcgcagaaaccaaaagcttgccagaacgggcatgtcatgaagccactgaatggcctggtgcacgggcactattcagcgactcgctgcaatggcgtcattcccatctagcaggctgttttcgcttgttctttttctttccgttctacctacctgcagggcaaccaggaagagaagggctgtttgctctagcgacacggcagccgtttccgatgttttaacgaggaagcaattggcatgcaaagctgtcgcgcgcattaagaggcaaatctagcagcttattagctagggttcgattagtagtagtagtaatccgatgttgctggtttatttgttagtttgtttgctaagaaagattacaagggttagtgatgtgcagctagctccagtgtagcctgccgtctcgccccatttgtacattgtaaaaccactgctactctccatgattgactgaatggatgagtataaacgtattggaccaacatgctcggtgttataaaaatctaagttgcaatccaactgtagttgtctcggggatgttcggtaaagttgcgtgagctggtggcacgagctatgggtttggtaaaggcttagcagactcatatgtacatttgca

SEQ ID NO: 15713 - DNA, 1645 bp, Zea Mays
attctcctttcatccattgcgagtttgcgactgcgaacacgcgcgcaaaaaatattgacgaaaactggaggggtaaaggggaaaaggcgacggccgcctgggccctggaggagcgagaaggcggaagaaggggagcggcagtcgcaggccgcagctcgttgatggtggttagggtttcgccgcccgcacgctcgacctgctgaagaatcgcccccctgttgaagaggtctgcgcctcgccctataaggctccggggaagaggagatagacatcagtggaccccggcgcgcggctgatggcggagcaggagcggagggacgcggaggctgggggcgatgccgcgggcgcagcggtggcgtctcacaccagcagcatgcagcgtgtcaaagtataccgtttggctgatggtgggaagtgggacgatcaaggaacaggtcatgtttctattgattacattgagggttcgaaagaactcggtttgactgttttagatgaagatgacaatgagacgctacttatgcacaacatcacatctgatgatatttacagaaaacaagaagaaacaatcatttcatggagagatcgtgaagcagcgacagacttagcactaagctttcaggaagctgcaggatgctcctacatatgggaacatatatgtgaaattcagagaaaccttcagttcagtaaccttggtgctccggaagttggtcgtcgtcaatcatcagaatctctagaagcctctagaataatgcattcaaatgatgattcattccgctctgctaacggtgaattcagggaacttcctcctgttgagctgtctaatcttccttttattttgaagactgtattggagggtggcattacagatcagatccacatggcagagttgataacacaagatcgggactttttcccaaagctagtggacattttcagaatgtgcgaggatttagagaacatagatgatcttcacatgattttcaaattggtcaagggaataatattgttgaacagtccgtcaatctttgacaagattttctctgatgagtttatccttgacataataggtgcccttgaatatgatccagaggttccaagagtgcaaaagcaccgtgcttttctaaaagatcatgtagttttcaaagaggccatacatattgaaaatgtttctgttatttcgaagattcatcaaacatacagaataggctatcttaaggatgttattctgccacgaatattggatgatgccactctaggaagttttaacacaatgatacattcaaataatgcttctgttatttccatgctaaaggatgacacaccctttataagacaactatttgctaggatgaggtcatcagatatttctatggaatcaaaacgagaattggttctgttcttgcatgaattttgcacacttagcaagagtctaccagttgttcagcaactgcgactgtttcgggatctttcaggtgaaggcgttttcgaaataatttctgatgtgttgcagagtcaagatagaaaaatcgtttcagctgggacagatatgctgatactttttcttaatcaggaccctaacctattgaggtcatatattgttcagcaagaaggaaattctcttctaggacttctggcttagaaaaac

SEQ ID NO: 15714 - DNA, 1330 bp, Zea Mays
ttcctactactgctttaacacttttggaccatctacttgccgtagaacctgggaataggggtaccgctgcatctgcccttgacagtgaatttttacaacaaagccatatgcctgcgatccatcaagtctacccaagtatcccccaagcaaggaatatgatgctaagcttcgagatgaagaagctaggaggcaaagagcagctgctaaaggacaggaagctgaagctggacggaggaagcaacctcctgcacctgatggtaatagtggattgcagcaccgccgagttcagatgaatcctaaaagcagcagttacaagttcactccaaaggaggatgctgtttctggatttccaattgatccgccagcaagagctgctgcagacaatggttaccctcagcgcgttcctctgatgcaagctggccgttcttcctccactctgggtagatcaagtgggatggatccaaaggcccaaagattccacacctcccaaattgtcactactgagatgtccggccaatctactgcatctgggcagcgaggcaatgctcctaagatgtctaacctcggggaaagtgccaggagacaatatcttcgagagcatcggtccagttcaagatacagtcaactcactgctgcggacccttctgacaggcctgaatggaaccatcaattccaagagcggccatcgtcttcccatcggaaggatgatgctgtggcaaacaaggagcatacggtggtgaacgggacaaagaagaacagaatccactattcggggccattgatgcctcctggagtgaacatggatgagattcttagagagcacgagcgacagatccaacaagcagtgcgaagagcgcgccttgacaagggaaagggaaagcacagcggtgagagagaccagtcggagtcactgctgtgtaccaccgggaatctcagggctgatcgctaagttcagtttgagcagtcatcagaagcaaagaaaacagcatcgaatcccttatattttttcggttcccccgccccaccccaaccgccaagcggagaggtttttgttctgccagaaactcaaactcctgatgcggtttggtacccaggaggtgggcagctgccaaaagaaaacctgttcctgtagagatttaccgccccagagtctagcatatgcggtctgaaatattttttccctgaagatttgttggttatccatagtcctcaattgtatatctcaaaagtactcacccccaaaaatgaaaaattgatccatacactcgtttttgcatacgacgtgacactccaaaatgaaaattccataaagattctcgatgaattaaga

SEQ ID NO: 15715 - DNA, 1088 bp, Zea Mays
gagatgccggcagggagcggggccccagcgctggcgcggcagggctcggtctactcgctcacgttcgacgagttccagaccacgctcggcggcgccagcaaggacttcggctccatgaacatggacgagctgctgcgcaacatctggacagccgaggagtctaacgccatggctgcggccgccccggccacggccacggccacggcggccgcatccgtggacgcgcacgcgcagcagcagcagcagcagcagcacggggcgcccatccagcgccagggctccttcacgctgccccgcacactcagccagaagacggtcgacgaggtctggcgcgagatcgtgagcctcaccagcggcgaggacgcgcagcaggttgcggctcccgctcccgctcccgcgcccgagcccgagcccgcgcccgcgcccgcgccgctgccggcgcaggcgcaggcgcagcagacgctggggtccatgactctggaggagttcctggtacgcgccggcgtggttcgtgaggacatgggggggcaccagaccctcctgctgcagccgcacgcgcaggggcttttctcccaggggaatgcggtcgcgccgcagaccctgcagctgggaaacgggatggtggccggggtcgtcgggcagggcctcggaggaggggtgacggtggcggctccgacgacgccggtcgtgttcaacgggttgggaaaggtggaggcgggtgatctgtcgtcgctgtcgccggtgccgtatccgttcgacactgcgctgaggatgcggaagggacccaccgtcgagaaggtggtggagaggaggcagcgccgcatgatcaagaacagggagtcggccgccaggtcgcgtgcgaggaagcaggcgtacataatggagctggaagctgaggtggcaaaactcaaggaccagaatgaggagttgcagaaaaagcaggttgaaatgctaaagaagcaaaaggatgagcggaagacagtagatctttctggctgccgattttgatgcgctgcatattcatcaactgggaaatgacggttcccttcagacaatgtgtttttttttcactcacaaaagcttctctg

SEQ ID NO: 15716 - DNA, 1025 bp, Zea Mays
ttccatccttcgccggaggcgaccgcccgtcaacaggacttgatctactactcactagcggtgtagaggtgaagataagaacttgaccatgagcagcataggcacaggttatgatttgtctgtcacgaccttctccccagatggtcgtgtcttccaggtcgagtatgccaccaaggccgtcgacaacagcgggactattgttgggatcaagtgcaaagatggcattgtcctgggtgtcgagaagctggtaacctcaaagatgatgctggaaggatcaaaccgaaggatccattcggtgcaccgtcactctggcttggctgttgctggtttagcagcagatggcaggcaaattgtttcaaggaccaaatcagaagctgccagttatgaaaagaccagggtctatggagaacccatttctgtgaaggaattggctgatcgtgtggcaagttatgttcatctttgcacgctgtactggtggctcaggccttttggttgtggtgttattcttggaggttatgatagggatgggccacagctctacatgatagaaccctcaggagtttcctacaaatacttcggtgctgcattggggaagggaagacaggctgcaaagactgagatagaaaagttgaaactttcggagcttacctgccgggaaggcattgttgaagttgcaaagataatttatggagtgcatgacgaagcgaaggacaaagcttttgagttggagttgagctggatctgtgatgaatcgaaccgccagcatcagaaggttccaaatgaactgttggagcaggccaaagctgctgctcaggcagctcttgaggagatggatgctgactaagaaacaggacgatttgcccagacttggtgtttttggtgctgttgaaatctccgatccctttgggataaagagctgtttcttgatttgatgcaagtaggcttggtactcttcatgtttgtggcatatggttagcaggcatgaatgtgacatcaaacgaagtagtattattgatcaaccaatg

SEQ ID NO: 15717 - DNA, 1192 bp, Zea Mays
caccgtggctctgcctggtgatcacaactccacgtcacacacctcacagagctgcagcagcatcagctgccacctcctgcctctcctccttccttcctgcctgcatgtatgtatgcatccctctgcttggtttcttgcctgttcattcatcatcgccctgctggtgattttccattcatcatcgatcttcctgcgtctctgaactttttctgctgtgtctgttggccgggagcagaggttgctacacgtatatattctgaagaagagatcgagatgaccagcgtgtggaagaccaaggttctgcctggcctcaacaagatctttgacaaggatggcaagaaggctgcagctgcaggcttcttgaagtccttcaacaaggaggagtttgacaaggagattgaggacaagaagacagagctggagcccaaggtcgtggaggcctacgaagcatctcctcctgaggtcaaggctctcttcaaggataagaagccagtcaaggtcagcaagaagaactcggctgcagtcaccaagttcctcgatgagctggctaagattgacttccctggagccaaggtggtgagcgaggcggtggccaagtccggcacctcgcccctgcttccggcgatcaccttcatcttggacaaggtcgcaccgtttatccccaaggaggagcccaaggaagagccggcggcggaggccacctcccgggaagtcgccgtggaggagaagaaggaggaggccgagccagctgcagcgacggaggcggcaccggcgccggcagagacaccgtcggaggcggcggtggtagaggagaagaaggaagaagagaagaaggaagaggaggataagccggctgccgaagaggcggcgccgccagcagcagctgctgctgctgctgaggagaagtgatcctgtcgacggatcgagcatgcaaagcgctccctcctcgctcccttgcttgctgctggtaaattaaattaagttgccgtgatacttaagcgtagccgcacggagtgaaaagttatcaagtaaaagcagacaaacacttggcatgcatggacattaatttattaaaaaaaaatcaagaaaagcatgaacgactataaataaaaaaaaatgactagtaacatgacaaagtttgtggtatatataccgggggagcacaaggataagcagagggaatgtgaatatc

SEQ ID NO: 15718 - DNA, 2010 bp, Zea Mays
agtatttgcacatttcataacctgcttcattgtttgagctcatgcaaggcgtaaatcttattgcaagaagggcagctgtgcatgttaagtctcaaatatagactcacttgataacactgcatgagaggttgaaaacttgaggtacagttgatattctggttcagagtatgggttcaaggtttgcatcacatcagctgagcaatggcctgtatgtttctggtcgacctgagcaacctaaggagaaggccccaaccatttgttccactgcgatgccatatactgggggtgacatcaagaagtctggagagcttgggaagatgtttgatctccatgttgagaaatcaagaaaatctggtcctctaggaaacgctccttcaaggaatacttcatttggaggcactgcttccaattctgggcctgtctccaatgctggtggtcggtccaactactctggttccctttcatcttcagttcctggtgctggtggatcagccagagcgaaatcaaactccggaccactcaataagcatggagagccaacaaagaggtcatctggtccccagtctggaggagtaaccccaatggcacgccagaattctggcccccttcctcctgtgcttccgacaactgggcttatcacatctgggcctatctcttcagggccacttaattcgtctggtgctccaaggaaagtatctgggccacttgattctgctgcatcgatgaaaatgcgggctacttcctttgctcacaatcaagctgttactaatctgaacactgaagatggttactcaattcagggaagctttccgaagccaatactctgggctgtgattttgctctttgtgatgggttttatagcaggtggcttcattttgggggctgttcacaatgcaattttgctgatagttgttgtggtcatatttggttttgttgctgcacttcttatctggaatgcttgctggggtagcagaggtggaattgggtttgttagtcgctaccctgatgctgatctcagaacggccaaagatggacaatatgtaaaggttacaggggttgttacttgtggaaatttccccctcgaatcctcgttccaaagggttccaagatgcgtatacacttctactggcttgtatgagtacaggggttgggattccaaagctgccaataccgaacatcggcgttttacatggggtttacgttcaatggagcgacatgcggttgatttctacatttcagattttcagtccgggcttcgagcattggtgaaaacaggatatggtgcacgtgtgaccccatacgttgatgaatctgttataattgacatcgatccagacaacaaggatatgtcccctgaatttttgagatggctaagagagagaaacctttcaagcgatgatcggacaatgcgcctaaaagaaggatacatcaaggaaggtagcactgtaagtgtgatgggggttgtccaaaggaacgacaacgttctgatgattgttcctccatcagagcccatctcaactggttgtcagtgggccaagtgcgttctcccgaccaaccttgacgggcttgttttaagatgcgaagatacttcgaacattgatgtggtgccagtttaattagcggtgaagagtcgttgccaaagaaagtgtctgttaaatatgagtctgaattgtttcatgcaatgttagttgacaaaaatgtgcaaatgttgggtgtgattatggcaggtggagggtggttcgttaagctggcttttggatgtatagtttctttttcttttagttgtgttttgtcatttctttttaattttcagctccgagatctgaaacttgtgtaaccagatgcctcttaatctaaatcagcgtggcatttagatcgatttgaaagcttacaggtgacaggacttcggatgtacattcttccccttttattgtgttgtcatttattttcttttttaatttcaactcagatctaaaacttgtattcagatacatgaagcagatggtttgc

SEQ ID NO: 15719 - DNA, 1185 bp, Zea Mays
gctcgtcttcgcctcgtctttgaaaattgacaagggctcaaggctgaggactcaaccggacaggcaagagctgccggctgcggtgggtcaactacctccaccctggcctcaagcgtgggcgcatgtctccccatgaagagcgcctcatccttgagctgcacgctcggtggggaaacaggtggtccaggatagcacggcgcttgccagggcgcactgacaatgagatcaagaactactggaggacacacatgaggaagaaagcacaggagaggaagaggaacatgtctccatcatcatcctcatcttcactgagttaccagtcaggctacccagatactccatcaatcattggagttaagggacaggagcttcatggtggcagtggctgcatcacaagcatcctgaagggcacccatccggacatggatggctatcccatggaccagatatggatggaaattgaggcgccagaggtgccctcggaggtgggctttgttggagggaacgaaaatgtgtgcagcagccttgccacccctctgccaccacctaccgtctgggaatactacccagaggtctgctggaagcttgacgatgagatcaagatggcaccacaatttggttatatagtgaaggagctgacccctgcttctgataccatatatattgggtctgattactaagttatacaccatcctagcagaagtgaagtgcttttgttgacacaagctttagcatggatctggatatttatctcccgcttagaattggaggcctatggctctatgcatgatttctatgtatctatctagtgtgcaagacaagatcatctcaatttgtccttgatgctatgtaacacaagggcaaaggtgctatgtctgtttactcagaataattagctattccgtgggactcctgttgggcatgaagccaagaataaattttatattgatatagatggtcttaacttggaacgattttagagtttcaatccagagaaaccattgttaaggtgaacattaagctgacccagctaaaaatatagttcgcttttaacccatccgtaaaaaccagtgaatgttgttttgtacaagtggatcggctggttgatggcctcaagtaacaactactaaccccaaaagaaaccaaacgagtaccaaattagtgcactgatagagttgcctgcct

SEQ ID NO: 15720 - DNA, 113 bp, Zea Mays
gaattaaagaatgaataagacagagataggtcaagggacaattgcctccaccaaccgactgctgctcaggggcttctcctgcgagttcctcgggctcttcaatcggatcgttc

SEQ ID NO: 15721 - DNA, 1815 bp, Zea Mays
cagctagccgcgagcccacacgaatacacgaaagcgcggcgcggccgattttctgttccgccccctgggaaacgctggattttagcgtgcaccacgccaccacccgaccccagccaacaagacccccctgcctcgcctcgattccacccacacccacatcctcacctccctccgcctccgagtgccaccaaaccctagatctcgcaccggcggcagccatgtccaagccatggggtggcgtcggcgcgtgggcgctggatgccgagcgcgccgaggaggaggagcgcgagcaggtcctggccttcccggcgcccgagccacccgcggccgcgggcggcgccgccagcttcccgagcctccgcgaggcggcctctgctggcggcaagggcaaatcgaagaagaagaacaagggcaccacgctgtccctgtccgagttcaccaccttcggcgcggccgcggcccagcggcgcgcggcgcccgtcgagcccaagggcctgacccacgaggagatgatgctgctgcccacgggcccccgggaacgctcggccgaggagctggaccgctctcgcgggttccgctcctacggcggcggcggcggcggcggcttcggcgcaggcgctggaggggagcgccgcggcgggttcgacgacgagggccgccgcgggccgggcagaagctccgatcttgacatgacatcccgagcggacgaggctgacgactggggcgccactaagaagttcaccccggctcccgccgactccggccgccgcgataggttcggtgggccttcccctctcggccgcgctgatgatattgacgactggtcacgcgacaagaagccgctcccgtcgcgctaccccagccttggttctgcaggtggcttccgtgactcgccgggcttccgcgactcatcagcttcttctgacgctgaccgttgggtccgtggagccacccctatgccacacaacggccagggggcgggggagaggccacgcatcgtccttaatccacctaaacgtgacccgtcaactgcctctaccccacctgctgaggtggctcgcaaccggccaagcccttttggggctgcaaggccccgggaggatgtgctggctgagaagggggtggattggaagaagtttgagaatgagattgaccagaagaccagccgccctaccagttcgcactccagcaggccgaatagtgctcattcctcccgccctggcagccctgggtcacaggtttcggccgttgggagcgaaggagcaccaagggcacggccaaaggttaacccatttggtgatgccaagccaagagaagtggtgttgcaggagaaagggaaagactggaggaaaattgatgttgagctggagcatcgtgctataaataggccggagtctgatgaagaaagaaatttgaaagaagaaatcaacctcctgaaggtggatcttaaagaaatcgagggaaagatgagtaatggttctgagcagacatcggtagatgcaaaagatttgtctgagaagatatctatgttggaaagccagcttgagcagctttcaagggagttggatgacaagattcgatttgggcaaaggccacgttctggtgcaggcagggttacaacacttgcacccactagtttaggggaggaaccacaggctacagtggtggacagaccacgttctcgtggtggtatggaaccacccccaaggcaggaagaaagatggggatttcaaggaagccgagaaaggggctcgtttggtggaagcagaaattcagacaggattgatgcacattggtagactaaggttgtagatt

SEQ ID NO: 15722 - DNA, 409 bp, Zea Mays
gattctccattgatgtcaaatgacacatcggatccttctgaccggaggaaaataatctgcgatgagaaactgaaggacctattaggagttgaaacgttcaccggctttactgtttcaaagctgcttgccccccattttaccaagacgaagtagcaacccgccatccagatcttctaaacccccaaaaggctgggtgatcatgttttgcagaatgtgtaatcatggaacagttaggagctatgtgagtggtgtgaaatttttttacatgtgggagtcggtggcactttccgaatgttaccagtaaagtaggttcctcgatgtctaatgaatctatcaactgtttactaaccgtcacgccctccgaaaactgtttatctgtgtggcttgtagtgcgttctttctgagttta

SEQ ID NO: 15723 - DNA, 1920 bp, Zea Mays
ccaaggccaggttctagagcgaacaaggcccacgtcacccgtggcccgtcaggcgaagcaggtcttgtgtagactttgagagggattggatattaacggaaccaatcacgcacgggaatgcgattcccagcccacctgtaacgttccagtgggccatccttaactccaagcccaacggccctaccccatctcgtcgtgtcatccactccgccgcacaggcgctcagctccgcaacgccgccggaaatggtcgccgccaccgccaccgccaccgccatggccaccgctgcatcgccgctactcaacgggacccgaatacctgcgcggctccgccatcgaggactcagcgtgcgctgcgctgctgtggcgggcggcgcggccgaggcaccggcttccaccggcgcgcggctgtccgcggactgcgtcgtggtgggcggaggcatcagtggcctctgcaccgcgcaggcgctggccacgcggcacggcgtcggggacgtgcttgtcacggaggcccgcgcccgccccggcggcaacattaccaccgtcgagcgccccgaggaagggtacctctgggaggagggtcccaacagcttccagccctccgaccccgttctcaccatggccgtggacagcggactgaaggatgacttggtttttggggacccaaacgcgccgcgtttcgtgctgtgggaggggaagctgaggcccgtgccatccaagcccgccgacctcccgttcttcgatctcatgagcatcccagggaagctcagggccggtctaggcgcgcttggcatccgcccgcctcctccaggccgcgaagagtcagtggaggagttcgtgcgccgcaacctcggtgctgaggtctttgagcgcctcattgagcctttctgctcaggtgtctatgctggtgatccttctaagctcagcatgaaggctgcatttgggaaggtttggcggttggaagaaactggaggtagtattattggtggaaccatcaagacaattcaggagaggagcaagaatccaaaaccaccgagggatgcccgccttccgaagccaaaagggcagacagttgcatctttcaggaagggtcttgccatgcttccaaatgccattacatccagcttgggtagtaaagtcaaactatcatggaaactcacgagcattacaaaatcagatgacaagggatatgttttggagtatgaaacgccagaaggggttgtttcggtgcaggctaaaagtgttatcatgactattccatcatatgttgctagcaacattttgcgtccactttcaagcgatgctgcagatgctctatcaagattctattatccaccggttgctgctgtaactgtttcgtatccaaaggaagcaattagaaaagaatgcttaattgatggggaactccagggctttggccagttgcatccacgtagtcaaggagttgagacattaggaacaatatacagttcctcactctttccaaatcgtgctcctgacggtagggtgttacttctaaactacataggaggtgctacaaacacaggaattgtttccaagactgaaagtgagctggtcgaagcagttgaccgtgacctccgaaaaatgcttataaattctacagcagtggaccctttagtccttggtgttcgagtttggccacaagccatacctcagttcctggtaggacatcttgatcttctggaagccgcaaaagctgccctggaccgaggtggctacgatgggctgttcctaggagggaactatgttgcaggagttgccctgggcagatgcgttgagggcgcgtatgaaagtgcctcgcaaatatctgacttcttgaccaagtatgcctacaagtgatgaaagaagtggagcgctacttgttaatcgtttatgttgcatagatgagttctgtaaaaca

SEQ ID NO: 15724 - DNA, 1931 bp, Zea Mays
ggcagtggtccaagtccaacgaccggaccggacggaccccggcggccggcacccagcggcagcggaaggggaatcatcgtccactcgcaactccttcctggcccctcccactcaccgctggacacttccatcaatctctttcccccttcccttggattcgtttcagctactgaaactgaacgcgggcagtggcaggcaggatcagccgagccgagttccatttccgccaccgtcccttccccctctgcccctcgttcctcgtcttctcgtccgcaagtcaagtcccttcccccttccgcccctcgtcaaagcaagcaagcaaaagtggtgcggtgccatcagagtgaatctgcaaatgtaggatggtcagctgatccttctgtccacaccaactatagcgccgggagccccaggctgaaacaatgcttgtctgatatcagcatgggcaactccaggttcttctcatatgatgagctgtatcagatcactgatggtttctcagctcagaggctgctaggggaaggaggctttgggtcggtgtacaagggccgcctgccagattataaagatgtcgccgttaaacgactaaaggatggcggcggacaaggggagcgcgagttccaggccgaagtggagataattagtcgcgtgcaccaccgccatttggtttctcttgtgggatactgcatttccaatgaccaaaggttacttgtatacgactttgtttctaataacacgctgcattatcatcttcacggacacggaatgcctgtgttagaatggtccgcacgggttaaaattgctgcaggtgctgctcgtggaattgcttacctacacgaagattgccatccgaggataattcatcgagacatcaagtcctcaaacattttgttggataacaatttcgaagcaaaggttgctgactttggtcttgcgaggctggctttggatgctgtaacccatgtgacaacccgtgttatgggaacatttgggtacatggctccagagtatgcatcgagtggcaaactgactgagagatcagatgtgttctcttttggtgtagttttgttagagcttattactggccggaaacctgttgatgcatcaagaccaatgggtgacgagagcctcgtcgagtgggctcggccattgctctctcgagccctggacacaggcgatttggaagggttggttgaccccaggctcgagatgaagttggacgaggtggagatgttccgcatggtcgaggccgctgcagcctgcatccggcactcggcgtcaaggaggcccaggatgagccaggttgtgcgggttctcgagagctcagcggacatcgacctgaccaatggtgttcagcctgggcaaagccagctcttcaacgtggccaacgcggcggagatacggatgttccgccggatggtagccggcgcgcaagacgacgacagctctgacttgacacagtacgattggagcaggggtagcgacgctgccccgggctccaggatcttgtaacgatgaccacattgtggtttctgaattctgactctgcctgcagtacttgttctgtagggagagggatggaattcagttcaaagtttgttccctgaccggccgggtcttattctttaggaaaaaacaaagtgatgtgttgtgttgtgtgtagagaagattgcactcctaggtttggtgtgaaggaagaggtttgcagttcattcagatttttaggcagtcaaggacaaggacgtggaaattgaagcaattgttgttacttgaatgaaacacgtgacatgcaaggttcaccatatcgaacggctaatctagcttaccgatcggtttattggtaattggcgctggcgggtaacgctgtatcggtggtttcggaatatgaatttgcaagattttgtaaatttcaaaaaaaaaatgacatttca

SEQ ID NO: 15725 - DNA, 1953 bp, Zea Mays
attagacagaattactggagatagtctcatgcttatgcgtagacagattcgcacacgacgcacgaaaccagtgaacgtaggagggtgggtcttctcttcccccttcgcttcctcgtgcagctccgaccacgggctcgtccctgcctcggacgtcgctgcacggttacctccccatcggagctactgacctggggaagcgttcgtcgtcggagcatgctgatgaaaacaggagtggcgctgcaattggggaggaattgtcgcagggtgagcgggagtccttagtggagcagaatggtcagggtggcgacgtgaattcaagccaaacgtctgcagcttcaggaaagatggatgacaacgagccggatccagcttcttccagtgataccacaacgattccggacgaggatacatctaatgaatctcaaaaggctgagcaagataattgtgatctatatcgtggagagtgggttactgattcttctgggccactatacacaaacaactcctgccctatcatcacacagatgcagaattgccagggaaatgggcgaccggacaaggactatgaaaattggagatggaagccagaacagtgtaacctcccacgcttcgatgcaaggaagttcttggagttgatgagaggcaagacacttgcgttcgttggggattcagttgctcggaatcagatggagtccctcctttgcattctgtggcaagtagatgtcccacaaaaccgaggcaacaaaaggatgcacaagtggctcttcaaatcaactaaaacaactatcgcccgcgtctggtcttcttggttagtgcacaggtcaactgaagctgtggggattgctcctaagggtattgataaagtttttctggatattcctgatgagaccttcatggagttcctcccaaggtttgatgtactcgtcctttcctctggccactggtttgctaaacgatcagcctatatcctgaacgagaatgttgttggagggcagctttggtggcctcgtaaagcaggaaaaatgcaggtcaacaatgtggatgcctttggtatctctgtcgagacttgcctaactgctgtggtgaataacccaaattttacaggcctagcaattgtgcgcacatggtcacctgatcattatgaaggcggagcatggaacaccggtggatcatgcaccggaaaggtcaagcccttgaatgaagtggtgaggaacggatttaccgatgcgatgcatgaaaagcaggttgcaggcttcaggaaggcagtgaagaatgcaggggaacacggttctaggttgaaattgatggatatcactgaaccctttgccttcagggctgacggtcatcctggcccgtacagaagtcctgacccaaacaagaagacacagagagggccagatggaaaacctccacctcaggattgtttgcactggtgcatgccaggaccagtagacacatggaatgagatgttgctagaaaccattcgaagagagttcgagacagatagaacctgaggatagaaagtgctggctacttcgccatcatgtattcatgttatacattctgcgctgcgaactccatagggatgtatcgctgcacttagtagcatgttgtgtttaccatagataggaaggaacaaagcttcggatacgtaagattcactgtattttctctgacacgattcttggacatcattttcttgccaaattttgtgggcctgaatcccaaaaagtgtcaactgatatttgcattctgtccttgtactagtcaacctggtttggtgtaatagaataaaatgtaacaaccggaaagatgagaattgtttgccgaaaaatcgtctgtagctgttttttttttgtgtgtttttgtacaaaaaaggtgtactgctcttcttgtgccatacatgcagatattctagaaattgcagatgcggtttatgttttggggcgtggt

SEQ ID NO: 15726 - DNA, 177 bp, Zea Mays
acctgggggtgtagttggctttgccggagggccgtcaatggggggccggggcatagtgctcgctctgccaaggttggggtgtagaggttcattcgatttggttttgttagtcatcgaccttggggaggtgtactgcgtttgtacgactggcgaaacctaacgagcagctatgcacca

SEQ ID NO: 15727 - DNA, 1786 bp, Zea Mays
cggcgaggcatgtggaaggaatagcggttggtagaacatttgcctcactcaaggactaccagatagatggaaacaaggagatgatggccatagggttgatgaatgttgttgggtcctgcacatcatgctacgtaacaacaggtgcgttctcccgctctgctgtaaaccacaacgccggctgcaagactgccatgtccaacgtgatcatggcgctgactgtgatggtcacgctgctgttcctcatgccactgttcgtgtacacacccaacgttgtcctcggagcgatcatcatcgccgcggtgatcggcctgatcgatttccccgcggtgtaccacatctggaagatggacaagatggattttctggtgtgcgtttgcgcgtttgccggcgtcatcttcatctcagtccaagaaggccttgcgatagcggttggtatatctatatttagggtgttgatgcagatcacaaggccgaagatgatggttcaagggaacatcaaggggactgatatttacagagacctgcatcactacaaggaggcccaaagagtttctgggttcttgatcttggccattgaagcaccgataaacttcgccaactccaactacctgaatgaaaggattaaaagatggatagaggaagaatcttttgaacaggataaacatactgaactccatttcataatcttggatctgtcagctgttcctgcaattgacacaagtggcatagcgttcctcattgacataaagaaatcaatagagaaacgtggtctggagcttgtgcttgtcaatccaactggagaagtcatggagaaaatacaacgtgcaaacgaggctgaaaactattttaggccagattgcttgtatctgaccactggcgaagcaatcgcttcactttctgcacttgccaagatgacaaaaccctaaatggattgctgaattgtcattgtgttcatccctagcactgttaaaagttttcggtgcaggattttctgtaatggggagtgcatccaataggagtacatcacagctatgtttgtatctagtagaattcttcagatccatgtgatgcaaattcaatggaaaacaaatatgacagtacaatagtagatcttacagaaattttctgctgcagcgataaatattaggtgtcataagagtatagagtatatttgaattcatctatttactacaaagttcttcttcgttctacattgacagttggtacaatttttggagcgaggtgcgctagtagatatatatcagaatacctgattggcatcccactttgcaatatggcacctgagagtagtagataacttacattacatggtgcatgaaatcgaagtcatcttggaattttagatgattgtatgaactctttctccaagctgaagagtctagtaccttcacttcctctattaccgttgcatgactcaacttttggggcatttttgaagactagattgataaatcctcgagacgagattaacaagtcaccataaacgtctcgttgttaatgggccgtcgcctaaaaaatacaaaacattaaattttaaaatactcacttcaacatggagtcggacccaatatctttgatgatattgaggctgtggatgagaagaaaaaaagaaagaccccttcttcctctattttttttcaggttcgtttcaacatacgccgtatttttatcatttaaaactaaaaaaatatcattttgattttgggtgatgcattttttttctttttttaaccgtataagactacgctggtgtgatttatctctg

SEQ ID NO: 15728 - DNA, 1375 bp, Zea Mays
ccaaacacccccagagtgtatactagtctagcaccaaagcgaccgagccgcggatttcacccctgcctttccttcaccccgtgtccaggccctggtgcccgcgcgttcccgtgcggcaactggccgccgccgccgcactacgccaggtgcccaattcctcgtcgggtcctccgccggcgacgagcacccaccagaaaactggagtggactctacatgtcaagacagtatggcgccaggaagcaaggcggagaggaaagcagcactagacgctggcgcatggatgttcaatgtcgtcacatccgttggtatcatcatggtcaacaaagccttaatggcgacgcatggttttagtttcgctacaacgttgaccggacttcatttcgcgatgacgaccttgatgacattagtaatgaaatggctgggatatattcagccgtcctatctaccgttacctgaactagtaaaattcgccttttttgcgaacctgtctattgttgggatgaatgtaagcttgatgtggaactctgttggattctatcagatcgcaaagctgtgtatcattccagtcttatgcattctggaaatcatgttcgacaaagtccgttactctagagatacaaagctcagtatagtgcttgtccttgtaggtgttgctgtatgcacagtcactgatgttagtgtgaactctcaagggttactagctgcagtaatagctgtttggagcacagcactacagcagcattatgttcaccaccttcaatggaagtactcgcttggctcattcaacctcttaggccatactgctccagcccaggcagcatcgttgttagtattgggtccttttgtggacttctggctgaccaacaaaagagtcgatgcttttaactacacatcaatagttacgttctttatcgtgttgtcgtgcataattgctgtcgggaccaacctaagccagttcatatgcatcggaagattcacggccgtctcgttccaagtcctaggtcacatgaagacggttctcgtgttgaccctggggttctttttctttgggaaagagggtctcaatttccacgtcgcccttggcatgtttctggcagtgatcggcatgatctggtatgggaatgcctcctcgaaacctggaggcaaagagcgccaggtttactccacaccgagtgagaaaactcagaagcatggggtgctgtcatcccaatccgagcttgatcagaagaattgtaggccatagcagaaaatgggtacccagcggcctgcgcctgacattagcagccgggaaccggccacgttccacgatacaaggaactgtttcgttgtaattgctctcccagagtgtgaaattctccaaaggtatcgtatcac

SEQ ID NO: 15729 - DNA, 2123 bp, Zea Mays
ctcctgctgagcgggggctcccagtcacaagggtcattagccgcatgacactgcaacaaatccttgctcgagcagtcggcgatgatgcaatattgaatggaagccatgtagtcgattttatagatgatggcagtaaggttactgccatattggaggatggtagaaaatttgaaggtgaccttttggttggcgccgatggaatatggtcaaaggtgaggaagacactattcgggcattcggatgccacctattcaggttacacttgctacactggaattgcagattttgtgccacctgatatcgatacagttgggtaccgagtatttcttggccacaaacagtacttcgtctcttcggatgtcggtgctggtaaaatgcaatggtacgcttttcacaatgaagaggctggtggcactgaccctgaaaatggcaaaaagaaaaaattgcttgagatattcgacggatggtgtgataatgttattgatttgataaatgcaactgatgaagaagcagttcttcgccgagatatatacgaccgcccacctactatgaattgggggaaaggtcgtgtcaccttgcttggtgattctgtccatgctatgcagccaaatctgggccaaggtggctgcatggctattgaggatggttaccagctggctgtagagctagagaatgcctggcaagagagtgtcaaaactgaaactcctatagacatagtttcctccttgaggcgctacgagaaagagagaaggctgcgtgttgctattatacatggactggcaagaatggcagcaatcatggctaccacctatagaccgtacttgggtgttggtctagggcctttatcgtttttgaccaagttgcggataccacaccctggaagagtcggtggcagattcttcatcaagtatggaatgcctacgatgttgagctgggtgcttggtggcaacagctcaaaactagaaggaagacttttaagctgccgactttctgacaaggcaaatgaccagctttatcaatggtttgaggatgatgacgcactggaagaagctatgggtggagaatggtacctcatcgcaacaagtgaaggaaactgcaatagcttgcagcccattcatttaattagggatgagcagaggtcactctttgttggaagccggtcagatcctaatgattcagcttcttccctatcattgtcctctccacagatatcagaaagacatgctactatcacatgcaagaataaagctttctatctgactgatctcggaagcgaacatggtacctggattaccgacaatgaaggtagacgttaccgcgtgccaccaaacttcccagttcgtttccatccctccgatgtcattgagtttggttccgataagaaggctatgttccgggtgaaggtgctgaacacgctcccgtatgaatctgcaagaagtgggaatcggcagcaacagcaagtccttcaggcagcatgaatggagacactggctaccaccactatcatcagccacactgtactgtacagcatccggtaaagacacaacactgcatcacggaaaggatacactcgttctcgaatatttgtcgtctgctagttcaattttaaactaaaacgtgacaaatgaaaaaacgaaggaagtagaagatatgtcaaaacacatgcaatttttgcatccatgaagatgccaaacaggatcttgaatactagcacctagcggattgaaataatgaagttgcagttctgcgtgaactggattgtacgatagggatagacaatttagctgttgtcggactgtgtacatcgttgtaccatcaccggaaatattgtacaccgagaagccatattgtaattacggcatgagaacagtaacactttgatcatgtaatacagtatatagttgtttagcaattagctgagtcagataagatatgatttgttcttccacaagtgccagctcctcgaactgttgaaatttccttaaaatttctgcaggaattgaaaaacttgttcctataaaattatttcatgatccaattaaaaattttactatattatgttggatttaattgggcctagcccattttgaattagtaattaaataaaaaaaataaaaccatag

SEQ ID NO: 15730 - DNA, 130 bp, Zea Mays
ttggaagttgacggttaggatgggttatgggaaggatgtaccgtggaccgttgatcgcggaatggacgtatcggattagattcacgtatacccgttcgactcattaaatccagggcgtagatcttggatc

SEQ ID NO: 15731 - DNA, 4079 bp, Zea Mays
aaaaaaacaggacttatgggtctcatctcctcaggggcatgccttgtatattgtctttatagctgctggtgttttcgtcgcaggatggatagaggtatcatgctggattctcactggggaacgccagactgctgtcatcagatcaaaatacgttcatgttttgctaaatcaagacatgagtttttttgatacatatggtaacaacggagatattgttagtcaagtgctcagtgatgtattgctcattcagtcagctataagcgagaaagtggggaactacatacataatatggctacatttgttggtggtctcattgttggccttctgaattgttggcaaatagcacttctaactcttgccactggacccttgattgttgcagctggaggaatatctaacatattccttcatagactggctgaaaacattcaagatgcatattccgaagcggctagtattggtgaacagtggtttgaatcaagcagctacaaacttctattcattcgaccaagggcgcattgctgcttatagactatatgagatgattagtcgttcaacttccagcaccaatcaagaagggacaaccttaccccaggtgcaagggaatattgagtttcgaaatgtgtactttagctacctgtctcgtcctgaaatcccaatattaagtggtttcttcctcactgtaccggcgagaaaaactgtggcacttgttggtagaaatggctcggggaaaagcagtataattcctctgatggagagattctatgacccaacattaggtgaagttcttttggatggggaaaacataaaaaatttgaaagtagaatggttaagaagccaaattggtctggtgacacaagaaccagccttattgagtttgagcattcgggaaaatattgcttatggaagatctgctacctttgatcagatagaagaggcagcaaaaacagcccatgcccatgggttcatcagttcacttgaaaaggggtacgaaacccaggttggtcgagctggtctagcactcactgatgaacagaaaatcaaaatttctattgctcgtgctgtgctttcgaatccatccattcttttgcttgatgaggtcaccggaggacttgattttgaagctgagaaggctgtacaagaagcattagatgttctgatgttgggaaggtcaaccattataattgctagacgtctttgcctcattaaaaatgctgattatatagctgtaatggaggagggccatcttgttgaaatggggacacatgatgaacttctaaacttggatggcctttatgctgaacttttaaggtgtgaggaagcaacaaaacttcccaaaaggatgcctaccaagaacagcagggaacataagtcgctccaatctgaggatgcattggtgagccaatactttcaagaatcctcctctcctaagatggcaaaatcaccatcactacaaaggacacatggtatgcttcaattttggcgatcagatgccaacagaaactctcatgattcaccaaaggatctaagtccaccttctgaacaaactatggacaatggaatacctatggttgcaattgaaactgaaaggacaccgtccattaagagacagaatagttttgaaatgaaattacctgatcttcctaaagttgatgtacatcctatacagcggcagtcatctaagaattcagaacctgactcacccatatctcctcttttgacttctgatcctaagaacgagcggtcacattcacaaacttttagcagaccgcagagtgaacaagatgatacgagttctgaacgtagtgaactggatgaggttcagcaccagaaacctccatctttttggcgtcttgcaacacttagtatcgctgaatggccttatgctcttttaggtacaattggtgctgctatatttggctcatttaatccactgcttgcttacacaatagcacttatagtgtcagcatactatcagatagaaatccgtgatatgcgccatgaagtgaacagatggtgtttattcatagtgggcatgggtgttattacagtgctagtcaactggctgcaacatttctattttggaataatgggggagaaaatgactgagcgcataagaaggatgatgttctcagcaatgctacgcaatgaagttggatggtttgacaaagatgaaaacaatgctgatacactgtccatgcgcctcgcaaatgatgctacatttgtccgtgctgcgttcagtaaccggctttccatatttatacaagatactgctgcagtatctgtggctctccttattggaatgttgttgggatggcgggtggcacttgttgcacttgcaactttgccagtccttgtcatatctgctattgcacagaaattgtggcttgctggtttctcaaaaggaatccaggaaatgcatagaaaggcttcgttagtacttgaagatgcagtccggaacatatacactgtagtagcattctgtgctggcgataagatcatggaactctacagactacatcttgggaagatactaaaacaaagtcttgtgcaaggattggctataggctttggttttggtctctcccagttcctcctttttgcctgcaatgccttgcttctttggtacactgcaatttcagttgaccgacaacgtctgacaatagccacaggactaaaagagtacattctgttttcgtttgcatcattcgcgttggtggagccatttggactggcaccttacattcttaaaaggagaaaatctcttacgtcagtctttgaaattattgaccgggagccaaaaattgatcctgatgataccaccggcttgaaaccacccaatgtctacggaagcattgaattcaagagtgttgatttttcttatcctgttcgccctgacattcttgtcttgagtaattttaatcttaaagtgagtggtgggcaaacacttgcggtggttggggtctcaggatcagggaaaagcaccattatttctttgattgagagattctatgaccctgtttctggccaagttctgctggatggtcgagatctgaaatcatttaaccttagatggttgcgtagccacatgggcctgattcagcaagatccagttattttctcaacgacgataagagaaaacattatttacgcaaggcacatcgcaacagaggctgagataaaggaagctgcaaggatagcaaatgctcaccatttcatcagcagcttgccacatggatatgacacccatgtgggaatgagaggggtcgatctaacacctgggcaaaagcaacggattgccattgctagggtggttttgaagaatgcacctatactgttgttggatgaggccagctctgcaatcgagtctgaatcaagtagagtggtacaagaagctctcgacactctggttatgggtaacaagacaacgattctcattgcgcacagggcagcaatgatgaagcatgtggataacattgttgtcctaaatggtggtaggatagttgagcagggcacacatgactctctgatggatcagaacggtctatatgttaggttgatgcaaccccattttggcaagggccttcgccagcatcggctagtgtaattattattgagcttgttaggtgtaaattatcctagggcatgatcaggtttacttccgctcttggtgcagccactcagggcccgttttggcacatgaaaaatgctgggaagttgccgccttgctggtgttgttctgagtaagcggaatgcagacctgatcttgacaaaaaaaacctagcttggagattcaggtaagtaactgttggaactgtagggcacaactcattctggaaatagttagcaagtttggatggcattgtaattgttgtaatatgagttgaaacattctttcagaggctcgtgcttgtgatctctcgcatctgtaatgttagtgttttgatcatttaatgtgtgtatattgttcgattcttggtcggtccgagtcttgtagccgtgatgaaaagctttttacatggaaattctgagcttggcgttattttcgtccacgagaccattcagactacgagttgca

SEQ ID NO: 15732 - DNA, 3212 bp, Zea Mays
cccacgcgaagccacctccccgaattccccaacccgccatgcccgactccgccgatcccctccccacgcaagcctcgccggatccggacatgccgccgcggaagcctacagctggctgcggcggcggcaagctcaagaagcctctcactgacaagcagcgcgctgccgcggagcagcgcctgtcccacctccgcgcccacctcatcctccgatccctcgagtcctcagctgccggggcccgtgccctaccgccggcgcaggaggcggcgctcgatgccctaggtctgctcgagtttttccgcctcgacctgcaatccgacaccctgcgccccgacctcatcgccccgctcgtcgcctactacgacccggtctgcaagcgcagcttcgtccgaggcgtccgtgtcgccgtctcgcgccacaactttacccgcgcgctctgcctaccctcgaagccctccccctcggcgccggccccagccgacatcgaccccgcagccgtggtgcctgccgttatgcagctcctgaaggattacgttctgctcccgttcctaggagacgacatgtgcatactgccgcaggaagtggccgccgcggagcaggcggtcagggagggggcggcgcatagggttgactgggcgggcctgatgtggggcctcgtcgagaaggagatcctcgagctgcctaagagggaagacggggtgtgctactacgggcctcatctgcagaggctcatttatgcccaaaagccacatttgttggagctggtggaggaagggggcacaggagagcctgctccggaggcatccactgatgtggagatggaggaggatggtgatgtggatatgaaaagcaagagcttggtggagctggagctgggggatagggatggggatgccagtaacgacgtgaggagcaagagcttggaggagtcggaattgggaaatgctagtgcaaggagtgatggtttggacgagttggaattgggggtttctgttactaggaacaaggtcatggaggagttgggtttaggggatatggatgacaggaacaacagtatagaggaactagaggtggttgaggaagatgcaaggagcaagaggttggatgaatatgagtctgtggatgtggatccggatgccatggataacaatatagatgaaataaacacagtcaatgaagactcaaggaggaaaagcttgaatgaatctgagactgtggatgtggatccggatgccatggacaacaatatagatgaaatgcaggcggtcaatgaagactcaaggagcaagagcttgaatgaatctgaggatgtggatgtggatccgcatgccatggacaacaatatagatgaaatggagatggtcaatgaagatgcaaggaccaagagcttggatgaatctgaggctgtggatgtggatccggatgccatggacaacaatatagatgaaatggaggcagtcagtgaagattcaaggagcaagaccttcaatgagtctgagtctgtggatgccatgaacaacaatatagtcgaattggatgcggtcaatgaagacacaaggagccagagattgaatgatgaatcagagttggtggaagaggatgttaagggtccaaacttagatgacaagaacactgcggatgagcatgtcaatggcacaaacattgatggaatatgtttgggatttgtggcagttgaagtggtgcctgctgtacatgaggcaaggcttgacaataatgaggaaacagcagaggtagcaccaatggggggcgatgatgtgccagtgcctacagatgtggatggtgaagaacccttggtggaggcagcagctgtaacacaggaggtagtggctgttgcagaggaattgggggatgatgaggctgaggaggatgaagagaaggatgcaatgggattgagcttggggtttgactctaccaatggttatgttgctatggatgtggaagaggaaactaatgttgagaatctggacgaggatgagagtgacagtgccaatgaagaggcagaggagtcagaggatgatgcatttgaggttaatgatggagaggacatgaattggagaattggggatggcaggggggatgagggaatgtcacattctttgcaacgctgtaacacatttggaggcatggagtttgagaacctgaatgaaggggagactgtaatgaaggatgagttgaggtttgatgatttccctgcgagggcatcttcagaaaggatgacaccatcaaacctcctccaagccatgaactcaattccctcaacgtacaatgtagcagggaatgtgcatgatctgccttctggggatttcttggctatgggggctgatgcacataagaatggagtggatctgggaccagggagctcatatttatttgggaataatggtaagaggaatattgatgatattgatggttacgatgacaatatgcaggcgcaagaggactttcctcagtctaatcagcagaagaggatgcgccatagtaacagtggcaacatatcacctggatcaggctttttcaacgcaagcttttcggtacctatacagaacttgatggttgaggcaagcaggctctatgagcagaaggagcaaaaacttcagagtttgcaatttgagaaacaacattggtctgacatgctgcaagagaaggaagccattatccaatccctaaactcagctcggtttgagcaacagaacaagtatcaagtggagcttagacgcttcgagcatgatctgaatgttatggcccatttggtaactacctacaaaagagctttaaaacagacccgggcttcttttgatgagtacaggaagaagttcccttgcaatgttcctctttatgatgatgttgctggtggtggtggtcttgttcttagtgtgagggagttggagaagaggcggtgtgaggaggagcagcaaaaaattgccatggtaaatgatatgatcgaaagattccagtacaaatggttctcaaaagcttgaagagtggggactgtctgtcaactcactgtggagcagaatggaaggactctataaggagattgagcttctgaaggaaaatagaagatcaagatttgctaccccagctacagaggaatctctagctacagaagaacctaccccagctacagaggaatgagttccctgacagtcagaggctatcacttgcatcagtacaagatcccagtgcaatta

SEQ ID NO: 15733 - DNA, 960 bp, Zea Mays
agctagtggaactatatcaggtcctggggcgttcggcaaactaaagtttgagagtggcatccatagagttcagcgagtgccagcgactgagaaatctggacgaatgcacactagtgctgtatcagttgctgttcttccgcaagctgatgaggttgatgtccagctgcgaaatgaggacctgagaattgatacctacagatcaggtggctctggaggtcagtctgtcaatacaaccgatagtgctgttaggataactcatattccaaccggaacagtggttgcaatccaagatgagagatcacagcacatgaacaaggccaaagctctgaaagttctccgagcgcgactgtatgagttggagaggcgtagactacacatggacaggtcaaagcttcgatcagaacagattggaagcggtgacaggtctgagcgaatcagaacatacaacttcccacagggccgtgtcaccgaccatcgcgttggagtcacacaccactccatagcagatgtcatggagggggagagcctggacatgttcgttgatgcgctcctgcttcaagaagagatggacgccattgcttcatttggcgcatagctagattaaaccttgcaacattgattcacgtcatggacaaaatagagatcagcgaaaaacaataccgagcagtccactagtgaattgcctgtgcattgtgtcctgttttggcgtgtgctagttttacataatgctgaatttttaatgtaggcatgtgttataattgttgccgataaacgtgtcgctcatccaattctttccaaactacagttttgctggcaatgttttgttgttcgttctttccaaactacagttgtgctggcatggttttgttattcataaacttggtgcgcctgaattgtctatggacaaacatgtttataagtgatccttatttaagcttcagtaagacgttctggccttct

SEQ ID NO: 15734 - DNA, 1064 bp, Zea Mays
caggtggcaatgacaaatgaaagtaaagtagccaagcagcgtgagtggaaggcaaaacaaactgtggttggtagacccggaaataaggagcccctattgcctgaaccaaagtcggtgtttcaaaagcctgtaggagtttcctcatatgtccggtacaacagtagaggtcgcggaagaggaagaggccgtgggcaatcgcatcccataaccaagttcacagaggactttgatttcatggcaatgaatgagaagttcaacaaagatgaagtatggggccatcttggtaaaagaatagggcagttaaatgatgaaccaaatggttacgaagatgatgttatagaagatgatgagatatctcctagaaagccagaagctaaggctgtgtatgttaaagatgacttctttgattcactctcttgcaaccaaattgacaatggagggaggaacggaagagtgaaattctctgagcagaggaaaatagacactgagacctttggtgactcagcaaggcatcgaccaatgggcatccgaggtaggggcccccgtggcggcgctcgtggtcgtggctattatggtattagaggatatggatatacgggtagggggcgtggctactcttacccaaatcaccagccgtgatacctcggtgtctggaagcacactgaatggcaatggtaaattggccaatttgcgtggtaaaactgagatttatcgcagattacagtgctgctgttgtaagcgtcttattagtttgtttactgatgtggttggtaattcaagaatcaacgtctcttttattgatggcagattggtgtagaagctttcacatctatatcttgttagtgtcgatggtcatttatttccttttggaggtagaagctgttagcagattgctagatgatgtaacacagatctgtccaagatcaacggaaaaacaagcagcagtattgataatctgaaaaaaaaagggatggagttcagggtaggaaagtaacttatccaacaaagcaccatgagtacaaaactatactcgcaagatttatgtaatataagtgagacaagga

SEQ ID NO: 15735 - DNA, 1461 bp, Zea Mays
ctgtgattgcctgactgtacaagaatgcaacaacggtgcatctagttaaattgacaatgtggtcatattgacagatgacatagaagaggtggggaagaaaggggatacaatgaaggtgcgagctggattctaccgcaactccttgcttcccaagggcaaggctgcgcttctaaccccagcagtccacaagcaaaatacaatagtggcatctgagaatgaaaatccacctttaatgccggcaatcatgactcctggtggtgcgcttgatctcgcaactgtactactgggaaatcgtataatcttcattggccaatatattaactcccaggtggcccaacgtgtgatatcacagcttgtaacacttgctgccatcgatgaagaggctgatattctgatatatcttaactgccctggtggaagtctctattcgatcttagcgatttatgattgcatgtcctggataaagcccaaagttgggacagtgtgctttggtgttgttgctagtcaagcagcaattatccttgcaggtggcgagaagggaatgcgctatgcaatgccaaatgctagagtaatgattcatcaacctcaaggtggatctgagggtaatgtggaggaggtgaggcgacaggttggagaaaccatctatgctcgtgataaagttgataaaatgtttgctgctttcaccgggcaaccacttgacatggtgcagcagtggacagagagggatcggttcatgtcttcttcagaggccatggatttcggattgcttgatgctttactggaaacaagatactagagaagggacacaacccacattctattagcagactagaaatactgcagaactggagccaaagttagatgcttgccgtccatctcgattaaagccctggaatgacagatgtttaccgaagaacaagatttgcttccattgcatttatggttgtaccattcaccagcttatggtggcacgtaggatggcattgtcatgcactcatgctaaaacgatgaagactgtttaatgtagacctagatgatctttgcggatgggagaaaagtgccagtttgcaaacttatagcccaggaaaggagaagtggtttaagaaatcgtttggattcaacatattggatttatggtgagaccgtcacatgatttttatttgtatgtgggcaactactcgtgttagcgttcaggaaaactcatacattcggatgttgcaaatacgtcttcaaggattttgataagggccccgtttggtttggatactttgaattgaattttattctaataatcataatttggacacagatcaattaagctggtatgtttttttttataaatatatctgtatactattgttggccgacgtatcataactctatatgttgcatcccttgataatatgatatacctataattttaagtacaaagattactctataattcaaccatttaaattt

SEQ ID NO: 15736 - DNA, 938 bp, Zea Mays
tgggattcgatcctgacatatgctccattttaaatcctctctatggaagaatgagccgacggatcttgagatcgacgaaatcactaaaccacgcggaggaggaggacgattatatatatggacataaattgggtctccttgctgcgtaaatgcttcaagagagtatgcctacactctccatgtcactgaaaagagtgacatatatagctttggtgtggtgatccttgagctcgttaccggaaagaagccgctggcagcagagattggcgagatggacctggtggcgtgggtgactgccaaagttgagcagtacgggctagagtctgtgcttgaccagaacctcgacgagcagttcaaggacgagatgtgcatggttctgaaaatcgggctgctctgtgtctcaaaccttccaaccaaacgcccgtcaatgaggtccgtggtgatgctgctgctggaggtcaaggaagagaacaagccaaagctgaaggcggtggcaactctgcccatctgacctggaggaggcgaccccatctgatcaataataacaaataaaagtagtgtctgttcttcttgggatagtgtactaaaaaaactatttgcattatatctgatcttgagaagttcattcagggcagcagctagctagctaggtctgagaacattttcagcatagtgtttgctaaagcttatgactgtggtatccttttgctctaaatgagaaagtgctggttgctgtcaattttatccctggcaatctttttgttcatgattggctggccccatcaagggtgagtctacttccattcttttttgtgcctatttctgatcctgaaaggtgtagtttccaatcatgtacaccttgtggacctgataatgcgcctaatgatttacattaggaatttgcacgacagatcttctgtttcggtaactagtagagc

SEQ ID NO: 15737 - DNA, 623 bp, Zea Mays
cgcgtacacaagctcgcctcgcaccagaaacccgcgaatcaatcccgaatcccgatcgaccggcggcgcgggaggcgatgccggacaaggcggtggacgacgtcatggaggccgcggtgggggcccacttcagcggcctccgcctcgaggcgctgcgcctctccacctctgcgccctcttccccttcctcctcccccgccgccgcggcgcacacgcactccaacggagccgtctacgccaacggcaccaccgagcttccctctcctgccgctgcccggcagccattcgtcatcggggtttctggagggacggcgtcggggaagacgacggtgtgcgacatgatcatccagcagctgcacgaccaccgtgtcgtgctcgttaaccaggattcgttttaccgtggccttactgctgaagagtctgcacatgcacaagactataattttgatcaccctgatgcatttgatacagagcaacttctagaatgcatggggcagctgaaatgtgctcaacctgtaaatgttcctatatatgatttcaagaagcatcgacggtgttctgaaagctttagaaagagcatttgcaactttatttttgatccctccttatctgccccggaggag

SEQ ID NO: 15738 - DNA, 1450 bp, Zea Mays
tgcatagcctatcgagcgacggcctacgctcaaaaaacacaaatcgctttccgcgccgccgccgcgccgccgaccggcgctcctcacctctcccgccgcacccatcgtccccccgttcccggctaaaccctgcttgagccctagacaccgcccgcctccgggaggtagagagcatgcacgccaggttcctcagcgcgccgtcccctgcctccgccgccccctccccgtacgttcgcttggccttcacgggcgccctcccgcgccgcgcgtgttggaagccgcgaggccccgcgtccgcgtccgcgccgccgcctcggcctctccactcgctgtgcgcccgggcctccatgcagcccgcctctcccgcgcacgacgggcatggtggtccgccggtgcacggcgtctccaacaccgtcatcggggtcctggggggcggtcagctcgggaagatgctctgccatgcagcgagtcagatggggattagaattgtcatcctcgaccctcttcccggctgccccgcgagctcggtttgcgatgagcacgtcatcgggagcttcaacgatggggacacggtccgggagttcgccaagaggtgtggggtcctaacagtggagattgagcatgttgatgccgccacactggagaagctggaaaaacagggcgttgactgcgagcctaaagcctccacaatcacgattattcaggacaagtacaggcagaaaaagcatttctcaagatacgagatcccattgcctgacttcatggaagtagatactttacgcagtatagaggaggctggggaaaagtttggctatcccctaatggtcaaaagcaagagattagcatatgatggtcgaggaaatgctgtagccaagaacaaagaggagctatcttctgttgttgcttcactgggtgggtttgagcggggcttgtatgttgagagatggactcctttcgtaaaggagctttctgtaattgtggcaaggagcagagacaactctactgtctgctatcctgttgtggaaacagttcacaaggaaaatatatgccatgttgttgaagctcctgctgatgtatctaacaaaataaagaagttagctactagcgtggctgaaaaagctatcaaatcattagaaggagctggtgtctttgctgtagagttgtttttaacagaagatgatcagattttattgaatgaggtagcccctaggcctcacaatagtgggcatcacacaatagagtcatgctacacctcacaatatgagcagcatatacgcgctattcttggccttcctcttggtgatccctcaatgaaagcacctgcagcaataatgtacaacatcctgggcgaggatgagggtgaagcagggttctttctggctcatcagcttatcagtagggcactaaccattccaggcacatcggtccattggtacgcaaagccaggatg

SEQ ID NO: 15739 - DNA, 1107 bp, Zea Mays
acatcgccgttgcagacccaccagggtaggtcaccacgaacgaacgcgtcgcgtatacggcgcaccaccatggcactagcgggaaaatttcagtgaccgaataaacgaaacacctcagtcgagacgcgagagtttatctacctatctggtgtccgctttaatttctttcctcggtccctccaccccccttcgccctttccgacgcgccgcccgaaaccctagccccactgattctctccagcccagcccagccaaggggaggggatgtcggcggcgccagcggcgggagggcagggtggcgggggcattgacgccgcgctcctcgacgacatcatccgccgcctgctcgaggtgcggaccgcgcgcccagggaagcaggtgcagctctctgagtcggagatccgccagctgtgcaccgtctcccgcgccatcttcctcagccagcccaacctcctcgagctcgaggcgcccatcaagatctgcggctctcctgtggatgcatcaagacaacagcatgatggcgccaaacttgaggtcagcattgggcaagggcaactaccagagcagagaaaccaaataatataccatacctaactgttcgcctggaagttactcttcatgacaggaaaaattctgaacatcaaggagtttctgtttgcaagtttcactatttaaaagcaggtcgtgtcacttgtgcggagttaaggactggaccgaggcagtattatcagtttctggatatggattgttgtgctagtttcgatgcaggtgtcaaacaacaattaggctgaagaggtgagcaacatttaaggaggtgctgatgcttgctgataacctatgaaaaggcgttgctgtagctgactacttggtttgtggtcagataattctggacgtgaattttgatatgttggccagattagctgccaaataggtatttcgtatctcttgatttatgggattcacattaactgattcttggttgccattcacttgtcttggttatggtgctacatgggcgtgcaaagcatgaaggcaatcgtttgactttgcttggtaatgcgttttgcgcacaacaatctgatcaaggcaaaaatggtaatggtttcc

SEQ ID NO: 15740 - DNA, 1521 bp, Zea Mays
aaattgaggatctccttaggtgctaatgagtttggccagttgggagatgggacagaggacagcgcgaaagagcccaagaaggtcaagtcattggagactgagtttgtaaaatcagtatcctgtggcgcacattgtacagctgccgtcgctgagcctcgagaaaacgatggcacggtatcgaaaagcaggctttgggtttggggacaaaatcagggttcagattaccctcgtctattttggggagctttcacaccaaacacggtgattaagcaagtttcttgtggagctgttcatgtcatggctctatccgaggatggtctactgcaagcatggggtatacttggggactgggaagcatggggcagcttgggcattgctccctccaatctggagataatgagctgatccctaggcgagttgtggcccttgatggtatagtagttggggacgtttcttgtggaggtgtccactcttgtgctgtaactgaagggggagctctatatgcctggggcggaggacatgtgggtcagctgggagtcgggcctcagggtggcttcttctcttgctcccttaatggatccgacatgctgctccgaaacatcccagtcctggtgataccctcaggtgttcgtcttgctacctgtgggcactcccacacacttgtgtctatgaaagatggccgcatatatgggtggggctataatagttacggtcaagcgacgaacgagaaatctacttatgcttggtttccctctccggtcgattggtgtgttggtgaagtgagacgactcgccgctggaggtggccattctgctgttctgactgatgcatgttcgctgaaagagctgtgcgaattcaagctcgcagagaccgtgaacctttcaaatgctcagctaatagaagatgttgcatcgcggactggtgcggatgccttggcacgcttgtgcgagaaagtaagggagcatttggataaggaaggagaatgtgaattcctggaaaagcaagtggcagaagaggtcaacactataggcagttaggccactagcaaaacagttcaagcagtctgaggctgaagccagtctgggattaaacagggagtcatctacaattgatagcttgacctcccagtaaagttactgattcggacattaattgttgtggtgatcatggaaaatatgtgactcgtcaattgattctgattggtctgtagacctccattggtggtgagcctctcagctgcatcggggaggcgcagaggctctatatgtgtcatgatcttgttccgaactgtcaggttgctgtaatgtagccaaatggaaacctttgtatccctggaacttgaaaggcatgtacctggtatctgcagccagtaagtttggcaatctgaattcgatgccaattcctgggcgtattcgaacgtcctacgtccatgtatttatttcagttcatgtgcatctaaacaatattggtatagcatgaaatttaagtacatcaacacacatttaataggattaacagaat

SEQ ID NO: 15741 - DNA, 814 bp, Zea Mays
gatcactggaagctttctgtggcatgcgctttgtacagcaactggtggcccatgttagcagctctcatgtacgtccttgtaccaatgccatgcctgttttttggtggtggatccacacacttcttgaccagcagagaaggtggagggtggattaatgctgcaaaattcttgactggtgcatcggccatgggaagccttgctattccagcaattctgaggcatgctggcttaatcgagaccggggccatgttcatcgagttcacgtccttcttcatccttgtatgcacagtgctgtgcttccatagggcgactctggatgaagactggtaaatgcgcatttcaccgacaccctgaaccctagcggttcttggctgcttctgtccatgctaagaaatattcctgttggaagctaacatggatctgtacaaagaagcgtatttcgagcgtagccgtagctgatgtcttatgtagacacttgtgaagattatgtggtcatgtggcaatgcagatgttattaccttcactttgactttgtcgtcacatgttctatggtgaaggaaggaatcatccgtgtaaaccatggccagggcacgccctacttggctcctaattctatcgcaggctttggggttaacctattatgaatggaataataggatcttgatgaccgaaagaaaagggagagctaattagtcacatggctcggccgatgtatttttttttcatgtttgcattcatgaatctgtctaggatattacatattgtggtctgaatctttataaatcacttgttttgcggtctgaatctttataaa

SEQ ID NO: 15742 - DNA, 3896 bp, Zea Mays
cgatggggtttgctaacttcagttctatgcttgcaattgtgtactcaattgtcaattgtgcattctgcagtggttttgtgggctggatttgataaactggagcttcaaccatcatcattcaagcatgtcctgcttgttggttattcaaatgggtttcaagtgctcgatgttgaggatgctgcaaatgtttgcgagttggtctcaaaacgtgatggcccagttacgtttttacaaatgcaacccactccagttagctctgaaggcattgaaggattcagagcatcccatcccatgcttctagttgttgctggtgatgagacaaatggcctgggtgcggttcaaggtggtcgcttaagtgctcttatcagagacacaaacagtgagcctcaagctggaagttgcatttctaccccaacggttgtccgtttctactctttgaagtctcacacctatgtacacgttcttcgattccggtctgctgtatatttagttcgctgcagtccaaggattgttgctgtagcacttgcagcacaaatctactgctttgatgctgttactcttgagaacaagctcagcgtcttgtcatatcctctgcaaggtgcacctggggtaaatattgggtatggcccgatggctgttggccccagatggttagcctatgccacaaatactcctttattgtcaaacacaggccgtctaagtccacagaacctcacaccttcaccaggagtgagcccatctacttctcctagcagtggcagtttagttgctagatatgcaatggagtccagcaagcaattagcttctggtattattgacatgggatataaaacattttcaaagtaccgccaggaacttctaccagatggttctaactcccctttgtcatcaagcccaggcaggagatctggtaaaattccttccagtgtgcatccactggaagctgacaatgcaggaatggtagtcatcaaggatttcacttccaaagctgtggtctcacagtttagggctcacacaagtcctatatctgctctttgttttgatcctagtggaacacttttggtgacaacctctgttcatggccataacataaatgttttcaggatcatgccaacttgcgttgctaatggcacaggcgcaacgcgctatgattggacagcatctcatgttcatctttataaactgtatcgtggcatgacatcagctgtcatacaagacatctcgtttagtcattttagccaatggatatctattgtttcatctcgtggtacctgccatatttttacattgtccccatttggtggtgatgccagcctgcagccacagaattctcacagtgatgggccacctcttgcgccatgtcagtcaaggccatggtggtcaaagccgtcctttctgatggaccaacagcttcatcaagttccctcaactgtgacaaattcggtagtcagtaggataaagaataacaattctggttggctaaatactgtcagcaatgtggctgcttctgcaagtggaaaactatctgtaccatctggcgctgtaactgctgtttttcataattccatctaccagggttctttgccagttccatctaaggctaatgctttagaacatctactggtgtattcgccatctggtcatgttattcaacatgaacttttaccttcttcaggttctgagtcctctggtagcagcccaagagttggttcaggtcataactcgcaactccaagatgatgagatgcatgttactgctgaaccaattcaatggtgggatgtgtgccgtaggacaaactggcccgaaagagatgaaaacattgcaaacattgtactgtataaccaaagaagcagtatgatggctatggatgtttctgactgtgaagatagcgagcattcggattccactgcatcaaatgatggtatctctgggaaagagattatgagagtccgagaaaggtcaagctggtatctatctaatgcagaagtacagataaactcatggcggattcccatctggcagaaatctaagatttgcttctatgtgatggaccatcctgctgcagagtcggtcgaatcagttagcagtggtggagaaattgagatcgagaagttacctcttcatgaggttgagatcaggagaagggaattgctccctgtattcaagcagttcctatattctgagcgacattctagtgataggaatattgcaaatggagtttgaatgcactatttttagtagtttagctaataaatcttaggaacgttgcaaatggaaggagtaatgcaaatggaggttttcagaatgtcttgtccgtcatcaatgatgtacaatatggctctgtaaaggataatggtgaatatgaaaccaaatcggtggctcctttgtctgggttttacactgatacgagggaaacggttaacacaaatggtctagctacgcaaacattctctggacctggctcagctgttaatcttcagcaagtggggaagcgcaattctattgaatctcctaatgctgcaattttggctggcaaggcagagaatgatagcaatggctatatatccacgccacctgaaacaaatgcatctatcagatccttgagcagctattgtctcttggatggatctgttaacggaatgccgtctcctgcaaatagcgcatcatgcaagcctgaaacaaccaataattctgtgctcagcaatgttgcaagcactgacgtaacaaatgggtgtctcaccactgtcgattctggacagcaggaggcgtctgattctcacagctcagtggagtttacccagtatttccaagagggctattgtaaaatatcagaactcgatgactgccgtgagttaactgaagctgttactgatgctgacagcagcagcagccactgcgagagagagaagcctgaggaagatggggataacgatgacttgcttggaggagtttttgccttcagtgaagaaggttctacacttctacccatttattcatataagttataggtctccatctatctactgatactcatcttctgatttccgccccttatcacgttgcaggttgaacttactatagtgccttgagattgagatacaacagaaaaaaagtgctcaaaacatccagtgtgccatagtatgtagacgatggtgaaattctactaggttttcatggaataaagctgtgcggaatcgatcatctgccatggtacatagtacttttcaaggtaaaccttgcacctagttctcaaaatatgaggccaagattcctccaggcaatttactaatctgcggatccacgttgaaacttggaaggagttggtgttgtcgagaagttgctattgcctgccgcaacaccacttccttatagtgttggtttgtacatataccgtgagacccatttgtttcgtgccatacttccgttccggggcatttgggtggttctgaatcctgtaccttggcagccatatttgttgaccgtctctgccagggcctgtgaatgttccatgtttatttgtacatatacattgtgttttgtcggaaaaaaaggaaaaaaaatctagcgacaattgatgtgatataactttataaacattcagtaaagaaaattgcattcacgatgttatgcttatttgcatgtgctggggtcctgcgccagagtgtggcacttggatggagtcgcgaaagttcccaatctggtagacactccatgcttcggtgcttaccagtatccgtcccggtcaccgttttttttcttcttatgagtcaccacttgttctatgatattattattatctggtaatgagtcagctgttgcgttggatagaaggtaattgtacgcgttttatatgttctcttgagtaatattaaagaaacgtacctgtctcttaataa

SEQ ID NO: 15743 - DNA, 1242 bp, Zea Mays
aattgctcaggaaatgtgctgcgagttcaatgtacacgtactcgtaagggctactacacagagcactacagaagtcacgcaccaaacgggcaagggcaaacaccaccaaagaaggcgagaacgcactccgtccctctcctccaggaccgcccgctcttatcccgtttctcccttctctgggctcggagaatcggagatggcgtccagcgcctctcggttcatcaagtgcgtcacggtcggcgacggtgccgtgggcaagacatgtatgctcatctgctacaccagcaacaagttccccactgattacatacccacggtgttcgacaatttcagtgcaaatgtcgttgtggatggcaccacggtgaatttgggcctgtgggataccgcagggcaggaagattacaaccgactgaggcctctaagctaccgtggtgcagatgttttcgtgcttgcattctcacttgtgagtcgagctagctatgagaatatcatgaagaagtggataccggagcttcagcattatgcacgtggggtgcctgttgtgttggtaggcacaaaatttgatcttcgtgaagacaagcactacttgatggaccatcctgggttggtgcctgttaccacagcacaaggggaggaacttcgtagacaaattggtgctatgtattacatcgaatgcagttcgaagacacagcagaatgtcaaagctgtgttcgatgctgccatcaaggttgtaatccagcctccaactaaactaagagaaaagaagaaaaagaaatcacgcaagggatgttcgatggtgaacatcttatctggaagaaaaatgctatgcttcaagtcctgaatgatcgaagggggtcttacctgaactaataccatgagtgtgaccccaagttcgcgaagcttgaaatcttgatgcgctcgttgcgcatgtatatttgcacctttggttattaatcactagaggtagatgattgaaactaatctgcttaaccaatgtgcactgctgggcgctggcgtggttagctatatcagttaggcagttcgacagaggtcaaagagattgagattttgttctttcttggcaatgtcacagcttttgtgaatctggtctcatcatactgtccgctagtttatccaatgattccatggtggaatcaatccatagcaacattgtgttgaatgatcctttgcttttgcgctaagcatataacattccagttttggtgaaagctggaagtgaaa

SEQ ID NO: 15744 - DNA, 922 bp, Zea Mays
aaaagtttcaagatcaaaggtttggggtggctgctggccacagagctatggaactcgtgagatttaatgatgaggctaggggattagatgtccttccaacaaccatatcaagattccgagcaggtggggatgagcaaacagcaagactactagaagatattatttatcctgaagaggtgacacattgctcagctggtgttagatggttcagatacctgtgccttaggtcccacggtaatcacccaacctcatgttcagttcctggactggaaccccgttcctctgggctgccgggggatggcactgctgatggtaagacagctagggaggctgaaggtgaacctacacccaaactggcgaaagacgtcaggggtgacgacaagatggtccagcaggtggaagatgaactgccatccaggattgcacaggatgctaatggtcgatctaaggtgaccgaacacgtcgaggacggattagcaaagtgcaaacttgatgacagtattgagaaatacgaagagttggtcattaggactttccacagggtggtaagagagtattttcggggacccctgaagccgcccttcaacacggaggcgaggaaagctgccggctttgagcctgcctggtatgaacccctggcagtgaaggaggcatgcatagagggggagacaattgagtgatgaatttgcactgttgttgtagtgtctgtgctatgtagcaggctagaaggcatatttgaaaatttgctgcgactagcgttccagtaccattatttgtttagcagatggtgcggcgctgagccttttttctaatcatgtttgtttgcttgccatggagacgcatgaacctatctgtgtgaaagcctttgttcagcttgacgtgggcttggagtgtgaaggtggagcctgagaccaccaaatac

SEQ ID NO: 15745 - DNA, 918 bp, Zea Mays
agatcaaccccatttgagtactattgtgctaatcaccgaaatatactggctcctatttgcctaagtgataatacgccgaatggacttaaaaggtgcacactatgaggtcaaagcatttgaggattacaaatttctcaactcctcgtatgttcctgtgctccggcaactggagtcagcaaacctccagaaattctattttgagaacaagcttgagaatgccaccaaagatgccagcaatatgaagtttaggaatcccaaatatctgtctatgcttaatcacttgcgattctatttgccggagatgtacccaaagctacaccgcattcttttcctggatgatgatgttgtggtacagagggatcttacaggactctggaagattgacatggatgggaaggtgaatggggcagtagaaacatgctttggatcttttcaccgatatgcacagtatatgaacttctcacaccctcttatcaaagcaaagtttaatcctaatgcctgtggatgggcatacggaatgaatttcttcgatcttgattcttggaggagggagaaatgtactgagcagtaccattattggcagaatcagaatgagaacaggacattatggaagctaggaacgctgccccctggcttgatcactttctactcgaccacaaaacctctggagaaatcttggcatgttcttggacttggatacaatcctagcatcagcatggaggagattagaaatgctgctgttgtgcatttcaacggcaacatgaagccctggctggacatcggtatgaaccagttcaggcacctttggacaaaatgacggcttggtggcgatcaaagtgcaaggatcatccataaagaaacgtaaaacttcatcggtatgtccaactgctgggcactccaatctttactccttcctaa

SEQ ID NO: 15746 - DNA, 540 bp, Zea Mays
gtactgtacgtataatacatgagggagatcatgcacgcgatgtggcgtcctcagaagttcaaggccatctacctgctggcgacgctgtacgtgctgacgctgaccctcccttccgccgccgcctcctactgggcgttcggcgacgagctgctgacgcactccaacgcgctggcgctgctcccgcggacgcccttccgcgacgccgccgtggtgctcatgctcatccaccagttcatcaccttcggcttcgcctgcaccccgctctacttcgtctgggagaagctcatcggcctccacgactgccgtagcctctgcaagcgcgccgccgccaggctccccgtcgtcgtccccatctggttcctcgccatcatcttccccttcttcgggcccatcaactccgccgtcggctcgctcctcgtcagcttcaccgtctatatcatcccggcgctcgcgcacatggtcaccttcaggtcgccgcagtcgagggagtggtgataataatagaaccactgtactggaaagccgcgcacaagggcgcag

SEQ ID NO: 15747 - DNA, 307 bp, Zea Mays
taacagttttctggaagtaagcttcacgccctcgcttacgcaggtactcccgcaaatcgtcgtagcttgagcttttgccctccaacaattctggtgtcaagtcatccaacagatggcaataccttgtagaaaagaaacagaaacattataattttggtgacagtacatcagtcaacagatccccagaaatccaattggccaaatacacatgaatatatacaatttgaaaacttactgttgcagcttagctataagtttgttcaggtcccaattttcctttggagtatcaggtcctatgttagcctgc

SEQ ID NO: 15748 - DNA, 763 bp, Zea Mays
ctgcttgttcggtcctttgggccaggcagagttggcacggcccacagcagcgtgaagtcgacggggcagaaccctcaggccgccgggttaccgcagcagctgaacaacggcaccaccatggtcttcttcggcggcaacacacagaccagcagcgccgccgcctcatctgccaactctctcttcgccgtcaccgtcaccatcacagcagccgtcgcgctcgcgctctcgcgctcgactcgcctgtgaccggtcatcatcgctgtcaggtgggccacgcttatcagaagaccggtgagcatacatacagtatgttgagcccctagcgactgcgacggaacatgagcatagtattctaggcttgtagcttaggtaggacgagtagaatttcttcttttgttttttggcttcgaaaatattcttttcatccgttgggcagagactacaggtggtgtggggcaattctttcactgttctttctcctagttaggtcgtatgcatcgggaggatgtgctgtaacctcaaaagcgattattggttgattgattcgattggggggataatcaaaatttaagcttctttcttctcacacttcattacgctctcaacatttttcaacaaccgacagcaactatgccagtgaatgattgggagtgctcgggtgctaaataatcaacgtgttgtcgcgagccggctatattcctggactcgtgtattgacactagttaaatatctgcacgtcacatacagaaaataaaataacaca

SEQ ID NO: 15749 - DNA, 1303 bp, Zea Mays
cagcaatgagccaatgatgccaaagcttgctgcgtttgtgatttcgacatgttcttcagttgccaaggccatatccctggtacctgattgactagtcgctgcttattgtcataaagctttttggagggtttgctggttgctgccatgacaagtccacctagggtgagcatggagatcactgatgaggtggtcaagagcatgaagatagggttggtctttcaaggctataatggcagaatttgttctatggactttcacagcaaggctaccaactatctcgtgacagctagcgatgatgaatcaatccgtttatacgatacccaagatgcagtgtgtttgaatactattaatagcaaaaaatatggggttggacttgtgtgcttcactgataacccatctattgtcttatattcatcgaacaatggctgggatgaatctctgcgtctgctctcaatgaatgataaccggtttattagatattataaaggtcaccttgatagggttgtctgcatcgcactttgctctggaaaagaaaactttctctcatgttcgcttgatcgtaccattctcttatgggaccatcgggctgaaaaaccgcagggcttactgcgcgcgcaaaggaggcctacagtttcgtacgacgcccagggcatggtatttgctgtcgcctatggtggccgcataaagatgtttgatattcggaaattcggaatggggccttttgcgaccttctctgtcggcactgatgattcggaagcccatgtcgtacagttcagcggtgatggcaggcggattctgttaaccactaaagctgggcgtgttcatgtgctagattcttttgaaggcaacagcattgcatcgtttcgcgcgaagccaatattaaccaattcgacactggaggcatcgttctgtcccgagggaaaccatatcgtatctggctccggtgatggtagtgtctatgcttggaacgttgagagcggaaaggttgcatgctgggaaagcacagatgtgaaaccgccgcgggtaaggtggtctccaggatccttgatgttcgtgacaggaacgtcggagctgtcctgctgggtgccggatttgtccaagctggagtccttcaccatcagccacaccaacaccaggtccagctcgtccctgtaggcttggaccgatttgcatgccgtgtggccggttgacgcgaaggaggaacaagaaagcatagcggagcatcttgtaccaattgagtttgtgatctgttcctgatggcccggtaagctactattgcaacgattgtggtctgcggcaacgg

SEQ ID NO: 15750 - DNA, 3519 bp, Zea Mays
ccagctcccagctcccatgccagcgcagtagatgctgcgagctaccacaccgaatacccacccatgctgcacacgatacgattgcagtcgcggtctcgctgctgtgggagtccctctgctctactgccgtgagagttgagacagcagacagacagcatggtgtggaagagctggggcgctgcgccatcgctgctgctgctgcgcattgctctgctcctcctcggcgctgcggcgccactctgctccggcgccggcgacgtcgccctcagtttcgcagccaccccgcgccgcgtctccaggtccacgtccgccgccttcgccttgcgggtcctgcgcgccaccggagggccttgcgccgactgcgtcgttacctgccagttggacggcgaggcagcgtcgctctgcggtgggacggcggcggcgagctatgcggggctcagggacggcaaccacagcttcacggcacactgtccccccgacggcgtccgtgtcggcggggccggcgttcacgagcgcgtcctccaccgtgtcggcgctcgtctccttctccgagccctgccccggccgcggtggattcgtctgcaacgccacctactgcaatctcatcgtgtacggctccggcagtgtggatccgtcgacgctccaggtgctgagccccggcctgcgctactccgtggccgtcgccatctcgccggacgccgagtacggccgcctcgtcctcgtcatgggcaggggcttctgcacggacgccgccggacacccgttcaccaggacgcccaactccactttcaccctgcgcttcgatcgaaggagcgactccatgaacatcaccgccaccgttgccgagaagatggtgcagatacagggcgtcaccaggctggttcaggccagcaacgaggaagagggcctgaggatatacctggccttcgcccagccggtgctcaactcgtcggagcagatcctgcgcgcgcttacagcgactgacgccgtcgccgtgcacctcacacccaccaacagaagcaccctcggcaaccgccgcttcggctacgttgtgaagaagatgtctgacgccgccgccattgtgagcgttgcctgcgacacaagctctattatcagcaggcaagggactccggtggttccagcagagccattcacgtttctttatgatacacagagaccttgggttaagctcggcacatcgactcggcggaccagctcacgcgacatcctcgtcctcatcaagtttgcaaagcctgtgttcaacttcagctcctcggcagtgcaggtgtctgggggcaatgtgttgagctttcatgaagccagtaagagcatatacacgctgcagatacaggccgtcggtcagctggtatcggttcaggtagctgagaacgcggccatggacgtcgccgggaaccccaacctagcatcagaccgtcttcaagtcaggcactattctgtgcccgcgtcatcttcttggatcgcggcgatcaccaccgtcgtatttctgacaactgctgccgttgccgcgctcctcaccgtctccacgtcgtctctcgtcgctgccggagctgtctcgaggccctcttcctacatgatctcggagccatcaagaaatgtgctgaggatggcgtgccacatccaaatctttgctctgtcaagatggctgtcggccaacctgccgatcgagtactacgagttcgcaaagggggtagagtggagcataccctacatgcgtcttccatgggaaggcccagccgcagatccgtacctggggtactccacgatgcctgccatcgcgtactcggagtcggagctgctcgacaggagcgccgtcggcggcgctgcaaacatctcctcctatcgtcctcgagcacagcaaggtcagccggtgacgccagcgcagatcatcccgtcggatccggtattcccgacggagatccctgaagatgggaaacccacaccgccggtgcaaactccgggaggagacgccacgccgccggtgatgccagtgcagaccccgttgccgttggacgggatgccgctgacggcaatggagtaccgttccttcttcgagaacccggacatgaagcctgaggcacaaatcatcatgaagctacaagatttggatgggtggaagtacttcggcaggaacatgttctggctgggtgtcatcggcggcggcctcatcctcctgcacctcctcaccctcctctacttcaagctgaggtacagagacagggagcggcggcggcatggctacgccgcactgcttctccccaggctggagatcatggtcgtcgtcctggcgatgccgtgcgtcgcccaagcggcggcggcgctcatcaggggcgggaccacgtgcggcctggtggtcgggatcgtgctcaccgccgtcctgacgtcggtcctggtggccctgctgctgttcctgtctctgggcatcaccatgggcaagctgctgcagtacagggaggtgcaccatgaggaggggcaggaggagtaccactggtaccaggatctggcccgccgcacgctgggcgccggcaagcgcgggcagtggacgtggaaggacccgcgccgcgccgcctgcctgcccaggcttggcccgctcttcgaggacctgcgcggcccgcccaagtacacgcgtggcggtggaggcggcaagcgccgcgccgaaggcggcggaccagagcggcgggtcatcgcgtcggaggacgagaacgaggggtcgagggcgcccttggtgcagcagctcctcggcgtgctccgcatctacttgacgctgctggagtcggtgaagcgcgtggcggtgggcatcgtggccggcgcgcacgcgtcgtcggggcggtcgtcccgcgcgcacgccgtggcggtgctgtccgtcgcctcgttccagctcctgttcatgctgctcgggaagcccttcgtcaagaagcgggtgcagctggtggagaccctgtcggtggccagcgaggtggccgtgttcgcggcgtgcctggcgctcatcgacaggacggcatcgagtggcgggtggctgcccgacggcgaggcgcgcggcgtggggctggcgatgctgggcgccttcgtgctggggttcgcggcgcaggtgtgcaacgagtggaacgcgctgtaccggcaggcgcggctgctgagcgccgaccggagctccttcctggacggcgccaagacagcgggcctgggcctgctcgtgctggtgctgccgtcgtctgcgctcggcgaccaccgggatccgccacctcccgacggcggtggaggagccggggagagcgtgtcagcgtcgacggcggccgacgggggcaggggcgggagctccaacaacgagcggtggtggcttgggcagctgtgggagatggcgaaggctagcttcagcaaggagagtaatgcgtaagaatgtgtttggtactgtatctcggaacatgtaacatcagaaatcagcattaaacgattagaatgacagcgctcgagctcaagaaaatgattctttttttttggtaccga

SEQ ID NO: 15751 - DNA, 1518 bp, Zea Mays
ggagaacggtgtttatccacacattcttgattcttctcttatgtacgactagagaatgatatggaagttcctcaccagtatgtttctagggggatgcataccaaaagtagcagtggcaatagcctgcagagttcattccataagccatctaaagcaaatcaagctttgaagaggtctacaagtcaaaaggatttctttcattctagagacagcagctccagccattcttcaattactgatgatgagtctaggagttcactctctttccatagcagaaatcagaaggctgtctgtgcagtttatggtcttgacaaggagcacggaattgatgatggggctggaaatgtattgtacgatgtaatgcgaaaagaagttaggcaagctgttgaggaaataaggaatcagcttgaagaggccatgacaaaatctgaaccttcagaaaaggcaataaacagtgatgcacaaccaacccaagttattactcagctccgaaggagctacactagtaaattggaagagagaagcggaagcaggaactgttagctcaattggcagcagaagaacaccatggtcatgagctcacaaaaatagttagagaattgctacctactcctaaaaagactgcaaacttacaaagacagccacactacagaagaaggagcaatgatagatcaaggatgtcaaaacgacttactgaagaggctgaacaatactttgaagatttcctgtcgaatgttgaagacactgacttttcttcttttgatggagagaaaagtgactcaagttcaaccaggaaagacctgttgttacttcatgctatgacagaaactccagttaagctcccagaagttgctttacctgcagaggcagatggcgttgtccttccctggctgcaatgggaaactaccaatgactttcagacctccccgtgcaaaaccaaggcccagggagaaagtaccagaggcagcactagcaatcagactgcgagcagccgtgggagttggagccctggagaccatgccacttcatcagttgcctctaaaaatagtttactgaccagatttggtgaggttgggatttgccgaagcagcttgtctgactatgctcgaaccttgtcgtttcacatcgacgactatttgcatttaaggcagagtgaggatctcctcttggagacgtggatgcagaaacaaaggatcgactctggcggcctagtcctgtgcagtaaatcgacgatattgtagagtgcagccaaataggtagttgatggggttgagttagactaataattgcttggatttttacctttagctgccatggctcctgccgcctagtgtgtatagatgcatgcattatagttaacagattggataagctttttttaacgcttcatcgtgattaagaaaatttattttttacaccatcattctgcaagtgcaaatgatccacgacaatattgccgagattaagatccatattgtgttgcatctcaacaatataaaatgtcaatctctacaaaat

SEQ ID NO: 15752 - DNA, 1890 bp, Zea Mays
tcacagggatatgacacgtgttaatcttgtagtctcaggggtgcatgatctgtttagtccttgctctcgggtgggcggctgcttcaattgtcagaaaaggggttataaagaacatgaggcgcaacattgtagatggaaatagttttgcatttctttgtgacaacatagatgagcttgagcactctgttcaggagaatttacctagagtctctgtagtcatgcctttgaagggctttggcgaacataatttgcaaaattggcgaactcagattacatcactttatggtgggccactggaattcttgtttatcgtcgagagcaaagatgatcctgcttatcatgctgtttcccgtttgatcacagagtacaaggacaatctggaggcaaaggtggtcgttgctgggttgtcaacaacctgtagccagaaaattcacaatcaattgatcggtgttgaaaagatgcacaaggataccaagtatgtattgtttcttgatgatgatgtgaggctgcatcctgggactatcggagctctcacaaaagaaatggagaagaatcctgagatatttatacaaactggatatccccttgacttaccttctggcagtttgggcagctattgcatatatgaataccacatgccttgttcgatgggatttgcaactggtgggaagactttcttcttgtggggtggctgtatgatgatgcatgctgatgattttaggcaagaccggtacggcattgtcagtggattaagagatggcggttactcagatgatatgacactcgctgcaatagcaggacagcacaaaaggctcatattttcaccacctgttgctgtgtttccacacccccttgccagtgatcttagcttctccagatactggaattacctcaggaaacaaacttttgttctcgagtcatatgtatcgaatgtaaactggatgatgaaccgtgcattatttacaagccattgctatctgtcatgggggtttgtctggccatacattatggctttggtccatgttttagctgctcttcgggcaccgtacagcaaagttgtaaaggaagcatccgattcatcttggggtttgttcctggtgggcctcttgttcacatgcactctgatcgagctcgtttcaatgtggaatttgactaaggtggaaattcaactgtgcaatatgctgtctcctgaaggaccgaaagtatctcttgattcatacaactgggggctcgtgttcatcgctgtgttggtagacaacttcctctatccagtatccgcaatccggtcgcatttctcccaatcaatcaactggtctggcatccggtactacttgagggacgggaaaataagcaagatcgagagagagaacagttcgaagtacactgatcttggagggaagcatctatacggcaagaggacataccctcctaacaaatcgttgctcggttacctgtcaagaactctagtgcaatggcatcagccaaagaaatatgacgtataggaaggtcgaccgggggagattcagccctcgattgtgtggggggcttcttgttgtacacctcttttggtttcaactttctttcatgcctctctctctctctctctcctctctgattgtttagtggttattaggttcattcatattaaattttgtggtgttcaatcggcgccaccactttgaaagggttgcattgcacctcatagttctttgtaacactagagatatgtaacgatttggctgaagaagtgaaatgttccatgttggtgagacggtctctttggttcatttgctgattcatcgactctttaagagttgacatctactcactattgtatcataggatcacatgccttgatatagcaagattctgctctttcttttttttggg

SEQ ID NO: 15753 - DNA, 386 bp, Zea Mays
gtaccgatcttaatggacgtaatgcggaagccgcacgccttgaggacgacgccgatgctgctggccgtgacgcccttgcccaggccgctcaccaccccgccggtgacaaggacgtacttcatattgccttgaccaggaatctcgggccagaaaaatccgtcgtcgtcgccgccgccgccgccgacactctcttcctcaatcccccgacccgcgcgacagttcttggcgaggaaaccgcccgctcgcacggacacacgagctgaaggtgtcgatgcgcgtgctcgtgcgcgcgggcaagggagagcaagaggggttttaggaggtgagaggggagtggggagggcaacggaggcaaggcggtttgggggagactgggagagagaaga

SEQ ID NO: 15754 - DNA, 120 bp, Zea Mays
gtgagattaatgacaatccaacatggaaagttgagttgataaagaaagctgttctaaaagaccttcttgcagatgtgtcactgtccaagtgcaagagggcaaaggcattggtcctgaagg

SEQ ID NO: 15755 - DNA, 883 bp, Zea Mays
cactcgccatcgtcgggaatgagatgaatgaacgtgagttatctgcgctgaaatctgtcattaagtgcattgaagagcacaaacttgagcagcagtaccctgtggatccacttcagaaaagggttttgcagctagagaaagcaaaggcagacaagaggatggctgttgaagcagcaaagccgcagtccaagaggcctcgtgccaatggatcggcctttgcaacccgtgctacaggctttgctgacaagagcttctactcagcaaccccagagaggcatccattcaatccttgcgagaggcagtttgtgtatggcgctgaggttcatcttcctcccatgatgacctcagcgtcttacacgatgcaacctgcccatggaccttattacggtaatggctacccagttcagtaccaggtctcgtatatccactaatggagacagccaggtgcaggtgctctttcctaacaatctagcttaacctgctgctctttgctgtagtcgtatcagttactctgcaagtttccctagctggaaatatttggaccactcaatgtgtgtgctctgagtggctgttgtggtaattttatgccctaatgacatgacataaattactcctaatatttagctatcgatgaatctcccaatgtacttcattcggcttgtgaaatgcctgtcactgaagaagcgcccaggggcatgaaaatatcatgtcgtcatggacgcctgccaaactgtcagttgcatcctgactggttgttgtttttagtttggtgtatcttttatgcccaagtatatttgctgagttatcatcttcagtttgccgattctaattggtttgtactccctcttttttctaaattataagatactttgatttttttgat

SEQ ID NO: 15756 - DNA, 972 bp, Zea Mays
acctcttgtacttcttctggttgaaggttccacgcctatatatattggagaacatggatgggaaatgcttctggtagtaaaaaaggcaacacaagaggctggttcaaaatttgaactgctaggttttgcatctgtgcataacttctatcattatcctgagagtattcgcttacgaatcagccagatacttgtgttgccaccttatcagggtgaaggccatggtcttggtcttcttgaagcaatcaattatattgcacagtctgagaacatttacgatgttacaatagaaagcccttctgattacctgcagtatgtgagatcatccattgactgcctctgtttgctcatgtttgatccgatcaaacctgcacttggtgctattgtctcgtctctgaaggagaccaacctgtcaaaaagggcccaaagtttgagaatggttccaccggttgacctgatggagactcagccagaggatctcaggacgcaggagcaacagctcaatgagctcgtggacatccaaatcgaggagattgatggggtcgccaagaacgtcacttcacgtggcaaggataagatggcagagctggcggttcaatgaatctgggtgaggttcctacttcaaacgatgttaaaatgttgtcgtagcttatctggtgaggtctcttttacgagttggcttcttggtagaaagggaatgtcacggcataggcactgagtagattgtcacgacagattattatatacttcaattctggaatatttgatggaaatgctattttagattgcttggtaagtgggaaccgcctcaaatcacagaagtagaagcagcttccgattcagccggaaccatttcttcaaaaatgttctattatagaataaacaaggcttaggagatagaaaacattatttacaatataaatatgtaatattattataaatgtaccgactcaaataaaatgaactggtattgaa

SEQ ID NO: 15757 - DNA, 803 bp, Zea Mays
gttttccttgtctattatctaataaattttggctgttgtacagtggacattctgaaacagctcagtggccaagaaatttctcgcaagccacctggcggaaagcctggagacaggattggtagacttgcctcacacatactaaagcagcaaagttactaccctctatatcctcctgcccccggtgtgccgttagacttgtcactcgctaaggaagcgctggagatcccatcagcgccagatgttctcctccttccttctgatctcgcaccatttgtgaaggtgctctcccttggagaaggtagcgacgacgacagacggtttatctgtgtgaaccctgggaggttggcgaagggtattggcgggggcacatttgtggagctttactacaacgagggcatcgacaagaccaatgcctccatcatccgcatataggatcgctgaaactagggtgcgccgcagaaaatcacgtacgtagtttttgagctcggaaaatccatctcagcgtttgttatcccaggaagtgttgcttaacatgtggcatctccgctgcaaccgagtacctggactgaaatgttcatgttatcgtcaactaacaactgacctggtttacttcaggccctactgtataattacaggaattggttggtccatctttgctgttttccacagcattcttatggtaaaattattactgggagtttgttgtccagattaagctgtaatgcgccatacaacttccccgaatactggaatatgaagtgattgatgaacctaaactttgggagacaaaaatgtgatgaaca

SEQ ID NO: 15758 - DNA, 613 bp, Zea Mays
gaagatgacagttcaaattgttgaactcgttttttatgtatttggcatgtcatgctccagtgaggaggatgctcgtcagaagctggctccctgtcctaaacgtctgccgggacattgttcaaccaatgcactcccagaaatcaaccaactgccaagagctggagggggcgtttcttcagatcatctccacattgccttttctagaagcacaggagctgctgcagcaatgcctggggttctcgactcgcaatgtcgatgactgcccgcatctggtcacggcattcaagacgtggttccggcgcgctggccgggctcctctaggcggggaaaactgaaacatgagcggatgtctgtatgcgcccaatcggtgcttgtgtcgctttgtattctcacatcacatagtctgctatcggcctacctacatcctctggatttggtatagtgcttgcctctctctctctctcgaatttgtctgtatatactgtcggtcgtttttgcacttaattgcacctactacttttagctattgtctataatcaataaccaaggtaaatgtatgcagcgtatgatccgtgtttttaactctaacaatgaggtctgcgtgcctattttc

SEQ ID NO: 15759 - DNA, 1811 bp, Zea Mays
gtgaaattaggattccacctaccggttgtgacacaaatactggaggggactggtcaaagaagatatttggtttatcaatttcccttgtactcatcaacctagcttctatattggaacgagctgatgagaatctcctcccagctgtttacaaggaagtgttcttgctcttcactatgaccgccctgcagtgcttgcgatagggactgcgttctgggctttgtcaacgggggctgttggtgtcagccagtattttgggcaggttgcattctggagagctattaatggtgttgggcttgccattgtaataccagctcttcaatccttcattgctgatagttacaaagatggcacacgtggagcgggatttggtttgctatcacttattggttcagtaggtgggataggaggtagtgttttggcaaccatcgtggctggaggggattattatggttttccaggatggcggcttgcatttatatctgttgcatttgtgagcttcttaattggacttcttgtatacctttacactgttgatcctaggaaattatctccaagccattttggcggtggtgaggacaatgagaggttacatttggtcagcaatggtatccttcctccacattccatctggaaggattcgtggatagcggcgagatccgtaatgaaagttcggacctttcaaatcattgtgttgcaaggcattgttggctctttaccatgggctgctgtagttttcttcaccatgtggtttgaactcattggtttcgacaacagcagctcagcggcgctgaatagctttttcgctattgggtgcgccagtggatcatttctgggtggtgtgatagcagatgtcttatctagatactatccagattctgctcgcgtcatgtgcgctcagttcagcgccttcatgggcatccctttttcatggatcctcctcacagtcattccccagtctgttgattactggtctgcctatgccgtcacactctttttaatgggaattaccataagctggtgcgctacttgtgcaaacaaccccatgttcgcagaggtagtccctcccaagcaccgcacaatgatctacgcctttgaccgcgcatttgagggttcatttggctcgcttgctgcacctgctgttggattagtgaccgaaaagatctatggctacaatgcaaaggccgtcgatctatcacatggatcagtggatggagcttatgcactctctagaggtctattgactatgatgattgtcccttttgctctgtgcctcatgttttacaccccactgtatacagtgttcaagcgtgaccgagaaaatgctagattggccagcatcaaggagcaggaacttacttgaaaagctttctaacaaggagtactgatgtagtttggattactatagtctacaacaccgccaacctggaggttttgattgaagtactttggttgatgtctaggatactcaggttttatgtttcttcagtcggatatcatttaagagtacacattttgtacacaagcgatagattgtttgatctcgtcgtatgtaactggttcagtatacattcggacctcaacctggagagtggagagaggatgttgcagctttccattgaactttcagcatatagatacagttctttctcgttttgttactatttacggtctgtaatcttgttttgaactgcctgaaccatcacgtcattccaatgatgatgacatttgcagaactcttgtaccagtttcagtttatatcattataagatcaacgcttttctgacagtgtgcatgtgttcagcacagtgaag

SEQ ID NO: 15760 - DNA, 1115 bp, Zea Mays
gtctcttcgcatttgcgggggaaagacttgccttgattacagaagttcttctggaggaggaacagtcattcttgatgattgcaatttccatgagtcagtacatctggacagttttgatattgacagaactttgactttaataccgcccgatggagaatttcctgtaatgaactaccgtatgacccaagaatttaagccaccattccgtgtaaccgcactaattgaagaagctggaccagcgagggctgaagttctactgaaaataagagctgacttctccgcgagtgccactgctaacacaatcgtagtacaaatgccagtgcctgcatacacaatgagagcgagttttgagttggaagctggagcagttggacagacaaccgattttaaggaaggatccaggagacttgagtggaatctaaagaagattgttggtggttctgagcacaccctccgtgcaaagctgacattttctcaggagtcacatgggaatatcacaaaggaagctggcccagtgaacatgaatttcactataccgatgtacaatgcatcaaagttgcaggtcaggtatcttcagatcgcaaagaaatcgaaggcatacaacccttatagatgggtgcgatacgttacacaagccaactcctacgtagctcgtctatgaggaatcagcatctgtactcttgtttccagtccattttttttgggtgtaatatttgagcgttatcatggacatagtggcgtgtattgtgtaactgtatattgaggttcgcataccgctcagctcctgtagtaacaattgtttttcgtcgtgcaatgtgcagatgaataattcatgttctaatgctgcaaaactgattgaggcgagtacctattgtcttgcataattcctgcgaggttttagaaactgtgaactgacctcgcctgtgggacattgggtcctattgtttcgcataatttctgcaaggttctagaaactatgaactgagctttggccagtaaagctctttgtattaaagtaataatgtattttcagttgagttcaggtactcatgtattcccgttttttttccccaaaaggatatttggtatgagtttttctttctgcagtttggtag

SEQ ID NO: 15761 - DNA, 1452 bp, Zea Mays
gtaacgcccgcaatcaataccagagtgggatcgagacgacatgagggacatgggagagaagaggagacacgggcatggacatggacatggacatcttgttgggtttggagctggaggggttgttggacatgccgcagagcatgaggagaagcgcatggagcagaagaagctggacatgagcagcatgtccatggacaccctgccacatctcaccacgcctcttggcaacatcactaccctggatctctccaacaacaacctacagagcattccggagtccataatcgcgaggctcctgaacgtggtggtgctggacgtgcgctccaaccagctcaagtcgctgcccaactccatcggctgcctctcaaagctcaaggtcctcaacgtctccggcaacctgctccaagaactcccggccaccatcgaggaatgccgtgcgctggaggagctgaacgccaacttcaaccagctgacgaggctgccggacacgctgggcttcgagctccacggcctccggcggctgtccgtcaactccaacaagctcgcgtacctgccgtcgtccacctcccacatgacggcgctgcggtcgctggacgcgcgcctcaactgcctccgcgcgctgcccgacgggctggagaacctcggcggcctcgaggcgctcaacgtgagccagaacttccagtacctgcgggagctgccctacggcatcggcctcctcgtctcgctccgggagctggacgtcagctacaactccatcgccgcgctcccggactccatgggctgcctcaccaagctcgccaggttcagcgccgcgggcaacccgctggtgtgcccgcccatggacgtcgtcgagcagagcctcgacgccatgcgcgcctacctcagcgcgcggatgaacggcaccgccaaggccaagaagaagagctgggtgcccaagctggtcaagtacagcaccttctcggcggggatgatgacgcccggccgcaccaaggtgcacgggaacaacaccgacggcctccacatgtcggattaccggtcgctcgacggcggcggcgttgcgtcgtcggcgtttctcagcatgctgtcgccccggcgtctcttctcgccgcggagaaattcggccaagcactagtagcttagcagtggccactggttcggcgggctatacatgtgtgctccctccttattgctggctatttgcttgctgcttcgatgttcatatgacatgcacgtactgtagcgcaagctgaagctaatgatcttgctactgcagttgtatatgctttgaagagaggtatatatgaagtgtgtatagtagcacgtagtgcaatagggcattaatgtacataagaattaagggtgtctttctttccattgtttacatttgcgttagtgcttatgctggagtagtctttttgaaggaaattgtgtcatcactacagtaaacggaac

SEQ ID NO: 15762 - DNA, 549 bp, Zea Mays
gagagctttacccgacgcccaggacgaatcctcctggagcctagcactgtcattatgccctagctaggccaggcctagggttcacaggtcgcaatacaacaaaaaaccagattgggggcctcactgcattctactgctgcgactagcacacacacctccctttttcattcgagttcgaggagaaggcggcggatgcggccatggagctcgacgagcaggccttcctggaggagatcctctccctgcgcagggacgcctgggactgcaatgtgtccatgggggacctcttcgccccggcggcggccgccgccattgactgctccttccacaaccagcaggcgcccaccgtcagcgtcctccccaccttcaccgcctcctgcgccgagccgccggccttcgactgcctcagcgaggtctacggcgccgccgccgcgttcggcgggcccaatgccggcgacgagatggcgttcctccacgtcgcggagcccatggatgcgctgcagctggacaacaacgccggcctcggggttgtgcaaggtggagcccggc

SEQ ID NO: 15763 - DNA, 1240 bp, Zea Mays
tcaagtccccaaccaaaacatgtttaaatcttgtcatttcaagaatcaagctgctgcgcaacaggagggagttacaactaataaatatgcgcaaagaaatggttcaatatcttcagactggccaggaatcaatcgcgaggattcgagtggagcacattattcgggagcaaaatatattggctgcctatgagatcgttgagcttttctgtgaatttgttctggcaagagtccctattgttgaggtccaaaaggaatgccccttagaactgcgtgaagccattgctagtataatctttgcatcaggaaggtgttcagacttgcctgagctaatgcatctccgtaatttgtttaccaccaagtatggaaaggagtttgttgctggtgctatggaattgcgccccgacagcagtgtcaaccgcacaataattgaaaagctctcggtgaaggctccatcaggtgattcaaagctaaaagtcttgaaagctattgcccaagagtacaatattgaatgggattcatctaatactgaagcagaattcaacaagaaatatgaagatctactggacggctcgggatcttcggtccaccagatccagacacctatcattgagggctcagtgagctcaccagttgtttctgctccaagagataagacgccagcattgaattcacctgtcattgatgccgaaaaacaccaagttcgcgaatctccgacttcaccagctggaggtgcaagagctggtgttgtcactaagggcaatgtggtaaccatgggccatcactcccccgctgaggagatgccctccaccagcccaagttcatcagacgcgctggagaaagcccgagctgctattgcagctgccacccgcgcatctgctgctgctcgcgccgcagctgaacttgcaaaagttaaaattacaaatcaatgacacctccagttcgggcaaggcgtgtcaggaagtttaatctggcaactgatcaccaggacagactgaaatgtatttcattgaataaattgttactgtatattccctttgtgagcacttggcacatcatataaggagcgtggctcctcgcctttcttcgaatgtactcaaagagaactatctggaatgcataatgttgcatttactgttcactagttagttattgtatcattacggtttttttacaatacaaaccaatctaaattgcagtggttagagacgaacactttgttcctagagatcatagttctgag

SEQ ID NO: 15764 - DNA, 1655 bp, Zea Mays
ggtccacccacatccgcgctcgtcccggccaccgccgccgcactctcacggtcccacctctctgtggcatgagaagatggtcgcgtgctccaggggactcgcgtggccgccgttcgatctgaccacggcgaggggggcggcgtcctggccgcgccggcgtgccgcgatccggtgctgctgcgccggagcagacgcacagccgcagaggcgactctcgagggcggccgcggtcgcgcccgagcgcgccgaggagtggcgcatcgatgggaacaagccgtccgccgcggcaccgggacggcggcgcaccagcctcaccgccatgcccccgctccccttccctgcacctcgctctagaagacaggtcaagcaaccggacttctacccgcggtgcactccgagggggtcggctcctcaatcccgtgataccccgcccaagagagacactggtattgctagtgagaaggaatggggaatcaacttgctggacgaagccgtcaaggagtctggaataaatgaagatggaagcacttggtacagggagagtggagatgatattggcgagaacgggtaccgctgccgctgggcaagaatgggaggacagagccatgatggttccaccgaatggaaagagacttggtgggagaaaagtgactggactggatataaggaattaggtgcggagaaatctgggaggaatgctgaaggagattcttggtgggagaaatggaaagaagttctgtaccaagacgaatggagcaatcttgcaagaatagagagaagtgctgagaaacaagcaaaatcaggcatagaaaatgctgggtggtacgagaaatggtgggagaaatatgatgccaaaggttggacagaaaaaggtgctcacaaatatggaagattgaatgagcagtcctggtgggagagatggggtgaacattatgatggccgtggatttgttttgaaatggacagataagtgggcagagacagacttaggcaccaaatggggggacaagtgggaggagaaattctttgcaggaattggttctcgacaaggggagacatggcatgtatgtcctggcggtgaacgttggtcaagaacctggggagaagaacactttggtaacggaaaagtccacaagtatggaaagagcacaaccggcgagaggtgggacttggtagtcgacgaggagacatactacgaggcggagccccattacggatgggccgatgtcgtcggagactcgacgcagctgctgtccatacagcccgtggagaggccacccggcgtgttcccggccatcgacttcagctccgcgccgccgccgaaggacgctccgccgggcatgcccccttctcctctggactgagtgaattaggcctgccagcacagacggatttttctgtctatataggctccagattttgcctgtaagggaacagcattctttgtaggaagttgacggaaccccgttcctgcgttcattggttggctcattctttgctacgcattcctttcctctggctgggatatatatatattttgcttgggaactgggtggatgcaataatcaaacggcgcccgtggttgtgtgtgttgcccctgtccccctatgtgcttgcaacttggtctgaaggcagtgtggtctgggcaaagctttc

SEQ ID NO: 15765 - DNA, 2057 bp, Zea Mays
tgctttgcgaacaacacacataccggtacgacaccgacattccgacaataaggtgtggattgaccttgtcagtcacagaagggcggagcagtgccagtgtactggccgccaccactcgccactcgtccccctccccccgaaagccggcacgagccctcccttcccttcctccaacctgttccgatccgccccgagccggctggccatggcgatcagggctggccgctcggccctccacctccacgctctcgctttcctcatcctcgccgcctccccctgcctccaagtccaagaaactaagggggagaattggtgtaaggaacaaaatggaagtagtgcagcaggatgatgaagcattagttaaacttgagaacacagaatatattctgttcttgccaaatctaggggcaaacttgatctctatcaggagctgctagcaagactcaaggaaagccagcgctcccttggggaagctactgctgatgccgaacttccgaagagtgcttcagatagaatcaaagcaatgggccaagttttatcaaaagcaagggatctgttgtatgattgcaaggaaattacccagcgtttgagagcaatgcttcagtcagcagatgagcaggtccggagcttgaagaagcagagcaccttccttagccagcttgcagctaagacaatcccaaatggcatccattgtctttctatgcgcttaacaattgattattaccttctctctccagagaaaagaaagttccccaatagcgagaacttggaaaatcctgatctttaccattatgctcttttctcagataatgttttggcagcatcagttgtggtcaactcaaccatcatgaatgcgaaggagcctgaaaaacatgtgtttcaccttgttactgacaaactgaactttggggccatgaacatgtggtttttgctgaatccacctggggatgcaacaatgcatgtggaaaatgttgatgacttcaaatggttgaactcttcttactgccctgttctgaaacagctcgagtctgcagccatgaaagaatactatttcaaggctgatcgtccgaaaacactctctgctggctcttctaatctgaagtatcgaaacccaaaatatctgtctatgctcaaccatctaagattttacctcccccaagtctatcccaagctgaataaaattcttttcctggatgatgacatagttgtccagagggacctaactggactctgggaggtagatcttaatgggaatgtaaatggagcggtggaaacatgtggagagagttttcaccgatttgacaagtacctcaacttctcaaacccaaatattgctcagaattttgatcctaatgcatgtggttgggcttatggaatgaacatgtttgatctggaagaatggaagaagaaagacattactggaatctaccacaaatggcagaacatgaacgagaacaggctgctctggaaattggggacattgccgccagggcttctaactttttacaagctgacacaccctctggacaaatcatggcatgtgcttggtttagggtacaatccaaccgttgagcgctcagaaatagacaatgccgcagtcatccactacaatggtaacatgaagccatggctggaaatcgcaatgacaaagtatcggccttactggacaaagtacatcaattatgagcatccttacattcatggatgcaagttcagccaataggaactacctaaacattcttctgtgatgaacactgaagttagagggcactcaaaatatagtcctctcttagtagtataactatcacatgttctttcttcgttttatattaagcttatcatgtgtatgtagtagtttcatcgcctttagtccgttgtcggttcttgtctttttttttgtcatgaaaaggacgatgagttcaaagattctcatcagctgataaatgcaatatatgaatttctgttggtagcaaattaatgatgtcactcaaactgtgttacgtgttccgttgaacattcatgcgagcattttaatggccattcgagagttatgctag

SEQ ID NO: 15766 - DNA, 830 bp, Zea Mays
ataaaacatcagagctttaccgcactttgggagaaactgcatttcactagggaatgtggatggaggaaaacttccgcctcatccacttgtcaggatccatgtgtcatatgtttggaggtggaatgcactgtagctgcagaaggttgcggccatgagttctgcaccaaatgtgcactctacttgtgctccaccactagcagctcaacatccacccgtggagttcctggctccatatcatgccctctgtgtcgccatgccatcgtctccttcatgaggctcaccagcactaccccgataaaggagcttccatggacaagcgcgtcactagctctatgtgcagcgggctcaaacactggccgccctgaacatggcgggtccttgcatcgaaggcctgacctgcgtcgactgcgctccatctcagttcagctgggatgctcttcttttagatccattggctctgggaagctgtcgtccatgaagctgaactgcacaggagctgaagaggcggtgccttgcctcgtcagctgcctcaggcccgatgtgcagcgttcatcgtcgtacaggggaagaattaggagatattcagagttttgaaaggatggttttgtggcgtccttcctgcgagtttttagggtttgggaatttaaacctgtgtcgtcatgttcctcttcgtttgtttccctgttgtttaatatgcatgcagtcctcgttgtgaagatctatttgtgtacatggcccgtttgtcttcattacttttacttatatgtgaattatataccatctctgttttgcaattaccgacaagttaatactcccttcttttattctac

SEQ ID NO: 15767 - DNA, 945 bp, Zea Mays
cagcgcacgcgtcgtccgtccgtccgtacttcctcgccgagttgacctgggtaagtgggcgagatggaggacgaggggagcggcgaccggcgccgcgccgcggaggcactcgtctcgccgccgccgagggcgaagacggtgacgatccccgtggcccgcgacttcatcatcccccacgccgctgaccagtgccgctgctccggcttcgaagtcgccgaggagggttcgccgacgggttcgtcggcgctcggaccagccagcgctggcggtggcgtcccgtgcgagggcgcgctgcaggacacgccggactacatccggaggagcgccgcgcggcacagggtcgcgccgctcgagctcttctcctccgcctcgccaccgcccgcgggacttggcgccgctgatgcggtggcttctagtgcgaaatgccatgccacggagggcgaggccgtgggcggtcggcagccgcaagagactcgagtggataaatccgattgctggggtatctccgaacaacagtatggtgtccttctgcgggaggaggaggaatgcaggaagctgttagatgacctcatggcagagaatgagctcaagaccagggagtgccgtgaagcccaggagtcgctccgtgatctgcggatggagctgatgaggaagtccatgcacgttggctcactagcctctgctgttgaagggcaagtgaaggagaagagtcgtttgtgtcaattactgaaggcattgggcgaaaaattgaaggtattaaagtcagagcaccagaacctaagacaagaatcgctagagtacagaaagtgtgtgttagatgcttcacaaatgtctgcaacaattcagcgatatgtgaatcaatatgtaagtttagagtgcgagtttaaagatctcaaagagaagttcaatgaggaggcaaaggagcgtaaagacttatacaacaag

SEQ ID NO: 15768 - DNA, 3091 bp, Zea Mays
cggcgacccggaccggacggacgcgaaaatcagctgccgtggaggtgcgggcaactccaacgacgcgatccggcccgcccgcgacgctgacacgaccgcgggacccacccaatacgacgccactaccccgcttttctcgcacctatttaccgcccctgccactgtctcctttccctctgactagtcacctgttggcagggtccggttcacgccgcggcggctcgactggactcccctcgtcatggccggcgtcagcggccgcggggccgcggagagggtggccgccgccgtggaggcggtgggatccggtggctgggagttccgaaacgcgtacaggcgccagctgctcgcgctgtcgcggcggatccggctccttggcccctttgtcgaggagctccgggaggtaccctgtgtacccgcggtggaaccggagcgggcgctggcggtgctcgccgacgcgctggaggaggcgctcgacctgctccagctcggccgcgacgggagcaggatattcctggtccttgatagggataaagtaatgaagaagtttcatgaatcaattgttcagctggagcaagctttgtgtgatttttcatatgataaattggacatatctgatgaagttagagagcaggttgagttagtgcatgtacagctcaaaagagccaaagaacgggttgacatgcctgatgatgagttctacaatgaattactttcactgtataacaagagccacgacccaagtgctgaattggatatccttggaagattgtcagaaaagctgcacctgacgaccatcaccgatctcacacaagaatcgcttgctttgcatgagatggtggcatccggtggcggtaatgatcctggagaacacattgaaaaaatgtcgatgctactgaagaagatcaaggactttgtgcaaactcagaaccctgaaatgggcccgccgatgactaccaagctaatggatcccaatggggagccaagacccagaaacatccctgatgagttccggtgtccaatttctcttgagctgatgaaagaccccgttattgttgctactggccagacatatgagcgggcattcatcgagaaatggctagcttctgggcaccagacttgtccaaatactcaacagaggatgccaaacacaacactgacaccaaactatgttcttagaagccttattgcacagtggtgcgaggccaacgggatcgatccaccgaagcgctcgacgcagcctgacaaacctacatcttcgtgctcttcgagcgaacgtgctaacatcgacgctcttctctccaagttatgctccgcagatcctgaggaacagagatcagctgctgcggagctccggctcctggcaaagcggaatgcaaacaatcgtatctgcattgcctaggctggtgccattcccttaatattgagtctcctgtcgtcatctaatctgcagacccaggaacgtgctgtgactgcacttctgaacctctctagtcacgaatataacaagactagcatcatttcatccggtgccgtcccgggcatagttcatgtcttgaagaatggaagcatggaggcacgggagaatgccgcagccacccttttcagcctgtctgtggtcgatgaatacaaggtaacaatcggaggaacaggagccatccccgctcttgtagttttgctgagtgagggcagccaacgcgggaagaaggatgcagcagccgccctgttcaacctgtgtatctaccaggggaacaagggccgtgccatacgagctggcctggtgccactcatcatggggctcgtgacgaaccccaccggagctctgttggacgaggccatggcgatactctcgatactgtccagtcaccccgagggcaaggccgcgattggggcggccgagcccgtccccgtgcttgtggagatgatcggaagcgggtcgccgaggaacagagagaatgctgcggctgtgatgctgcatctgtccgtgcagtccgtgcatctagcccgggcgcaggagtgcggcatcatggtcccgctacgggacctggccctgaatggcacggagagggggaggagaaaggcggtgcagctccttgagcgaatgagcagattcctggttcggcaacaagagggtatcagctcccatgagcagatgttggacgagctcgaacgtcaacttgatgccttcggacctggtgttacagaggccgatatccttgaacaatcgggacttctttaacccacggttgcatgatgatgatgaatctatcttcgccataatactatcaaaagaggtcttcttttggggatagtactaccaaaaaagttcatgctgaaccagagttctttcatggcgacgttctatcggtactgatgctgatctgtccgtccggtttggcttcttccatgcttgtgtgctgaagctcccatcgctccatcagtttctgggaacgtaaggtagcacagaatgatgagatgtgtacagtctactatgtatgctgctccagacgtcatatagctatgtacattttttttcactatggtactataaaaaatgaggagttttagcggcggacttgatcagtaatacttatttcgtgcatgcgtacttgttggcgttagttccagattccagaattttttttggggacacgtatgcatttgggattccaacattggtagtgcgtggtattggaatctagtatggcagtgctagttgcaaccagaatgctattcatgcctctgaaatgcagcaagtgcacacgttcatgtcgatttcttttcttttttacccaaggagaaacatttcatctctgcttttgagaaagcaattatcatggaagatggaacagtttcgtatcgaattcacgcgaaatgtttccaagaagagcacgtatacacgtttggcagctctggtgaaggaagcaagaagactgcgtctgttggcagatctggtgaaggaagcaagaagaccgtcgtctacaagtgctgatgggccacgtcgttcgaataggccgaggaagagcaatgcaaacatgtatgggctggcgtgggtgaatgtgatagaaggccctcatgaatccaaatattc

SEQ ID NO: 15769 - DNA, 3052 bp, Zea Mays
aacccaaatcaaatttccccaaacggaggaaagaaacggaagccgaaaagaaaagcgtgctcttttttcatccttcgtgcgtggtgcgcgagcgtgcgcctcccttaccatctcgcgatcccaattcgatccgctcgccagctctccccatcagacctgccctccccggccgggcgattcgccgccgctactcgaattcgcgtggacccgtcatccattctcgctccccggcgccccaaaccctagatccgctgctgttcttcccaccgccgccgccatgttctggcgcatgaccggcctctccgcggcctcgcccgtggatacaattcttgacaaagaaaattttacattggaagaacttcttgacgaggatgaaattattcaggagtgcaaagcacttaactcacgactcataaacttcttacgtgacaaggctcaggtggaacagttgcttcgttatgttgtggaagaagttccagatgatgctgaaaggaagcgatctttcaagttcccatttattgcttctgaaatatttacttgcgaaatcgatgtcattttgaggaccctagtagaggatgaagagctaatggatttgcttttctcatttgtgaaacctgatcatccgcatagtacattattgtctggttacttcagtaaggtggtaatatgtttggtgctgcggaagactgctccacttatgagttatgttcaggggcatccagagatagttgtccagcttgttgacctgattggcatcacatcgataatggaggtgctgatacgactgattggtgctgatgagaccatatattcaaactatggtgatacgttgcagtggttagaaaatacaaatgtacttgaaatgattgcagataagtttaactcgtcggattctcctgaagtgcatgccaatgctgcggaaattctatgtgcagttactcggtgtgcgcctccatctcttgctgcaaagatatgcagtccaagttttgttcggaggttgttccatcacgctcttgaagaatcaagacccaaatctgttctgcttcattcactgtcagtgtgcatatctttgctggatccaaaaagactagcatcagcttcgtatcaagcattcaaaagcaacttaagtcatggggcattggtcatggccagtccagagacagttgatggtatgcttgagagtctaggcaacttgctgaatttattggacacatcggctgctgaaagtgtgttgccaacaacttatggatgtttgcgcccacctcttggaaaacatcgtctgaagattgttgaattcatctctgtgctgcttacaattggaagtgaaactgcagaaaaggagctagtaagacagtcagcaataaagcgatcgattgatttgttctttgaacctgaagttgttgagcatgttcttcatgaatgtgatattgttggtaaaattcttgtttcagaaaggctttcatctttgtcgactgagtctaatgggcctactgttcccactgaaggaaaaacacatccaagagttggaaatgttggccacatgacaagaatagccaataagcttattcagttgggcaacagtaacaacacaatccaggctcacttacaggaaaataatgagtgggttgaatggcaaacaaatgtgctggtcaaacgtaatgaagtagagaatgtttatcattgggcttgtgggcgcccggcgtcattacatgaccgtggtagggacagtgatgatgatgacttccgggacagggactacgacgtggcagctcttgctaataacttaagtcaggcatttcgttatgggatatacagcagcgatgacatcgaagaggcacaaggatcacttgaaagagatgatgaggatgtgtattttgatgatgaatcagctgaggtggtaatatcttctttgcgtctgggagatgaccaggaaggctccctctttacaaattcaaactggttcacatttgatggagagagaggcattgatgaccgatcatctgcctctgttccttcatcatcccccaattctgaggagacatcactaaagactgaggaagctgatgatggtaaagtcattggcactgaggatgaaatggaaacagtgtatcttggaaatggtagtgttgaggaggtaaaagatgtagcagaatgtactgaacagccaaattgttgtactgaggaagagcgattgaaaaatgaagaagggatggaatggcatccaaatgcttcaaataacgataccgaggctgaggctgccgcagagtcttcagccccatcagttgagatagtggcagagaaaacagtagatgaaccattagaggtgggaagaaaattggatgaaccggcagaatcatctttggacagttctgtctctgtagctttgccagctcctgttaacggtagtgagcctgccaactcggaagtatcttctgaacaagtagcccatgccactgatgtgcagcaaccagtgaaggaagctcctgccgaggatgatgatgcaaagaaaactgatgcagccaaaacaaacgagtgaagtagcaacatgctgggctgagctgatcagagcgattgcttgtgaactgaaaactctgtagagtgcagcttgggcatccatcttgcttcatgtgtgctcagctgccacaagatagtctgaagcaaactgctgtacaataagcaagtaattgctctaccatcaaccgtggcatgccactgtacaaatgagcaccactgactaacgcacgtcagtcgccttgtctgaaactggtcattttctttgaagttcaccctccagtccatgtgctttggtggcagtcttcatggcatggtatatgatacctgaaagaacattctttgggtggcaactggttttggctacttagtcttctgttgctttaggttaactttggaactgtaatatgagatgtgattttatttctagtctagctattgtatttttttttcggactctacatgtgtcagttcgatttgaacatgttatttttttcataaagatttgaagacatcttgatcgacggctcctcgtctaccc

SEQ ID NO: 15770 - DNA, 1392 bp, Zea Mays
ttcattggccatgcactagattattaattatttgaaggactgcaccgattgcttctcagatcctacccagtgacagtgatggcataaaagttctccaggcatcttggcatccctttagcaataaccattttgcagttttgacatcagatgctgttttcaggttttcatcttattcagtgatggttcaatttttgtcctctgcccagttgttccatttggaagtgactatagcaagaagcatattcaggaaatatatgaagatgttaatgcatttggattgaaatcttcaaatccaaatgttgtcactaattcacatttggccatagcttggttggaggcaacatttcctgacctgttacatcaatcaacagataccagttttctgatgtcaaaagctcatgcatatgcgccattagatgattctctaacattacaggggcctctttgtacagtttgtgaggaaagtaatgaatctgaaagcaagagcagcagttgtgaaggaaaagctgtaggttttatgtacagttctgctggcaaagattcagttcttgtgactgcctggggtagtgggctgcttcaggttgatgctcttgcagatgaaattcaaccgcggtggaacattggggttccttcgcgtcttaatgtcgattcacatggacaaataaataatgttgccatgatatgtgactccaattcgcaagatccattggcgttgagatcgcatcgaccatctagtacaggatcaaacgtgaagagcaacatagaagctgtttggatgggacactctcctcctttgctaaggctcgcaattgtggatttggcattaccaaaaactcctaatgataactctctgtcattgtttgctgatccccttgttccagagagattttattgtgcgcatggtggggggcttgacatggtcacactgcacttcctaccattttcataccctgaaatgtcttcgacaccaccctctgtgcatcctgtcctcactacagggaacagcgaaacaagctcaccttttctttctggatttgttaccatagctgatgcatatggtcatgtacagttagctggcatcacatgcttgggtgagtgctttgtggtggagatgaagggttggaaggaaccggcacctcttcagcttgacttagaaagcaaaatcgtcaaggatgtggagcctcctgcaactggaatgatcagcaaagaacttattgctggtccagacccacccatacttccatcatcttcaagcctgaaatcgttgaccccagactctattgaaggaaaatctacacttcaccactatattaaggtcttccatgagtactatgtggagtacggacacaagggatgaaaggaaacacgctgaccaagaggtcaatttaatga

SEQ ID NO: 15771 - DNA, 113 bp, Zea Mays
ttttggggcattggattctcaccaatgttttcgttactaaagccaacattctcacttccgctttgttgaccctctctttcgcgtttgcttccctttaaggcggaacactcccc

SEQ ID NO: 15772 - DNA, 2491 bp, Zea Mays
tcaccaaaccgctcctaatccccaccatcatcacgtgcaattaatcaaccctctccaaccaatccgcgttggaattacaagaaagtcccttgcttcccttcccccctcgtctccgttcatggtgctggtggccgtcgaccggcaactccggcgcgggggcctctaatggcgcagtacaggcagcagtacggcgtcggcttttccgactcccgcggccaccatcaccaggtgctcccggactggcaccggccccaccacgcctccgccaagtcctcctcacggatccgccgccccgggaagcctgcgccgcgccgccgctcgccggctgctgctgccgccgtcgccgccgctctactcctcgccgccgtcttcctcctttcgcgccgcatctcgcgcagccccgcagagatcagccaagattcgagcgctagggagacgttgccggactggaaccagagcaagagctggaaggagctcaagttcgggcacggcggaggtggccgcagcgcgcgggactccaggtactgggaccgggacgataggcgccgcgacgaggactacacagaggacgaaaaggagaagatctcgggtggaagtgggacctccggcgatgctggcggcagcagcgataaaggtaccacctctgagggaggtggggaggataaaggtttgactaccggcagcgatgctaaggatgttccagaggtgtctgaaggtgggaaaggtgggaccttgtacaatgagggtggcaggaaggagctggagcagtacgaggctgcagccatgggagccacaggaacaggggtgaaggaggttgatccagatgatgagtatgacgatggcatcgatacacaggatgaaatggaggatgctcacctgcattcatctgatggtgggaggaagcttggtggtggcagccatgagggtgctgagaagaaggacgaggtcgctactgagaggcacacagaagcaggtggagggattgcgggtagtcatgatattagcagcccagacaaaaagaaggtttcaggtactggagacaagaagcatgggcccaagaagaaaccgaaacgcaagaagtctggttcaatttgtcaaatgaagtttcttaactcaactgctcagcttgtggagcctgtgaggaatgagaaatttgctagttttaagttggagtatgtagaagttgaagaaagacctattggatcagaattttgggaaccgagatttgccggccaccaaagcctgcaagaaagagaggagtcatacaaagcccatgaccaacagttgacatgcgcttttgttaagggtccaaatggtacaagtactggttttgatatatctgatgatgaccgaaagtacatgagtaaatgccacattgctgtatcatcctgcatctttggaaattctgatcgactgaggactccatttggcaaaacgattacaagcctctcaaagaagacagtttgctttgctatgtttttggatgaagtgacattgcacactttagaatctgaaggccagaaaatggacagcatgggtttcattggcatatggaagatcatattgattaagaacatgccttataatgacatgcgtagagtggggaaaataccaaagtttttggcacacaggctattcccatcatcgaggttctcaatctggttagacagcaaactgagactacaaactgatcctatccttatcctggagtatttcctctggcggcatggctatgaatatgctatttccaatcactatgatcggcattgtgtttgggaggaagtagcacaaaataaaaagctgaacaagttcaaccatacaataattgaccagcaatttgagttttaccaagcagacggactgacaaggttcaacccgtcggatcccaacaagcttctaccaagctatgtccccgaaggctcttttatcgtgagagaacacacaccaatgtccaacttattctcttgcctgtggtacaatgaggttgatcgtttcacgcctcgtgaccagctcagctttgcatatacgtacctaaaactaagaaggataaaccctgacagaccgttccgactcaatatgtttaaggattgtgagaggcgatcgatagcgaagctattccatcatcgatcagaagagagtcacagtggtgcacaactaacaagatgacacatccttcttggtgatggggggcagaagagggagagatcagggattgtattttttatacagctcagcagtcagctatgcacaagatccattgaaatttatacccctgtcgaagagttcatactttatataatgcaagtcatctttacccttgttactctctagtgctgcagaccagttcccgcctttcatgttttgcagttgacaaaggcagattaggaggttctagttgtttggtttttctttattctccgtaaagctctgtttattctttggataatatgggaaagttgtggctgggcatggacttcccagatgtattatt

SEQ ID NO: 15773 - DNA, 1566 bp, Zea Mays
  misc_feature (1566)..(1566): n is a, c, g, or t
tttatagcttaatttgagctacagatcccacgttaataatacgttgggttttggtattaaatatatctacgaataagaatatttgtccatctatagttaaaattatattaataaaaggaataatattgttgggagacgtctccagattgagttaaaattatattaaggtaaaagtctcttttaggacattgcaaatttgcaatgccaagccgcaagctctgcagatcctttcccctgcttaatggattggtgaattggtttctccctccggggaacacacaggtgggctgggccttcttttgcggcgggagtgatcaggcccacatgccgtgaacgaacgctccagatcgtggcgccggcagctcttcggacgcggccgggccgaatctcacctggacccaagggcctctttagaatgcaggagcaggcgccagcgaaatgctcctctgcccagtgcccactcccagctctaaccaaaactgacgcagttcactgtacagtgttttctctatccatggcaaaagaaacaaatagaaccaaaggatctatccaatttgtttaagggaaaaaccacatatatattatgcatccatcggcgactttcacagttacgacacacacacacacacacgactacacagtccattatttacagactaaaataccttaattagctagctgtgtgtgcttatggctggagtagcacgcagaggaatggtgaacgcatgcgccagcacactcctcctgcaggctgcagctggctacgcccctgctttcttcctgacgatcttctccagttgctcgcagaatgccgggcactcctccttcatcgttctttgacttctctgtcagtgcgaaacattggtatatatattatggatgctgtaagtcatctgctgggcactggcagccatcattgtcagcttagcaacgcatgcatgcagtgatgagttaagttggaatttcgttcgagatgtggtgcatggggtatatatatgttcatgctgttggtttctttcactagtgaactggttgagacagatcatctcgttcctaattttcgtccttatttctttcgtgcgtcagaaacatgatgagttgatctctcatatcgatcgatcatataagcacatgttgatagaatgaatggatcatcgacacaaaatccactggatgatgatctcataacacaccaccgctcctgtcagttgactctagctatactaagggcctgttttggagctaaaaaaatagcttaaattagccatggttatctgactagttaactagttttaaagacttgactaaaaaattagactatctattaacccttctgtttcgatgtactagaggtctagagagaacttttagctagctagcggttagcttcagtatctaaacataaactaaacgggactgcacggttcaattgctgtgctatttgaatccgaatagccttgtagaaggcaggatactgatcaatctgcctcaggcatccagaaggtaaggcaggatctttttttaatagagttccgggggtgaggtatgtagcagcaggctgcagan

SEQ ID NO: 15774 - DNA, 1398 bp, Zea Mays
tctatatagtaaaacgcgaagagagagatacttctgcggaaacgaatggcagcagcaatggccaacaccacatgcctccgctcccgcctcctcgtcctcccaccgccaccggcgccccgcaccgtcgtgtcctttcgtctccgcccatgcgctactacgatctcctcgtcctcccgaaagaggagaccccgtctcgcggcacgggcggcgccgcccggcggcgctgtggccccggcgtcggccgcgtcgaaggaggatgaccagggggagatgggcagcggcgggggcctctctgcggatgatgcagagaggctgtgtcagtttctgcgggccgacctgccgcacctgttcgacgacgtcggcatcgaccggtccgcgtacgatgaccgcgtgcggttccgcgaccctatcacccgccacgacaccatcgacggctacctcttcaacatccgcctcctcaagctcctcttccgccccgacttctacctccacgccgtcaagcagacagggccgtacgagctcaccacgaggtggaccatggtgatgaagtttatgctccttccctggaagccggagctggtcttcactggcctgtcgatcatgggcgtcaacccgaagaatctcaagttcaacagccatgtggatctttgggattcgatacaaaacaacgagtacttctcttctgaaggactatgggatgttttcaaacagctacggatttacaagacccctgacatagaaacaccaaattaccttattctaaagaggactgcacattatgaggttaggagttatgcgccattcttagtggttgaagcaaaaggtgataaactgacaggatcgtcgggcttcaacaatgtaaccggatatatatttggcaataatgcttcatctgaaaagattccgatgactacacctgtcttcactcaagcttctgacaacacactttcagatgtatccatccagatagttctgccaatgaacaaagacttggacagtttaccagctccaaatacagcagttactttgcggaaggtagaaggaggcattgctgcagtgaaaaaattcagtggacgaccaaaagaagaaattgtgctccagaaggagaaggatctgcgctcccagttacttaacgatggattgaagcctcatccaggctgtttgcttgcacgttacaatgatcccaggacaaagagcttcttaatgaggaacgaggtgcttatacggctaattgacttcacactggagttgtaatcgtcaatactggcatcagatcgatgtaacacactgggcttggagcttccagtgagtcattagaaaggagaaatgttgtagatgtcagatttgctttatgtaaatgtaaactctaaaagttgccacctttcggttgactggcca

SEQ ID NO: 15775 - DNA, 920 bp, Zea Mays
taatagggaagtaaagaagcacgtaccactattctgcacagggttttgatggcagagaccatcagtctccttttaacagcaaattacaaggattgaagctagaactaggaagtgttaactaataagtccattccccatctcatcggttttggaactcttgtgcttactcttcttgtgcttatgcacatctgctgaatcttcagttccctcgtgcttcctcttctgatacaaatggtgagcattgcccatcaaaaggtatatggtttagaatgaagctattcagagtttttgaacataaagaaaactgaccaaccttttcatgatgtttctttgaatcagaatcatgatgaccactcttatcttttttcttatccttgtctttgtctttatctttgtccttactccgatccttatgccgatgtttgtgcttcttatgttccttgtctttgtccctctctctgtctttgtgctttttatgcttcttctctttgtccttggactcgctttttggtttacccgaaatagtcggtatacccttttcagtctagggcaaaaccacaggagctgtttctcgaagttggaacgcttgccccagtgtttccatatcgaagggctgaatataagcaggtttatccctcatatatgcattctgaacaagttgatctaactccattccttctccttttcgaatttcagtgtctcccacaatattgtgaagataatgtgtatctgatattgccagtggcaaaggtttcttgcaaaagaaatcatggtgtggcagcagtttgtagtggttaatcaaatcaacagcaccagtaagctcccttggccctgaaatagagatcatattatcaaacaaccacaaagccgacaaataaggcttctgaaaatatagatgcactaatatatttaaaaaaaaa

SEQ ID NO: 15776 - DNA, 3160 bp, Zea Mays
accaatccgactctcgtccctccccgactcaccccactgcccagccgcacgcgccgccgtgtgttcgcgctctctcccactgtgtctgtgacgactgggtaggctacagccgccgcccgtcgccaggtgccgatcccttcgccgacgaagagcatccaccagagagaaatcgacttcactagatccgcacctgggctggatggtttgacgccatgtatgatgtttcgatcgtttcaggctccggccaagggcgtgatggcggctgtagggagcttgcagccgggggtggagactctacatgtgcaggattacaaggacgcgcctccagccaaggctgtggcggccgcggtagagagcttgcagccggcgatggagagcctacatgtgcaggaattcaaggacgcggctccggctaagggcgtttccgccgctgctgtagggagcttgcagccggggatggagaacctgcaggtgcaggattacaaggacgctagcatgtattatggtgcttacccggcttatccctatggagcaccctatggtggctggggggagtactccacatacttgagccatgatggagcacagacaccaactgctggcgcgtatgctgacatgtactatggccatgctgcatatggtcatatttatgggtctcagaattaccagtatccatcgacctacagcaagcaacagaattccactgccaagctgtcgtccaatggtaaaagtgagaaattggctccagctccggaaggggatgtctccactattgttgttgatgaggtgaaagtcctgaaaaatccaaacccgaccctgaaggcagacaggaatgcaccaggttccaatggttcatatggccgatctagtgtgcgttctggtaactatcagaaccagactagttggtcacactatccatattatagtagtgagatgttctctgacaagcagcaaaagtttaccagcaatcacaattcgactgctcccaatgataaaaccaaggggcagtcgaggaaccaaaacacgagacagtatcctcatctcatgggtctgcaaacaccaacttccccatcagtttactcagctaatggaatatatcggtatgatggcagctatggacctagcctttggtatggatcacacatgtatagttctgggttatatggtggatggaattcactgtatgatgggaagtacagaaccagaggaagatgtaataatggctattatgcttatggtaatggaagccttgatggctttaatgagctgaaaagagggccaagaagtgggatgtacacaaaccagctggggcttggagctactactgaagtaccagcaaaagagcaggaccttctgtctgctaatggttcacatcctgccatgaaggaccagtataatcgggctgactttgcggaaacatactcagacgcaaaattcttcattatcaaatcatacagtgaagacgatgttcacaagagcgtaaagtacaatgtgtgggctagcactccaaatggtaataagaaacttgatgctgcctatcaagaggctaaagaaaaatcaagcgaaactcctgttttccttcttttctctgtgaatgcaagtggccagtttgttgggcttgctgagatggtgggtcgtgttgattttaacaaaacagtagatcattggcaacaggacaagtggactggttgtttccctgtcaagtggcacattgtgaaggatgttccaaacagtttgctgaagcacatcattctcgagaacaatgaaaacaagccagtgacaaacagcagagatacacatgaggtgaagcttgagcaaggccttcaagtgcttaaggttttcaaggatcatgtgtgcaagacatctatactggatgactttggcttttacgataatcgtgagaagatgatgcaatataggaaagcaaagcagcagcagtcactgaaaaaggtcatcgatgtgaaggtgcctaacgccactgacgcagatacaagtctcgtaggaactggatcaacggaactcaccaatgttgaggctgatgtcttgaacaaagagctttcattagacaaagcagtagagaaaaacgaggagaaaggaaatgatgtcgccccacaggacctgaaatcatcagctgagaagtcggcaagcccaaatggctgttaatttttttttttttggttagctcggccattgacagtggtatggggcgggaacctgaggctgggggttgtttgaggaaatcctgagatcccattgagcttgtttcttgcccttgttttctatagttcatagaggattagttagttgcttgtgtgtttgggtgataggtgaggtcagtgtcctggcatggcaggtatttaggaatagaaggacgattaactggggtttacaatggtggttcatgggtttgaggttgtgtttccatctatttgcctttcccctctctatattccagttcctacctctctagattctggacaaacgtagtgcttatttaatgctggctggtttaagaacctgaaatggacaaaggaatccaatcaagtgtttacaaacttccttccctgattacattatgtgaaaaccgtctactctcaaacttgtacagctgtctgctatctgttgtgatccgaaccactatgttgagaagggcctgttgtatttgcattgcgtgaccggcttgtaaattcccatgttaatgttcacctagaacaaatgcatcactcactatgcttacaacaatttattttggaagaagcgtccttggtattttcacaaactgtcagtatgactggatctggctaatcccagcgtagtatttaatgttaaaaaaataagagaattgttctgggaaaagagaaaaggaacacagccttacagatgcaagtggaactgaagctaaaacttgagcagtaataatatgcgcactaattactggcaggtgaattcatctgcctgacccttctcttcactgactgcagcagctgtcacagctgatgaattcggatgccttttgttcataaaaggcccgtccgcccgttactggcccaactagtgcgaagtaaccctaacaaaacaggcaccgatccggctctcctccgtgactccgtcccactgcccagccgctgtgcgttcgcgctctctcccacactgtctgcga

SEQ ID NO: 15777 - DNA, 422 bp, Zea Mays
ttgaattcgagtccaatcggtcgattcgggcgaaccgcctcacccggcgggagctcgaatccggtggaatcgacgggctccggtcgggctcgattgggggtctgggggctgggtcagcggagtgggctccgcggcttggacccgatccgaggtggggcggaggcggagagagagaaatttatggattcagcgagagggagagagatcgcagctgggtgagcagggacaggggcagggcacagcagagacggcgagggaggtcgggtcgagagatggggagagaggggatgatgtctcgtctcgacttgtcctggcaggccagggatgagagcaaaggggcaaattcgaccatgcacagtgaccgcagccgcaggggacctccttctgtgcctgcgcggcgacgccgtgtcgccgttcatgtg

SEQ ID NO: 15778 - DNA, 460 bp, Zea Mays
atgcctggacagtttctctctctcgcttcgatagctaatttcgccgtcacccgccggacagacacggaggtacaggagcgagggggaaagtgggatggtagtgggggcatcatcggtgtccggcgccgcggcttccggaggtacctctggtacggctccgccgcggaaggggaagtcgtgcaagggctgcctttactactcgtcagtgctcaagtcccgcggctacaacccaatctgcgttgggatcccccgttccatcccccaagttcctaactacgtggtggatgagcctaaggaggacgcgacagcgcaggggcatgatctcaggcggttcaggtacgggtgcgcgggttactccatattcgtgaacagggacggccaaggtggtgagggcgagggcaagacgttgttgccgtattgcaggggcctcgaggttttgccaacattctgacaaatcagc

SEQ ID NO: 15779 - DNA, 1453 bp, Zea Mays
cccgaaagaggactactatgatgagttcgatgaaatctaggaaactcgtttgctaagatggaagagggcaatgactactatgttgttaggaaaggtgatgtggtggcagtttacaaaactctaagtgattgccagggtcagatttgctcttcggtatctggtcctgctgcaagtgcctacaagggtcactcttggagcagaggaaaggaggaatacctgtcttcacggggactaagtgatgctacatacgtaatcaatgcagccgaactcagggaagatatacttggcccccttgtgccctgtagtttccaggacatacttggttctagttcaaatcaactggctccaaatcatataggcttccataatgttatagcatctcagactggagcacaatatgttgatctgaaccatgaagccagatctagttcatccagacatatctcaccagcaaatttcaatcataccggaactgttgatgcacaacctatctcaaaacaatacatggtgggtattcttcattttgatggtgcttcaaaagggaacccaggtaaagcaggtgctggagctgtgcttatgactgaagatggaagagtgatatctcggcttcgtgagggtcttggtgtcgctactaataatgttgctgagtatcgaggcctgatcttaggactgaaatatgcgattcggcatggattcaagagaattaaagtacatggggactctcaacttgtctgcaatcaggtgaatggtgtttggcaaacgaagcagccgaatatgatggagctgtgcactgaagcgagaaagctaaaagagaacttccattcctttgagatcatccatgttcgacgggagtggaatgctgaggcggatcgtcaggcgaacatcggtatcacgcttgcaagtggcgccgtgtttgaggagcgtggtgacatctgatacatagctagcaacgtatgtatttaactaactagcttgacctttgacttgcacctttgtcgagcttctatgctgctctgcagcagccatcaggagctgaggtgatggcctgccgtctagtaggcactatatccaattactttacactagttggacctatttcaccatcaagctgctacggaagcctgatttctgctatggggcctcagtttgatgtgaaactgtgctttggaagcttgatgttgctcgataagttgatctatgaatggagaattttaatttgtcagctagcctttagatcgctatttagattttggatttgaacactctttgaactagcatccttaggctatcttcaacaccttactcataatcatactcatattcaaactttattctgtatagtggaaaacagtggtgaattcacggacatggtctaacgtttcatgccatgaattttggtagaattaacatattccttttgcatataaaaatttgagtaaaaatgtattaacga

SEQ ID NO: 15780 - DNA, 1967 bp, Zea Mays
gacgaatcctcctgggtcgtccgatacgatactccgatgccggcgtctggctagccggtctcggcgtggcacaccgcgcgcctgcccttctctcatcctttaaatacggccccggccagccggccttgccatccatctatccatcaccaccacctcctcctccttcccacgactcccgagcgctttctccgcctgcgtgtggcggcagcatggcgactgcgaacgggagcagcaaggggccgttcgaggtgcccaaggtggaggtcaggttcaccaagctcttcatcgacggcaagttcgtcgacgccgtctccggcaagacgttcgagacccgggaccctcgcaccggcgaggtgatcgccagcatcgcggagggaggcaaggccgacgtcgacctcgccgtcaaggccgcccgggaggccttcgacaacgggccctggcccaggatgacgggatacgagcgtggtcggatcctccacaggttcgcggacctgatcgacgagcacgtggaggagctggcggcgctggacacggtggacgccggcaagctgttcgccgtgggcaaggtgcacggcgcgacgctcaagatggcgcagcggatgcacgggtacacgctcaaggagcccgtgggcgtggtgggccacatcgtgccctggaactaccccaccaccatgttcttcttcaaggtagggcccgcgctcgccgcaggctgcgccgtcgtcgtcaagcccgccgagcagacgccgctgtccgcgctcttctacgcgcacctcgccagggaggccggcgtccccgccggcgtgctcaacgtcgtgccgggattcgggcccacggccggggccgccgtcgccgcccacatggacgtcgacaaggtcagcttcaccgggtccacggaggtcggccgcctcgtcatgagggccgcggccgagagcaacctcaagcccgtgtcgctcgagctgggcggcaagtctcccgtcatcgtcttcgacgacgccgacctcgacatggccgttaacctcgtcaacttcgccacctacaccaacaagggcgagatctgtgtggccggcacgcgcatctacgtgcaggaagggatctacgacgagttcgtgaagaaggccgccgagctcgccagcaagtccgtggtcggagacccgttcaacccgagtgtcagccaaggcccccaggttgacaaggaccagtacgagaaggtcctcaggtacattgacatcgggaagcgcgaaggcgccacgctggtcaccggagggaagccctgcggcgacaagggctactacatcgagcccaccatcttcacggacgtcaaggacgacatgacgatcgcacaggatgaaatctttgggccggtgatggctctcatgaaattcaagaccgtggaggaggtgatccagaaagcgaacaacacccggtacggcctggccgccggcatcgtgaccaagaacatcgacgtcgccaacaccgtgtcgcggtccatccgcgccggcgccatctggatcaactgctacttcgcgttcgacccggacgcgccgttcggcgggtacaagatgagcgggttcggcaaggacatgggcatggacgcgctcgacaagtacctgcagaccaagaccgtcgtcactccgctgtacaacactccatggctctgaccgacctcatcctgtccgatgaacagttcaacatcacaaacaagaagaaacatgtcttgtaagatactcctccaaaggatcggttgcctgtacctgtactcttacacctgcatggattgatgatgcagtgcaatgtagcattcagaacaataaagacatgtttcggactgctggtgtctgatcggttgaagagcatgtttcagtattactatttcttttcaccgacaaccgcgttggtttcttgtgaacattttttggtgcctattttcgcgataggaacttatggcaatataatgcttggcatatcat

SEQ ID NO: 15781 - DNA, 882 bp, Zea Mays
gtcaagttcataactgtggttagattattgaaaagaaggtactattccatgtatgggcatgttggcaaactagctgaagagatcaagaaaggtgccttatctgttgaaggtgttgaggctaaaatatggcaggtccctgaaattctctctgaagaagtgcttggaaagatgggcgcgccccctaagcccgacgtgccagtcatcacaccgcaggaacttgcagaggctgacggtatcctctttgggttcccgacaaggttcggaatgatggcagctcagatgaaggcgttcttcgatgccaccggtgggctctggagggagcagagcctcgctggcaagcctgccggcatgttcttcagcactggaacccagggtggtggccaagagactacaccgctgacggcgattacccagttgacgcaccacggcatggtgtttgtgcccgtgggctacaccttcggcgccaagctgttcggcatggaccaggtccagggtggcagcccctacggcgccggcacgttcgccgccgacggctcgaggtggccgagcgaggtggagctggagcacgccttccaccaggggaaatacttcgcgggcatcgccaagaagctcaagggctctgcttgatctgcacatacccctctgtcagatatcataaaacatttacagattcgtcatacccgtcaccgtcaatagattggtctgtgttctctcgtggtgcctcgatgctatgtagttcattggtactgctgccgtatgaatttcgatgattgctctggtgacttggtttgtaatttggagttggactatcgttgtttctgccgcataaatttcgatgatttggtcaagtaaacgacttgcaggcttgcagctggttgatct

SEQ ID NO: 15782 - DNA, 2723 bp, Zea Mays
tttgtcctccactccacttcccctcttcacgagaggagagagagagagagagagagtgcgtgcgaatgcggagttactcggggactggtacgagcggagcaggggtgggcggtgggggaagcgagtggaagattgggagccaagagcacggagagtgccccgggatcttcacctcccatcattcgagtgtggagtttgtcctacttccgggagttgcttggcttggtggcgcccagaattagtctggaagcagggtggagtgctgtctgcgcagaaatctgctcaccgggtgccaggaaacaggtggctgtagagaattgcttggggattcgtcaagaaacgacccagtaggtggttgtgcacttgttatgctgagactgaatggaggctgtagacaagattgctgagcccaaagacccttttgtgctcactgcccagaaggttcagagctcggagccaccgatacctataaaggcgtcatgtgaagggaatgactcccaacagcaagaagagacggatttgccagatgatggcgaagagagcttccggagcatggattcctctgatgaaggtgtccggagctccttctctggggctagtcaccctccagagcctattgacatggatatcatgaagacagtctatgttgcaatcgacgagaagtccgagccaccggttagtttagtgcgaggagtctcggtgaaggggcctttcatagatgacctctcgatccgtgttacaggcgcaaaggcaaatctggtggtaggtgcaggcggtgctgaaggtatggctgaagagaggaaggtatctgcttctgcagtggcatcagtcaccacagcaaggtcgtctcaggctacctctttgcctcaggactcggaggagaaggagtgcgtctgggacgcttcactccctccgagtggcaatgttagccctcacagtagtattgacagcatgggtgtggtcactgctatgagcaccctcaacagctgcacgagcacatataaaagcgagaccatagctggtgaagcaatgctcaatgtggagaggaactgtgagagtgtaaagggtgttcgaggtgacttactagaaagtgcaaaaaccagcatgagtcgagcaagtgatagcagtgttgttagtgatgacagcagctggagccacatcactggaggtgccagcaagcctcacaaggggaatgatcctagatggaaggcaattcatgctgtacgaactcgtgatagcgtgcttggaatgagccattttagactactaaagcgtcttggttgtggtgacattggcagtgtttacctctcagaattaagtggaactcggtgctactttgcaatgaaggtaatggacaaggcatccttggcaagtaggaaaaagttaaatagggctcaaactgaaagggagattctacagcttcttgaccacccattcctcccaacgttgtatacacattttgaaaccgacaggttctcttgtttggtgatggaattctgtccaggtggtgatctgcatactttgcgacagagacaaccaggaaagcatttctctgagtatgctgcaaggttttatgccgcagaagtacttctagctctggagtatctacacatgttgggagtggtctatagagatctgaagcctgaaaatgttcttgtgcgcgatgatgggcacataatgctttcagactttgacctctcgctgagatgtgcagtctcacctacactcatcagaacatcagctttcgattctgatcccagaagagcaggtggttctttctgtgtacagcctgcttgcatagaacctacttcagcttgtatccagcctgcgtgcttcctccccaaattcttcggacagaagagcaagaagaagactcgaaaggcaaggtctgagttgggacataacgccggcaccctgcccgagcttgttgccgagccaacatcagctcggtcgatgtcatttgtcgggacccatgaatacttggcccctgaaatcatcaaaggcgaagggcacggaagcgctgtcgactggtggaccttcggcatcttcctgcatgagctgctgtacggcaagaccccgttcaaggggtcagggaaccgcgccaccctgttcaacgtggtaggccagcaactgaaatttccggagtcgccgtccacaagctactcgagcagagacctcatccgtgggctcttggtcaaggagccgcagagccgcctgggcgtgaagcggggagcgacagagataaagcagcatgccttcttcgagggtgtgaactgggctctcatccggtgcagcactcctcccgaggtcccgaggcctgttgaggccgagctgcctgtgaagtatggggtggcggaggcgatcgggagcaacagcaagcgggtagtcggagcagacgtgaagtcggccggaaaatacctggactttgagttcttttaagagcagtgcgtgcccagtggcagctattgtttgcgtactgtccgtgtatggtcggttttgatgtttgtgtgattcgatatggtgatttgtgcctcgccgtcgatgcacaattgtcaggtttgaatcgaccaaaattaggtaggtgtgtgttgccatttgcctgctttggcacatttcgagtttatgtatggaactatgtatagagtatgcattgcaatttgcagcaaacctgaaaagcagctaagaaggccctttcctccttgtttatgcaatgcatctgttcc

SEQ ID NO: 15783 - DNA, 1693 bp, Zea Mays
agtagacgccagcactgtcgtcagcaagccccatccgcccacccgcttttatttatatctacgagaacaacaaacacatagcggcgaccggcgacgagcggaagccttcctccatcttcaggctgctagtactcagtagtcagtacagtacagtggtgccgacgacatgacgaagatctcccgctcgttgctcgtcgtcatcgcgctggtcctcctcggccctcacctcccgccatccgaggcgctgacgcccaagcagggcgtcaggtccaagaccttcctgtccccgcccatcctgcttcgcccgggcgacgtggccgacaagttctactacgacatccccttcccccggggccacctggcgctcaagagcttcaacggcgaggtggtggacgagcgcggcgcccccgtgccgctccacgagacgtacctccaccactgggtcgtgcagccctactacgccctggtagtatcggcggagggcggcagcagccggccgcggaccatcccggcgcgcaacgccggcgtgtgcagcggccacacgctgggccagtactacgggctggggtccgagacccggcgcacggccacgtgggtgcccgacccgtacggcatcgagatcggcgacccggccgcggcgcccgccgagggctacgagcagcgctggctgctcaacgtgcacgccatcgacacgcgcggcgccgccgaccggacgatggcgtgcaccgagtgccgctgcgacgtgtacaacgtgacggcggactggcgcgggcacgccatcgagcccgggtacgccggcggcctgcgctgctgctacgacggcacgcggtgcggcgccgcggcggagggggctgaggggaaggccaggactgtgttcctgcgctacacggtgatgtggcgcgactggagccccgcggcggtgctgcccgtgcggatctacatcttcgacgtggccggctgcggcgtggagtacgacgtggaggagcagtgcagcggcggcgcgggcggggagtgcgtgcacgtgaagacggccacgcaggcgctgccgcggggcgggctacatcgtcggcatgtccacgtgctacccgcgcccgggcgccgtcacggtgcgcgacggcgagccgctcaccgtcgtgtccaggtacagcagcgaccggcgccacacgggcgtcatgggcctcttctacatcctcgtggccgaccacgcccggcagctgccgccgcaggagggcctgtgcttcagcttcccggtcccatggtgcctaccgtcatggctgtcgagcaacctgtgagatcttttggtgttgaaagctggtgctatgttctaattagctgcttggttagggttcggttcggggctggtgatggtagggcaaagcaaggaaggccgcgtgggtccttgcgttactcatacagtagtagtaatgtaaaaatatagaagcagcggtcagtctactctgctgttgctgtattatacaataaccacgtcgctccctccgtttgacttctccacgtgctgccgttgttgctcaggagtcaggagtctggacatgttcggttacatcggaactattctgaaactattctaaatgatcaattattatataaactaaattatcattctgaatcgctgtcggtcaaactcagcatcgacgtcgttaccatgttgacatgacatccggtggatttctct

SEQ ID NO: 15784 - DNA, 1786 bp, Zea Mays
gagaagggaaagcattctccaatatccacctcctcctcgcccctctctctctctctctaaaagaattgaaaagataagggggaaatcctcaagtgctcgttacataaaccctaacctcgttggattcgcagcaaaagcccaccaattggaagccctccgatgttccagctgcatgctggagctgagccgtgctcggtttgacgaaattttgcatcccttctgtgcttggaccacccgattgaggctgtttctccgagggggcgtgccagcggtttcgcggcccaggtcctcacctgtgctatccggcgccggatccgggtttgttccggtgagaggtcgggcttttggtggggtctgtccagcttggagctcaatttgccggcctgagttggagtcgcgactgcggtggcggtgattgaggtagtcgcgtcgatttgacacgcgtttcttcctgccatttgggtgagccagcctttcctggcaatcttggcgggcgtttcgtcttgctgcgtggcagaaaggtgtgacctttgtgccgtgcgatgcatcccaaggcacgaatccacgccgacccggtgcgcgaggtcgaccactttgactgcctgccggattcgctcgtcctgctgatcctgaacaaggtcgaggacgtgcgatcgctcggccggtgctacgccgtgtccaagcggctttgtgggcttgtcccccttgtccatgatgtgtatgtcaagattgaccgcgtcgtggcggtcgacggcgacgctgaggacgcgctcaacctgtcatcgccgaagcctcggaacatcttctcgcacttcctgaagctgatgctcttcaccatcatcaagcctttccacaacatgcgcaaccctaatggtactgggaggtcattgttcccgcagctctcgcaccactcgccagcgcaggtgctcaggaacttcacgcacatcaggaatcttcggatcgagctcccttctggggatgtgggtactgaggagggagttctcctgaaatggcgagcagagtatgggagcacacttcagagttgtgtgatcctggggggtacccgggttgaccgcaagcctgttggtggagagcatgagcagtctttggaggataatggaagcatgccagagtctttctataccaatggtgggctgaaacttcgtgtcgtctggacaatcagctctctaattgcggcatcaacgaggcactatcttctccgctcaatcatcaatgaccattccacacttctgagcttggtactgacagatgccgatggccaaggcacattgtgcatgggagcagagcagctgaaggagttcagagagaaccagttgtcggcctcagcatgttccaacaggactcaggtcccagcctgcaacatgaagctcaagtatgctccatatcttgaactgcctggtggtatggcgttgcaaggcgccactttggtggctatcaaaccctcacctgacggaagcaatggaagccaccctaaccgtaaagaagccgacgcatttgtctttggagcatttgatgggccatttaaggctgctgtgaaggctttgatgaagaggcgcacttaccttctggagatgaatggcttctagaaatcttgtggtatcgagcttgttggtgctatgcatggcatatttagctaagcttttcatctttgtaatatccaagaaagcaccatctctagttgctgcttttagtctgctgttttagctctttgtacagtgttaacatttgattatataaaaatcgtatcaagttctctaaaaaagaa

SEQ ID NO: 15785 - DNA, 330 bp, Zea Mays
tggacattgtaaatccaggggagcgaaggaaaggcaaaggagaaaatttcgtagcaataaataaataaataaaattaataaaagaaaggtggcgtagaggataggaggagaaccaaggttgcgtctcgaaggttcttgcctcgttgggaagggatggcgtcggaggtggaggacgaggcggcgacgccgctgctcgccaacggtgcagccgacgtccgccggaggagggaccaggcgaaggcaattctgtccacgcaggccgtcaggatcgccaccaaggccgagcagcatgagcgcttcatctttaagccgtgctccctttccttgtcg

SEQ ID NO: 15786 - DNA, 824 bp, Zea Mays
ggagcacaacaattccatgttctcttttgagtttcgaggcccgtgtatcagactttggacttgcaaagcttttagaggatgaagaatcacatattactacaatagttgcaggaacatttggctaccttgcaccagagtatatgcaatttggcagagccaccgagaagactgatgtctacagttttggggttttggtactcgaaatactcagtggaaagcggcctactgatgcatccttcattgagaagggactaaacattgttggatggttaaattttcttgctagtgagaaccgggagagggaaattgtcgacctgaactgtgaaggagtgcagactgagaccttagatgccctgctctctcttgccaagcaatgtgttagctcctcgccagaggagaggccgacaatgcacagggtggtacatatgctggagtcggatgtaattacaccgtgccctagcgacttctatgattcagagtagtctcctggacaagccacgctgctgctagtttcccgtgggggcgcattcctttattctttgcgtatattgtgtaaatgcattgccgcggtgtttggtctccaatcggctggctcaacgggtgacttttttttgcgtctgtatacctatgtatgtatctgtcatggtacaagttggctatatgctgatttaataataagagagaacttactagtagactattgtatgtttaactatagtctttagatactcgtagatgttgtgggatctacaaaagaaatggggaaataatgaatatcgcttggaacaaacaagaatagataaaactcttttggcttggaggat

SEQ ID NO: 15787 - DNA, 3401 bp, Zea Mays
atggtatcactctgctatttctgccccgggctcacaacgcggtcccggatgcccgtgaagcggtacaagaagatccttgctgaaatctttcccaaaacacaggatgaagagcctaacgagagaaggattgggaagctgtgcgagtacgcttcgaaaaaccctcttcgagtgccaaagatcacagtttacttggagcaacatatttatcgggacttaagaagtgagcaatacggctttgcaaaagttgtgatgttgatataccgcagactgtcagtttcctgtaaagaacagatgcctctgtttgcaagtagcctattaagcattgtccacacccttttagaccaaaagaggcaggatgatttatgtatcgttggatgcgaaaccttgtttgattttgctgtcaatcaggtggacggtacatatcagttcaatttggaagggctggtcccaagactgtgtgaaatagcacaagaagtaggagaagatgagcgagcaagtgccctacgagcggcagccctgcaatctctttcagctatggtctggtttatgggggagctttctcatatctcgtcagagtttgacaatgttgttcaagttgtactggaaaactacaaacctcagaagatgcaaaatgatgatcaaggtaccaatgatgccgacaaccagttggtgcaggaagaccagaaggctgagcaccccccttcccctttcattatcactccggccccctcttgggagagcatagttaatgttaagggaggagtcaacctaccagaggaagatgctagagatcccaaattttggtccagaatctgtgtgcacaatatggccaagctttctagggaggcaaccacattccgccgcatcttggaatgtttgtttcggtactttggtaacaatagttcatggttatcagaaaatggacttgctttgtgtgtcttgttggacatgcaacttttagtagaaagctcaggacaaaatatgcacttaatgctttcactgctgataaagcatattgagcacaaaacaatgttgaagcagccggacatgcagcttagcatcgtggaggtggcagctacccttgcagaacaatccagtgctatcgcttcaccaacaactatgggtgccataagtgatcttgtgaggcatttgaaaaggacattccatattactcttggcagcaaagatacggaattagtaaaatggaatgagaaattccggaagggcatagatgaatgcttagttcagctgtcaaagaaggtgtctgatgctgggccagttcttgacatgatggctgttatgctagaaaacattgcgagcactcctgttgtagctagatcaactgcagctgctgtttatcgcacagctcaaataattgcttcggtgccaaatttgcaataccagaataaggtgtttcctgaagctctgtttcatcagttgctgttaacaatgatacaccctgaccatgaagctcgtgttgctgcacaccgcatttttgccattgtcttagtcccatcttctgtttccccttcgattcaagccagtccatctagccgaccaaagaaacatgacatgcagaggacactctctagggctgtctctgtattttcttcttcagctgctatctttgacaagatgaaaaaggacaagaactcagaaaattcacaaggagaaagcaaggacaatagtatgcatagcgttggtgaagggaccggacaatcaaagagtcaaaaccttcacgtgtctcaaagccgccgtagcatgaaagctccgaatttttccatgaaaagaggtccttcaatggccatgagagctccttcagtagcgatcagagctccctcaatatctctgagaggtccttcaatgtctttgagagcatcttctatgtctgtaaaggaagaccaaagttcctcaaacaagtcagatgaggaaacggaatctgtgttggtgaagctgagcgcacgtcagatcacacttttgctgtcatccatttgggctcaatcaacatcccctgaaaatactcctgtgaactatgaagccattgctcatacttacagtttgcttctgttgttctctggatctaaggcatcaacttttgaggctcttactcagagttttcaggttgcattttctttgaggagctattcactcactgaagcagattcattacaaccgtctcggcgccggtcattgtttactctgtccacagccatgattattttctcgtcaagagcttacaatgtcttgccactcatcccgatctgtaaacaaatgatcaatgatcgtgcggccgatccgttccttcatttggtggatgagagcagacttacagctgttaaggattcttcaaatgatccttcaaaaatatatggatcaccagaggacaacaataatgcactgaagtccctttcagaaatagaactatcagaaagtcaatctcgagaatgcatagtctccacaatcatgaacaacatcgcaaatatgctggatgcggaattgcataatgtgagaagccaattgctaagtgatttcactcccgatgacatgtgtcctacaagcactcagttctttgaagtgcatgctgataacccttcatcagggtcttatgagactggtcaccatcaagagggcttgctgattgacctagggaatgaccatgatgcttttggggaagcttcagaaagcgcagaagcttccgcatcttctatacctgcatcagatcttctgagtatcgatcagcttcttgaaacggttggtgcagaaccagcacctcaggctggagtagtgtcagcagacattgggttcaaggatatgactagccactgcgaagccctgacgattgggaaacagcagaaaatgtccgccttcatgagcttccagcaaagcgtgcaagcggcagggctgccgagcagccagcccaaccagatggagctggacctttcccaagacccgcagttgcctcagaccggggcacatagcacgaacccattcactgatgacagccttcagggatatccacagtacacgaaggggcccaacggcgacaacgcacagccaggccaggacttccaacaacagtccctgaagttaccggcggcgagcccatatgacaatttcctcagagctgctggctatagccacgaactttccattccgcaggaaatcaaggaagaggtatgtccgtgtatgaggtcttagctagagactcaaccggattcgacacccattctttatgtatagctgtatatatgtataggttggctctttgctgctgctgctgctgctgtttttgccaatgcaacgagtagagggactgggggggagcagtgccttctatcacagactgtacatgtaaacatgttgcagaaatatatgaagaaaaaaaatgacgtttgaagaaa

SEQ ID NO: 15788 - DNA, 1403 bp, Zea Mays
gcggatctgtgatggtatgagatcggagaggtgcaacacttctcttttgattgactattgccaagatgaacgtgcacataagtatattataatagatgttgggaagacattcagagaacaagttctgagatggtttgttcgccacaaaatcccttgcgttgattctattcttctgactcatgagcatgcagatgcgatcttgggccttgatgatgttcgggtcgtacagccatttagtcccacaaatgatattgatccaaccccaatttatctctctcaattcgctatggacagcatctgccaaaagttcccctatttggtcaaaaagaaattaaaggaaggggaggaggttagacgagttgctcaacttgaatggaagataattgagagtgatattcagaaaccattcacaacttcagggctagagtttgttcccttgccggtgatccatggtgaagactacatttgtttgggtttccttttcggaaggaaatcaaaagttgcttacatatcagatgtttcacggtttcccccaagcacagaatatgcaatttcaaaatctggaggagggcaacttgatttgctcatcttggattgcctatacaggacgggttctcacaatgtgcacttgtgttgggaccagacactagatgctgttaggaggatttgccccaaaagagcactgcttattgggatgacccacgagatggatcatcacaaggacaaccaaacattggaagaatggtccaggagggaggggattgacgtgcagttagctcgtgatggcttgcgtgtctacattgatctgtagccgtgaaaggaaaatatgccatactcagcgaaccgcgccaggctttctggctgatgtaacatccattcccacttgtgaagaaagtgcaaactgactaaaaaggcgagcctatttggtgcatcattttacgtttcgctagtttatacgtgaatctctgaataaaaaagagaaaaagaaaagaaaagagagagagtagccacttgctagtagctggttcagtgccccggcaaattaatggccatctccctggtaaaggtagtcgaatgttcttgtaatcttgtcaattggaagctacactgcactggatgcatgcccaccagtcgaactgagcatgcgattttttttccctcggtcgcgcccgggtcatgtattgtagtataccgtaagaggaaagtcgattgagcatgttcgtggcgccagaccgagccacacgatctccaagactcttgcttgtgaagagcacgcagatgactcctactctaggttcaccaatgtttgtcgctcaaactttttaagtttgactagatttataaaatatattagtaatatttatatcttcaaataactttactataaaaataaattcaaaaat

SEQ ID NO: 15789 - DNA, 631 bp, Zea Mays
catgacccctcttcagataccatataaggctacttaaatgtgaagtgagatatgctacttcaagaatggagtatgccaaggcagcgccttcaaggacattcctggagggaggtatttcccagccgcgtcactgtatacgatgcctaacgagccaaactgtgtagtcaagttcaacttcgggccagattttgagttcttcccacaagatttcggaagcctgccagttcctcaaccaatgagcgaggtaactcatcaggcacttgaagtgaagaacgaggggcctaccgagaatggcatcgctgaaaaaactagctagtgtagttagcatgcttttgtataacttatacctatgttaacactaagcaagttatgatgtataagttagccgtagcagttatatctgactggattaatgcttgtgctgttactaaatgggctctatcttctccttgcctgggttaatggtgttattgtagtgctgctgatcgtggataattgttaactggttatgttatgtaagggcaacctgatcaacaattaatcatcgtctggtcgaccactaggtgacaaggtctgaccaagcgctcaagggatatatatattgaaaaaaaatcaagagatgagttttttt

SEQ ID NO: 15790 - DNA, 1241 bp, Zea Mays
gattatgcctttctagcacctcctggccaccaaagaagcaaaaatcttccaggttcccacccacacggccacacccactgttctacatgctcatgcatcctcctaatgtaacctgaagctttaagaaaacaaagtgctcccggaagactccaagctgcagctaccggccttcctctcccccattccaattccgagaacaggggcggcggagtcaaccaggtacgatgtgctcggtagcgaggctggcgtttgtgcttgcactggccatagccgcctcgtcaattgaggttgcggagagcagagattttaatatctttgctcagggcagcttgcctgatgcaaccaagggatcgtctggtctagctgcaaccagtggaaagttgtgtcagttatgcgagcagtactcatccgaggcgctcctctatctcacacaaaacgagacccagactgagattcttagcattctacaccatgaatgtgccagccttgcccctctcaaacagcagtgcatcacgctggttgactactacgtaccccttttcttcttggaggtctccatggttacccctgagaagttctgcgagtcgatgcatctctgcaagaaggggatgaagattagcctacccacccgggagggtacttgtggtttgtgccaccatgttgttgttgaaattcttatcatgcttaaagaccccaacatgcagctggaagtaatcgacctactcaccaaaacatgcagcaaggcgcagaactatgaacagtagtgcaagcggctggtcctcaagtatattccacttattctggtgaagggccagaaattccttgagacaacggatgtctgctctgtgatacatgcatgcaaagcaggcacacaagcatcaatggaagccatgcctctgtctgccatgttgtgaaggtgatgcgaatcagaataaggcttatttgcctaggagatcaaattggggagaaacgatgaaaagtcagatgactgttttaagctctcttcctctattgctgaaacactattgatcggtgaaaattcggctgtgtaaaaatcttgtgtaaatttgggggtatatccattgtttctctgaagtatacagcaactgcagctacatcaatctcttcggcattgggttgagaagttctaagcagtaattgcattttactgtaaaagaagtgatcaagggcacaacttgccttcaacgagctcctgctcagctatctctacttgttgaagc

SEQ ID NO: 15791 - DNA, 2963 bp, Zea Mays
caaatctccctctcccctggtcggtcgtctgtgtctcggctccgttgttgcgctgcgctgccattctcccccctttccaattccatccgaatcgagaggcgcctccacatccacctccaccgatcctcaaaccctagatccgccggccatgtccgcgcgaggggtgcgcccgggggtgctgcaccacaaggagaacaatccggcggacgcgcagcctggaaagcgccagcgcaccgccgctggggccgggaggcagccgctcgccgctgcaccgccgccgcaggaggagcccatggtgttctcgggcagggaggacgtcgacgctctcctcaacgagaaaatgaaggggaagaacaagatggactacaaggggaagagcgagcaaatgatggaatacatcaagaagcttcgagcctgtaccaaatggcttcttgagcgggaagatgcaaatcttgttgaaatcgagaggatcactggtcagcttgacgcgacacacaagcaacactctgagatagtggctgtcttgaagaatactattgaagaaacaaaatcaatatgtgaggaacttcaaaaacaatgtgcatctctacaagaggctctaaagacagtggaggctgaaaaaatggatgccctgaggtctctaggagatgagagggaggccaggatgggtgtggaatctttgcggaatggacttctagaagatctgaacagggcaaagttggaggaaaaacgccttaatgatcagattaagatgcttcaggacacaaataaaaggcttcaagaatataacacaagcctgcaacaatacaattgcaaccttcaagcagatgcaacaaagaatgcggaaacaatagtaaagctgcaaaaggagaagaacactatggtcgagacaatgaatggtctgaaagatcatgctaactcagtaaaaatgcaactagacattgcaaggtctttgcaaaatgaagccacaaaacaaaagaccgatttattaaaggaagttgaaagtattagaatggagcttcaacgtgcaagggaggaccgtgacactaaatctgctcaagtagattctttgctggttgatattggaacatacaaagaaatgactggaaaatccgtcattgagttagatagcgccatggcaaaaacctctgccctagaggaaacatgttcgtctcaaaggaagatgatagagacattggaaattaagcttgcagctgccaatgaaaagttaaagaggtctaatatgacggcctcggaaaccatgaccgagtatgagaacatgaagaaaatgctggaaagtgttcagtctcgccttgaagaggccgagcaaacaattctggaaggagagaatttacgaaaaaagttacataatacaattcttgagttgaagggaaacatctcaacttgtccaaagtgccctagatggctataaggtctgcatatttgcctatgggcaaactggttctggtaaaacatatacaatgatgggcaaccctgagttagaagatcaaaaaggaatgataccacgatctctggagcaaatttttcaagctagccagacacttaactcacagggttggagatataagatgcaggcctcaatgttggagatttacaacgagactatacgcgacttgctagcaacgaatcgcatggctgttcaggatgttggtgcttcaaagtacagtatcaagcatgatactaatggtaacacgaatgtgtcggaccttacgatcattgacgtaactagtatcaacgaagtttcttctctccttaggcgggctgctcagagcagatcagttggtagaacacaaatgaatgaggaatcatcaagaagtcactgtgttttcactcttcggattttcggtgtaaatgagggaacggatcaacaagtgcaaggagtgctgaatcttatagatctagcaggcagtgagcgcctgaacaaaagtggtgccacgggtgatcggttgaaagagacagtggctatcaacaaaagcttgtcatgtttaagtgatgtcatcttctcgattgcaaagaaagaggaacacgttccatttcggaactcaaagctgacatatctgctccagccgtgtctcggaggggactcgaagacactgatgtttgtgaatctgtctcctgaagcgtcctcgacaggggagtctctttgctcattgcggtttgctgcaagggtgaactcctgtgagatcgggatccccaggcgccaaacccagatgcggagctcacaatgatgaaatacggcggaagcgagctgccagtgtaatgcttgtgtgtgtgttgatttggtgatgcaaccgatcatttgcatccccttgtctggaggtggtgtgagttgccaattttatttggtttgtggccttgttgattgcgctaacggctggcagcggtgggtgtgctggcctattatattaatcttaggacctgatctgatttgtatgttgggatgtgttgccattttcaatttttttgctttcattcgtagtcttgatttgtcgtttgcccaatgcccaatgcctctgagctgagctgggcgtgtatgtaaacaactgtgtacccgttgtcggacacgcacacagcctgacatgataattgtatttccctgctctgggaattctgcaataccccttgtgagtttcaagtattcatttacacatcatgatatatgaatgaaaaattgtggttctgctaggccatcttggccatgagctcctggaggatgagctttgtctcggcgtagcggtcgccgatcctggcgtcgtccttggctgtgacggcctcctggagcgtctcgaagctgtcgaagaggcggttggcgaggtcgacgaagggcggcttgtcttcggcggcggagatgagcttgtcgaagtcgtagtacatgaaggtggacttgaggcggaggtacttgttgacgtagttggaggcgtccttgcccagcagccgtcgcc

SEQ ID NO: 15792 - DNA, 1684 bp, Zea Mays
catttttgggcagatgtgttttcttccacttcgatgttgctcttgtaacatcactgagagatgggatgaaccttgtgagctatgaatatgttgcatgccaagggtctaagaaaggagttctgatacttagcgagtttgctggggcagcacaatcacttggagctggtgccattctagtaaacccttggaatattacagaagttgcagactcaatacggcatgctttaacgatgccatccgatgagagagagaaacgacacagacacaactacgcacatgtcacaactcacacggctcaagattgggctgaaacttttgtatttgagctaaatgacacggttgctgaagcactactgaggacaagacaagttcctcctggtcttcctagtcaaatggcaattcagcaatatttgcgctctaaaaatcgtctgctcatattgggtttcaattcgacattgactgagccagtcgaatcctctgggagaaggggtggtgaccaaatcaaggaaatggaactcaagttgcatcctgacttaaagggtcctctgagagccctctgtgaggatgagcgcactacagttattgttcttagcggcagtgacaggagtgttcttgatgaaaattttggagaatttaaaatgtggttggcggcagagcatgggatgtttttacgcccgacttacggagaatggatgacaacaatgcctgagcatctgaacatggattgggttgacagcgtaaagcatgtttttgaatactttacagaaagaaccccaagatcccatttcgaacatcgtgaaacatcatttgtgtggaactataagtatgctgatgttgagttcggaaggctacaagcaagagatatgctgcagcacttgtggacaggtccgatctcaaatgcagctgttgatgttgttcaagggagtcgatcagttgaagttcggtctgttggagttaccaagggtgctgcaattgatcgtattttaggggagatagttcacagcgaaaacatgattactccaattgactatgtcctgtgcatagggcatttccttgggaaggatgaggacatctacgtcttctttgatcccgagtacccttctgaatccaaagtaaagccagagggcggctcagcatcacttgaccggaggccgaacgggaggccaccatcgaatggcaggagtaactccaggaacccacagtccaggacacagaaggcgcagcaggctgcatccgagaggtcatcctcatcaagtcacagcagcacgagcagcaaccacgactggcgcgaagggtcctcggtccttgatctcaagggcgagaactacttctcctgcgccgtcgggaggaagcggtccaacgcccgctacctgctgagctcgtcggaggaggttgtctccttcctcaaagagttggcgacagcgacagctggcttccaggccacctgtgctgactacatgcatgttcttggataggcagtaaatagactgaagttgaagcctccgtgctttaccagagacagagagaagaagaatattcattcctcgtatgcgcgacagagctacacccgtagctagtcagcgtgctgtacaatcatgtacaaaatttatgctcgtgataaaactgcgagaggggagctagcaaatgggaaaggataaaggagtttagttgcttctggtacgag

SEQ ID NO: 15793 - DNA, 2331 bp, Zea Mays
ggtgggagcgggtgtctcagtcttcatgaatcgcttctgctttgaaaagagggattggatgactgtgcagccaaacgagctgcctcatggatcccaactaattatgggtcttaatcctccttttggagtcaaagcaagtcttgcgaacaaatttattgacaaagcattgacattcaagcctaagctcattgtactaattgtccctaaagaaactaaaaggttagatcagaggagaacaccttatgatttgatttgggaggacagtgagtgtctttctggcaagtccttctatttgcctggttctgtggatcttaatgataaaatagttgaagggtggaatgcatctgcgccacccctctatttgtggagtcatcctggttggacaaagaagcacatgcaagtggctgaagagcatggtcatacttgtatggggaagatagcttgccatgttgaagagagtaatctatcagatgacctgtccgtgaggaaacaatctgatgctacaaacaaactgaactcgagatcagggaaagagactccattcaatgacagaatgtccaatctacttgatgatggttctgctaggaagcaagcaagatctgaagaagagaagagaactctagggaagatagaacaccatgtgaaaaaggctaatataccagataacctcccagtgaagaaagaacctgaagcttccagcaaagtcatgtcgcattctggaaaagatagaaagattggcagatacaacaggaggagacatgacaacaggagcagcaaggggacacctgatcacacagagagcctcccccctgaaaagcaagtggaagttgcatatgaggaaacaagagttattcctagcaaaaagattgctcataatgaaaaaaagagcgcgcagtacaactacgagcaaactgcagcagggatgccaaacatgaggtctagaggaggggattctgacatgagtatctcacccccagtcagttgcaatgctcgaagcaaacccatgagctattccctgacgagaccaattgaacacttggatacgaatgctcaccttttggcagaagaacctagtgactctgtgctcaatagggttccaaatcatgacagttatttggcaatcaaagaggaatactgtgatggatttaagaggaaaaatgatcctatcttcagtcacattgatgatagctcaaggatgaggggctccagcatcgaagaagtgaccaagccgtatattactgctccaaacagtgatccgtggtctaaaggagatggcagcttttacaggcatccgagctcagaagatttaaacgctaatgctgatgtgcttatgccaggatacagtgcaagatatggacaaattggtggtgacagtaacccacaagctagtatggtcccactagcaacagattcaagactgcatggtggaacggttgctgataattacctctcggcaagatactcccttggatcttcaggtgctcgcgttagccaaccagctccaactgttcccccttttgggctctcaggtgcaagttcacaacgaggctcagtaatggacaggtattcgtatgggctttcgggtccgactggaacacagcgctcagttattgacaggtatgcgccgtccctcgatggaacgaacacaacaagatcgaggagctccttgcctgagcagtacccgttcggacaacctggctcttccggtggcgggtggcctcatcactgatcgctggaacttggtcctcagatttgaccagcaaaagtgcaaccgatttcttgagtccggtggagcctacaacctatctacggcctaactttttggatcctactagtcgtttcttcctggcgccttcgacgaagacatcacctgtgtctaccaatacagaagtgtagacttcaattcctacaaatacagaagtgtaggcttcaatcctattgtttgctctggatttctgtttatgagcgtatttacaagagtatgtttggtctatgttagtatattaggaatacaattccaaaaccgttgtaccgtgccaaagtttaatactatacgtttgggtctgtcgatgagaaaaaaggacgagtgggtgagaagatgctgccctccgcagaactcgatcaggccggttcctctgcgcgtcctgctatgagaggctaacctgagcccgacagaaccggcttggtcgatttgggacctggtaggccggtatttttttattgaagtgtaactttctaaattaggtcttgttggtttgcgttggattgcgtccggaatcgtttcaagtttatataaattagagaagcaatccggttagaaatcgtttcgat

SEQ ID NO: 15794 - DNA, 1934 bp, Zea Mays
gataaatagcaggccgcggacacagccgagacctttccatttccagagttccaaggcttcccttttaccccttcgcttcccatggcgccgtgggtgtgggtggcgttgcaggcggccgccgtggctgcgtccgcggcggaggcgctgagcctggacgtccaccaccgctactcggccaccgtgcgggagtgggcggggcaccgcgcgccgccagccgggacggcggagtactacgcggcgctcgccgggcacgacctccgccggcgctcgctggcgggagggggggaggtggccttcgccgacggcaacgacacgtaccggctcaacgaactgggattcttgcattacgcggtggtggcgctggggacgccgaacgtgacgttcctggtggcgctggacaccggcagcgacctcttctgggtgccctgcgactgcatcaactgcgcgccactagtctcacccaactacagggatctcaagttcgacacttacagccctcagaagtcgagcactagccgaaaggtcccatgcagcagcaatttgtgcgatgaacagagtgcatgccggtcagcaagcagcagctgcccctacagcatccaatacctgtctgataacacatcatccaccggtgtgctggttgaggatgtcctgtacctggtcacggagtatgggcggcaacccaaaatcgttacggcccccataacgttcggctgtggacggactcagacgggttcatttctgggcactgctgcacccaatggtctacttggcctgggcatggacaccatatcggtccccagtttgctagcaagtcagggagttgctgctgccaattccttctccatgtgcttcgcacaagatggccatggtagaatcaattttggggacactggaagctcagatcagcaggaaaccccgttaaacatgtataaacaaaatccatactacaacataagcatcactggtgctacggtggggagtaaatccattcacaccaagttcaacgctattgttgactctggcacctctttcacagctctgtctgatccgatgtacactcaaatcactagcagcttcaactcacaagtccaggataagccaagccagcttgactcttctctgccctttgaattttgctactctataagtccaaaggcttctaccaatcctccgaacataagcttcacggcggaaggtggaagcgtgtttcctgtcaatgatccaataattaccattacggactctgtatctaatccgatggcatattgcttggctgttatgaagagcgaaggtgttaacttaataggggagaattttatgtctgggctgaaggtcgtgtttgatcgagagaggaaggtcttgggctggaaaaactttgattgttacagtgtgggcaactcaagaagcaaccttccagtgaacccaaatccttctggtgttccccctaaacctgccttgggacctaacagctacactcctgaagctaccaagggcgcctcgcccaatggcacccaagtcaatgtcttgcagccttctgcaagtttttcgccgaagctgcgttgcaacagaaacgtcctcgtcgccgctgctctgctgttcctcgtgatcctttgatcacctcaactccccatgacaatcttttcagaaaccaaatcgacagatatgatagattttagttaaacttggtttacgttgtatgtattgagttacgtatagtgtgatagtatcacattcttttggcctgtgtccacagttccagtaggagttaggatagaacacgggatgagtccatagccctttttttttgcacgttcataatgtacctggtggatgtactgtgtacatattagatatgacttcaggatgtattgattttatagaataattgaataacgatgctcgcatacacagatatatatacttcgcattgcttc

SEQ ID NO: 15795 - DNA, 5405 bp, Zea Mays
atggggggcgggagacgcgcgacttggcccttgtgcggggtggcgaggatggagctcgtcccggacctggcgagcacgtcgcagagcgggcggggactgcggagggcgggcgggcggatcatggcgttcgcggctgtcgcggcgggcaggcaagaagggagcgcgctggcgtccgtcatcggcgagggctctggggctgcgacggcaagcgggagcccgccgatggatcgctgccggaagaggcccgactccgaccccgaaggctgcagcgaacccgaaccccccgccgataagcgcccgtgcacagcggaaccctcgacctccgcggccgcggtcgccgccgctcctccgcccggcgcgcgccaggctgagcagggcggctcggatatggacacctcgtcgtccggccaccacggcgatgctgatgtcgacgcggatgatggggacggtgatggcgatggcgatggcgatggcgatggggggtcgtcgtgcgagtcggatggggacgggagcccggggccgcgcggcagcgggggcgggaggttccagcggatggtggacgcggtggcagacgatggcgcggggcaggacgcgctgttggcggcgctcacggagctctgcgaggcgctatcgttctgtacggaggacgtcggtgggtacttccccacagaggcagccgcgcgagcgctggtgcgccgggccggcggcggcgatggcgcgggtactaccccggacgtgattctgctgtccgtacgcgccatcacgtacctctgcgacgccatgccgcgtgccgctgacgccgtcgtccgccacggcctcctccccgtgctctgctcccggctgctaaccatcgagtacgtcgatgttgctgagcagtgcttgcaagcatttgagaagatatcacggaggcagcctacccagtgcttgcaggctggcatgatcaacgctgtgctggcattcattgacttcttcgctgcaagtattcagagggttgcagtgtcagctgtcgcaaatgcctgcaaaaaggtcccgtcagattgctcccaatttgttctggatgcggtcccaactctctgtaatcttctgcaatctgaggacaaagtgatagtagagaaggttgcagcttgcctggtaagcattgcggactcctttagcacttcggttgatcttgtcgatcatctctgccaccagggtgttatggagaaggtcctacctttgatccacactggtggactcacggcccttagcccatcgacatgtagtaatctgattgggcttcttgctaagctagcctgtacttcacttgtggcagtgaaatctctgtttgagctgggtgttagtagcacaataaaggggattttgatcacttcagacatttcccatggcatgccatatttgcctctggaaaaacaaaacaatcaggtcaatgaagctcttaaactagcaaaccagttgattccttcagcagcaagggatgttgaagacacccagatcatactagcgaaagaaaaaatacttacggatgaaccaaggttcttgtgtcaattctctagggatattcttcctgtcttgatcaaggcggtgaactctggtgccaattcatacatttgctatgggtgtgcttcaattgttaacaatatttgttacttcagtaaatcagaaatacttcaggacttgctcaaggaaacaaacataccaagcttcttggctggtttattgtctagaaaggatcatcatgtgctgacctcatcactaaagatagtcgagattctcatgcaaaagcttcctaatgcataccttggtttctttatcaaggaaggtgtcgtcaatgcagttgaggcgcttcttaatcaacaggattgttcaaaatccacccatatgcctgataacatgcaacaacctgagactcaacctgtcataagaaataagactacatgtttctgctacgcatttgatgcctgtagatctgaagctgctgaaaaaaggacttgcaggattgggaaggacagtctttttacttttgccaggcatgtgaagacaacttactttactaaggatgtagtgagctctgagatggggttaactgagattttgcagaaactcaaaaattgctgtgcagttttgaatgagaccacagacaagtcatctgaacaatgcaatcttcaaaatgaagaatacttatctaccattttaagtgaggtgatgatggagcttcatgggggagaaacaatgacaacctttgaatttcttgagagtggattggttaaatctttatcaaattacctctcaaatggcaagtacctccaggtggaggacaatatgggttgcagttctgaccatcttttggctgtggtgaaaagatttcagtcattttctcggatgtctttctcaagaatgggccaaggttgggatgacatgctcctgacacttttagtaaggaagctgcagaatgctcttacttctcttgacaactttccagttataatgagccacaacttcaagccaaggagcagtattgctgatatccctacaaggcactcaacaattactccatgtatccgagtaagattcaagaaagacgaagatgaaactaaattgtcaagctataacagtgccgtgaatgtggaaatatcgtcatccttgcaaaccattgaagaatttctatggcccaaagttagtatagatgtcaatagtcaaaaggctgaatcaccacctagtgacactgctttggaaatcaaatatgctgacgatgactctcaggaacaagattccacacctagtcagaaggctgattcaccatcagagggcctcacttgtggaagtcagaatctacctgcagaaacatgtccgaagcaaggaacttcatcttctggtcaagcagaaagaaacacaacaatcttgagtgattacaccatacaacaaaaattggtatttagcttaaatgggaaagagcttgaccggtctgttactctatatcagtcaatcctgcaggatcatatcaatgcagggtctgagataattctggacatgcagttttggcgcagtgtacatgacataactttcaaagctgctaatccagaagcaaatagaacagctgttaacccagaagcaaatgattctcctaggcattcctctactgcaatgtcatcaataaatgagaatacaactgggtttacatggcagatgctcccattcttttctagtatgttgcttggtaaacttccttgcaaacttgacagatcaggtgcttcgtatgacatattgtttatgttacacattttagagggattaaacaggtattcctttcacctcgtgtctgatgagagaaaccgttcttttgcccatggaaggataactaaccttgatgatctgaaggctgaagttttctcgattcctcagcaagagtttgtcagcgccaaattaacagataaattggagcaacaaatgcatgatccattagtttcaaggtcttgctgcctgcctttatggtgcattgaactgatgtctgcatgtcctttcttattttcatttgaggcgagatggaagtatttccagttgacggcatttggttctttgaaaaatcatcatggccacatgatggatgcaagtgttaacagtgttgcggaaagggggtcttcccactcacggaaaaagttcaaagttgatcgtgatgatatactggtttcagcagcaaaaatgatgaagtcccatgctaagagcaatgctctacttgaagtagaatataaagaggaagtgggcactggtttaggtcctacaatggaattctatacattgataagtcatgaatttcagaagtctggtctaggcatgtggagaggggaacttccttgtaaatctggtacccatgatactcatgtttctagatttgtggttgcctctaatggacttttccctagaccttggtctgcttctgaagatcctgcttcctttcaagaagtgagcgagcgattccacttacttggtctggttgttgcaaaagcaattaaagacaacagaattcttgacattccattttctaaagcattctacaaacttatccttggacaggagcttaatatatatgatatccagtcattagattctgaactggccatatgccttgtggagtttcaagcgcttgcttgtcagagaaaatatgcagagtccaatttgacaagggactgccagatatcagatttgacttatcggggttgtagaattgaggatcttgctattgagttcgctctcccaggatatccagaatatgtgctctcgccaggaagtcgctctgactgtttgaatgctgagaatttggaagaatatgttcgtcatgttgttgacgcaacggttaaaagtggaattgcaagacagatggaagcttttaagtcaggatttaatgaggtatttccgctaaaaaaactccaggttttttcagaggacgagctagagagattactttgtggtgaacaagatacatgggattttgcgaaacttgtggatcacatcaaatttgatcatggctacacttccagcagccctcctgtcattaatttgctggaaatcatacaagagtttggatccattcaacgtagagctttcttgcaatttataacgggttcacctcggcttccaccaggcggcttggctgcactaaatccaaagttcacagttgttcgaaagaataacagcaatgatgttgatcatgacctgccgagcgtgatgacttgtgccaactatcttaagttacctccatactcttcaaaggaaaagatgagagagaaactcctctatgcaattacagagggccagggatccttccacctatcttaaccaataagcgataatgatacttcgcatgcaacaggagtttctctttgtaagtatctcgtaggaaaggaaaacacggtgtaaatgtgggtggttcactgcttattttagctgacagcacgatctggtggagctgattttaggagagaaaaaaacggctaccgctctttgtacatactaggtttcaggtgtgatcaagcagatcactagtgtgcctagttcgctactcttttgttcaaactttcggtgtacatatgcgtgcctgcctgatagaagtgccagtgctatctttcattgttcgttggtgtttgccttcttaagcgtcgttgtgtgacttatggcgaaatatgtgcaaattatttgtggatttcatatgaacaatgtctgatccgagcgtgaggaatttgtgcttttggaataggacagtgccttttccttcggttcctatagtggcctgtcccttatcgtccctcatcgatcagacatttttcgtggcgattgctctgctatgttcctgttgttatctttggttctcaaaagtttcttgtgtgtgcgagaggtggcacacgaaggcacca

SEQ ID NO: 15796 - DNA, 675 bp, Zea Mays
gtgcagtgggggtgccaactgacagagagcaatatattcatcgacttggtagaactggtcgcagaggcaatgaggggacaggaatcttactattggcaccatgggaagaatatttccttaggagcatcaatgacttgcctattacagaggcaacacaaccattaattgatctggatactaagaaaaaggtcgataaggctcttgcacatgtggaggttaaagacaaggaatccgcttatcaggcgtggcttggttactacaattcaaataaggtcattgggcgcgacaaataccagcttgtatcacttgccaatgagttcagcagaagcatgggtctcaacaaccctcctgcagtgtctaagcttgccctcaggaagatggggctgaacaacattccaggtctgagatcaaagtaaccaattgccatgtatactgtatacatgtcttgaagtcttttttgcacatgatctgacatctgagcacgctattccatactgatcgagttgagttagtttctggtaataaatttattgtacgttttatgcttgcagaagtgcacgaatattcataatatgttctcattcgtttgttctgttactgagataacaaatgataaagatgaacgtgttttgctattaaagaaaataaagggatacaaataaatgaagataataa

SEQ ID NO: 15797 - DNA, 2377 bp, Zea Mays
ctgagatttattttaataacaaaaaaaaaaacaagcaagactcatactacactctagaagctacaaaccacgagcatttccgcggcgccgccttcctccggctccgacccccttgcccgttgcagctgcattggttttggttctcttcaagccagccaccgcaaagcgcgcagcaaagctggcctcactcatacagctcagctttcaaagcgttgggagagatggcagaggagacgcagccagaggccgcagccgaggccgaggtggtcgtgaccgagccggcgccggcgccggcggaggcggaggtgcctgcggcagcagatgccgaagccgtgaccgaaacggagaagaaagccgatgagccggcggtcaccgccgatgacgcgggaaaggggaccggctcgttcaaggaggagagcaacctcgtggaggacttgcccgacccggagaagaaggtgctcgacgagttcaagcacctgatcgctgccgctctcgccgccggtgagttcaacctgcctcccccgccgccgccgccgaaggccaaggaggaacccaaggccgaggagacgaagacggaagaatccaagaccgaggatccggccgaagaagagcctaaggcggagtctgcggcggaggagcccaaggccgaggtagctgcgaatgccccggatgaggaggtcaagacggaggtgccgccggtcgaggaggccaaggctgagacagtggctgtggaagccaagcctgccgagcccgagccgcaggagaagaccgtcgtggtcgctgaggaggagcctgccaccaagacggtggaagcaatcgaggaaagcgtcgtgtccgccgacgaggcggccgcgcctgagcccgtgctggtctggggcgtgccgctggtgggcgacgacgagcgcacggacacggttctgctcaagttcctgcgagcgcgggagttcaaggtgaaggaggccatggcgatgctcaagtccgcggtgctgtggcgcaagcgcttcggcatcacctcgctcctcgacgccgacctcggcctgccggagctggagaacgtggtgttctaccgcggcgccgaccgcgagggccaccccgtgtgctacaacgtctacggcgagttccaggacaaggatctctacgagaaggccttcggcgacgatgagaagagggagcgctttctcaagtggcgcatccagctgctggagcgtggcatcctgtcgaagctggacttctcgcccaacggcatctgctccatggttcaggttaccgacctcaagaactccccgcccatgctcggcaagcaccgcgccgtcacccgccaggctgtcacgctgctccaggacaactaccccgagttcattgccaagaaggtgttcatcaatgtgccgtggtggtatctcgctgccaacaagatgatgagcccgttcttcacgcagcgcaccaagagcaagttcgtttttgctagcccagccaagtcagcagagactctattcagatacatcgcaccggaacaagttccggtccaatttggaggccttttcaaggaggatgaccctgagttcacaaccttggacactgtcactgagctcactatcaaaccatcgtcgaaagaaaccattgagatccccgtcaccgagaactccgcgattgtatgggaactccgggtgctcggttgggaggtgagctacagcgccgagttcacccctgacaccgagggtgggtacactgtcattatacagaaaacaaggaaggtgcccgctaacgaggaaccaatcatgaagggaagcttcaaggtaggcgagcccggcaagcttgtgctaactgtgaacaaccctgcatccaagaagaagaagctcctttacagatcaaaggtcaagagcatcagcgagtgagtgagtgagtgaggttgctgctagctgcctgggtcctagagttaaatgatgtaccacagttcatctcagcatgatagaagagaggagaagccttttggtttggttcgttaatttattgggttttgctggcttttggttcacattctatattttgtttggttaaaaccaaagcgagcttggttttgtgacagtagatggggaagtataatgacattctgatggatggttgttgaggagggcagggaagacgaaaggctggggaatgtctgctcctctgtagatgtgtctgtacattgcatctcttggattctcattgatatgtttaggttttaggagtactttgtcacatcattatgcaatccatgttactctctgcatgttcctctttctcttcgtgtcctttcccttgtttaattgaacgctgtctgctgtccatgcatatatcaggatctgcctgctcccaccatttatgtgctcatttccag

SEQ ID NO: 15798 - DNA, 3121 bp, Zea Mays
aaaaaataaactaaaataaagggagagaaaaactgtcttttgctacagctgagctagaaaaggaacctttttccgcgcgttattcttcttcttgtattcgaaagcccaagcccaactgataaaaggcccatgctcaagcgataagacgagaataaacaaccaccgatcccccagggcccaggcccacgcgcacacattctgattccgaaggcaagggcgtgtacatggcggtgagacgaggagccaaaacccaacggcgacgagaaatccacggcggctagttcaccccatccggcgcgagcgactccctccgcctgcaccaaaaacgagggcgttttcgtgtcccctcctccaaactccggagcccacatcctccagtccccactcacctgcgccactccccaccacgctcctcaaaaccctaggtccttcgatctaatgccgtgagctctcgaattctcaattcccccagcctctccatggaagaccccgtggcggtaccctcctcgtccttgaccgaccctgccgctgccgccgcagctagggttccgggtgcggtggcagcagcccctggcgtcacctctgcgccgtccgctctcgctccgacgcagccgcctgccaccgcggccgcggtctctgaagccgcgacgccgtgccagaggcagctgttcacagtggagctgcggccaggggagaccacaatcgtgtcgtggaagaagcttctcaaggaggccgggcacaccgccgcggcaccgccagtggcggtggagccagcgttcgccgcacatgcgggcccatctggtccggcacatcctgcagaaaatgacccaaaggatccaacacagccaaatcggttcaatgcagtgattgaaaaaatagagcgcctttacatgggaaaacatagcagcgatgaagaggatcttaatgatgtaccagatgatgatcagtatgacactgaggattctttcattgatgatgccgaattggatgaatatttcgaagttgataatttgaaaactaagcatgatggctattttgtgaacaagggaaaattggaacagattgaacctggtacagcggcaaatgttgctccaaagaaaaggagaagaaaggatgcatcaagttcttatctggagagtaatcaccttggtccaattgattattttgatattggcgatgtacctgaaaaatcctctgcaagaggtactgtgcagacgggaaaacagttagttagtagcaacgtaagttcttatggtcaataccatgaggacaatagagtggtgaagaataaaatcagtggtcctggaggagcccctaaaagaaaatcttctgaattctcgggtgacgctgcagcacgagctaagattattaaggatgtctcgcatgctcctttggagctaagagacatggaaaagcataaagctgcagcactacctgttgactatgcacataagtcaaaaatcagcgaaacatttgattatgcatatccagcttatagggataaaggcacttcagggcaacttgatttccaacaaagaaagataagcagggaaaatcaaggtccatcaaatagaacctatcgcaaagagaaacatggaacaaatgaatatcctggcatcgctatggctactgcggtctattctacacaaacaatgcacccagttgttggtagggagggttcaggaactaaacccaaaggcaccaggcttgagcgagctattcgcgatctccagaagatcgttgcagaatacagaccaccaacaattgatattaatgaggtagatccaaatggccaggtagcagttaaaagacggttgcctcctgaaataaagcaaaagcttgcgaaggttgcaaaggttatcggcaaataacggaaagatccaagaacatgagctaatgaatcgcctcatgggcatagttggacaccttgttcagcgcaggacactgaagagaaacatgaaagaaatggtagaatctggtatatctgctaaactggagaaggctgacaggtttcagcgtgtaaaattggagatcaatgagatgattaaagagcgtatggctacaaagtccaaggtcaatgaacaggatggttcagctgatgattttcaggttgctaatgatgaaagaagagctttaaaaacaaagtatacaatggatactgcattggaggacaagatgtgtgatctgtatgatatgtatgttgagggtatggatgaagacaagggccctcaaagcaggaagttatatgtagagcttgccgagttatggcctcatggttgcatggacaatgtcgggatcaaagatgccatttatagatcaaaggagcgaagaagattattgtacagccagcaaaaggttcgcagtgaagagagaatgaagaggaagaggctggctgcaacagcaaagctgccagatggcctcgcagttgcaatgcaaagtggagttgccccacaagttgcacagccacccataacaaatcccatcacataccatacggctgattatggacagaacccggggttaaaatattttgatagggctcgtgaaacgagctccagtgcaatccctgatgacggcaacagaattgctggtgaggtcaagaagaagaaaagaaaacctgaatatgaccctgtagatacacaagctaacctaccaagggctcccatgccgcacgggagcgagaagcaaaagccttctaagcctgctgacgaggccagtgctggtagcctgccctccatggcgacaactcaaactgtgcttggcctaccgtcggtgcttggtcataaccaacaacctagctgattctttcggcgtagtgttggacatttggttctccttataggcctttttcagctgctgtaacaaattatggcctttccatgtgttcagcatcgattgttgagactaacatgttcccgagtagagaggatatttgatcactctttacttttccagcattgcatggttggtacccttgcccagattatctgtgcagcgctgatagatatgatctgcaaccccttcaaataccagttgtaattatgaatattttctcgagacatgtactgctcatattgtgcgaagcgatgtgcagattttcttttacttttgttcaagtgtg

SEQ ID NO: 15799 - DNA, 1775 bp, Zea Mays
attaaattgctgtaggtgaataagtattcatgttgtggttgttctctgtggttattttcaaatttgttggagtgattcacttacagcaccagaaaatttatacatgatagtgggtaatggatctagttcttctctattttgcaattccattatttatttaacttacatgtaccgtttccatctggggatgtgttcagtgttgttagcaaacaacaacaaccataattgatcttggtataacttgtgcaatttcagaaaatttgcttgttacaaaggaactcatcaagatagcggattttgggcttgctcgtgaaatttcttctgagccaccttatacggaatatgtgtccactcgttggtatcgtgcccctgaagttcttcttcaagctactgtttataatgctgcagttgacatgtgggcaatgggtgccattatcgcggagctattttcactgcgacctctttttcctggatcaagtgagccagatgaactttacaaaatctgtagcattattggcactccaaatcagcgtacttggcctgaaggactgcagctagcagcatctatgggttttcagttccctcagtgtgaaagtgtacatctttcggaagtggttcctttagcaagcaaagatgcaatcaatcttatctcgtggctttgctcatgggacccacgaagaaggccaacagcagtggaggttttgcagcatcccttctttcagccatgcttctatgtcccaccttcacttcgcttcaaatctactggatatgcatcaacgccaccatcagctggggctaaaggagctgttgatcagaagaacattaggagatactacatgggtactgtacccaatgcgaggccaacagttaattactcgtacttgagaaacaatgctcctgcaagagcagttggtgcacaaaggaaattggagttggattatcagctcccagagactaataaccataataaggtgacaaaggcagaagcgatgaaccagtcttggtccagaccagcagcagtaaggagcaatgcaggaaatcatcttgccaacgacctgaacccccgtgtacctgaccttgccgagaagctgtctcagttgtcaatgggccccaacagggtgtcgggtttgggttccgagaggtttgttagaacccatgagaacgctgccaagcgccccttgcccgtgggatccagggcgtggcatggtccagctgaccccttccggcgcccatacgagatgccaggtgatagaactctccttccaaggaatctcgttcgctgaggctgtgaagctcttcgcaagaaacatatccaacgctcgctgtcttcggagctactcttccccggctatttacctcgcaacaataaataaacaaccaaacttcgtttccagcagtgggtgttgctcagcattgtctgttaccgtgcttgtgcgtgacgaggataagaggcgtccgggtttgtgcaccccccccccccccccgggtcctcgagggctccagggctggttggttgcagcatggcccgatgtgcctccatgtgatatcgtttttttaattatgctgtgcgatgtgtgattggtaacactgcttcagttgttaccgctgcttgttcagtgggtttgtatgaactgtgacatgctccgctaaacgttattctaaatactggtatgcaaacatgtcgaaggtgaacaatcaatggtgtatgtagagtagacttaaatggtaactgccttgtttcattctttacaagcctactctagtcccaattcgca

SEQ ID NO: 15800 - DNA, 1621 bp, Zea Mays
tggtccagtatctgttgtgtgccaccaaccacataaagaacctgcacttaccagaaaacagcatggcttggtatgttctacatgtgtataccaactgggatagcattaggctatgtttatggcggactggttggaaaatatctgaactggcgtgctgctttctggggagagtcaatattgatggttccttttgttattcttggttttgtaataaagccactaaacctcaaaggatttgctcacaacacaacaaaagaatatggccagatgcttaatcctgaggttcaagatcagataaataataatgcgacaaagcatgttttgcctggtggaattgaggatctttcagggaaggttccacaaaagttctccttgtccagtttttgccacggtatcatgactgaaattggtcgcttcagcaaagatatgaaagaactactacaagagaaggtttttgtcatcgttgttttaggttatatatcctacaatttcgtcattggtgcttattcctactggggcccaaaggcaggtcaagagatctacaatatggggagtgcagatcttatgtttggtggaattactatagtgtgtggaattattggatcactagcaggaggtttcatccttgacaagatagggtctactattcctaatgccttcaagcttctttcgggtgcgacatttgtaggggcaatattctgctttggtgctttttgtttcaagagcctttatgggttcataccctcctttgcagttggggagctttcagtgttcgcaactcaggcacctgtaaattttgtatgccttcacgccgtgaagccacatttgcggccattggcaatggccgtatccactgtttcaatccatatatttggcgatgtgccttcttcacctcttgttgggcttcttcaggacaaaatcaataattggagggccacagctcttattttgacatccatccttttcgctgctgttgtgttctggttcattggcatatttatccccagcgtcgatcgtttcaatgaagagagcgagcatggccttactgtcgccgagagatcaaatctcaggccgctccttgatgaaaaggacgagccacggacatctgactaaaacctacgcaagtcataaccttttatttcttggcttagtccgtagtttttcccttatgccatcaacatgtgaaatgtaaatttgcatgcccattggctgtacctgtacatatacgaggtttgttcgttttgcgttattcttttacttttttttgtacaggctacagaaacaagcaaaagagtgctagaattcctttttttacgaattaaaacattttagaatttctttttacgaatgtaaaacgtgttcggattgtgacatggcataactttctggttatgcggttatgctctgctcacgggaggctaggtgatgtcactgtatgcctagatggatctgcaactactctttcgtggctactttgagcacctcgaatccccttggggattggagtggattaagagcttgttcgattagttcttaatccatgtggatttgggtattctaattttttttaatctcgtccaatccatgtataacgggaataaccgaacaaggtttaaggtgg

SEQ ID NO: 15801 - DNA, 663 bp, Zea Mays
cagatgtctttatggcagtcttgatgagaaacttgcacgctttaaataagcttccatattctaagctagactctaaaacctttgggatcacagatggagttgtttttgtaacttatagcagcttgatagcatcctctgagaaccgttcccgtttgcaacagttggtacagtggtgcgggtctgagtttgatggtcttctggtgttcgacgagtgccacaaggccaaaaatctgattcctgaggcagggagccagcccacccgcactggtaaagctgttcttgagattcaggatatgttacctcaagcacgggttgtttattgttcagcgactggtgcatctgagcctcgaaatttaggttatatggttcggcttggtctctggggagatggaacatcgtttgagaatttcaaccaatttttaggtgctcttgagaaaggaggtgtgggtgctcttgaacttgttgctatggacatgaaagccaggggaatgtatgtttgccgtactctaagttacaagggtgctaactttgatatcctagaatcacttctggaggaaagaatgatggatatttttgttagtatgattgctcattgacatgaagtagtattcttttaaatttaattaacttggcgagaacaaagtggtagaaactgaaaggaga

SEQ ID NO: 15802 - DNA, 837 bp, Zea Mays
ttacatgcatcagcccttgcaaccaaattcctgggttgatgctgtagtatacctggtagatgcgtatgataaggagcgatttgctgaatcaaaaaaggagctggacgctctcctgtcagatgattccttggcaaatgttccatttctcatccttggcaacaagattgatatcccgtatgctgcctctgaagaggagctgcggtatcacctaggccttagcaacttcacaaccgggaagggcaaggtcaaccttggcgactccaatgtccggccacttgaggttttcatgtgcagtgttgttcgcaagatgggctacggcgatggtttcaagtgggtctcccaatacatcaagtagggcccttgccggggcgcttgctcagcccagcgatttttttgccttgttatttgttctggttggtatttcgtcacgtgaacgatgatcatcatatcatgacagtatcatggaggggtatgaagaggaaaaaacagtgcttaacattggggaacatgttgaatctttagcgtgaaaacattttgttatgtcagtcaaactcctggaattcttttgcttttccgtaggacctttactaaggacttgcctgcgatgcattataagattattgattgcttaaattatgtgttataatatggtggtggattggtactgagtatcggtggttgcgttatcaatgcatgtattcatttgtttgcttaatttttgccttgctgagcgaggatatggaacaatttagagttggattgcggactcgtagatgatgttgtagtgatgaagccatttttcatcaatgctaatatgcagatgctaaagttgatcaa

SEQ ID NO: 15803 - DNA, 1601 bp, Zea Mays
aaataaggtaggcagtttcccgaagcaacctcccgttcctccgcgacccagcgacgcctccgcggccgtccgatcgccctatccgccgccgcgcgattccggcagaggagtagacggttccagcaaatttggtccaacaattctttgtttggccgcttgggctccggtctctcgattcttcgtagcttggtgggagggcgccggatccagcggccatcatggttgtcgacacggtcagcgcgagcacctccataatagccccccacctgttcgaccacaggtccaggggcgccggcgcttcccaccaccacctccgccggacgttccatgtcgtcgcctgccgacccctgcccaccgccttcgccggccgccgcctcgtggcccgggtcaccaggcagccgtcgtcgcgcctcgccgattggccggtcagggcgctggctatgggggtcacgaaggaggtcagggccagccctcgcagggagtaccgggggatccccggggatggtggagacatgggggacgttggggtcaccagccccacgccgtcatggcctccgcggaacagggcagatgaccccaagctgcataacccgctgctccgcctcgagcgcatgggctgcgggtggctcggcgtcatcttcgagtgggagggggtcatcgttgaggatgatgccgaattggaaaggcaggcgtggttgaccctggcacaggaggagggcaagtcgccgcctcccgcttttctgttgcggagagtcgaagggatgaagaacgagcaggcgatttctgaggttctctgctggtctcgggatccctccgagcttaggagattggccctgaggaaggacgagatccacagcagccttcgaggtggctcctaccaccagatgaggaacggttccagggagttcatgagcacgctcgccaattacaagatccctatcgctgtggtgaccacacgcccacggaaggttattgaggaagccattgaagctgtaggcgtgcgcagcttcttcgatgcggttgtgacagcagaagacgtgtaccggggcaagcctgacccagaaatgttcctgtacgctgctcagcttctcagtttcatcccggagaggtgcatcgtgtttgggaactccaattcggcggtggaagctgcgcatgacgcacgtatgaagtgtgtcgcggtcgcaagcaagcacaagatctacgagcttagcgctgcagaccttgtggtgaagcaactagacgagctatccgtcgttgacttgaagaaccttgctgatattgagtccccggagtttggcatggaacctgaaccagagatggaggaggaggaagtgcccccaccatcgacgtctgtgggtatagatgatctattctggtaagagaccaaattgtacatttgattgattcctctccagaacacagatgtattgttgtcaactgtcatagtgatcagaaagaagggcttatcatccttctgtaatcagtagaatgtgatatgtaaaaaatgttgtctagagctcacacactgtatatacatactcagaaagaaagctgggaactgaatatatgaatcagaacatttgaatctgcaaaaaatagaa

SEQ ID NO: 15804 - DNA, 1395 bp, Zea Mays
ttttattatttaacatatcctcgcggctccccgatcgccgccaccgctttaccccactctgctgctgttgttatgataacaactcgcacccccactctcagcaccgcagcctcactcctgctcacccaccggcaccgcatcctcgccgcccggaccctctctgtctctgtctccgccgcggcgggctcctcctccatccccgtcaagggacgggcggttccccgccgtggcggggcggtaccacctctacgtctcgtacgcgtgcccctgggcgtcccggtgcctcgccttcctcaagctcaagggcctcgaccacgccatcggcgtcacggccgtgaagcctatcttcgagcggaccaaggagagcgacgagcatctgggctgggtgttccccgccgccgccgacgaggagcccggcgccgagcccgaccctctcaacggcgcccggagcgtgagggagctatacgagatcgccagctccaactacgccgggaagccaaccgtccccgtgctgtgggacaagcagctgaagacggtggtgaacaacgagagctccgagatcatccggatgctcaacgccgagttcaacggcatcgccaggaaccccgggctggacctctacccggcccacctccgggcctccatcgacgaggccaacgagctggtctacgacgccatcaacaacggcgtctacaagtgcggcttcgccaagaagcaggggccgtacgacgaggccgtgacgagattgtacgaggctctggacagatgcgaggagattcttggcaagcggcgctatatttgtggcgaccagctgactgaggcggacattcgcctgttcgtgactctcattcggttcgatgaggtctacgccgttcacttcaagtgcaacaagaagctgctgagggagtacccaaacctgttcaactacaccaaggacatataccagatccccggcatcagcagcaccgtcaacatggaacacatcaggaagcactactacggaagccatccgtccataaacccatacgggattatccccgctggacccaacatcgactacaatgccccacatgacagggagaggttcagcgcctgactgcgcgtgggaccttgttgcttcctttctctctctctctctctctctcttttctgcaggagccgtgtgcagtgttgttgtgcttcatgagggtcttgtgcttggccgtgtcagaggctgcaagaatccctactgtactttttttcttcttctgagcagttgaagatggaagacaaggttttatttcgcacagataaataaaaggtacaaagggtcgtcgattttatacgaaggcctcgtttggcacagtagcaccgaacgtggtgttttctttctttccttccttatgacatcccttc

SEQ ID NO: 15805 - DNA, 100 bp, Zea Mays
taccatgtaaaacttgagttctggaatgtaaagtgtactttgtaaaagtattccgctctatctccaatatgtgtgtatcaaatgtgattactgtaatata

SEQ ID NO: 15806 - DNA, 561 bp, Zea Mays
cagttctgcaggctgtgtttgtgatcagtgtgactgagaggggagggtttccagtcagtcatttatgaatcctgaggcctgtgcttactagagggagggcaaggctcgttgggatccgggatgaaggggagaaatgactcggggcacagcaagaggccggttgtgctgtgctgtgtgatgattgtgtgcctatgtctcctcttcttgtatttctcgggctccaatggacaggctgggagcgccgcatttgagtacgggaccaaattctcacggtcacttggatggggcagtgatgatggtgaggatggctctgaagagtccatttttggaaccggggatgcagatgatgtcaagcccaagagctttcctgtgtgtgatgaccggcactctgaactgatcccctgcttggataggaacttgatatatcaaatgaggctgaagctggatttaaacctgatggagcactatgagaggcattgccctccacctgaaaggcgttttaattgcttgattcctccaccacatggctataaggctacaacctgaggcgttttgtcggtg

SEQ ID NO: 15807 - DNA, 5799 bp, Zea Mays
ctgcagtgcagtgcagtgcggtgcagaggctccaaaaaggacgagaccatggttgctggctcgctcgctcgctcgagggtcgagtgcgtttctaacgctgcccacaccacacaccacacaccagcctagtcgagaagaaagaaacctccggtctctgggtcaggttctcgccgagcacgcgatttcacccgtcctttcggttcagatcttgtttcggattcgacaggcgagggtgggagttatagaggagagccggacatttcggcgcggagcaaagctaatcaggagttgcaacataatatgctgtcaattatgatcaatttggtctgacgaagattttctgcaaacaaatagtaaagctaaagcttgtggatacaagaacttcagcatgacgaagaaacacaaaattagaaagtccaagcatcttttagagagcaaaaaggatgttgatgaaaatgtggagaacattttaagaatgatagaggaggagaacgaacagactgagaatgaacaagatgattctggaaatcccgtcaggaaatcaaagctatcttcccttgtgaagggcttccatgaggactatcaataccttcacaagcactacaaacagctaattagcaaactagaaactgctggccacagttcctcaggttcagattcatctgattcagatgtggaaggagacagattagagaataatgtaactacaccaaaagcagtgttgaatgaagaaaacggcctgaaccataagcttgatgaggttcatagcatggaagcagaaatcgagatgctaaaacaaagtacagaagaacacaccaaggaaatatctgatctgaaacagctactagaaaaagcaatcaaggataaagaagctacaaggggagagttcactttagaggttgcaaatttatcatctgagaatgaaaatctgaaatcattagttgaaactgcaaagagggaggaaggagacttgcttaacatcataaaatctaaggagaatgaggtcaaaacattgtctagtgagaagcaaactattgaagaggagagagataacctgaagatgtcagttgtagacatgaagaaggagatggaagatctgagcaatcagctcaaagatacagtggataaatgcagcgtcatggcatcagaactagagaagtccctgaaggctgagaaagaagtgcagaccttgtttgaagaaaaccagaacctgaagaaccataacttgatgctgtcggtggagcatgataacctgaaagcacttcatcataacttagatattgagtgctgtcaactgaaggcaaccattgcagaaaccaaagctgaaaatgaatcattgaccacagaaaatcattcagctgaaagaaaactccagcaattgagggtagaaatagatggcttgatggctgagaccacagtgataatgaacaatctggacaaggaacgtagtactgcagcagaagaaaaagaaaggctaacatcagaaaattctgtatacatgagtgagttagaggaggcacaatctaatgttaaggatctagaaaaggaactggagtcaacaaaaagtgttctcaataatcgtattgcggagctatgtaaggagaagaattctaccacatcagagatagaacggctagaggcttctttgatgaatcatcagaacgatctgtcacaacaacttgataggatttcagatatgcagaagactactgaaaacctggagctggcaaattctaacctgcataatgagattgtaaaagtacaaggacaaaagaatgaagctgttgcttctatagttaatctcgagagcatgttagaacagcaagtacaagagattgcaaatcttcaggaggccaacaaagaactcaaagcagcaaagactgatctacataatgaggttatgttacttcaacaggagaaaattgtagcactgactcagttacaagaatatgaggctcaaatcaagaatcttcgaattgacttggaacagcagtgcaaccaaatttcagttatgcagcaagcaaatgaagaaacacaggataaaaattctagcttgcacaagcaactggaagaaactaggattcatctgcaagaggagatcattgcattacaaggagagaaggaagaggccatcagtagcttacagcagtcaaatgattcactcaagaccctagaagtccagttagagcagcaaagagaacaaatttctgttctgcagcttgctcatgaagacttgcaaaatagcaattccaacctagagatgcaattggaagaggcgaaggttagtcaccatgctgaaattctagcattacaagatgaaaagaacaagattatttcagagttgcagcagtcagatggttgtatcaagaaccttagatttgagttggagcaaggaaaagagcaaacctcaatcttgcttcatgctaatgaagatatgaagaataacatttctgtcttggacaagcaattggaagaggtcaggagcagtttgcatgctgaaattgcagaagtacgtgcagagaaggagacagctctatcagagttacatatgtctcagacttccatcaggaacttagagagtgtggtagaaaagcaaactgagaacattttaactctagaaaaagctaatgataagttaaacaataaaatatgtatcttgacagagcaagtagaacaagccaaggctgagctgcataaggaggtagcggcaatacaagaagagaaggatacagcactaacacaattaagacagtcagagttttcaatacaagatcttgagaatgaggtgacacgactgaaagacgaactttcaattcagctggaaaaaaattccaccttggacaagcaatttgaagaattcaagagcaagctgcatgctgaaattttagacctacgcgcagagaaggacacatctctattggagttacagacatctcaggattctgtaaggaatcttgagattctggttgaaaagcaaactgagaacatttcaactctgcaccaagctaatgatgagttacagaagaacatctacactttgactgagcaatcacaacaagccaaggaggagatgcaggatgagttgaaggcaatacaagaagagaaggatacagtgctaacacaactgaagcagtcagagacttcagtacaaaatctagaggatgaggtgacacgactgaaagaggaactttccgtccagctagaaaacaattccaccttggacaagcagtttgcagaagctaggagcaatctgcatgctgaaatttcagacctacgtgcagagaagggcacatctctactggagttacagatgtctcaggcttctgtcaggaatcttgagattttggtcggaaagcaaactgagaacatttcaactctacagcaagctaatgaagagttacaaaagaacatctacactttgactgagcaatcacaacaggtcaaggtggagatgcaaagtgatttgaaggcaatacaagaagagaagaatgcggtgctatcacaactgaagcagtcagaaacttcagtacaaaatcttgagaatgaggtgatacgactgaaagaggagctttctgtccagctagaaaacaattccaccttggacaagcagtttgaagaagccaggagcaatctgcatgctgaaatttcagagctacgtgcagataagaacacatctctattgaaattacagacgtctcaggattctgtcaggaatcttgagattgtggttgaaaagcaaactgagaacatttcaactctacagcaagctaatgatgagttacagaagaacatctacactttgacggagcaatcacaacgagacaaggcggagatgcaggatgagttgaaggcaatacaagaagataaggatgcagtgctaacacaactgaagcagtcagagacttcagtacaaaatctagaggatgagttgacacgactgaaagaggagctttccgtccagctagaaaacaattccaccttggacaagcagtttgcagaagccaggagcaatctgcatgctgaaatttcagacctacatacagagaaggacacatctctacgggaattacagacgtctcaggcttgtgtcaggaatcttgagattgtggttgaaaagcaaactgagaacatttcaactctacagcaagctaatgatgaattacagaagaatgtctatactttgactgagcaatcacagcaagccaaggtggagatgcaggatgagttgaagtcaatacaagaagagaaggatgcagcgctaacacaactgaagctgtcagagacttcagtacaaaatcttgagaatgaggtgacacgactgaaatgggagttctccgtccagctagaaaacaattccaccttggacaagcagttggaggaggcaatgttgaaagtgtctagcctacatgagaatcttgagaaggcccaagctgaagcagcttgtcaacttgatggcatgagtacaaaaaccaaagatctagaggagacaatcaatcaattgtcttctcaaaagactaagttggagaaggatgtgaaaattatgattgaagcatgcacagaaaacatgtcatgtttggcaggatttgaagatagagttacacaaaaaatttcagatcaggaggcaggactgaaggttctccaccagagccttggaggggctgttggtagctgtcagaggcttcagtatgcatatgatgaggtgtccacaagggcatcacatcttgagatacttaagaggagtcagatggagcagattgatcagctagagcagaaaaacacagaaactgtggagaaacatcggcttctggaagaggaaaagttatctgcaaataaggagaatattaagctacaaaagcatgtccaagaccttgaagttcagctccagctagcaaagcagaagcttaaagttactgaggcagaaagcaaatgcaaagaagagagatatgaagcgtcagtggaagcactgcgggcagagatctgtcatcttgaacaattagtacagcagttttcagggagagtcagcttgctggaaggaactctcatgcaggttaaaggacatgctgagtcagtggtctgtaaatgggctgacaaattggatgagctagaaacaatctgcagtcagaattttgtgctcttcattgaccgctcatctgcatgtagtgacgagcttaaaatcctgaggaagaaggtacatgatcatcttaatgaacagaaggaacttgccaatgcgaacaacgagctggctattaggttcaaagagaaagaaatggtggtgtcagaaatggtgaagagtgctgctgaggcacagacaaagatgctccagctccagaagacggtggacgagaaagaagacgagctagcagctagagtgcaggagaagagagaagccatcaagcaactgagcgacaccattgtttaccacaagaactatagcgatgacctggtgcgctacatccgcagtcagagtcgccctcgcctcccgttctgcctttaaatctgaaagtcaatgaaagatgtaaaggcttaatctagctgtgattttttttttttgcagtaaggagaccattgcaatttttcttatgtatcatatatagggctcgaatactttctggaggtagccatatattcagtggcttgtgtattctattcgctactaaggggactgctgtagtaattgatttattcgttttgccttatcttttttatcggatcggtgaatatactgcctgagactgcgaaggaaggctcaagaaatatccaggtttgcagttttctatccaaattcgcacaggtaagtaa

SEQ ID NO: 15808 - DNA, 141 bp, Zea Mays
atggtctgatttttcgcaatccaaaccgaatgtaacataaaaatacaaaggcaatacatgacctgatgtttggactgacacataaacatccatatctatacaaaaaattggattgcaaattacctgtcgtacacggtacac

SEQ ID NO: 15809 - DNA, 158 bp, Zea Mays
ctgcccttgcttaatagttgatttcccgaagacaacatggcttggtctcttgggccgatcttcggcatcttcattcccactttctacatcgaaactttcactatcgctggagttctcagatatcccagccagcatctcgtttgcaatcttctctacgt

SEQ ID NO: 15810 - DNA, 802 bp, Zea Mays
ctgtggtaaaagagcagactggtgtttgacgcagtgatatttgctactcctaaagatcaccgtaaagcaaaacctttccatgaccatgtatttgtcttctccattgtggatggccatgtttggtttcgaaactaccagatttctgttccccacaatgagattgataaagttgataaaggtggtatggataaaatgacacttattgaggttggccccaggttctgtttgaatccaatcaaaatatttggtggtagttttggtggtcctacatgatccgtgcactagagaagaggcagaaggcaggcaaatatgccaagaaggtgaaggccaaggtgaggaggaagatgcacgagatggagaacacgctggagcctgatgagtttgctgagctctggaaaggggagtaggctttgatcgaccctgtcaatgtcgtgaagcacccgcaactcctgtcagcaagcgcagattttgtttacctgtgtggcagtgtctatgttgtggaagttttgtatgacaaggcctacgtttattttacataaaatcggattttagtgataacttatgcccatatgacattctctcttgtttgcttctagtggatgtagtgccaagtgttatatcacttatgtgattggtagctgagaatcatggggaagcgcgatcacagttcaaacctcaagatatcaatgtgatagccatagccgtgttccatatgtatactatgtacttcatttcagcaatggttttgtaaggaaaatagatcgagcttcatttaaagtaaagttttagtgtttgatgagca

SEQ ID NO: 15811 - DNA, 6421 bp, Zea Mays
cgcaactgccatcgtcctctgctcgtcgcgtcgttctcctctcgaccgcatcgcgcccgtggcggggaacgagccatcgacgccgcgtcgcgtgcctttcttcttcgtcccccccctgcctgcctagctgtctcaggctgccgcccgcccagccccaaaacattcggcagccgagtcaaccgagaacacgagccatccacccaccctgtcccttccccggctttcccccgtcctcggctccaccaattgctctcgcgtcagtggaaggaaaaaccaagggcgagggagggaggagcgcatctccgccccgcccgcgttcccgtaccccgatccgccacatgatctgacaccgcattgccgccgaggtgacccctcccgcccccagaatggaggcgctcaacgagctctgcgacctggtggccgcgcacccggatctcctcctcgccgacaagcttgcatggctctcctcccgctgcgccgccgccccgggtgccgccgccccgcagcgtgcgtcgagggcgcaccttcattcgctcctcgcgttggcgcgcctcctcccggcgggtggcgccggtgccggtgccgaaggcgatgcggcgcccccggccccactcctattcttcctcgcgtcccacgccttcctctcgccggccttctggccccagtctttcgccccggcgccgtttctcgctaggctcctcccgctcctcgccgcggccccatcctcccccgccctttcttccgcgctctccgccgccctcctcgcggcgctcgacgtcgccgacccgacctccgcgccgctcgcccgcgcgtttctctccgccgccgctgccgcggcgcccctgccgctcctccccgcggatgccgcgcccatcgctgcccggctgctcctcgagtttcttggctccgaggaggagccgatcagggccaaggggaagggagaggacaccttgggcgaggaaaacggtggggcaaaggaggtagtgcggaggttcgaggaggaggaggtcgatgagctggagcggaaggaagtcgcattcagactgaccgtgcatatgcttgggggcgagggtgggctagagaccgagcagattgggaaggtcaggaatgctgctgcgcgacaggtccgatcactcacggattttctcaagattagaaagcgggactggagggagcagggtacacagctcagggcaaggataaacaccaaattgatgtgttgtcaagctgcagtgggggtgctggtgcgaagcgtttccaccatggatactgatatcaaatcttcgaaggatatgctccagcagactctagcttggttcatcgaggccaccaagtcgtgcatcctgtcatcctggcggaaactgaagatatgcgaggagctattttgcacactgctcaatgggatcagccagataactgtctcacgtgggggccaacttctgccggctgacatggcaggcagtagtcctggggctctatttgaagcagttgtgaagttgagctgtgagatcatagagtttggctggacaaaggatagggcccttgttgacacatttgttatgcgtctagctgcttatgttcgtgagcggaatgattacgaggaggaggatggcaaaggaaaagaggcagttccagttattcgacttaatgtcatacgccttttggctgagttatgtgtttgcttgaaaaaatgggaagttgtggacatgattttaccccttttcattgaacatctagaagagggtgatgcttcatctccaagttcattgcgtttacgattattagatgcaatatctcgtgttgcgtgcttgggttttgaaaaatcatatcgtgagagtattgtcttgatgacaagaagctatcttgacaaagttaaagctctaggggcttcagaaaacaatacagttccatcagaagcaacaactgagcgaacagaaactcttcctgcaggctttctgcttgttgcttccaaccttacaagcacaaaactcaggtctgattatcgtcataggttactgtctctgtgctcagatgtggggctagttgctgaatctaaaagtgggaggagtggtgctgatttgatgggtccgttacttcctgcagttgctgatatatgttctgattttgatccagtgtccactgttgagccatcattattgaaactattccgaaacctttggttctacgttgtattgtttgggctagctccacccatacagaataatgaggcacctacaaaaccggtttccacttcattaggtacagcagaaagcagcagtgctatagcccttcaagctgtagctggaccatacatgtggaacagccaatggtctgtagcagtgcaacgtattgcgcaaggaacacctcctctggttgttagttctgtaaaatggcttgaagatgagctagagttaaacactctacacaacccaggtagtcgtggtggtaatggtaatgaaaattctgctgttgggcagagagctgcactttctgctgctttgggaggtcgagttgaggtagcagcaatgaacactatttcaggggtaaaagctacgtacctacttgcagttgctttcctggagatactacgttttagttgcaatggtggcatactctcggctacatctacattgaatagatcaaacagtgctttcagttgtgtatttgaatacctgctcactccaaatttgacaccagcagtaactcagtgtttgacggcagttgcacatagagcttttgaaacagtgctgtcgtggctggatgatcgcatatctgacataggtgaaggagctgatgttagagaatcggttctttctgttcatgcttgctttctgataaaaagcatgtcccagagagacgagcatgttcgtgatgtgagtgttaagcttttaacgcagctgaaggaaaagttcccacaggtcctctggaactcttcatgcttggatttacttcttatttctgttcacaatgagttgacttctggtccagtcagtgatcctgcttgggttgcaactgtacgctcactgtatcaaaagatcgctagggaatggttaacaagtgctctttcatatgctccatgtaccacacaaggccttatacaggaaaatttttgcaagccaagtggagtacaaagaacacaacatacagcagatgttgtttcacttttatctgagatacgtatttgtagtggaaagaatgattggaacggtattaggacggccaatgttcctgcagttatggactcagcagcagcagcatcgggagccaaaaaagaagcacctgacttcactttggaagtactctctactgcagtagtgagtgcaactgtgaagtgcaatcatgctggtgagattgctggtatgagaaggctgtttagtactatgggaggcataaacatgggcatgtctcctcctgggacacaatctttgcacccccatcagtcatttgatgaagtttttgtctccaagtttgtcagtcttcttcagaactttgttgttgcagctgagaaacaaccaatagataattcacaatttcgtgaaacatgttctcaagctacagcattacttcttgatcatatggtgtctgattctagagcaaacctggaagggttttctcagcttatacggcttctatgttggtgtcctgcttatatttctacccctgatgcaatggaaactggaatctacatctggacatggctagtatcggctgcgccttctttaggtcctcttgtgcttgcggaacttgttgatgcatggctgtggaccatagatacaaagcgtggattgtttgcatcagatatgaattactgtggcccagatgcaaaattgaggccgcatcttatcgctggtgagcctgaggcaccaccagaaaaggacccagtagaagcaataatagcccatagactctggcttggcttcttcattgatcggtttgaggtggttcggcatgacagcattgaacaacttctacttctaggtcgaatgttacaaggaacaatgaagtctccagctcatttttctcaccatcctgctgctactggcactttctttactgcgatgctccttggattgaagttttgctcatgccagtctcaatctaacttgcagaagtgtaatatggggcttcagttgttagaggacagggtataccgtgctgctttgggatggttttcttatgcgcctgagtggtatgaatctccaaacaaaacttatgctcagagagaagctcaatctgtgtcagtatttgttcattttctacaaaatgagcgcaccagtggtcctgtcgattcggtttcaaagttacagggacgtgaaggtgaacctagcatggcagatcacattcatcctgtttggggctgtgttgacaactacacaaatgcaagggaaaagcgtaaacagttacttctgacactttctcagaatgaggcagacagacttgaagtctgggcacaaccaatacatacaaaagatacaacgacttttcgcggtaaaatcagctcggataaatggattgatcatgtcagaactgcttttgctgttgatcctcgaattgctctttctatgcctttgaggtttccaacgaatgctacaatgcaatctgagattactcagttggtacagacacgattactggagcttcgtacaattcctgaagcattaccctttttcattactccaaaagcagtagatgaaaattcagtgctgttacagcaactaccacactgggctccatgttctgttacacaggcattggagtttcttactcctccttataaaggacatccacgtgttatggcctatgtccttcgtgtcttggagacttacccccctgagactgttaccttttttatgccacaattggtacaatctctcagatatgatgaagggaaactggttgaagggtacttgcttggagctactcgaagaagtaatatatttgctcatatcttgatatggcatctgcagggagaatatgttgatgaatctgagaaagatgcagctgctctgaagggcagtgcattccagtccttgctcccagctgttaaggacaaaattatagagagttttactccagaggctcgtgacatgtttgaaagagaatttgatttctttgacaaagtcacatctatttctggtgttcttttccctctccccaaggacgagcggagagcgggtataagaagggaactggagaagatttctattccaggtgatgacctctacctacctactgcaacaaacaagctagtacggggtatacagttggacagcggtattcctctccagtctgctgcaaaagttccaataatgattacttttaacgttgttgaccgtgacggggacccaaatgatgtaaaaccacaggcttgtatttttaaggttggtgatgactgtagacaagatgtgctggcgctgcaagtgattgctctattaagggatgtatttcaagctgtcggattaaacctgtatctttttccatatggtgttttgcctactggaccaggccgaggcataattgaggtggtcccagatactcgaagtagaaatcaaatgggtgaaacaactgatggtggtttattagagatatttcagcaagattatggtcctgtaggttcaccttcttttgaaactgctcgagaaatgtttatgatcagtagtgctggatatgctgttgctagcttactccttcaaccgaaggatcggcataatggcaatcttctctttgatagccatgggagattagttcacattgattttggttttattttggagatttcacctggaggtaacatggggtttgagagtgcacatttcaagctaagccacgagatgactcaattgctggatccatctggaactatgaagagtgatacatggaaccaatttctcaggttgtgtgtcaaaggatacctagcagcaaggaggcatatgaatgggattttaagtacagtcaacctaatggtggacagtggccttccttgctttagcaggggagatcctatcaataatcttcggaagcggtttcatccagagatgaatgaacgtgaggccgctaacttcatggtacgaacatgtgctgatgcttacaacaagtggactaccgcagggtatgacttgattcagtacttgcagcagggtattgagaaatagtttgtttctcgttttttaagtggcgttcgtgtacatcaattgtatgtagccactatctttttatgtagaatttattttttgagttgtatcatcgggcaaggatggaattcatgtgattaacgtaggatgcttggtgcaaagaggcaattctttttttttcttgcactgtaaaactgccaagaaagtagctagtaagttgatcaagattctgtattgctgtcgcagaatgcattttcgtttactagacatgtatgattcgcatttttatc

SEQ ID NO: 15812 - DNA, 3182 bp, Zea Mays
caatctgttgaaaccgagctcacgggctaggccaactggactcccgacaccgccgacgcaacccaaggatcacccaaaacttccacctcagaccccaaccccctccatggccccataactagagaaacaacaacactacgtccctacgaaacgcaagcaagccatagaaaggatggaacttgcttttctctttttttgaaacatgggattcctgcagtctgctctttaccgtgtccacggcaccatcctccgccgtcgggtgtagccgtctagcctatgcttacctttcagctgagtgaccaaacactgcaccctttcgatcatgcttccttccaaggcacagcccgactgtcagctgtccgctgcccaccgcgtgcgctgcgctcccgtgcggcactgccggcggcgcgaccccgcgcccattggacgagcttccgccccgccccgatcgatcccgccgccatgtcgtcggcggccgtgtcgtcctcttcctccaccttcttcctcgcgctcgcctccgcctcccccgggggccgcaggcgggctagggtcggctcctcgccgttccacaccggcgccagcctgagtttcgcgttctgggcgccaccgtcgccgccgcgcgcgccccgggacgcagcgctggtgcgcgctgaggctgaggccgggggcaaggacgcgccgccggagaggagcggcgacgccgccaggttgccccgcgctcggcgcaatgcggtctccaaacggagggatcctcttcagccggtcggccggtacggctccgcgacgggaaacacggccaggaccggcgccgcgtcctgccagaacgccgcattggcggacgttgagatcaagtccatcgtcgccgcgccgccgacgagcatagtgaagttcccagcgccgggctacaggatgatccttccctctggggacatagcgccggagactgtcctcccagccccgaagccactgcatgaatcgcctgcggtaaactccgtgccgccggtttccattcccaatcctgacaccgatggtattgctgcgcttgctgaaaagaaatatgcacaggttgacggagattcaaatggaattgcacctcctacagttgagccattagtacaggaggccacttgggatttcaagaaatacatcggttttgacgagcctgacgaagcgaaggatgattccagggttggtgcagatgatgctggttcttttgaacattatggggacaatgattctgggcctttggccggggagaatgttatgaacgtgatcgtggtggctgctgaatgttctccatggtgcaaaacaggtggtcttggagatgttgtgggagctttacccaaggctttagcgagaagaggacatcgtgttatggttgtggtaccaaggtatggggactatgtggaagcctttgatatgggaatccggaaatactacaaagctgcaggacaggtacatgacctagaagtgaactatttccatgcatttattgatggagtcgactttgtgttcattgatgcccctcttttccggcaccgtcaagatgacatatatgggggaagtaggcaggaaatcatgaagcgcatgattttgttttgcaaggttgctgttgaggttccttggcacgttccatgcggtggtgtgtgctacggagatggaaatttggtgttcattgccaatgattggcacactgcactcctgcctgtttatctgaaggcatattacagagaccatgggttaatgcagtacactcgctccgtcctcgtcatacataacatcgcccaccagggccgtggtcctgtagatgaattcccgtacatggacttgcctgaacactaccttcaacatttcgagctgtacgatcccgtcggtggcgagcacgccaacatctttgccgcgggtctgaagatggcagaccgggtggtgactgtcagccgcggctacctgtgggagctgaagacagtggaaggcggctggggcctccacgacatcatccgttctaacgactggaagatcaatggcatcgtgaacggcatcgaccaccaggagtggaaccccaaggtggacgtgcacctgcggtcggacggctacaccaactactccctcgagacactcgacgctggaaagcggcagtgcaaggcggccctgcagcgggagctgggcctggaagtgcgcgacgacgtgccgctgctcggcttcatcgggcgtctggatggacagaagggcgtggacatcatcggggacgcgatgccgtggatcgcggggcaggacgtgcagctggtgatgctgggcaccgggcgcgccgacctggaacgaatgctgcagcacttggagcgggagcatcccaacaaggtgcgcgggtgggtcgggttctcggtgcctatggcgcatcgcatcacggcgggcgccgacgtgctggtgatgccctcccgcttcgagccctgcgggctgaaccagctctacgcgatggcatacggcaccgtccctgtggtgcacgccgtgggcgggctcagggacaccgtggcgccgttcgacccgttcagcgacgccgggctcgggtggacttttgaccgcgccgaggccaacaagctgatcgaggcgctcaggcactgcctcgacacgtaccggaactacgaggagagctggaagagtctccaggcgcgcggcatgtcgcaggacctcagctgggaccacgcggctgagctctacgaggacgtccttgtcaaggccaagtaccagtggtgaaccctccgccctccgcatcaatatcttcggtttgatcccattgtacatcgcgcgtttgacggtctcggtgaagaacttcatatgcagtgacgcgccgctggggtcggtagcagtactatgggattgcattgagctgtgtcactatgtgctttcgacaggacagtagtgaaggttgtatgcaagtttattttttttttcattactgatatttggaatgtcaacacaataaatgaagctactatgtgtttcgtaagtataatgttacttatttaggtgatacttcattcaagttcagagatttttttattgttagatcaaattacagcagtgaaggttgtatgcaagtttagttttttttttcattactgatatttggaatgtcaacacaataaatgaagttactatgtcttttgtaagtataatgttacttattt

SEQ ID NO: 15813 - DNA, 1110 bp, Zea Mays
gtgccgtgcacactgcgagatactcggacgcgggcggcggcgatcatggcgtggcgcggcccgctcggagccggagaggaggccctggacagcggcctcgagctcagcctcggcctcccggcctacttcgcccggccttcaggtttggacgccgccagggaggagcccgccgaggcctctgcctacgctatccaggccgccagtgggagcaatgtctccaaggcaagggtcaggccagcgggcgcggcgccggtggtggggtggccgccggtgcggtcgttccggaggaacctggccgcctcctcctccaggccgtcgtcggggaaacacacccgccaggagggcagcgccaaggacggcctgttcgtgaagatcaacatggacggcgtgccgatcgggcgcaaggtggacctcacggcgtacggcggctacgccgacctctccgccgccgtcggcaagctcttccgcggcctgcttgccgctcagagggaccgagcggccacggcgggtggcgaggaggaggaggagggggagggccccgtgatcggcggcgactacacgctggtgtacgaggacgacgagggcgacagggtccttgccggcgacgtcccctgggagatgttcgtggccaccgccaagaggctgcgcgtgctcaagagctccgacgtgccggcctcgtcggtgacgctgggagctgggggcccggagaggtctgcagccgactgctgctgctgaaacgtgctctgcttcgtcagctgcttgtaaaaagtcccgagtggaggagacgaggagtggccctatccctggcctcttttttgtgtgttgctcttgctgcctttctgctagtggtactagtattgggtgccagtaaaaagtaggagaacaaagtcatgacggtattaaggatgtaatgtgcaagattagcagtggtagtagtcgtaaggtgtttaatgaatctacggtctctgttttggggcatattcgaccgtttaaagctgtatgcacgcgtcgaatttcggtgtggtttctgcatgccggccttaatgtttttcagcttttgtttgcacacgaacgctttagagcaagtttaataatagttggctctaacta

SEQ ID NO: 15814 - DNA, 3047 bp, Zea Mays
cacgcaaaatcaaatggcttgactatttttgaccagagtgaacgtgcattattaaatcgcttgatgattgagctgagcaaacttgattgtgatgtacttgtgggacacaatatttcagggttcgacttggatgtgcttctacaccgtgctcagacatgcaaagtgccaagcagcatgtggtccaagattggtcgtctcaggcgatcattaatgcccaggcttaccaaaggaagcacactctatggttctggagcaagtccaggaattatgtcctgtgttgctggccgtcttctctgtgacacctatttatgctctcgtgaccttctgaaggaggtgagttattccttgacacaacttgcagaaacacagttaaaaaaggtcaggaaggaggtttctccacacgatatacctatgatgttccagtcttcaggcgaactgctcaaactggttgaatatggtgagacagatgcatggctttctttggagctcatgtttcatttgagtgttctcccactgacacgacaattaaccaacattagtggtaacctgtgggggaaaacactccagggtgctagggctcagagggtagaatatctactactgcattcattccatgcaagaaaatttattgcaccagataaatttgcacgcaacaaagagctgaactccacaaaaagaaaaatgaatcctgatactgggggtgcaaatgctgatgatggtgctgctgatccttccgttgatgatgaagtgcataatggtgatcaaagtaaagctagaaaaggaccttcatatgctggtggattagttttggagcctaagaagggtctatatgacaagtatgttctacttctcgacttcaacagcctttacccttcaataattcaggaattcaacatatgctttaccactgtcgagcgttcttctgatggcagtgtacctaatttgccagcatcaaaagttactggtgttttacctgagttgctgaggagtttggtggagaggagaaggatggttaaatcatggttgaagactgcttctggtcttaaaaagcagcagttcgatattcagcaacaagcattgaaacttactgcaaatagcatgtatggttgcttgggcttttccaactccaggttttatgcaaagccacttgctgagctgattacactccaaggtagagagatattgcaaaacactgtagatctggttcagaacaatttaaatttggaggttatctatggtgatacagattctatcatgatacatactggacttgatgacatctccagggcaaaagcaattgcaggaaaggttattcaggaggtgaacaaaaagtaccgttgtctggagattgatcttgatggcatatacaagagaatgttacttcttaaaaagaagaaatatgctgctattaaagtagcactggatggcagcttacgagagaacattgaacgcaaggggctcgatatggtcagacgtgattggagtttgctgtcaaaagacattggagatttttgtcttaaacaaattctgtctggagggacatgtgatgatgttgttgagtcaatacatagttcacttgtccaggtgcaagagcaaatgagaagtggtcaaatagaactcgaaaaatatgttatcacaaagagcttaacaaaagcaccagaagattatccagatgctaaaaatcagcctcatgttcaggttgctttgagactcaagcaaaatggttactctggttgctcagctggtgacacagtaccttatataatttgctctcagcaggactcagataatgcacattctgtgggaatagctcagagagctagacatcccgaggagttaaaaagagaccctgacaagtggatgattgacattgactattatttatcacaacagattcatcctgtcgtttctcgtctgtgtgcttccattcagggcactagtccagctcgtctggctgaatgtctgggccttgattcggctaagttccaaccaagattgactgagtcgagcaaccaagatacatctatgatgctgttatctgtaatcgatgacgaagatgagagatatcgtggttgtgaaccactgcgtttgtcatgcccaagctgttctggtaccttcgactgcccccctgtatctagtctgattactagtgctagtgctacaagtgtatcagatccaattgaaggaaaggatgctactgctaatttctggcgccatatgcggtgcccaagatgcctagataatactgttgagtccaaattttccccttctatgctcgccaaccagatgaaaagacaggctgataatttcattagtctatattataaaggtttgcagatgtgtgacgatgagggttgcaaatactcgactcacagcgtaaaccttagagttatgggggattctgagagaggaactgtctgtcctaactacccacgctgcaacggtcgcctagtaagacagtacaaggagtcagatctgtacaggcaactatcatacttttgttatgtacttgatgcaacccggtgtcttgaaaagctggaccagaaggcaaggctccccttcgagagagagtttgtagcagtaggccaaacaattaaattggcactgctagagatccagaaaatccgagacagatgtgcatttggatgggttcagctaaaggaccttgccgtatcaatatgatgtttttcttgtgtgaaagggctcaattagataagtttgaattaaccgtgcaagaaattcatctctctgtaggttattctagatctcgttggtaaaaggaacaggacacggcaaacggtgtatcgaaacaccagccgtctttggtatttccctgcgtgacagaccttgtatcatctatacatgtgttttagccagtggctgtattgtacaactttatgttgtgtccgtctccataggcctcggtgcatgtgccaatgtagtcttgttaatataattatacgcagcgtgtgatgagaaaaaaaaaacaagacactagattactaatgtcgcgagttgcggtagatgggaaaaatatgggagggaca

SEQ ID NO: 15815 - DNA, 899 bp, Zea Mays
gcagtttgttgcaagattaacagcaggcatcattcagacatatctagaatgtgatcctgagtttaagtactcagaggttctaaatccaaaacgcttcctcaccaatccctctaccccagcccacaatgatgggcttgacaatgcaaattgggacctcatattgtacgtcaacttggagttggttaataagatgtcaaacagaaggtttattgtcaaggaaatgcttgggcagggaacttttggtcaagtagtcaagtgctgggacacagaaactaatgactatgttgctgtgaaggtgataaaaaaccagcctgcattttaccatcaagctatcatggaggtttcactattaagaacgttaaatcagaaatttgatcctgatgatcagcataacattgtccgtatgcttgattatttgtcatttcaaaatcatttgtgcatagcttttgagatgcttggtcaaaacctgtatgaactgctcaaaaggaatcacttaagaggtctgaaattgaaatatgttcaagccttctcaaaacagatattggatgccatggttgtgatgagagaagctggaataattcattgtgatctgaagccagaaaatatcctgttagctcccagcgtcgcaacagctgcagcagtgaaagttattgattttggatcagcgtgcctggagggtaaaacagtttactcgtacattcagagccgctattacaggtctccagaggttctccttggctatccatatactactgcgatcgacatgtggtcattcggctgcatagttgctgaactgtttctaggcttgccattgtttcctggagcaacagaatatgatgtgcttcagagaatggtgaaaattctcggctaagaatttaacacacctgggcatatacttg

SEQ ID NO: 15816 - DNA, 1540 bp, Zea Mays
aataaaaaagaaaaacagaaaataagcacatcctcctccatcaccaaattgacgattatatcgaaaatctggacggcggcggactcgattgtagcagcagccgccgggaacaagatggcggcggcgttgtcgcagctggacgacgagatcgtccgcggcatggccatcggcgctgtcttcaccgactatgccgggaagataaactgcctcgacttccaccgcaaggaagatctcctcgtcacttccagcgaggacgactccatccgcatgtacaacatcaccagcgcgacgttgttaaagactacatatcacaggaaacatggtgctgaccgtgtctgttttagtcatcatccaagttctatcttatgctcttcacgatacaacctagagtctgcagaatcacttcgttatctgtcattgtatgacaaccgttgcttaagatacttcaaaggacacaaagacagggtcgtttcattatgtatgtcgcctgtcaatgatagctttatgtcaggatcacttgatcacagtgtcagaatatgggatcttcgcgtaaatgcttgtcagggcatactaaggctgcgtggtagaccttctgtcgcatatgatcagcagggacttgtttttgctgtagcaatggaaggaggtgctattaagttatttgattcccggtcatatgacaagggtccatttgacactttcttggttggtggagatacagctgaagtttctgacatcaaatttagcaacgatggcaagtctatgcttttgacaacaactaacaaccatatatatgttctggatgcatatggaggggataaaggtgtggctttagtttagagccatctcccaatgtaacaaatgaagctgctttcactccagatggtcaatatgtaatttcaggatcaggtgatggaaccctgcacgcttggaacatcaatacagtacaagagattgcttgttggaacagtcacattggtccgattacagcattgaagtgggcccctcgtcgagcgatgtttgcaactgcatcaactgccctaactttctggattcccaaccaatcgaattaggatcaggtgcatggagaaagaagggatgtgacttcatgtatgttaacgtagcaaatgttcatatcttgttcttttgtccaaaagatagatgccatgtatgaaatcacttcattaccatctacggaaacattgacatgtttccaggcagatacttgttgtagtgctcccttatttatatgtactatactaatacacctgcctgttaaattgttgtaacatagttctaggcagatacttgtagtgcctccttccttattttattttatgtacacttgcctgttaaattatcgtgttcttgaaagaccggggggtgttcggtttgaggaatcaaactattcaaaatgaggtggtgcattatggatccattattcaaatttagtgggatgaccacatttctaatattagtactaactatgaagaatgaggtgataatgaatcaaattatttcattctaaaaaccaaacaaaaaa

SEQ ID NO: 15817 - DNA, 763 bp, Zea Mays
ctcgtttccgtccgcgtgctctgactaccagcgagcccacggcgtcgccctttataactggggcccccaaccgaaacctctgctcgccgcaacgaattcccagtctccagccaaccaccgcagacaagatcctctattccgcgtccccaaaccctcgagttcgcacgggctccggccagattcgcgcagtctaagcttcgaatcggcgcatggaggcggcagcagtagccgcggcgctcaggtcgcctaccgccaccaccgccgccgccgccgctggccccacgtggcgggccgcggccccgggcgccgcctcgctcgcctttgaccggagacgcagcttcgccttcggctccatcaagggtctcgggcggcagcagctcacctctaggtctactaggaggcgaagcagtgtggtcagggcatcctggtccccctcggagtctctgccaccgtcctcgtcgatcgcgcctctcaggatggaatcgccggcggggcagctactctcgcaaatcctgcacacgcacccgcacttgctgtctgccgctgccgagcagcagctcgagcagctccagaccgaccgcgaggccgacaaggagaaggataaggagagcgatgctggcgacaagctggctccgacaggtggcgacctcgtgctgtacaggcggattgctgaagtaaaagagaaggaacggagaaggactttggaggagatactctatgctctggttgttcagaagttcttgacaaaaaaaaaaaaatccta

SEQ ID NO: 15818 - DNA, 109 bp, Zea Mays
cggattttcaagggccgccgggggcgcaccggacaccgcgcgatgtgcggtgctcttccgtccgctggaccctgcctccggctgaaccgattccagggttggcgggccg

SEQ ID NO: 15819 - DNA, 773 bp, Zea Mays
acctatggacaagcatataactcaattgcagacacacagtccaggccatcgaactgatacttgtgtggtggcgcgggcagagatcaagatggagaaggaacacatcaagatggccatgctgaggcaagaacagacattcagacagcaggttcacgagctgcaccgcgtgtaccaggttcagaagcagctgatgatgcagatgcagattgccaagacaaacagctacggaaacgaagctgctgaaaggcaaaccaaaccgacagaaaaactcgagcaccgacagtggtgtggtagctcaggcaagacggaggccaagctggccgaagacttcagcctggagctgacactggcaactggggctggaaggaggggggaggaggagaagccatccaactcagactccgaagcaacaatgtcgtcatcgacatctgcagagtcagagccagggcaggggttcgcgcccaagtccgatgtaacaaacctaaggttccagaatgagagcagtaggcatgatgctcaggtcttgcagtctccttggcgataccaatgtttaagtctcaagatggcgtgaaggggttaggttgggttggcatggcatgggtgtaccccaaggctcaaacaaaagcaagtgcattgctgcatgcatgtatgtatgtatattacgatttcactgcaactgtaggagcgagctcaaaagaagcaaatggagcatttatggggaaacaaaaaatgaaccaaatgagaagaaaaggatgagatagattgtgtctgtt

SEQ ID NO: 15820 - DNA, 2517 bp, Zea Mays
gaacagacaggggcgatcagaaaagacaagcagcgtcgtcacaacacaattcagaaatcgtcaagtcctatcgtgctcgccgaaagaccgccgcctcgaacggctcgacacgacgaccttcgctctctccgccaccgaatccaccacaaaaaccaccatatccacttgttggccggccggtcaagaagaccaaggacaagggagaaacgaggggtttagttgggcgcgcgggcgatctcttcagtaaggcgttgtgtggtggtggtgtttggacggagcggagatgtcgtcggcgatggtggagcgggcaaccagcgatatgctcatcggcccggactgggcgatgaacttggagatctgtgacatcctcaaccgcgaacccggacaagcaaaagatgtggtaaagtccctcaagaaacgcattgcacacaagaacccaaaagtccaacttcttgctctcacgttgctggagacgatgataaaaaattgtggggacgttgtgcatatggttgttgctgagagagacatacttcatgagatggtcaagatagtaaagaaaaggcatgattatcatgttaaagagaagattctcacgctgatagatacttggcaagaagtttttggtggtgcacgtgcaagatatccacaatattatgcagcatatgaggagctcttgcgtgctggagtggtatttcctcaaagattgaatggttctgtgccaatcatcactcctccacagactcagcctctccaaaactatccctcatctttacacatttcacagcaggaggaacttgaattaccagtttcagatttccctgcattaagccttacagaaattcagaacgcacgtggcatcatggatgttctttcagagatgctggatgctttagatccaggtaacagagaggggcttagacaggatgtcattgcagaccttgtggatcaatgccgttcttacaagcaaagagtagtgcagcttgtcaacagtacctcgaacgaggagttgctcaaccagggtctttctttgaatgatgatatgcagcgtgttctggcaaaacatgatgctattgatgcaggtctagcagttcgagtggagaagccgaaatctctgcagtcccaaattggaagttcttcaacaagaaagccagataccatggaagaaacaattcagaggccttcagcaagtacaactgccaccagtcagtctccctttgggattttagcacttcctgcacctccatccagtagttcaaaagcacctgcaatacctgcttctagtatcgacctacttagtggagatgattatgtcaaacccgaacctgcaaactccctagcacttgttcctgtcactgaatattcagctgcagacaagaatgtcttagcttttgctgatatgtttgaacaaaatacagccaacaatagcaaccataaccttccatattcttttctatcttcgacttcaaattctactatctctacatcacaaacatatcatgcaccggtgcgacctgtattgcctcagcattcagctgcttatccaaatggggccagatccaatgccattgtaccttatgatcagcaggcccaatcgaactctacaggttcgcggaatgggcaaacagcctatggaggaaatcaccaaaagcaagcactaaattatggcacaggtgatcaaaatggagacattccaccagcaccatggggaactaagagatccactaacccatttgacgacgatcagcttggtggaatggcagtgcaaccaaaaggcatgcaaccccaaccagtgcaacccagtcagcatgggaacaaattcatgtcagcaccaccaatgccgaggggacagccaggaagaatgcagttgcaacaggtgcctggtgctcagcttggcgctctacaaccaacacaggctacactgaacatgcagtacaggggcatgcatccatcgatgcaaatgaatcatggaatgggcatgtattcccaaccaacgttcggaggatattatggaatgaaccaaacacagctttacggcgttcatatgtctggttatggatatggtcagcaatctgggggctactatattccgaatgctgcatatgcctatactagtgcaaacgaacttgcccagaggatgaatgacctttcagttcaaaacggtgatccaaatggagccgcagcaaataagcagagcagacctgaggatgcactctttggtgatctcttgagcatcgccaagatgaagcaaaacaaacctgcagctggcaaggttggcggctaagtttgagtaaagaaggtacataattttatcttaattgccagcagcagaaacctttcctgacagcgcatataattattttgccacgttctatgcaatgccagatggcttctcgatgtaagctcatttggtagaaattcatattgggaactggagattaggatgcttgtggggagcctcatagcaaatatgtctataactctactatatatgaaattcttgagttctcagtaaaacaa

SEQ ID NO: 15821 - DNA, 168 bp, Zea Mays
aaatttgaatgatgcgtcgccggcacgaaggccgtgcgatccgtcagttatcatgaatcatcggatcggcgggcagagcccgcgtcagccttttatctaataaatgcgcccctcccggaagtcggggttttgtttgcacgtattagctctagaattactacggttatc

SEQ ID NO: 15822 - DNA, 1774 bp, Zea Mays
ctctcgtggttgaagatactaaaacctgtttgtcggtggtttatttgtcagggaggaaagggttaggagggcctggctgttacagccaggatgatgtggatgccctacgggctcttgcagaagagccagggattgacgatctgttcttgactaatgaatggccgactggagtggtcagtgggtctgacacttccaatgtgcctaatcaggttttggatcccaatgggtatgatcctattgttgctgaattggttgctgagattaaaccaagatatcacattgctggcacaaaaggtgtcttttactcaagggaaccatatgtcaatgattctgctgctcatgttacccgctttattggacttgctaatgttggaaacaaagagaagcagaaatttattcatgcgatttctcctactccagcatctgtcatgtccagtgctgatatcaatgccaagcctccaaacgccactttgtcaccatatgttggttcagcaaaatcagttcctatcgaagaagctccaaaacgtgcagcggagaacatagattcacaatattggcgttatgatgtcaagcggcaaaggcatggggaagctggtgggggtggattgtgtttcaaatttgtatcctcaggatcctgtcaaagagggagtagatgcagttataggcatgatgaagaggcagtggagcattaccagagaaatgtctgttttgattttctaaacaaaggaaaatgtgagaggggcccagaatgcaagtttgttcacagtctttctggggagactgctctaagggatgcaagacctcctagtgaaagaagacgagtggagagcagttgctggttctgcttgtcgagtccagatgtcgagtcacatcttgtcattagcatcggtgaaggttactactgcacacttgcaaaggggccacttgttccaaatcacgttctaatgattcccgtggaacactgccccagtacattgatgatgcctccggaagcagaggcagaacttgggagatataagattgctctgagtaagtactttgagaagcaaggaaaaactgcagtctactttgagtgggtttcaccacgctctcaccatgcaaacctgcaggctgttcctgtaccattgtctaaagcagacgctgttaacaagatatttcatctagcagccaaaaaactgggatttgaattctctatggtgaatccagatggtgcaaaaactgctagagaatcattgatgtctcaatgcgaaagcaaatcagggctgttttatgttgagctcccggaaggtagaattctcttgcacatggtcgacagtaacgagaagttccctgttcagtttggacgcgaggtgttagcgggactgctaagcatggcggatcgtgcagattggaggaactgcaagatttcaaaggaggaagagattaaactggtggacgatttcaaacaaggtttccgcgaatttgaccctgcagagtgaaaacaatgctctgcgcctgtgtttttgttttgcaatttgtagtctatttttgaggtctcatttgaaatggacatatatgaagcacaagaatgtagtaacgttttccaatgccgcaatttttgttttagggctagttttggaaccacatttttcaagggattttcattctcctaagcaaaattagttcattttcttttgtgaaaataggttggaaaaatggtgttttcaaactagcccttagataaacgtatgtctgatctcggcgtgagtgggcacgcctagggatgaaaacggac

SEQ ID NO: 15823 - DNA, 4111 bp, Zea Mays
tcccatcccatccatccccacactgctggcgctgcccgcctcccccctccagtccactctccactcccacactccgttaccaagctgcccgccacgcccccctcccctactcctccgccgccgcctcacagccgcagcagctagggttagggttcgttccgccgcggctgccgtcttccccagggcaggctactcccgccgggcccctcccctcccattgcattccccagttcccctgcaacccccccattaccctttctcccacccattccttccttccgcccctctccaggccgcccggactggtcgcgttgcaaggtttgtttgaaggaatctggacgggtttatgtcgatactaggtgctgctgctgctgctgcagagatcaggtgaaagggacaagtgttgtggctgcgcaattagtacccagagtgtgcacagccataccacctcgctgatagctactacccgcctgtgcgcacgctgcctccaatctcctccaagaaatgcgtcctcgtccttgaatcctactaaccatcaaactcccagctcccctcccagaccagtccgtggaggaaagtgagcgatggggcttcgcgcgggtttcctcctcctgccgccgccgccgctcctcctcctcctcctcctcctcctgctgctcatttcccctgcgcgtgggcagctgccctcgcaggacatcctggcgctgctggccttcaagaagggcatcacgcacgacccggcgggctacgtcaccgactcctggaacgaggagtccatcgacttcaacgggtgcccggcgtcctggaacggcgtcgtgtgcaacggcgccagcgtggccggggtcgtgctggacggccacggcatctcgggcgtcgccgacctctccgtgttcgccaacctcaccatgctcgtcaagctctctctggccggcaacaacctctcgggcggcctccccggcaacgtggccagcctcaagagcctcaagttcatggacgtctcccgcaaccgcttctcggggccggtgccggacggcatcggcaacctccggagcctgcagaacctgtcgctcgccgggaacaacttctcgggcccgctgccggagtccgtcggcgggctcatgtcgctccagtcgctcgacgtgagcggcaattctctgtctggcccgctgcctgcagggctgaaggggatgaagagcttggtcgcgctgaacgcgtcctacaatgccttcacgaagggcatcccttctgggcttgggctcctcgtgaacctgcagtccttggatctgagctggaaccagttggatggtggtgttgattggaagttcttgatcgagtccgctgtcgctcatgttgacttcagcgggaacctgctcaccagtaccacgcccaaagagctcaagtttctggccgacatttcagagacggttctgtatctcaacctgagcaacaataagctgactgggtcattgatagacggtgtcgagctctctactttcgggaggctcaaggtgcttgatctcagcaataatcagctatctggtgacctcccagggttcaattatgtttacgatcttgaagttttgcgactcgcaaacaatgcattcactggatttgtgcctagtgggcttctcaagggtgattctctggtcctaagcgagctggacctaagcgctaataacctgacagggcatatcaatatgatcacatcaactactttgcaagtccttaacctgtcctcgaatgccctttttggggatcttccattgcttgctgggagctgcactgtgttagatctttcaaacaacaagttcagaggaaatctatcagttattgccaaatgggccagcgatttggaatatgttgaccttagtcagaacaacctaaccggtccagttcctgatgcgagctcacagttccttcgcctaaactacctaaacctttcccgcaactctctatccgagaccatccctgaagctattgctcagtaccccaaacttaccgtgcttgatctgagctccaatcagttacgtggtcctatgcctgctaatttgctaacttcgtccatgctgcaagaactctacatccgagataacatgctttttggtggcctatcctttcctggttcctcatccaaaaatttgagtctccaggtgcttgatatctctgggaatcgcttcaatggaagcctccctgatgatattgcctccttatctggcctccgagttctcgacatctcaacaaacaatttctctggcccactacctgctgctgtgagtaagcttggagctctcactgatattgatatatcaacgaatcagttcacggggccattgcctgaggatcttccggataacctccaatccttcaatgcatcctataacgacctttccggtgtcgtgccagagaacctgaggaagtttccagaatcttctttccatcctgggaactcaaagttagaatatcctgctagctcgtctggatctggcagttccccatctgggtcagcaggtggaaaatcactcagtacaggtgctaaagcagcaatcgtagcagctagcattgttcttcttgtcatcctcatacttattgccattgtatgccactacaagaggatctcacggcagttttctagctctgaaaaggtttcagacaagagcctccacaggaccactaaagacagtgctgtcatgcaaggaaaggacaacaaaggtggtttggtgtcagcagatgagcttgccactcctcgaaaagggtctacatctgaagcactcagccaggaagagaagtcagccgcggggggcttctcgccgtccaagggcagccggttctcgtggtcaccggactctggagaggcatatgggcaggaagggctggcgcggctggacgtgaggtcgcctgacaggctagcgggggagctgcatttcctggacgagacgatcacgctgacgccagaggagctttcgagggcgccggctgaagtcctaggcaggagcagccacgggacttcgtaccgggcgacactggagaatggcgtgttcctgaccgtgaagtggctgagggaaggcgtcgcgaggcccaagaaggagttcgcgaaggaggccaagaagttcgcaaacatccggcatccgaacgtggttggcttgcgtgggtactactggggcccgaccccgcatgagaagctcatcttgtcggattacgtcgctccggggagtcttgcaagcttcttatacgatcgaccaggaagaagaggtcctccactgacctgggcgcagcggctgaagatcgcggtggacgtggcgcgcggcctcaactacctccacttcgaccgcgcgatgccccacgggaacctcaaggccaccaacgtcctgctggacgggctggacctgaacgcccgcgtggccgactactgcctgcaccgcctgatgacgcagtcgggcgtggcggagcagatcctggacctaggcgtgctgggctaccgcgccccggagctggccgcgtccaagaagccggcgccctcgttcaaggccgacgtgtacgccttcggcgtcgcgctgctggagctcctgacgggccggtgcgccggggacgtcgtctcggggcccgagggcgccgcaggcgtcgacctcaccgactgggtccggctgcgcgtggcggaagggcgggggtccgactgcttcgacgccgccatggcctcggactctgagagcaacccgcaggctgtgaagggcatgaaggaggccctgggcattgcgctgcggtgcatcaggccggtctccgagaggccggggatcaaatctgtgtacgaggatctttcgtcgatctagctagtcggtagcgctagcctcgtcgcgtaggcgtagcttttagattaacactgcgtgttaaaattgtgtgcgtgttcgtcttgaactcgtagaactgcgtagcgaatccaagtgttattatggcctcaccttgatgccagcaatttgaaatgaagaatgtgttgcattgttctttttgtttttttggtaattaaggccggcatccacaagtgaacgagagtataacacactcaatagcgtatgatgatgatccactgcccagggtatattatccacctctagcctcc

SEQ ID NO: 15824 - DNA, 1238 bp, Zea Mays
aaaccaacaagatgttgttcgaggcgttcccctcctccacgcaaccttctcccctccagatccaggattgccgggctccttgactcgttacctcgcgcgccctcggttctagagctagcgaaatcgcaaggctattagggttcctttcggagcgcgtctgaagcgatgatggctgaagtcggcggtgggatcgggatcttctctgccctgctccactcgggatgatgaatctgctgcgctgataattattggatgaatttcgataattattagatctaagagatgcgccgacttgaagaggcgaggtaaggtgcaacatgtataagacgtgacatgctatagaggcctttgccatggtgggtgcgctcgcatggcaggccacggtaataaaagaagatatttttgtgtcctgggggtggagatcgcacgggggattgttttttggccccgggttctcctccctcgtggtgttccgtgtccctatgtgcattggtctttgcgtggtttgcgatctcagctcacctacacgcttcggatttctgcatctaacacggagatctacaacaaaaacaaacatggagctacaacgagattcttaaggtacaatcgttaatttactgtaacaattaagtttcttttctcatctctgacgccacacttgtatccttatgttctctctctgcacattcaaagaaaccgttaaacccccatgaataatgacattcgacgtccactttgcccagctgtgttgaatttaatagttcaacaatttcagactcccatgaactcagtgaaacaagcgttactgatgtcctaagtgaaattttatgtcgcacttaagatggcgctgcgtctttatttcgttgtatattttattttcaacaactccaatctgattatgtcgtggcatttcatttgtatttatcatgtcaattgggatatttggtccttgtaagcttttggcatgtttgttagttaagccattgcaattgttggacttgtggagggttgcaaaatcgcagtgattctactattcatcatgtcatcatgtgaaatcttctaccacggagcacgtcaatcgtggctgggctgatggacgactgtgctgatggaactgattcgttacgtgggttgaagattttgtgccaaatatgcgatctggttggttactccgccctgctgacgttgttttagcccagagatactcatgttgttcttggcctttgaggttggacacc

SEQ ID NO: 15825 - DNA, 3376 bp, Zea Mays
gtggccttctcttctctctcctccccgctccgacgcgacgaattcgaagttggaataggcgagcggggcagcgccatttccgtccggatttctcttctgtcttctccttccttggctgtccagtctaggaggggagaaaggcaagttcaaaaaaaaaaaaaccccgcccgaatcccaacaaaaccctaggcctcacgtccccggccgccgccgccatgccgcccggggccgacgcgtcctccctcgccgccgccgtgctcgacgcaggcacgccaccggccgccgccgccgccacatccagagtgctcgactacctctcccgccacgccgacgaccaaccgcgggccttcttcgccgacgccttcccgtccctgctctaccgcctctttgtctccgcaccctcctccccatcattcatcgacctcgccgctgccgaccccgcgctcggcgacctcatcctctccctcatctaccccaccggcccgctcctcgccgccgccgccgccgcagaccgcctcaccctcatacgttacgtcttcccctccgagcgcctccccgactggctccgactcgccctcgcgtctcccccctccaccgacctcgcctcgccgctcctgtcgcgtcgcgtcgcctccgagctccacctctccgtcttcgagtactacctcttctggttcgcctactaccctgtctcgtccgcatcatctgccgccccggccgcatccgcctccaaccctcgactcacctcgcgcgcccgcctcgagacctgggtctctactctcgccaccacggccatccgcaaatccggtcagaagcccgaaaactcgctatacctcaggctgctctatgcctacctcagggagttcgtgccaacgcgcactccacccgttaatatgtccgggggcggcaccctgctccaccgtgcacccagccatggcgtcgatgcaatcgactcgtttgcacgggccgagttcttccttcacacccttgtccacttctggcttgtcggcgatgacttctcgccgctccccaagcagacttgccatgcactcggcttgcggttaccttctcgtgctcatgctgacttgagtgagcggccaccgtcgccaggcctgggtgatgcagtgaagctgcttgtcatgtacctcaactgctgcgatggccgcgcactagccgatgcgtgtgtgccatctcctcaagggttgtcagtgtccaatgggctctgtgatacccaggttgggttctggaatccattgatacagaggcctttgtaccggtttgtactcaggaccttcttattctgccccattggcactgcgataaaaaatgcgtcacaagtcttctctgtgtggttggcttatatggagccatggaaagttacccaacaggagctggataggtatggcaagcagcaaggcggggatgagaaggagccacaaacgactaagatggtgtacaattcatcgtggaggacgtatgtcctgtcgaattacctgttctacaactcaatggttgtgcatttcttgggatttgcgcacaagtttatccattctgatgttgcctcagtgctgctaatggtacacaaggtgttggaggtcttgagctcttccccggagctattaggtcttctccataaagtggacgctgcttgccactctaggctagtggcatcatccccagcatctgatcatgtgttgaagtatgtgccatcaatccgtgaacagctaaaggactgggaggatggtttgtcagaaagtgatgcagatgggtcattgttgcatgagcattggaactctgatcttaggcttttcagttacgatgagaatggggcttataatcttcttcagctacttttggtccgagcagagtcagagatactgcgccttccaggtgagacgcaacaagcactccagacgctggattctatcaagtcacagatgaaaacagccttccaagggcacattgaaagaattaacgggaatacgtcgttggaggaatcacataatcaacagcatcaggtgcgtggggaggtattcacacctaagcatcccagcttgaggaagggttcttgggctgatgttaaatacaaaggtgagtggatgaaaaggccaatctcagaggctgaagtagcctggcttgcaaggattctgatccggctctctgactggttgaatgacgccctggggcttgagtgtgctgatgctgaaggtagtcctgctggcgccacctacattcagtttgatgggaacacgacggtgggcgggccaagggatgctgcgagaatggctctcggtgctgtatgttcattcatggtgctagtggggcaagcggtactgaagttgatgaggtcgcacagggtgaagatcagtctgagagtgtttgcttcgaagaaactgctctcagccgctgttgtgctgtatgcagtggtggccgtgacacggaatgtatcgcgttgagagttttgatttgataatggggttatgctgtataagctaagcttgtagaggaagtcgatcgataggaggaaaagaaaagaaaagtgtgtcgttctgctgttgtccagtaagcttgatgtaaatgcctgcactggaatggttttggacttaaaaacgcaatggagtaattaggacagttctaacagtattaaaacagctgctagctcctcatggaagcgttaaatgtatcggtggccttcgaagttcacttaaaagccactgcaactcctcccaaatcctcccacccggtttagccggctccgctgccaccgccgcgactccacctctgtcgccaccatggtcaagtccaaggccatcagggtccacgagctgggcggccccgaggtgctgcggtgggaggaggtggaggtcggggagcccggtgaaggggagatccgcatcaggaccaccgccgtcggcgtcaacttcatcgacatctactttcggaagggggtctacgccgcgcccaccatgcccttcaccccaggaatggaagccgttggcgtcgtcaccgctgttgggcctggcctcactggcaggaaggtgggcgatgttgttgcatatgccggcaaccccatgggctcctatgctcaggagcagatccttccagcggctgtcgctgttcctgttccaccttccgttgatcataagcaagcagcttctgtgatgctcaagggcatgaccgcccatgttctgcttcgccgggtattcaaggttgagagtggccatactatcctggtccatgctgctgctggtggtgtcggctcactcctttgtcaatgggcaaacgcccttggtgccactgtcatcgggactgtttccaatcaagaaaaagccgctcaggcagctcaggatggatgccaccatgacgaatctactag

SEQ ID NO: 15826 - DNA, 434 bp, Zea Mays
tagaagtcgatccttgctatacttgacaaactaaaggaggaaagggagcaacaagaaggaaaagatggagaggaagatgatgattcatatatatcagaagaagatgatggtgactgggatgcagatgagccagatgaggaggacatcatttacgtaaaatagcccattgtcttctaggaacttggccatcattcatccagaacacagcagttctcttcagagtttaattctgtgaagttcactgctcgcctgcttgtcgaagcactccaaagtatatcagcacttgaagagatgttacgaacactggacaaactatttgctatcgtgtgattttgcaatggttgtttaagggctcatctgtcttgagcaatcagtacacatctaaagaggatgaggttctcgttacaagcacaggcaggagaaaagcatggttt

SEQ ID NO: 15827 - DNA, 1345 bp, Zea Mays
tatgatcatgccaaagggtatcgacagagggacagaacatgcgtacggaattgtctgaaaaatttgatcatgccataaagggtgtcagtgccaaacttgaggagcagagagttgagcgcatttctcagctagaagagaacaatacgttgagaagtaaactgaaagaccttgctgatcaatataacattactcagcagaaatatgctcaccaattgaaagagaaaatgctggaacttgaacttgctgatctgagacttcaacaacatcaagagaaggctgctcaggaacatacacaaatgcagttgtatgctgaacaagtttctcagcttatgactactgagaagaacctgcggttgcaactagcttctgacggggaaagatttcagcactttcaggatgccttgtcaaaaagcaatgaagtctttgaaacttacaagcaggagatggaaaagatgatttcagtgataaagaatcttaagaaggagaacgaatttctgaagggaaaatgtgagaactcagatattgctattgtgaagctcattgaagagcgtgagctaacaaagaagcaaatagagaaattgaaaaatcaaagggagaagctcgaatccctgtgtcgaacactacaggcagaaaggaaacaaggcccctccgccagtattccagatgccccttctagccaagaagtgtcagcgacaagtcaagaatcttaacattccagttgccccttctagccaagatgtgtcagcaacaagtcaagaatcttggcagttgtgcttgtcaatataccgttggtgccagctacagcttgcggagatttctgaagcctgacattcagctgtcaacctaccgtccgtctcaggccttttgatattgtggctagagcctagtggtgcattcctactcggtgttgttaccaagcatataagctctcggctgattccatctcttgtttttgtttgagacaaagcctgctgcattggagataattagatttttgccaatcataatattgtcttcttgttataattaccactgtgtctatgaattgtgggtctagctgggtctatgaaatgtgagtctgatgacaattttacaaacttgtttcttgctgatggtaaatatcagaatctctcgctgcattgtgagtgtgttaattattgtttgagacaaagctctcgcggctcccgttttggaatgatggccaatgctttctcttaattattgtttaaaaaactaaacatcttttattttggatatacaataatctaatgagttatcctttgttgtgcgaaattctcgagatgatccatcattcctgtattcttcatgtttccacacaaattgc

SEQ ID NO: 15828 - DNA, 2953 bp, Zea Mays
tttctttttttttggtcatatatgaactgaattattagttccacacaatttcccagcttctggttcggcatgtagataaactgaattattaagcttcacacgattccccagcttctggtccggcatgtagatgaactgaattacagtacatgttattatggccactctacgcagatggaacccgaacgggaaaccagatctgtcagtactcagttgccgccagcgcagaggagggcgtcaaccttgtccttgaggtgcgcctcgtcgtccccgaggcgggcggcggcggcgccatcctcccagcggatcagcgttggcacgcccttgagcccgaacctggggtccaccctccacgggtgcgccgggtcgcgccaagtgggcttgtccccgacgtaggcgcgcaggagcaccgcgtccttgccctccagtgcctccagccgctcgtagatcaccggctccgccacgttgcagtctgccgcgccgcacaacgacgacggtgggtaagtacgggaccagagcgtcaccacgactagagctgaattcccagaatctgggcttaccggggcaccaggagagggaggagccaggcttgcggtcggccaggaagagcagcagcttcaccttgccgtcggaggcggcgtccggggaagcgaagaggcgatcgaagtgggcgtcgaagtcggaaagccccgcgtccaccttctccaccgtcatctcgccctcctctccccttccgctggccgagtaaagagagcgaattggagcagcaagaaagattgggagacagattggtggaagtggaatgaccgaatgacctaggaagcacacgagacggcgtgccgtgtgattcctttctgggatttctcgcagcctgccggtggtccccgcatctcaacccgcgtgttgcgtacgcgagccggaatcgggggaggtttgggtatggactgaagaggcccaagagctaccgtcgagcccaacaaccaaatgcagccgagtccaacagagtcatcctcatacatcgttcactacttcactctcgtcgttctccccgatcggttccggcctcgcgttcgtcgtctccttccccctcgccggccgcgtgatctgcctgccgcgcggacgccgcgggcgcgacgatgcacgacccgtcggagatccgcaacctccccatcgacatcgcctttggccgcctccaggagtggctcgtggaccgcaagcgagtgccgcacgactggcggaagcgcctcgccggtattcgcgcccgcatcgcgcccgctttctccgccctgccgcggaacctgcacccctcactcctcgccctcgatccagaagaaattggctaccttgaagcaaagaagatatacagcattctcctagaatccaacaccgagagtcgcaacatatttggccgcctgacgggatccgcgggtgaatgggagtcaattattaaagcttacgagaaggaccatgtcttccttggagaggcagcgcagatcatggttcaaaatgttaactatgacattccatatcagaggaagcagatgcagaagactcagcagcagcttgcagagcttgatcgaagggaggctgacatcaagcgtcttgcggcattgtcagcgactagatatgtagaagcctgccaggaactcggtttacagggaataaatgtgagggaagaactaatagagtccgcaaaaacactcccatctacttttagcaaaatcttggaggtcctgaacagtgatcctgtctcaaatgctatggagtactacacaacttttgttaaggactgccatactgaggacaagagaaatagtgattctgtgctacccaaactgaaagacttgcaggccaatcctccttctttgcatgtctcagtatataatgagatcaagagttctcttggagaggcatcaaaatctcctgggtttactgtgatcgcgggagaaattgactcaaatgttgctgctgctgatgatattgattgggacatttctgtggatactaatgaaattgattgggacattggtgctgtggaacaacctggtgaagaatctggcgatggctttggatcgtatgaaattattgatgctaatatagagctggccggttctgaaaattataatgttggtgtctcagacaaatcaatgaacaaagaagatcttgcatcatctgagtctggtatttgctgggacatcactgctgatagttctgaagaaattgctagtatacagaatgcttcatctgtattagagcaatctcagtctcaaatgatagctgaagatagaagtttgttgctggaaaaagaatataggaataatattctggatgatttactcgaggggagatgaggaatgcagacacatcatctctacagcatcaagtgcaagctgtctcaccttttgttctccagcagcatgctcctgacagtttggagaacatgcttgtagagatctcgtcagcaatctcattgctaactaatcagaagactcttgaccttataatgatccttaactctaaaaggtttctggatagattagtttcaagcttagaagagaagaagcatcacgaagtaaaactacgggaaggtttaggtgatttatctgttaagcgtatggagctgcaaaacgcactgtcatcatcatggccaaagcaagaggcagcaattacaaaaacaagggaactaaagaagctgtgtgagtcgacactgtcgtctgtttttgatggaagaccagtgtatataattggagagatcaatactttactgagctcaagtgttagtcaattagctggatgactgtatttccgttcctggaccaaataagattgcaaaaatattatcttatggtatatacttctgaatatttatggtttcctggtcctgtttctttgctgcacggaagtgcggatgtatgggtttgaattaaagtgtcagcttcatcgtagggaccgg

SEQ ID NO: 15829 - DNA, 1368 bp, Zea Mays
atggaacaaccacaatgcaatgcgcctttgcaggcagtggggcaagaaaagccgagggagaggaggaagcgacgctaccggcgatgcgtggctgaacaattgagggagagttttgctgtcgacgccgactatgaatacatttcaaaggaccacaagccagattgccaaaatgggtccagcagaagcaccaaggtttcctccccagatgtgatcactaagccagaccatgatgaatctgctgaggtagttgactcaaaatccgaagaggcacaaatcacagatagtgagcaggcaacatatgcttctgccaacaatgacttaaaaggaactaaggcctatcaagaagctgatgtttctggcctttacaatcttgcgatggcaataattgattacagaggtcacagggttgtagctcagagtatcatacctggtattcttcaaggagacaagtctgattctcttctgtatggctctgttgataatggcaagaagatatcttggaacgaaacattccattcaaaggtagtcgaggctgcaaagcggctccatttgaaggagcatgtggttttggacggttctggcaatcctgtaaaattagctgctacagtcgaatgcaagggcattgttgggagtgatgacaggcattacattttggatctgatgagagtgactcctcgagattctaactacattggacaagggcaccgcttctgtgtgctgagacctgaacttatagcatcatttgttgaggctgaatccatgaaacaatcgttgaagcagaaggttccagatgctccagttgcaagtacttctgatgctaaggctacctctgttgaagcagatgacaagtctgaagaaagctctgttcatacacacaaggaaaatgacaactcaagctccgagattcttttcaatccaaatgtgtttacggagtacaagcttgatggcagtccagaggaaatcgctgccgacgaagagttggtaaaaagggctggtacatatcttatagacatagtgatcccaaaaattgttcaggatctatgctcccttgatatctcccctatggatggacagactttaaccgatgcattgcatctccatgggataaatattaggtatctgggcaagattgcaggcatggtcaaacatttaccacacttacaggacttgttttctgctgaaataatagttagatctgcaaagcatgttatcaaggatatactgaggcaaagtttggatcatgatattgggccagctattgctcatttcttgaactgtttcatggggaaagttttaggtgcttctacagagggtagtctaagtgacatgcagtcaaagactctgaagtttcatttttttattttgatt

SEQ ID NO: 15830 - DNA, 494 bp, Zea Mays
gtggaaggttgcacaaagaactcatatcttcaggaggaatacgttgatggtgaagagattggtacaatgcaatgtgaacatcagtaccatgtgcgctgcattcacgaatggcttaagcagaagaattggtgtccaatatgcaaagcttcagctataccttcagagatgaccaagggagacgcatgaatcttggcccaaacttgtaaatagcgtggatttattattagacattgtagatgctgacgcagttcaccccaatatgtggatacgatagtctctcccgaacggtcgaacgcctggaaccttttgttactgcatcttttatcttcttagcacacccttgctgcttgacagcagtacgggtcagaaactcgaaaataaccgtggttctcaagaaatttttccagattctaaatatgaaattgttctccttgattgaaatgttgggttacatggtttatctaaagaccatctccagcaatttacccatatat

SEQ ID NO: 15831 - DNA, 1859 bp, Zea Mays
ttatttgcaaaaaaaccgcaatttggccgccggaaaccattcgctcatcaaggcgaggagatgagatcttgcagcggagagcatatgcctacaaagttctcaccccagctggttccctccaatattcccctccgacgatggaatatccccgcagttccaacccaggtagaacacaagcgccgtgcacgcttgcgcaagcccaaggattgccgctctgctctgtctcctccggtggccgcaggggcaatggcgattggcgggaaggaggtcaaggatgacctggaggaggcgccgccgccggtcctggacgaggccatgcggccgcgccgcgtcgcgctcttcgtcgagccgtctccgttcgcatacatctctgggtataagaaccggttccagaacttcatcaaacatttgcgagaaatgggggacgaggtcattgttgtgaccaatcatgagggagttccccaagagttccatggcgccaaggttataggttcatggagcttcccatgccccatgtatggaaaagtacctctttcgctggcactcagtcctaggatcatttcggaggttgcgaagttcaaacctgacattattcatgcgtcttctcctggaattatggtttttggagctctagctattgccaagctactcggtgtgcccctagtcatgtcctatcacacccatgttccagtatacatacctagatatacatttagctggcttgtggagccaatgtggcaagtcataagattccttcatagagctgctgatttaactttagtaccatctgctgctatcagcaaagattttgaaactgcccaggtcatatcagctaatagaatacgcctttggaacaaaggtgttgattctgcaagcttccatcctagattccgcagtcatgagatgcgagtcaggctaagtgacggtgagcctgaaaaaccactggtaattcatgtcggacgttttgggcgtgagaaaagtttggattttttgaagatggtaatggaaaggttgcctggagtaagaattgcatttattggagatggaccatataggggtgaactagagaagatgtttgaaggaatgccagcagtgttcacaggaatgatgcagggtgaagagctctcgcaggcgtacgccagcggcgatgttttcatcatgccatcggagtcagaaacgctcggccaagtggtcctagagtccatgtcgtcgggggtgcccgtcgtcgcggcccgtgcaggcgggatccccgacataatcccggaggaccaggagggcaggacgagcttcctgttcacccctggtgacctggacgactgcctcggcaaggtccagcagctgctgacgaacagggagtttagagaaaacatggggcggacggccagatccgagatggagaagtgcgactggcgggcagcgtccaagacgatccgcaacgagttctacaatgctgctatctggtactggcgaaagaagcatgcggagctggtgaagccgctgcagtggctggcacagatgttcctgccggcgcctgaggtccgcagcatcatgcaatgctgagtgaggatgctgttgcttgcagacatgatccagacaattgatggacggatgggcagatgcatatgcactccttgtaaattgaaattgtatgatgtatagtgctgtgtcgataggtgagatagttccccgtttttgtatggaaactggtattggactgtgattggtgtggcaattccatcgattacatgtgtcttgtgtagcaaaacaaaattggaattgtgctatatcttgctggacattgtaacctgtaaattatgatcatgccattttatttaaccgaagcggcaggagctttggca

SEQ ID NO: 15832 - DNA, 144 bp, Zea Mays
gtgtagtggtatagaagagtatgcgcgagagagatgttgcgagttcgaatctcaacattcacaaaacatataactttgattcaaaataatagtgaaaatgatagggcaatgggtaaggtaattgtatggcagagagttgttcct

SEQ ID NO: 15833 - DNA, 134 bp, Zea Mays
taggttagtgttgttagacgacgtccacttggcgaccattttcaggtttgtccatcagcatcatcctgcggattagcctgcgcttggggtcgacttgggttgtcttccgcatcgagcgattaattaacgtacct

SEQ ID NO: 15834 - DNA, 1772 bp, Zea Mays
tttatatactcgcttggcagtgttgccctgcaatactgctgctctggagctcatgcaaggtgtaagtcttactgcaagaagggcagctgtgcatgttaagacccatacatagcttctcttgattacacagcacggggggtgaaaacttgagatacagttgatctcctggttcagagtatgggttcaaggtttgcatcgcatcagctgagcaatggcctgtatgtttctggtcgacctgaacaacctaaggagaaggccccaaccatttgttccactgcgatgccatatactgggggtgacatcaagaaatcaggagagctggggaagatgtttgatctccatgttgagaagtcaagaaaatctggtcctctaggaaatgctccttcaaggaatacttcatttggaggtgctgcttccaactctggacccgtatccaatgctggcggtcggtccaattactctggttctctttcatcttcagttcctggtgctggcggatcagccagagcaaaatcaaactctggaccgctcaataagcatggagagccaacaaagaggtcatctggtccccagtctggaggagtgaccccaatggcacgccagaattctggcccccttcctcctgtgcttccgacaactgggcttatcacatctgggcctatctcttcagggccacttaattcgtctggtgttccaaggaaagtatctgggccacttgattctgctgcgtcgatgaaaatgcgggctacttcctttgctcacaatcaagctgttactaatctcaacactgaagatggttactcaattcagggaagctttccgaagccaatactctgggctgtgattctgctctttgtgatgggtttcatagcaggtggtttcattctgggtgctgttcacaatgcaattttgctgatagttgttgtggtgatatttggttttgttgctgcacttcttatctggaatgcttgctggggtagtagaggtgcagttgggtttgttaatcgctatcctgatgctgatctcagaactgctaaagatggacaatatgtaaaggttacaggggttgttacctgtggaaatttcccccttgaatcctcgttccaaagggtcccgagatgtgtatacacttctactagcttgtatgagtacagaggttgggattccaaagctgccaatacagagcatcggcgttttacctggggcttacgctcaatggagcgccatgcggttgatttctatatctcagattttcagtccgggcttcgagcattggtgaaaacaggatatggtgcacgtgtgaccccgtatgtcgatgaatctgttataattgacatcaatccagacaacaaggatatgtcccctgattttttgagatggctacgggagagaaacctttcatgcgaagatacttcaaatattgatgtgataccagtttaactggcggtggaagggtagttgccaaaaaaagtgcctgttaaatatttgagtctattgtttcatggaatgctagttgagaaaaatgtgcaaatgttgggtgggtgtgattatggtaggctgagggtggttggttaagctggcctttggatgtatagttttttcttcttcttttaattgtgttttgttgtttctttttaattttcagttctgagatctgaaacttgtgtaaccacatgccttttaatctaaatctgcgtggcatttagattgacttggctttgaaattagaaggacgctctcttttgtgctttgtgttaaaaaaaaactcggcc

SEQ ID NO: 15835 - DNA, 465 bp, Zea Mays
ctcatgcacattattccccacaacttgttgagtgatgaatatatgtgagctcactcttgttgtactcatgcccccaggtcaaggacaggtaccgccaagatgtggagcatgaaggatgtcgcgatgagttcatgagaggtctaggccgtcgtctccaagtcaactatggttgcagaggatcgttgtcttcgtatgatgtaattatttagctattttgtacaaaactcctattatatagtaaagatggaacattcgtttcagtaccataagtcatcatatgtgtgagacttgatcctagcacacatgtgattcgcgcctgggtttgcccttaaatccgggtgtgaaaaccatgttaataatgaattaattgaggttcaaacagttaaggttatcggttaattttctaacaatgatgatgagatcagcccctcatagatcattgtaacctctagaaacatacctcgg

SEQ ID NO: 15836 - DNA, 924 bp, Zea Mays
ggcaacggcccagagtcttgccggctttgctcccccgccgcggcgccgcgagcgcgtatgtataacgcgacccccctccccagtccccccagcggcaaggcggcaaccgttctcccgcgtcccgcactcccgccccttttccttttgctccttccttcctcgggaagcctagggcttaggctttaagcgccgcgatgtacggcggcggcggcggcggcgggcactacgacggaggcagcggtggcgccgggaacgctaacgcgctcttcggcggcgggggcttcatgccctcacagtccacggtggtcccggagaacagcggcctctctaagggtcggagcgcgcagacgctgctcccgctcaccgtgaaacagaccatggacgcggcgcaaaccagcggtgacaggtctaatttcgccatcaacggcgttgaggtgtctacgattaggcttgttggacgcatgctaggtaaggttgagcgtgtcacagatgttgtattcactcttgatgatggtactggcaagatagatgtgaatcgctgggaaaatgaggcttccgatgctaaggagatggctgatgctaataacgagaactatgtcatagtcattggcggtttgaaaggttttcaaggaaagcgccatgtagttgcctatgctgtgcggcgtgtgacaaacttcaatgaaataacctgtcactttctgcactgcattcaggtgcatatggagctcacagggttaaaggttgatggaaactacatatccaacttggtcttgagtgtttttcatgacccatctgtcatggaccaggagcatggactgcacatcaaagatgtcatagatcgtctcaaactaccagatgatgtagtcagaaccagactggcagcttgttttcctgcacatcgtttcttcaagttcttggttgtta

SEQ ID NO: 15837 - DNA, 3158 bp, Zea Mays
cgcttatcgattgaaaagccgatttcttctgtagatttttcaatggccgaggaggacaagggactgattgctattagagatctatttggtagtggtcagcagctgagggtgaaccgaagatgagcgttgtgggattcgacctcggcaatgagagctgcatcgtggcagtcgcgcggcagcgcggcatcgacgtggtcctcaacgaggagtccaagcgcgagaccccagccatcgtctgcttcggggacaagcagcggtttatcggtacggccggtgccgcgtcctcaaccatgaaccccagaaactccatctctcagatcaagcgcctgctcggccgcaagttctccgacccggaggtgcagagcgatatcgcctccttcccgttccgtgtcacggaggggcccgatggatttcccctggtccatgtacggttcctgggtgaggagcggacgttcacccccactcagctgcttgccatggtgctgtccaatctgaagagcattgccgaggggaacctgaagactgcggttgttgattgctgcattggcatccctgtgtacttcactgatttgcagcgcagggctgttcttgatgctgctactattgccggcctccggcctttgcggctattccatgagacaactgccacggcgttggcttatggcatttataagactgacctcccagagcatgaccagctaaacgtcgcgtttgttgatgttggtcatgctagcatgcaggtcagcattgtcggttacaagaagggacagctcaagatgctttcacatgcatatgaccgttctcttggcggcagggacttcgatgaggtcctcttcaagcactttgtggcaaagttcaaagaagagtacaagcttgacgtctaccagaatgcccgcgcatgccttaggttgcgtgtggcgtgtgagaagattaagaaggtgctgagtgccaacccagaggctccactgaacattgagtgcttgatggatgagaaggatgtgagagggtttattagaagggacgagtttgaacacatcagtgcacctgtgctggaacgtgtcaaaggacccttggagaaggccttgactgaagctggcttgacaactgaaaatgtgcacattgttgaggttgtcggatctggttctcgtgttccggccataatcaagataatcactgaattttttgggaaggagccaaggcgaaccatgaatgcaagtgagtgtgttgcacgaggatgtgctcttcagtgtgctatgctcagccccactttcaaagtgcgggaattccaggttaatgatgggtttcctttctcagttgcgttgtcatggaaacaagaatcccagaacagtgcaccccaacagacccttgtattcccaaaggggaatgcaattccgagcattaaatctctaacgttctataaattgagtacatttgaagttgatgttttgtatgtgggtacaggcgactcgcaaattccacaaaagataagcacttacacgattggccctttccaaccctccaaatgtgagaagaccaagctgaaagttaaagtgtgtctcagcatccatggcattgtcacagtggattcagcaatgatgctggaggaggatgtggaagttccagtctcatctgctaatgaagctctaaaggatactacaaagatggacacggatgatgcaccaagtgatcatgtttctggaactgatgcgaatatgcatgagcatagaagtgctgacactactgaggctcctgctgaaaatggagcacaagattctgaggaaaaatctgttccaatggaaactgatgcaaaggttgagccatcgaaaaggaaaattaagaaaacttctgttccgatccatgagttggtctacggcgcattgtctgccactgacctgcagaaggctgtagagaaagagtatgagatggctctgcaggacagagtaatggaagagaccaaagaaaagaaaaatgctgtggaagcttatgtctatgacatgcgtaacaagctgtacgacaagtataacgattttgtcacacccgaggagaaggaagggttgattgcaaagcttcaggaggttgaagattggctgtatgaagatggtgaggatgagacaaagggagtatatatttctaaactggaagagcttaaaaagattggcgatccaattgaggcacggcacaaggagtggacggaaaggggttcctctgtagatcaactggtgtattgtatcaatagtttcagagaggctgcatcgtccagtgaccagaagtttgaccatatcgacatatctgagaaacagaaggtcatcaatgaatgctctgaagcagagaactggttaagagagaggaaacagcagcaggatgccctaccgaagcatgctaatcctgtgctgctcgtatcggatctgaagaagaaagctgaaacacttgaccggttctgcaaaccgatcatgacaaaaccaaagccggctccaaagccacagactccgccaccacaacctgaaacccaagcatctgagcctcaaacaccagagcaacaacaaagccggtctggcggaactggtgagccgaggagtgagggaggtgtgcagcaggcctccggtgagcaaatggacatggacaatcctgaatctgctgatgctgccgcataagtttggttgccatctctatcttatgatcgatcaaaattttctgttagtgtctggtaggtggatgagttaaggcgacactagcattctcacaagcgatttcgttttaggcagttggattgaggtatatgcatcttgtccagcgttgtttagaaaaaaagttaggcaaaatatagcaagttttacataaacgttacatgatcgaaatgcaccatcggctataatcggatgtcgtggatgattcggtcaattataatttgcacttagattccttgagttaggctgcgtcacagctcaggtcatacatgtttctttgaagactacatgttctcgacagaacggaaagctattggtttttgtgcggatagaatttaagccttttttacgtggtgcacgttgtgaagtaattgctttgagtctcttgtgagctggtttaaccgtttatgttatcctttatctttgcctatgtacgagtatatgagattgcaatgttggtcgcacaaatgttta

SEQ ID NO: 15838 - DNA, 1101 bp, Zea Mays
ataattctaacatgtgtgactagtatgatctttatttatactgataaaaacgtgggcagtcaattattcgaccaaatgatatattttttccaaaaagaaagaaaacatggacatgatgataaaacagcccccgaagcgtgcaacgggtgagcccgcaggctccacgcggacgcggccatgctgtgcactccgcctccgccccagccgccgctgcagtcatcgcggcgcccgcgcccgctcccgctccgggccgcgccacgatgctccaagcccaacgacgccgagccctcgccgtccccaccgtccaccgcggccgccggcggcgtccggcgccaggtgctctcgcccgagggccgcgcgaagctggacccgcggccggaccgcgacttctacgcgctcccgcgcctggtgacgcacgtggacgacggcttcatcgccacgctcacgggcctctaccgggagcgcctccgcgccgggtgggacgtgctggacctcatgagctcctgggtcagccacctgccgccggaggtccggttccggcgcgtcgtcggccacgggctgaacgcgcaggagctcgccaggaacccgcgcctggacctcttcttcgtcaaggacctcaacaaggagcagcggctggagctggagagcggcaccttcgatgccgtgctctgcaccgtcagcgtgcagtacctgcagtcccctgaaaaggttttcgcggagatcttccgggtgctgaagccagggggcgtgtgcatcgtcagcttcagcaaccggatgttctacgagaaggccatcagcgcgtggcgggacgggaccgcgtacagccgcgtgcagctcgtcacgcagtacttccagtgcgtggaggggttcacgcagcccgaggtgatcaggaagctgccgtcggccggcggatcgccgtcctcgccgctggacgccgtgatgaggctgttcggcgtggcaggctccgacccgttctacgcagttatctcgtacaggaacttcaagccaatgtgacaccctgattgacagaacccgtgcagcattgcgatatgcagtgcatacgatctatagaatcactactggtgcaaagctaaaaaaaaa

SEQ ID NO: 15839 - DNA, 500 bp, Zea Mays
cgcgccctcacggagtaacgggccagctgtacaaaacaagagacgagaaatacctcctcgatttgcaaagagtcagtgggccacagctcctctttctggacttgtgcgcggcctttctaactcaactgagagttctttgatttctggtgtcagctttccatcagttgcattccttgcgtttcactagaggaatgtctaaatcgctcacaaagctgtaaatagtaatctccagtagattggattttctggagtatgtagatggtaggcatgagaagatgttatgcctggcggcgatcttctgaaccagactgtgtggagtaacttatctcctaattctttacggctggccagctgccggtgaattagatcagtgcttttgctggcataatgtctatctacattaataatttcagctattacaacggttaattaaatgctgtgctgcttacaggccaaatgagattatgttttgaaggcaactctttttttttgcattaatt

SEQ ID NO: 15840 - DNA, 1116 bp, Zea Mays
gtgccctccgtcctcacagcttctcctccagtcatcccggtcccggccgcggccattttctatcccgtcaaccacatcagggcaacctgccaaacaccgcgattgcgcaatccgtccaaaccccgtcaacttcctgattccctctcccggagccatcgagatgctctcttcctccgttagttcagctaccgccgcgctgtctcgcgggtcgccgccgctccaagaagcatgccccgcctattgcttccatctccatcgcctcgcccctgtctgaacgactcggtgcgccgtccaccactctccaaatatcggttcttcctgcccaggactcggaggcggccaagtccgcggcttggcgtgcgaatggcagagatgaccaaggttgggagcgccggggaaccggccgaggttggggtttccatggagagtgacccgattgtgggaggggaggcgccgtcccgcccggggtgggaagcgagccggtgggcgcccgtggaggctgcgctgaatcggatgagtaaatggctggtggctggttctcttgcttttgcagctatttggaagcgtgatgctgaaattatgtggtttttgctgggtgcggttggcaactctctgctttcgatggttcttaaaaagatgctaaaccatgaaagacccgcaccagctttgcggtctggccctgggatgccatcgtcccatgcacagtccatattctatgctgcgaccatcctggctctttcattgtactactggcttgggacaaattatctgaccatgattcttgggcctgcaactctgtcggtggctgcctatctgtcttggctacgggtgtctcggcgccttcatacactaaaccaggtcatggcgggagctgttgtaggatctgtcgtcggtgctctatggtttgtgctctggcattcgcttgtgcaggaggcttttgcttcttctctgctggtcaggattgcagtcgttcttggatcatcagcattttgtgttggctttgtcatctacatgattcgtcactggctcaaggatgagtaatgtacttcttagccgcaatgggagatcgactgataggcacgagatttacggtgattggaatggagccaatcctga

SEQ ID NO: 15841 - DNA, 771 bp, Zea Mays
acccccgggctaccttgcatattcagttatcggttcacgacgcaccaaccgaggccacaggccaccaccattccttccttgttccttccccagctccgcaggctgctcatggcatccaaacgtatcctcaaggaattaaaggacttgcaaaaggaccctccaacatcatgcagtgcaggtcctgctggtgaggatatgttccactggcaggcaaccatcatgggtcctcctgatagtccatatgctggaggtgttttcttggtgaacattcatttcccgccagactaccccttcaagcctccaaaggtatcttttaagacgaaggtcttccatccaaacatcaatagtaatggaagcatatgtcttgacattcttaaggagcagtggagccctgctttgacaatctctaagtacgaggcgacagcccgcagctggacccagaagtacgccatgggatgaaatgttcggcgttactggctaaatgcagacgattgtggtgttgcccatgaaactgttatcggggacgtatgttcttctgttccttgtgcattctccgatccatctctaggatccgagttctagtccaacattaacctaccattgccttgggtaatgagatgacttgtgcttgctgtggtaactatgctagtgttgatgttaatgattctcattgagggcttgttcagggattggagggtttaggggattttgacttattggcgagctctgctgccagtctatatctactattattacgctcgactgtataga

SEQ ID NO: 15842 - DNA, 1809 bp, Zea Mays
gcccaaaactgaacccacaacccgaaaccagcaggcaacaaagcaaccagaggcagagcgttcttcttccccgacggcccgggccgacggctcgactccactagtcgctggaaccctctgcaacaaagccgcctccacctgaccacctcccttgagctcttccccttcctcgtgggttgtgcgagccctctaccggcgcgcagtacaggggctgattgggtgatcaaacccgcaagatttgggtttgtgatttaggagcaggaggcggtggcaatatggaatataaggcgagatctactggaacttcaggaacttcgtctaaaagtttccgtgatctgtacaatatgaagtactcgagctacttaaacgacgaaccaatgccggatgctacatcggaaaaggagcagggaaatgagtatttcaaacagaagaagttcactgatgctattgaatgctactccagaagtattgggctgtctcctacagcagtcacatttgcaaatagagctatggcatatcttaaactaagaagattcaaggaggcagaggacgattgcactgaagctctgaatctggatgatcgctatattaaagcatactcacgccgaattactgcacgaaaagaacttgggaagcttaaggaggcaatggatgatgctgaatttgctatcagtcttgatccaaacaattcagagctaaggaagcagtattctgagataaaagctttgcacatggagaaaatggctaaaaaggttccagtgccagctaaacgtgcagtttctggaattgataaaactgcagatgtcacttctcacccaccgactatctcccagaaggacactattatggaagttgatctgcctgttagagatgcaatgaagatcaaagagagtgcaagcgtcaagtctaacggaggacctggagtaatcatcaatggcaataacgtgcagctccaaggtcgagatgccaaccagaagactgggccagaagtttcagtccaagatcttgcagctcgtgctgcttcacggtatatggccggcactgtgaaaagcattaagacacccaaaacagcttatgactttgaggtttcttggagagctctttctgatgacactgcccagcaaatacagttactaaagtcgattccaccagcaagcctaccagagattttcaagaacgcactttctgcaccttttcttattgacatcgtgaagtgtgcagcctcaattttccgggatgcggaggcattagctgtcagtattttggataatttggctcgagttccacgcttcgacttgataatcatgtgcctttcatccatgcacaaatttgaactgaggaagatatgggatcaagtattccttgctgaaaaagcgctggctgatgatcagatggaagctctgaggcagctgcgaggcagatacattccgggaggatggcaggatagcatgctcacttcgagttaaatcaatcaatcaaatgacgacgatgtaaagcaggattgttacaaaaaccttttgctggcttcgcaactgatgtctctgcatccatctgttctagaatcaggagtgcctgtcgattgttaagcccactggtctggatgtagcgaacggttgaagcatccagtgtaggaacatgtgtcgactgcaaatggttgagatttgttctgttgtgcttgccgctactgtaacctcgctttgttgtgcgccggattcctgacgctggcacatcgtacgcttgtcggcgacaactttatggaacacacacattttgatgatttaaagaattctctataaaatgtcttctaat

SEQ ID NO: 15843 - DNA, 1406 bp, Zea Mays
cgaggagtcgagcgaaccacacaccttgtgaggagtacacggcgctccctccctcctcgagagcgtgtatgcgcagctgcagctccgcaaggcagatgttgctgactcgtctgtccagcgtttcttgctcgtcaacagcgcagcagttgcatgcgggcgtcggcaagttcgccgccgccgcatgctggagctggaagaagaagcgcgaggagctcccctgcttcagggccagactggccggcaagccgccgcgcgcctcaccggcgaagggcggcattgtcccggccagcgacgatgacgacggcgttagcctcggcaccgtgaagctgccgggcaacatcgacaccgctcggttggagtccttgctcttccagatttcttcacctgatgcgatcgaccaggtggacaaggttgagggcgggatcaggctagggttcgtcgcggtcgaggacggcgcgacgcggacgctggtgtacatcgattgcctggtctctccggccccggatggctctggtccggtgttccgagcgatcaggaacggtcctatgaaggacaaggagccacctggggagcccaggatcatgagaagcctccttcaggctctcgaaaagtctattcagatcgctcgtgtttgaccgtgtaaacgccacacgatcaagcgctgcatctctgtaactattaattaagagccctctaaaccctgctattctagttgtctcttgagtcttgaccattccagggaaaaaaataaaccaagaaagttacaggaaccagcaccgtggtacagcatttcttcattattgattaccattattacgcgattccagcagttgtgtcaattgatctaagaagagatgatggttacaggctcaaacagcaagaaattatgtcaactgaatctaacagctggtacatttccaacccgcagttcaagtatacaggaatccgtgtcaaaacaggctggaaaaaaaaaacagcctaaacctcaccagctaccaaccccttcccaaacatcatgaggaaacacggatcacactttatgatgtggaacaagcttcgagctttgggaggacgctgcgccatgcatccgcaatgtccttagctagcttagcctgacccttggcaaattcatggaatgcgagtccaatgtcagctgttttctgctcctggaaacgagagagctcttcgttcattagtcttactatgtgttcaaacttcttcgtagcctcctcactgtctgctttcaactgtaagaacagcaacacatcagcgaacaaaaacttctgtaaacctcgtccacaaggctatgtaaagaattcctcaatggaaagttacagcaacttgcccctctaaactcagattctgcttcggcatacttctcagggttcatgaacttcaatttttca

SEQ ID NO: 15844 - DNA, 1514 bp, Zea Mays
cagatatttgagcttcatttgaattcaggaatctggcaatactgatattgaaggagtggactcctcaaatgcgtgctatggtggaacagctgcattgtttaattgtgttaactgggttgaaagcaactcatgggatgggcgttatggacttgttgtttgcacagacagtgcggtttatgctgaaggtccggctcgtcctactggtggtgcagctgctattgcaatgctgattggaccaaatgctcctatttcttttgaaagcaaatataggggatctcatatggcccatgtatacgacttttacaagcctgatctcgcgagtgaatatccggtggttgatgggaagctatcacagacatgctacctcatggcattggactcctgctacaatgtattttgtaaaaagtacgaaaagcatgagggaaagcagttttcaatttttgatgcagattatgttgtgttccattctccatacaacaagcttgtacagaaaagctttgctcgtttgtactacaatgatttcttgagaaactgcagcacggttgatgaagagtcgagggaaaagttggcaccgtatgcaggcttgtcatctgaagaaagctaccagagtcgcgaccttgaaaaggcatctcagcaagttgcaaagaacctgtacgagtccaaggttcagccaacaacattgatcccaaagcaagttgggaatatgtatacagcatcactctatgctgctcttgcatcggttatacataatagacatgaaactctggcaggccagaggattgttatgttttcgtatggcagtgggttgacatcaacaatgttctctttcaagattaatgaaggccatcaccctttcagcttgctaaacattgcaaacataatggatgtttccaagaaattgaaggcaagacatgtggtcccgccaaagaaatttatcgaggtactgaaactgatggagcaccggtatggggcgaaagatttcgtgaccagtcaagacacaagtttgctatctgtaggcacatattatctcacgcatgttgactccaagtaccgaaggttctatgacgtgaaaggtgacggtgtcaccactactgcaatgtccaacggccactgatctgtcttctgcccggagctgcaacaagtcaaataacagaggcaggtgttcctaagcattctgattcttcttagattatctattaggaagggacgctggagcttagattaatctctgccaagttgtaaggttgtaaagttagttagagctgcgtcattgctgtaatgcttgcttggtaaaagttctggcgctcttcagttcttcagtgcttgcaaaattcaaatcaagctcactactagttgtaagaattctgaataatctgcagaatcactggttacatccaagttacgctgttgaatgcatgatttcatgtttaacacgattaatgcatctggattcagctgtgttgttggagtactcgtgtcgtgtcttgtacctttttaaaaagaagtttcttaca

SEQ ID NO: 15845 - DNA, 155 bp, Zea Mays
ataaatcggcttatcgttacctaaacccgatctgaattcgtgagattgacgacgatgtccagtgggagcatttctcagcacaccatggaagcgacggatgaggttcgctttttctttacccagatttccctagatttctttctcgcggagtactg

SEQ ID NO: 15846 - DNA, 1136 bp, Zea Mays
agttggaggtggcccaaatgacttctttcctgctttacagttgagagcccaatcccatatggtagaggcccgcacgtttccccttgcgacgtcaacctcgttctacccaccagccaccagccggcacaaattctcccttcccacaagaacatcacacggcgatagcaaaaccttccgtcggaggatggcttccgccggcgctggagaagggaaggagacggctgccgggagcagcctccacagcaagactctcctcaagagccaaccactgtaccagagatccaaaagtttgtggaaatcaggaaagaaactgacgaagattccacagctcaccaaagtgaaatcgaatggagcagctcacctgtagaagaactaaatgagaagataaagatgctcgaattgaaactggaagaggccaccatgctcatcaatgagcgggattcagaaatacttgaactagatgcactcagccatgtacaaccacagaatacagtagcatgtaacaactatccgctgtccctacagtctgatgtagaccggctgttcctggagaagatggaagcagagattcagtgctttatccttacaagagcttctcaggactggaaactcctgacaatggatcaatttgctcttaacgaggcacagaaatcccttctgtcggatcacaaatccctagaaactaaactgaggcacgccgagaacagggcgatgatgctggaggagatggtggataaactagagtcgcaatgcaaggcgctgtctgagacttcagaagttctgaagctgcaggccggagctagcagggcctctttgttctgctcgatccagtttgtgctgctgtgcatagccattgggaccctcctcgttcgcttcctgtcctcttctccggagattgtacctacttgaggttagagaattatgccagtcagcctttatgtaggcgttgttgaacggttgtttactgtaacttattagggcatcaatcgccttacagattttcgttttttgtaccatcaactcgattttgctagtaatttctttatgaatacgagtttactccacttctgggttctctggattctggaaatgccacatgtgtagttttttttctatggtcggtataatgttcgaaa

SEQ ID NO: 15847 - DNA, 2300 bp, Zea Mays
ctctccctttccccctgtgcgaaaaaccgagcgctccaagccctgattcggagatgaacgcgtccaggaaatccagccatctctccagcaaggacagtgcagagaccgcgagggatatcatcaccacgtccggccaaatccaacccctcaaaatcccggacgctgttgctgcgctcgcacaggctgctgcaaaggcaaatgatcttccagggtggccgttgttctcgcctcctaaggtgcagttggacaagtgtaccaagtgctccagagaattctgttctgcaatcaacttccggaggcacacacgtgttcatcgtagatccctcaagatagatagggattttccaaagaatagagaccttctcgctgcattctggaataaactcactgtggatgatgccagcaaaattttgtccttgacaggtgttgttattgagggtgtaactggttcatcaattttgacagcactgtcatcatggatgtgtaaaccagggtatgcttcgttgccagttgcatatgccagagctggcagtgagcttctggatctaattcaagcaaagccttcaatgcatctgcctgtttcatcggatgaactatttagtttgctcgatgaagcaagtgaaaaaacatttctttgcacaaatacagctgcttgtatacagaagtttttatttgatggagaggtagaaaaaattgcaactgagttgaaaaatgttgtttcgtgcgctagttacatgcttgaacaaaagctgcttgaagcatggtgtgctgataagactgctgaagcattaagatgccagaagttgctggaggatgaagaggaagctgctcagaaaaggcaagccgaactgatggaaaggaagcggatgaagaaacttaggcagaaagaacagaggttaaaaaacctcaaggatgaggatgcgacagttcagtcacctgaaatcatggatgatgcgacatgttctactgccattcaaagtgtgaattccatttatgatcctgactgttttgagcaagaagaatcgcagtatcttcaatttccagcactaattactttggaaactgacaatgattttaatgtggacctaccagtagaagatatcagttgtgatttggggcctgaaatggataaaggtgttgtattaaggcaacaagttgtttcaaggcatcatttaggcagaacggagaagcttgctgaaagtagcattttatctggttccgtagttacttcaaagcatgcagctttagcaaggccttcaaattacaaggatccaaatgtctgttctgcaccaagtagaaacaaaacttgtgaattgaaactacggtctgagattgaagaacagtgccaaaaacatgagttagatgtagatgaacgtggcattggtcctagcaaaaactctcgtgtgctaataggatctataattgtcgcaattaaagattgtagtgaacacttgctggacttaggttccaagaatgacccagtacctcccaatgtaaagacaaagaaacatgcatcagtcaaggtggtgcaacaagttacccatgagggaaacagaaatgaaggtgttcctgatagtgataaccgttctagcctcagtgttactacagatgaaatcagttattcaacctgctgcgatgcagatttggcagtggatgaacatttacaatgcaccacgttttccagtgaagaagcgacagcctttctttctcaaagatggaaagaagcaatagccgccgatcacgtgaaacttgttgtgtcctgaaaactaaaggaatggcagaataaagaaattctgttgagggcaacagcatggaagctccggccgacttgtcgccggatcccacagccctacaacataggtggttcttatctagcctgcagggtgctatgaaagtttggatgtcaagtttgtgttgcggcatgaatggttgtaaaatggcaggtgcattttgcagctgatttgagattgaagcagagggttctagttttacaaggggacagcttgtgtgatgggatctgtttttggtaaggaaaaaaaagagtgatttgaataatggtttggtcgcacaagttcctaatcttttgtactcgttagagtctgctaaacacgaaatgcatgtgtgttgaacatgttgtgcttgcgggttgcggctttcatattgtcccagttctttctgctgtcagttcacgtaactcgcgttcattttgtatcgcttcgtgctgtataacccgtactatttgcaatctattctggaagtctgcagaaactaagtaatttatagattgaactatttgatga

SEQ ID NO: 15848 - DNA, 1203 bp, Zea Mays
agtgggcaacacaatcctctgcattggactggtaatccggaagtgcgggttcgtttttctggatttggggcagaggaggatgaatggatcaatgttcgcaaatgtgtgcgacaacgttctcttccatgcgaggccacagaatgcgttgctgtgcttcctggggacctcattctttgttttcaggaagataaagagcaggctctctattttgatgctcgtgtccttgatgctcaaaggagaaggcatgatgttagaggttgccgttgtagatttcttgttcgctatgatcatgactcttctgaggaaattgttccactgaggaaggtgtgccgccgaccagaaactgactacaggcttcagattctgcatgctgctagagcggcagccgccagtgcagatattcacactccacccagagaggctaaagtggagttggcatccaatgctaagagcccatatgagcaaaaaccccagaagcagtacaagatgatggacgtgaacactgatgaggaggtgaccatggtctccaccttggaacaggatgagacacaaggcaagactgtagcccccgtaccgtcagcaactgcagaaacccgcaattcaagttcagacgcggtgatgaaggatgcggaggcttcgtccgtggctcaagacgatgatgaagtgcaggtggttgacaagatgaaagaggggtagctttttttcgcactttttgtgtttggaggacttgatgttgtcgtacagagttttctaatttagtttgtagtatatgtttttctaattaagtactccttccattcttttttatttgttatggtttagtttagaaatgaactaacgctcgttcttttttatttgtcacgttagtttaaaaatgaactagcggacgacaagtattgagaacggaggtaatacagtacttgtcgtaattaccgtgtggcatcttaatggatggttacgtgtgtctgacgcgtcgctgctctcggccgcaagcgaacgagtattgcgacttgtgagcgtgtaaagaaccctcactgcttgtgtcacacacgagcagctcctgggactggagttgcgtgtgagaatggccatgactttcagaaaagagagtgtggtcccggccgtcagcgagagcgaaaggagagggaggaatcggccagcacgacgaggggaaggggaatggcggatcgggctaagccgagg

SEQ ID NO: 15849 - DNA, 784 bp, Zea Mays
gtcatttcagcttttgttgccccttgatactttctgattcttttgggcgctaaacaaggagaccaacaaaccgtgaggagatcctgacgatcgacatcaagccaggatggaagaagggcacaaagataacctttcccgagaaaggcaacgaggcacgcaacgttgtgccatcggatctggtgttcatagtagaagaacgggcgcaccccaggttcaggagagacgggaacgacctcatctacactcataagatctctctggtggaggcattgacaggctgcacagtccaagtgacgactctggacgggcggaccctgaccgttccggtgaagtcggtcgtcagccctacatacgaagaagtcgtgccgggcgaaggcatgccgatcacgagggagccgtctaggaaggggagcctgaggatcaagttccagatcaagttccccactagcctaacaggcgaccagaaggcggccatccaacagcttctgtcttgaagctctctctctctctctctctgtgtgtgtgtgtgtgtgtacaatgcgaggagtgttttcgtttgtggagtagttgtagtagtgacattagctgaatgcaccgtcacgtttttttttcatgctagtgttggcctattcttttctagctttggtggagctgcagctgtttgcgacatggtcatgacgctattcagtattcagatagattatcagttgctatgtctttgttggatcgggcctgtttgtttggtttctatagcttctacagtgttttttgtctctataaattg

SEQ ID NO: 15850 - DNA, 1491 bp, Zea Mays
actaacgacacgagtagtactgatcagggtcagggaccgtccgtagtttcagtcccgctcccgcagtctggttcgtcttctcttctccccacctgtctccacaattccccataggaggagggggaggtagagaagcgcgaatggagagcaggaacgtagtggtgtgcgacaatggtaccgggtatgtgaagtgtggctttgctggtgagaacttccctacatctgtgttcccttgtgttgtcggacgaccgctacttcgctatgaggagtcacttcaggaacaagaattgacggatattgttgttggagcagcttgtgctgacttgagacatcaacttgatgtatcatatcctgttaccaatggcattgttcaaaattgggatgacatgggccatatctgggatcatgccttctacagtgagctcaaggttgatccatctgagtgtaaaatcctactgacagatccaccactcaatcccgtgaaaaaccgagaaaaaatgatcgagacaatgttcgagaaatataactttgctggggtcttcatccagatccaagcagttctttcactgtatgctcaaggcttgctaactggacttgtgatagattctggtgatggtgttactcatgtggtgcctgtagttgatggatactcttatccacatctgacaaagagaatgaatgtagctggaaggcatataacatcttatcttgttgacctactctcaaggagagggtatgctatgaataaatctgctgactttgagactgtcagagaaataaaagagaagctatgttatataagttatgattacaaacgagaataccagctaggacttgagaccacaatccttgtgaaaagttacactatggaagagttattaaagtaggcactgaacgatttcaagctcctgaagctcttttcactcctgaactgatagatgttgaaggtgatgggatggcggatatggcattccgttgcattcaggaaatggatattgacaacaggatgacgctctatcaacatattgtcttaagtggaggaagtaccatgtaccctggtctgccaagtcggttggagaaagaaattcttgaccgttatcttgatgtagttttgaagggaaacaaagatggcctaaagaaattacggctgaggatagaggatcctcctcggagaaagcacatggtgtatctgggaggtgcagtgcttgctgggatcatgaaggatgcacctgagttctggataaccaggcaggagtaccaggaagaaggtgtagcgtgcctaaggaagtgcgggcagtcataagtcttgccacatatcatccacagaagaaatggaggttgcatgtgtaaagaagagctctgttgttggtgttgtgtattgtagtgagctatagctgtcctgaacatgcttggggataaaccatgtttgtattggcctactcaatttgacctctgttattgatcatcctttttagatatggaacatgacgg

SEQ ID NO: 15851 - DNA, 809 bp, Zea Mays
ttctgctgctagctgcctcgctagccgcctagcccaaccgcaatgcgcgccatcgcctccccacttgcgcctcctcgcccagagccacccattgccgtccgatcaagatccaacgccctcaaacgcgccactttaccaccagtccccctcaccgccgcccgtctccgcctccgccgacaaccggagccagggccctcgccacccacccgattgagccaccccatgcctcctcccactgcgacgatgtcccccgcagctggcggttcctttcctgagctcacctgtcccgcggactttgccaccgtcgccgcccccggcggccgcttctccgtcgtcggcttcggatccctcctttccgagcggagcgcgaggagcacgttcccggagctggagggcttccgtgtcgcggtgctgcgggggttccgccgagtcttcgcccacgctgcccccatcttcttcgagcgcggcatcgccatcgaggccaccaaggaattctcaagcttgagcgtagagccatgcgacagtgaactgatagtagtcacggttttcgaaatcaaggaggaagaggtcccggcgtttattgagagggaacatgagtttagatttcttgcggttgtccctgaaggattggatggggtaccttttacaaatcgagcagttgtctgtgcacgctacagcaatgaagaatatttccaagagagatgccgaggaagcaaggaaatatataacaagtactatggacggtacaatattgacaaaatatggagagatgatatcttaccatgtcgcttatacctcagacattggtt

SEQ ID NO: 15852 - DNA, 134 bp, Zea Mays
cggcggcggcgaccaggtagggagtggtcggcgtgaggagaggaggggaagtttagggggaggaccggaggagacgtgcggttcgggtcggtgtgttcggtttgggccgtggcccgtggggatgcgccggcaaa

SEQ ID NO: 15853 - DNA, 2014 bp, Zea Mays
tacagctgatatgcttcaatgcagagagaaaaactggtcctggattggagtctactaagatgcatgcaatgcgttatctccttatacagttactgctacaagttcttctccatccggatgagtattgggaggctgcagttgatgtgactatatgttgcaagaaatcctttcctgtcattgctcaaggtgataactcgagtgcacaagaatccgctgaacacggttcacaggagtctgatgaggatggttttgaggaatctgacgaggatggttcagaggatcccaatgaggaagtttccctagagtttatggatgttcttgtccagactttcctctctattttgcctcatgcatctggacctgtgtgtttcacagttgaacaggtttttcgtgtgttctgtgatgatattacagaaactggtctccttgatatgttgagggtcgtgaagatagatttgaaagaccgtcatcaaacagatagtgatgatgaagatgatggtcgtgttgatattgaagacgatgatgaaactgtaatggaagatgaagaggttggggaaattgataatgttacagatggtttggatgagaatacagatgatgattctactgatgaagatgatttggatcaagatgatttcaacaaaacagtcccgaatgagacaaaaggtggaggcaaaacagaaactactaaagatggggatgattcagatgattcagatggcatggatgatgatgctatgttccgtattgatccttacattgcaaggatattcaaggagcgcaatcttcctggtagtgatactaagcaatcccaacttatgcgattcaagcttcgtgtgctgacgttacttgatatatatcttcagaggaatccagggaaagttctggtgctggaggtgtattctttcttaatgcaagcttttgtaaaatcacatggtgctgatggtactgaacagttcaggcaacgtatttccggcatactgcagaggagggtattcaaagggaacgagtatccaaaaggcgatgccgtcgaatttggtaaactcgagagcttgttggagaaagctctgaggttgacatcgcgctcaagatacaacacggttgcttccgtagcacagaacgccacattttggatcctgaagatcatcaactcgaagcactgttctgagcaggagctcgcacgcgtggttgatctgttccgttcaatcttgagcgattacgacaggaagaaatcgcggctgaagcttggctttgtgaagcaggttgctaagaggaacccttggatagggcagaagctcttcggttttgtcctgcagagggccgaaaacacgaaggcgcagtatcggagaaaccagctgctggagttggcagagttcatactgaaatcatgggccgatggcacgtcagagatgttcttgaaccatctgtctcagctgtgcgggttgatacaagcagccctttcagccgttgccgaaaacaagtcgcgccgcaaggaagtgcgcaacttctgcactgggatcctgcagacggtgctgaagcttggtctcaaagaccagttccagaaagcgttgagtcctgaaacttattccctctgcgaggccaagctaggggctgcgtttaccgccttcaaaaagtgatcatgtgggacaccgattaaattcatttcacacagaccgtggatccttggaagttttataagaagaattagtgtatcttctagtttttgagctcggtgagagtaggatcaatcaaattaatgggtgcttgtgctagacttttagccgcagggagggatgcatgtacaagttgcttgggcccttattggatacaaaatgtttttatgttgttgcgtacgtaaatttgagcaaatattttttttattgaaagagcgtatttggatagggcgcctgaagtttgtgaattgcatccctttatatcatctttgggagaaaggtaacgagggggctaaaatctcctagctattcgttcaaaatattagtaatttcttaatctt

SEQ ID NO: 15854 - DNA, 412 bp, Zea Mays
cctttctcgtgcactctagtaatgctgcccacctagggcgactgggcgagtcagtacttcagacttgagtccacccagccagccaagacacgcagcgcaggcgcatcccagccagattcaacccgagttcgcgacgagagcacgagatggcgatgcggacagcgctgacctccctccccgcgcgcctgcgcgcccctgcgccccccgcggcgacgggcggccggcgcctcctcagcgacgggaaggggcgtgtgctcagcgaggaggagcgcgccaaggagagcatctacatccagaagatggagagggagcggcaggagaagctgaagaagaggctcgagcaggagaaggccgactccgacaaggccaagcccgccgacgccgacaaggtattttcggattcagaattatg

SEQ ID NO: 15855 - DNA, 982 bp, Zea Mays
cccgcccacgcgagagcgagagagagagagaccgaagcaccagcaccaccagtgccatacataccaaacgaggacggtgaggagaggagatggccgcctccgggaacaacagattctcccttacgtgcgctcgcttgcgcaagttcatgatggagcagaacaggaaggccaccctgaccatcttctaccaggggcaggtgtccacgttccaccacttcccagcagacagagccaaggtcctgatgcaaatggcaagttctgtgaccgggaacacgccggagaaaggggtggcggtggcgaccgccgtgccaaagaaggcgcagaccagcgatgaccagccatcgcctgcaggggcaggcatgccgcccatcgcaaggaagctgacgctgcagaactttctcaggaaaaggaagaacaggatcgcaggcaccgacgacgctgaccgcaacgaggatgcttcgccgtggaagaagagagactccgccgccggcgccggcggcacccccgcgggagacgtgcccgacgatgcctcgtggctcgcgctcaggctctgaaacagtgaaacccttcaccgcttattacatgagaataataatatggaagagaaggatacatcctccgagatgatacaataataataatgccgtgtctgtcccaggattcttaggacctccgaagaattcttaggcactgtgtctgtcgtcgagagccgtagcttatcaaaaaggggaagcatatctttagaaagctctctttcgaaaaacttgagaagctgttctaagtgagcttacctacttgtagtacaaaatgtagtttttatttgtcaatttgaactttgaagaagcagagaccctacctgctggggcggagcttttggcctttcaatagctttttggagaagcagaagcttccccaaatagagcttaattacattactgttggcaggactaataataatgcggcgtcaagcagttataaacta

SEQ ID NO: 15856 - DNA, 551 bp, Zea Mays
agtctgcatcaccaactattccactagtaggtctaaattagtagccaagatgacgtcagcagcatcgttccccagcagcctcttccccttcccgaccagagcaagcacgccaccgcttccgtcgtcgtcctcccgaccgtctcactcccgcccccacctccgcatccgatctccgaaacctaataatccaacggtcgcgcccgcgtcctctcggatggaggtggcccagccccaggcgagcaacgcccagggaggggcggagccggccatgaagctactgttcgtggagatgggcgtcggctacgatcagcacggccaagatatcaccgccgccgccgtgcgcgcctgcaaggacgccatcacctccaactccatccccgccttccggggcgggtccattccaggagtgaacacggaccagatgaagctgcagatcaagctcggagtgcctaggtcgacgcagcacttgctggatgctgagagagtcaaggccgtcttcccctaaatgatcagtaccaatgctgcaagctggcggcagagccttttggggc

SEQ ID NO: 15857 - DNA, 785 bp, Zea Mays
atattctgcagtgtgactggccaggttttgtagctggatggctgtcagggagtgatttgaagaagcttgccttgtttgggtgtcccactgttgagcgaagaacggtttttgcatcaaaaagattaagagccttcttcaacatccaggaagacaaaatatgcggttcctgtaaactgagaagttcgtgcaagtttgtgaaccaggaagtggccaggcataatagagtgattctatcagatacgatgagaattatctccttgtttgtactggacgcttgcccacaagagctcgagattaccgctgagttaaaagccagtgtctgcaagctgctaaaggacgccataaatctcagcagttaactgctgagcattacggagcagaagtttgctagttttcttgtccttgtagttctaatagcgtgctgtcagcatttatctggacttatggaggaaattgccgaggcccatgtttgacgttgcgctcgcaatcgctccctgtgaaggttggagtggtgaaccccagcgacttccttctgatccgtgttttcttttgtgcaactaatatgaagatgaagtacagagtatgtaaaaacttaagatgcatatcgctctgtagctccttttcaactaatatgaagatgaagtacagagtatgtaaaaacttaagatgcatatcgctctgtagctccttttctttttgatgtacgtagtcatataccatagtactgttatcgtttgctgcctcgcctccatttcgttaaactttggtgaactcaggttcaatct

SEQ ID NO: 15858 - DNA, 2224 bp, Zea Mays
cctcattcttcctcccccaaagactttgacttggactattgcgttaaacaaagttacatcacaagtccgtgcctgtgtacctgtcggagatggcgccggcgcgtctccggggcatgctcaacatcggcttccagctgatgatcaccatcggcatcctggctgcggagctcatcaactacggcaccaacaagatcaaggccgggtacgggtggcgcgtgagcctggcgctggcggcggtgccggcggccatcatcaccctgggctccctcttcctcccggacacccccaactcgctgctggagcggggccacccggaggaggcacgccgcatgctccgccgcatccgcggcacggacgacatcggcgaggagtacgcggacctggtggcggccagcgaggaggcccgccaggtgcgccacccgtggcggaacatcctgcgccgccggtaccgcgcgcagctcaccatggccgtcgcgatccccttcttccagcagctcacggggatcaacgtcatcatgttctacgcgcccgtgctgttcgacacgctgggattcaagaacgacgcctccctcatgtcctccgtcatcacgggcctcgtcaacgtcttcgccaccgtcgtgtccatcgtcaccgtcgaccgcgtcggccgccgcaagctgttcctccagggcggcgcgcagatgatcgtgtgccagctcatcgtgggcacgctcatcgccgccaagttcgggaccagcggcacgggggacatcgccaagggctacgccgcggtcgtcgtggtcttcatctgcgcctacgtcgccggcttcgcctggtcgtgggggcccctgggctggctcgtgccgtccgagatcttcccgctggagatccgcccggcggggcagagcatcaacgtctccgtcaacatgttcttcaccttctgcatcgcgcaggccttcctcaccatgctctgccacttcaagttcggcctcttctacttcttcgccggctgggtcgtcatcatgaccgtcttcatcgccttcttcctgcccgagaccaagaacgtgcccatcgaggagatggtgcttgtctggaagtcacactggttctggaaaaggttcatcgccgacgaggacgtgcacgtcggcattggcaacaaccacccggccaaaaacggcagcgacaccaagggggccgacgcgtgaacgtgatctcaacatctatattccatctacagtcacaactgaaatgtacatttaggcttccattgttccatcaactagtagctacatgtcctcctagtaaagtaccagtgtttgtttgtgtaatgtttgttacgcccattaaattcttcttggattggatgaactacaagcaaagacattccctggatgcagtacaatgataacagcagccagtaggcaaacacattccagatggaagcaaagagattatttgccttttccatcatgtactactaccaactagccatacataaacaacaaaaacagggcatgttcacaaaatttcaccaccaagcaatagtacagtcttatagaagacatcttgaaaaaaaatactaatctttattttgtttctttcaagctttattcataaggcaagtaaatcatacaattcccaattgccatcaataccactcaacaatattagaaaaaaaaatatgggctgatatgaaagcactgctctgtttactgttttgagctttattcacgtgagagagaaaaaaaatccaccagcaaaactggtgcctcgctttacttcacaacaataccatggtagtatatcgatggtcgtgcttgactgatcttactgtgtccttccctctgtctgggtttgcttcgccagatctatggcactcgcatgttcaaggggccttgaccccagcgaggtcttgtgcgtgttgcgggctctcgtgtacttgagcgctgagcttgacacatatccagagcgtccatgccgcgagctctgtggcttgtgagcagacggggcacccaccaacctggaagatctgcggtcgggtctgccaccacggtcagaatggtgcgaagaagagatcttgcgggtatggcggtccgagacgtcttttgatccagtcgccctaataggctgcttgttgtacacagcgaggtttggcaggagaccaagcaggtacttcttcaggtgctcatcgcctacattcttctgtgcagggttgccggcaaggttaatggcttctagagagttg

SEQ ID NO: 15859 - DNA, 253 bp, Zea Mays
tgcaggggttgcctattagtaaggcaatcattcttccacaacaatccttccaattttgttgacctgggtggtggtgtagtgggctgtagaggttttcattctagttttcgagcaacccagagtggacttttcactcaatatcgatgtgtcgactacaatgatagtgaaacctggtcctgtcattgattttctgcttgacaatcagaaagttggtgatccaagcatgattgattgggctaagttttgcaatttg

SEQ ID NO: 15860 - DNA, 471 bp, Zea Mays
ttgttgcgttagcttctccttctgcactgaggtgggtcgagagcattctcgaggcgctcagagtccacaggacagcatcaaaagaggccccaaaacgttgaaaacgggcggatggcggagcttcttcttggcgttggtagccgtccgcagtgtcgaagaaattctttgcttctttgacgacaattgccccccgttgagggaggtggtggtgtcaagccatggctttccactggcccagtttgtaatggattcttgggccgaaaggcccatctctatatgtcttgactcgcaaggcgattgcatcagtccatccatccatttcatggagggttttagcagtgccgtctctgtttcgctaatcggtgatggcagccagccttgttgtactttgtgggtttgttgacgcagccggtcggattcttcttattgccggattggttgcgtaacgctaggtggttctgaatatcggcg

SEQ ID NO: 15861 - DNA, 372 bp, Zea Mays
tgcaaaatgtaactggatgtcgaaacaaaaaccagcagagtactcctatataaaacgccgtactggccacatcgtcgatctcccccaacatgttgttcaggctccacacttgacagggcacagggcagggcgccaggagacggggagaatctttcgccctgaaaaaagagcaaagtgtcagccctttccccccggttcctagttttggtactactacaggctcccgctgcatcatccccaacgaaccagcagagctcgcaagcaacaaaagagaaggacgaagcaggcgcagccgccacacggacacgcagcagagcatcgccgcagcggtccagaggcatgggggccgccgccgccgcaaagcacgccttg

SEQ ID NO: 15862 - DNA, 570 bp, Zea Mays
tgtatctatgttgaagaagggggcgagactattttccctgatgcaaatgtgaacgccagttctttaccatggtacaatgagctttcagattgtgccaaaagaggcctttctgtcaaaccaaagatgggagatgcgcttcttttctggagcatgaaaccagatgccactttggacccattaagcttgcatgggggttgtcctgtgattaaaggaaataaatggtcatcaaccaagtggatgcacatccatgagtacaaagcttgaggcttggagaatcaaatatatgctgttgaattgggtttgtaagatggatctttatgcatgtgacttggggatttctacgggattgacactcattaccccaactatagaggagttgtgtagtgcctatagagtttgagattttgtttttgtgtcatgcccctaatattagtacatgaatgttgtgttactatgatacttgtaagctttggtactaatgaatagtgaggtctagagctcaacattaatgaggctgttgtgctacctttttgtgtcctctctgttatgttgttcctgcttaattttgac

SEQ ID NO: 15863 - DNA, 1069 bp, Zea Mays
ggatgacaaaactctggtgcttgttgtgtttaacacatttatgatgtctgggaatacatttggatccaagcatttatcttatggatgaggaaaagagtgatggtaattccaggacggagaagacagtaacagattctgaaaatccaggcatctctgtagaaaggaaggtcgaacatcaattcaaaaatggactagcagagaacagaatggattctactgaggacaacaaaaactttgtcaaaagcaaaaaaagcacgctggagaaaggtagaaccagtgaaggtctatcttatgctcagaaccacgaaaccaaggtccatgattctgcacgttctcaagaaaaaaatcccaaggatgaaagtgatgggcacaaagatttggaccaacagaagaataatgccaccaagaaagacaaacctgctgctgagccgataattgttccaattgtactgaggatgtctgattttgatcacaaagcattgctagaggaatggatagccactagagctttcagagataattgcattcctcaggatcatcggaaacttataaacaaccttaagcttattcaggactacctttgttcttttgagtcacagggattgaccattgttgatatctcagcaaattcgtttcctcaaacattagattggcttcacagctatcttcttcagtgcatcgagcgaggtcttttggctgcgtgtttagaaagctgcaatcaaggtcaatgacactcttggatgtaacctgtccaaccacacctcagtgggcattatatgctggcaatggacactaagaatatcattgtaaaggattacgcatgagtctggatatcatctccaaccaagaccgatatgaaaataccatcgtgatgttgtcaataccagccataagcgtgggtctgtctgattggggttactcgcattaatattgtactgtattgtattagaggttatgcggcatactcataatctgaataagataacaaaatttggcattgtttgctttatctgaatataaacttgtaaagatttatctacgtcctgcataagaaaattttggcatcgtc

SEQ ID NO: 15864 - DNA, 1621 bp, Zea Mays
gatccgctgtgtccccagctgtccaaagtcccactcccagcttccctccccctaaaaaactctcacacatcaccgcgagagaggaggctgagccgcggaggagcagcggcgcatcgcaacactaaccaaagtcctcctctccaggtgccgagccagggtgactgttccgaggagcgtggcgtggacccatggggaagaagggcaagtggttcggcgccgtcaagaaggtcttcagccccgaatccaaggagaagaaagaggaggcaaggagggcactaagagcactacgaggccttgtacgattgaagtcattggttgagggtaattcagttaagcgtcaatctgcaagcactctgcgctgtatgcaaactctatcgcgggtgcagtcacaaatacgatctaggagagcaaagatgtccgaggagaaccaggccctccaacgccagctcctacttaaacaggaactggagaatttcagaatgggtgagaactgggacgacagcactcaatccaaggagcaaatcgaggcaagcctaataagcaggcaagaggcagcgataagaagagaaagagctcttgcatatgcattttcacatcagtggaagagcacatcaagatctgcgaacccaatgtttgtagacccaaataacttgcagtggggctggagctggttggagcgctggatggcagcaaaaccttgggagggacgcaatgggaccgacaaggagagcaacattgatcgcggctccgtcaagaatatgagcttgaaccttggagttggagagggtgagatcacaaaagctttcaaccgccgggactcaaagccagagaagccatcaccaccgactccaaaaccggcccgtccagcttccaggcaatccccttcgacgccctctgctagagtggccccaatacctgcgaggaggaaatccagcacgccaaagaatgggctttcacaggtggacgatgacgtgaggagcgtgctcagtgtgcagtctgagcgaccaaggaggcacagcatagccacgacgtcgaccatgcgggacgatgagagcctcgcgagctccccgtcgctcccgagctacatggttcccacagaatctgcgagggccaaatctcgcacagcaacggccaatggcgcagagacgcctgagaaaggaggctctgctggaccagtcaagaagaggttgtctttccaaggtggagctgcggctgcctcaccgatgcgacggcattctggccctcccaaggtggagagcgctgtgaaggacattgctgcgccaccacagcctgaggccttggtagccaatggtggtggaagcaagtgacttgtattgacaagttccaggatgggggagcgggttatggtcttatggagggacatgtttcatccgtgaacagaagttaagagtggtgccggatctacgaatggtttgaattgttttcccgttacaaccacattgtttgctgtataagattcactgtacctgccagttggttccatttgttgttttctgtaaaacaaacatcaatttgtcactagaatctgtgatgcttgtatgtaaacaggtcctctatttatgtgagccatatatttcattttcagaagattccttgtgct

SEQ ID NO: 15865 - DNA, 970 bp, Zea Mays
ataatatttgttcaaggatatatgctatcaacacttcaaagatgccacattacttccacaaagttgcatcacaaccaaggagctcggaaccgtgatgcggtctctcgggcagaaccccaccgaggcggagctgcaggacatgatcgccgaggtggacagcaacggcagcggcaccatcgacgagcaggagttcctgggcctgatggcgcgcaagatgagggacgcggagtcggaggaggagctcagggaggcgttccgcgtgttcgacaaggaccagaacggggtgatctccgcggccgagctccggcacttgatgaccaacctcggggagaagctgagcgagcaggaggtggccgagatggtccgtgaggccgacgtggaccgcgacggccacatcaactacgacgagttcgtcaaggtcatgacggccaagcgaaggagcaagaggacggaggagaaggcgacgcgcggcaagaagaaaccggcggcggcgccgtccgacgccggcaagcgtggccagaaatgcgtgatcctgtgagccggagcttcggttgtccagtacatgctggtgcagtggtgctgcgtgcgtgtcacccgctcgacctctgcttccggcacaccagctgcgggaagctccacttgttctgcaggtgaatgtagctgtttgtaaacttatcagagcgtgtttgggagcatgattgaatgggaaaatccacttgagtaagggattttagtcatctagatctcctctaatctccttgctcccaaacaagccattaaataagaaaaacggaggaagtaactgtttgtcaatcttgtacatgtgctcgtgtagcctgtctggtcttgtagtttcgggctcataggtcagtggtaaaagcaatgtcacaacagaatttgtgatgaatatttaactatcacaataagaaacgatctgatttttacgaccatgttaactttactccctccg

SEQ ID NO: 15866 - DNA, 1291 bp, Zea Mays
agtaggaaccctcttatccgttctcgtctcctgtcccggactcccgggaccggggaggccgggatcgagaagggcaacgagcgcgtcccgtgctcgccgctcctcgccgatggcgtcctccactctgccagcctaccccttccgtatgtctcttcccggactacgagccccggaccctgctaaggttaagcacgtatccgttcgagcccccgctcgccgtcttcccgttgcagcctccgcggcaccatcaggcgccgcggcggcggcggcgagggagcgcaggcgtttcctggagagctacgggctcaacccaaacgacttcgaggaagatgcagaggagaatccgagggaagagagaaaggacaggcggagacgtcggcagtcggggagaggggagcaaactgcggaagcggcagtgactccagcgaaggtggaggagcctcgggagactcacaaaatgctccaggtgctaggtggaaaagtccgcagaaggaaattactttcacccaaagataggaatgtccgtccaatgatggaagttgtccgaggagcagcctttgacattttacagtcagctggtggttctcctgcttcactcagaccgggtcggtggctagacttgtatagtggtactggatccgttggaattgaagctatgagccgaggatgttcagaggcacatttcgttgagatggatccttgggtcatctctgaggtcctcaaaccaaatctggagtgtactggatttattgacgtgtcacagatacatatgctccgcgttgaaaaattcttggccaatgccgaaaaatctcatggtaaatatccttcattcgattatatcagtgtaacaccaccatatctggaggtcaactatagcacactgctcgcccaacttgcaaggtcaccattggttggaaaagactgcttcatcctagttgagtacccgctgaaaacagacatggctgaatcatgcggaaaccttgtacagatagctgacaggaggtttggtaggaccaacttgctgatatatgggccaacttggtcagagaaaaagaagaaaagatgatttctgaagggggggttcaggtgtcatgataatcacggttgggaatggttaaggtttcaagatttgcacaggggatatttggcctagtgtaaggcataagaaggtggttgatcttggttcactgggcctatacctgaataacttgcacagcacagagagctcgcatttcgctttcctttgtggtcagagatccacatccgacaagagggggggggggggggggaa

SEQ ID NO: 15867 - DNA, 2224 bp, Zea Mays
aaaatgccttcaaatttgtaaacagatgttccaccactgcatctaactgaaattgtggcatatctggttcggcaatctgggccatttttagatcaacttggcatacagagagacctttgtgacaaactagtggagatgttatgcagtaaacgaaatggtcggctcatgtatcattctctttcaaaggacagacccttagctgagaacatatctgacgagcttgatctaagaatagctagggtattagaaagtactggttatcacacagatgaaggtttttggaatgaccctgcaaagtacaagatctcagacaacagacggcatgttgctattgtcaccacagcaagccttccatggatgacaggaacagcaatcaatccattgtttcgtgctgcatatctggcaagaagtgcaaagcaaaaggtgacattggtggtcccatggctctctaagtcagatcaagaattggtttacccaaataacatcaccttcagttcgccagaagagcaagaaacttatataaggaactggctgcaggaaagaataggctttgaagcaaactttaagatatccttttatcctggcaagttctcaaaagagcgccgcagcattattcctgctggggatacttcacagttcatctcctcaaaagaagctgatatagcgattttagaagaaccggagcatctcaactggtatcatcatgggaagcgttggactgataagttcaatcatgtcatcggtgtagttcatacaaattacttggaatatatcaagagagagaaaaatggtgctattcagtcttttcttgttaaacatatcaataactgggtgactagagcatactgccataaggttttacgtctttctgctgcaactcaagatctaccgaggtctgttgtttgtaacgtacatggtgtaaatccgaagtttcttaatgttggtgagaaaatagcagctgatagggagtgtggacagaaggtcttttctaagggagcatatttccttggtaagatggtgtgggctaaaggatatagagagctgattgatttattatccaaacacaaaaacgacctggaaggattcatgatagatgtatatggaaatggcgaggactctgaagctgtccagaacgctgctaggaaatttgatttgaacatcaattttttcaagggaaaggaccatgcagatgattcactccatgggtacaaggtttttgtcaatccaagtgttagtgatgtgctatgcacagcaacagctgaggcccttgcaatggggaaatttgtagtctgtgcagatcatccatcaaacgatttttttaagtcattccctaactgcttaacatatagaacttcagccgaatttgttgctcgtgtcaaagaagccatggctactgaacctcaacctctgacctcagagcaacggtacagtttgtcatgggaagcggcgactgagaggtttatggaatactcagagcttgacaaagttctgaacagaaatggtcaccctggacgaaatgggaaggttaacaaagcaagaaagataccgttacttcctaaattgtcagatgtggtggatgggggactggcatttgctcatcactgcctgactggtaacgaaatcctcagattagcgacgggagcaattcctggtacacgtgactatgataaacagcagtgcatggatctgaacctgctgcctcctcaagttcaacaccctgtatatggctggtgatcaaaccagttcacattgaactatgtatagtcgtaggatgtacatattaagtgatccagttcctgtgtactgacaggagcatgaacttttgtagagtcttggtaattcctagggtccatcgggaacctgccttgttgcactctttgattgtaattatactccttttcgctatccaaataggttagttatgtagttgaatgatctttaatctgaggtatgcgtatacacataattaccagtgcctgtactctgaagtcttatgggacagcaaggattgtgacttgtttcggtttcctctgccatgccccatagtttgttcggaaaactgtctgtaggtgtgaaaagggatagagtttaacttgctgtgactagctgaagcaaccatactcaaactgaagactcggtgacgagataaattaagacattattgattcgagaagtactttcatttccttactaacctatgatgcaatgaaaagttggaattctc

SEQ ID NO: 15868 - DNA, 77 bp, Zea Mays
cgagttctaggtgtgggttagcggcaacccccagtcggatgcctgtgaaggccgcagttatctacgtttcttttccg

SEQ ID NO: 15869 - DNA, 1615 bp, Zea Mays
ttaatactttatcgttctcggcgattccagaaattcttctttggtgggaggctcatattcggacctgacgccaagtcactgatcctgtctgtttcgctcattgtggccccggtattggtcttctgcggattcgttgctcggcatcttcgccaccacttcccggcttacaatgctggatatgcgattcctgcggtagctgtagtgtttatgatttatgtgctagtcctgctcttgattacatcagcgcaggatcctgggatcgttccccgcgcagcccacccgccggaggatgagttttcttatggcaacgctttgtctgggggcacgcctgggaggctacaattcccccgtgtaaaggaagtactggttaatgggatgcctgtgaaagtgaagtattgtgacacctgcatgatttatcggcctcctcgatgctcacactgttcgatatgcaacaattgtgtagagcgctttgaccatcattgcccctgggttggacaatgcattgggcagcgcaattaccggtactttttcatgtttgtttcttcctcgactcttctctgcatttatgtatttgcaatgtcagccttgtacatcaagtttctcatggatgaggattatccaacagtatggaaggctttcaaacactctcccgcttctttggggcttctgatatattgtttcattgctctctggtttgttggtggactcactggatttcatttgtacctcattagcaccaaccagaccacgtacgagaatttccgatacagatcagacagcaggcctaacatctatagccaaggatgtctgaataactttctacaagtcttctgcagcaagacaaaaccttctaaacacaagttccgggcctacgcgcaagaggaagtgcggcctccaacggttagcttcggcagggaggtcgatgaggaaccggtcggcgggcctcggccgaaagttgaggacgatcttgaaattggtaccgatcttctgaagatctctcagcggcgcaactacgaggacgtcgatgcagaaacgggaggccgtcgcagtcgcagcagcgaggtggaaggcacggccagtgccagacctgctgtggcgtgctcggagtcccagatccctgcggtcgggggtactgacgtgagggtgcggcactcgagctgggaccggcgaagcgggaactgggacatgtcggctgtgcttacgaggagcgcgtcagatgtgattggacgtagcagcgtgttcgccgcggacgctgcacgtccatctctagaagagactcgctagcgaactgtgtctgtgcatccaggaaacatgtgcgagcggttcggatagcgaggccatttgactcgtggtggtggtgacacacacccaggtgttttggctttggctgccttgattgggtttttgttaccgacccttgtcagttgtcatgtatggacagttatttttagtcagagaatctgcccccattgttgccggcatgttcgtgtgcctgtaaattgcaaatgcaggatcctcatcaacttcaattcttattgggctgtttctttgagaatgcgtaatgtgaaaaagcatctggcctagctctttataggaatggatgcaattttaaagc

SEQ ID NO: 15870 - DNA, 2142 bp, Zea Mays
cagcttccttgcctgatacctaagggatgctgtctttggagtagcagtggcggttcagggctctatggactcctttttggtgtttaatttatgaactattttctggtgcaaagctggctagaacagaggaccttcgaaatactgcttcaatcccaaagtctctacttccagattaccagaggctcttgaattccacaccttctcgtagactaaatccttcaaaacttattgacaacagcgagtttttccagaacaagttagtagagaccatccagttcatggaaattcttaatttgaaagacacctttgagaaagacagtttttttcgtaaactccccaatatagctgaacagcttcctcgtgaaatagttctgaaaaagctgctccctgtattggcttcttctcttgaatttggttcagctgccgctccagccttaactgttttgttaaagatgggttcctggcttcctgctgaccaatttaatatcaaggtcttgccaactattgtcaagctttttgcctccaatgaccgagctatccgagcatgtcttttgcatcacataaatcagtttggggaatcaatgtcagctcaaattgttgacgaacaagtttttcctcatgtagccactggcttctctgatactgatggtactattcgtgaactgacattgaagtcgatgctcgtattagcaccaaaattatctcagcgtacaatctcaggatctctcttaaaatatctctctaagctacaggtggacgaagaacctggtatcaggacaaacacaacaattcttcttggcaatattgcaggctacatgaacgatgggacaaggaagagagtactgatcaatgcattcacagttcgtgcattacgtgataccttccctccggccagagcagctggaatcatggcactgagtgtcactagttcatactatgaaatgacagagattgcaactcgcatcctgcctaacattgttgtgctcacatttgacccaaatagtgatgtccgaacgaaggcttttcaggctaccgatcagttcttgcaaatagcaaaacaacaccatgaaaagcttaatacaggagacaacagtgtggctgaaagtactggtgttaagttaaagcctggaaatgcaggtttacttgggtgggccatgagttctgttacacaaaagggtaaaccttttgaccatgccccaatatctactgcaaatgccaataattctcaagcatcaacaacctcgactgccactccagacactcaggcttccacactagcgtatgcaccatccacatccacctcgcttgatcaagctgcatcagcatcagcaaggtcgtcagtagatgggtggggtgagcttgaggatggtaatatccatgaggagaatagtagcgataaagatggatgggatgatgtagacccatttgaggacaagccatccccatctcttctatccaacatacaggctgctcaaaaacgtccagtggtgcaaccaaagcaaccggttgcaaactcatctaaaccaaacccactgaaagcgccaaagtcagaagacgatcctttgtggggtcctatagctgctgcaccacctaaaagtgcagtaaaatctgcagacatcaagccatcaacatcacataatgatgaggatgacctctggggttcaatagcagcacctccaaaatcatctgggaagcctttgaagccagctgtagcgaatagtgacgacttatggggtgccatcgcagcacctccaccagcaaccaaagccagacccttagcctcgtcaggtaggggccgaggaacaaagccagcgcaaccaaaacttggtgctcaaagaataggaagaacatcttcaactggaatgtgacgtcttatgatatcaagtgttgtacaagaatgcaaagttttcctttttttttcccctgccttgcgttgagtctgtccaggatgacattctttgtaaactagtaaaaagatttatgtatatgagcacagttttgaccaatgtattagtattattttaccattgtgtattaaaatagatccagaagatttttgcacatcacagctgcaatcatcttaagtccatattattaatatattgctatgtcttattttggcgtgataagagcaacttaatg

SEQ ID NO: 15871 - DNA, 1298 bp, Zea Mays
aagcatggggccaatgctgatcttgtgaatgctctgaagctggtccaacctatcaaggacaagttttcaagtgttacctatgcagatctgtttcagcttgccagcgccacagctattgaggaagtaggtgtccctaaaatccctatgatctatggaagggttggcgttattgcccttgacaatgcgcgccaaagtagcctgcttccgacccgcacatctccctccggttctcgccatgggcgccggcgccaacaaccacgaggagtcgagccccctcatcccagctgcggtcgccgcccccgcgtacgagaagcccgtgtcggcccacgccttcggcggcgtcccgcgggagagctggaactccgggatcctctcctgcctcggccgcaacgacgagttctgcagcagcgacgtcgaagtgtgtcttcttggaacggtagcaccatgtgtgctctatggtagcaatgttgagaggcttgctgctggacaaggcacatttgcaaacagctgtttgccttacactgggctgtatttgcttgggaactctctctttgggtggaactgccttgccccatggttctctcatcccactcgtactgctattcgacaacgctacaatcttgagggtagctttgaggctttcaccaggcaatgtgggtgctgcggcgatctggtcgaggacgaggagaggcgtgagcacctagaggccgcctgtgaccttgcgacccactacctctgccacccctgcgccctctgccaggagggtcgcgagctgcgccgcagggttccccaccctggattcaacaatgggcactccgtctttgtcatgatgccgcccatggagcagaccatggggcgtggcatgtgagctattccaccaccttccctaccctagttttatctgtgcttcccgtggtttatcatctgctgctgttggccttgatgtgtgatgtgtcgccgtcagtaaatacgagtttgtgatatgaggtcgtgctgggaactttggattgtttgcttcttatcgactgcagtttggattctggacagtcacttatctcctgtgttactgtgtttgtacggtggtcctcgatgggcctgtcaatgtgaaatgcatttcgtcgtaccttattctgaatgtttttccctccaaaatatgagccccatacactaatatggcggtagctctcgtcacaaaccctcggatacagcagcgtttgtgcgtggaaagaaaaatcgggtgtcttaggtatgttcggttatgtctggattaaagtagattgagggtccgttcgttaaac

SEQ ID NO: 15872 - DNA, 107 bp, Zea Mays
ggtataggagggtatgcgcgagagagaggttgcgagttcgaacctcactatttactacaaaacatatagatttgattcaaaatgataggacaatgggtaaggtaata

SEQ ID NO: 15873 - DNA, 72 bp, Zea Mays
ccagaatattaccaacaaccggtataagtgcaccttcatcaccctgtacctgtggaattccataacaacatt

SEQ ID NO: 15874 - DNA, 984 bp, Zea Mays
tcatcaatagaatctaatcagccatcttctgcctattcaaatatttagattctaactaccagtttctcactacaactatattatcaagcattcagttttttactataatttttctctacatccaacttctcctcgtagtcatcttttcagaaaagtttcttagacccacaagctagagccagccagccgctcagccccagccctcggaaacccatcgcaaattcgcaaactaaccccaaaccccaatccaccccatcccctcctcatccactccgggcggccatggcctgctccttctccgccgccatcaccgtctcttccgcccctaccccggccgccagacccctcgctgctgccacgcagtccgtctgcatcgctcgctccgcggtcgccaccactgccaggccgctccgcctcgccgcctcaaggtccgcgcgggctaccagactcgttgcccgcgccagcgtagtcgatgacttgccgctggtcgggaacaaggcgccagacttcgaagccgaggctgtgttcgaccaggagttcatcaacgtgaagctctctgattacattgggaagaagtacgtcattctgttcttctaccccttggatttcaccttcgtctgcccgaccgagattactgcgtttagtgacagatacgaggaatttgagaagttgaacactgaggttcttggtgtttccattgacagtgtgttctcccaccttgcatgggtgcagacagacaggaagtcgggtgggctcggcgatcttaaatacccacttgtttctgatgtgaccaaatcaatttcaaaggcctttggtgttctgatccctgaccagggtattgctttgagaggactgttcatcattgacaaggagggagtgattcagcactctaccattaacaaccttgccattggtcgtagtgtggatgagaccatgaggacccttcagtccacaggtcacaattggaagagtattgaagttgac

SEQ ID NO: 15875 - DNA, 591 bp, Zea Mays
gcatcatggccaattcagaaatgggtaactattactccatccaaattgtttgctatgactggagccgtggggccgaaaatcacaaccctgcagctgcaaagacatccatctatctccacagtccacaggaaaccgaggtcaaaggaaagccgcgcattgcaacaggcaggaagtgattgcattgaaggtgttgcaaggaaccatgatgtcatccagcagttttgtcatgcctccctcctgtcttggaagtctggtagagtgtaaatttcagctaacttatgcgccgattatagggtttctgtagtacctggtgtttgtggtgtcttcaaaatagattctgtcgacgttctgtgatgatctccttactgcttatttctggcagtaaaatcagtgtatcttaaaaaggttgtgatgtaaattttcgtgcatatggaccccgatactaatggagttttacttcacagataaatcccgttctggtttacgaattacgatgaacatggagcaatccatggataacccgccgagccaatctagaaggaaacgcttcagtacagttttgactgatgagaagtttgtcagttgtaccag

SEQ ID NO: 15876 - DNA, 1845 bp, Zea Mays
actgcgcgtgttgccacttgccactgagcttcgtgtcgacatctcaagctgctcgacccatgtgtgggcatctcggtcatttcgcgaaggccgcgcatcctataaatgagaccccttcctcctcccctgccgttgttgttggcttcgtggtccgtgtttaacgggcgtagagagagaaagagaacagagcgagagagggggaggacgaagccctccgcgtcgtctcctgctgttccatcccacatctattctgcctcggcttgcaccttcgacctcgctgaaagttctgacctcaaactgaaaggggcctgtgaagcgtttccttgcggcagtgcaatggaggtatttggcaaatctgtgattgctgagcccagcaatgtgattttcttgtccgcaatccttaacacagaaggatcaaaccctagtcacaagtgtgacaagaggtgccagaacgagaacatttttgggaacatgtaccgttgcaaactgactggaaccactcacatctgtgacaaaaactgtaaccagagaatcctctatgacaaccataactcgctctgccgagtgagtgggcagttttttccgctctctccattggagcagcaagcagtgaggggtatccgcaggaagcacgaagtggacagcaatgaaggctgctcctttaagcgcaggcgtggtgcacagctgcatccttcccccttcgagaggtcctactcagctgtgtctccaatcccgagccaggttggagatggcatggacctgagctagagctaacgagacttccttttcttcagccaaccacctaattccgttgtctaccctttttccctttggttacaggatggaactataagagattccttctttgtagacttttatgaagggatataagactccttagatgcaccgaataaatgtctatgtagtttctattctgtttcatgggaccttgttgtaactcgtgaactttgattgagcacctattcggatttagtagcacgttcagaaaatcattcgctgcttatcttttttcacacttccgagttagttattttgtgtgtttttttactttgtgttcaactaagtttccttctaattttgattctttaatgcaatttattataattgaggtgtacatttgtccatcaatgtaaatatgtgaaagattctttggcactgtaatccaggcacagggaactgactgcctttgctgactgaagtttttgtacagttgttactagtgttttgcttgtcaagttcctaatcaagcttgaatcatttacggtgaacatctctggttctattttcatcgtcgggtaacaagaaactaatcagggagtctcttcccatttcttgcagtggaggaatgtttagctacagccgcgcagcatgctttccagagcataaattggtggaagagaagtttgatgctaccactttgccagaagaaccgagccagacacaataacatcaaactgagtctgagatactgcactttacaaattctttcgatattggcagattgaagaccaacaagatttgaagagcagcaagatcagcttgcacctgcagtttgaagaaatcctttcaaagaagactgcttgcggcaatcttgccttcactccacaagcatgtgctgtgttatgcgtaccatgtaatgattgtagtacttgacaactgataccaaagtagtggatgcttttctttcgcatgaagtcatgttgatttttgtacgttctaacagcgtctccatcaatatcctattgaatctcccatacttctatacctataattttcaagagattaccaaaaaagataggagatatgtttgaagatgctcctaat

SEQ ID NO: 15877 - DNA, 2940 bp, Zea Mays
gggtttggtacaagtggagtggcccatatgttgtgcggaggagcactggtgaagcctaagaacccttatgtcgatgggcgtggtctcaagggaggtgttgtcagcatgcgagaggctctgcttcatttgcccgtcactgcggacgaggtcccgccatccggtcaagcgctacaagaaattgcttgcagaaatcttccctcggacacaggatgaagaaccaaatgatcgcaagatagggaaactgtgcgaatatatttcaaggaatcctatgcgtgttccaaagattacattttacttagagcaaaagtgctacaaggaattaagggctgagcgctatggttcagtgaaagttgttattgcaatctatcgaaaggtgatatgttcttgtcaggagcaattgccactttttgccaacagcttgctaacaattgtagagacattattggagcaaaatagacaggatgacttgcggaaattggcatgtcaaacactttttgactttataaataatcaggttgacagtacttacatgttcaatttagaaaaccagattcctaaactatgtcatctggcccaagagatgggtgaaaaggagaagatatgcattcttcatgcagctgggctacaagctctttcatctatgatttggtttatgggtgagcattcccatatgtctgcagagcttgataatttctggaaaattatgagagcccatatgcaaatgctgataatgatgccgctattgaggatagacgaattcagtgggtggatgaagtgctcaaagctgaaggtcatgaacctcctgctgttaccattttgacaagggttccttcatggaaagttattagaactgttcacggtgaattaagtttgacaatagaagaatcaacaagtccaaatttttggtcagggatttgtctacataaccttgctagaatatccagggaagcaacaacagtgcgacgagttctggaagttatatttcgttattttgataataacaatctgtggtcaccttctaaaggatttgcactgtgtgtcctactggatatgcagattgtcatggagaaatctggacagaatgctcatatattgttgtctatgttagtcaagcatcttgaacacaagaatgtattgaaacaaccagatatgaatctagatatcattgaagttacttcacgccttgctgggcactccaaagctcagtcttctacagcactaatggcttcaataagtgatatggtcaggcatatgggtaaaagcatgcaatccttggccagcgatgcaggtcctggagacaacatggtcaaatggaatagcagatatgggaaagctgtagatgaatgtcttgttcaattgtctagaaaggtcggtgatgctggacctatccttgatacattagctgtagtgctggaaaacatttcaagttctatgattgttgcacggtctactatctttgcagcatatcgtactgctcaaatagttgcatcattgccaaacttgtcacatcagagcaaagcatttcctgaggcattgtttcaccaactgcttttagcaatggtctatccggactgtgggacacatttaggagcacatcggattttctctgttgttcttgttccctctgctgtcgctccgtgctcattttcagacacttcacggacaaggaagattgatctccgaaggacattatctagaacaacatcagtgttttcatcttctgctgctttgtttgggaaacttaaaagagacatgctttcatttcgtgaaagtccgctccatgataatacaaagctactacccatcagtgaggatgcagatgagatcagcgcaaatgatgcaaaactattcaagtcacagactattcaaaggatggctagtacaaaagatatttctcttccctcttccacagatgcaagtactttgagtgaacaaactccaaatcaggaaaaggatgctgtcacccttatgctcagtgttcgtcaggcaaatcttcttctttcctcgttatggactcaggcactgtcacctgaaaatgttccacggaattatgaagcaatttctcatacttacagcttgatgctattgttttctagagccaagggctcaggtgccgacgttttggttggtagctttcagcttgctttttcattaagaagtgtttcgttacaagcaggttttcttccaccttcacgcaggcgctctctttttactttggcaacttcaatgcttgtgtttttctcgaaagctttcaacgttccagcgctcattccagttgtgaagcatgtgttgacagaaagtacagttgatccatttctttgtttaatagaagactgtagattgcaggctcttgatagtgctgctcagtcttgcaaactctatggttcaaaagaagatgacgatcaagctctgaaatcactctcgaacattgacatgaatgaacatcagtcaaaagaaacatcagtgtctcttatacttgatagcttggaagatctgtcagagtcagaattgtctactattagaaaacagctgattgaggaattttcagcagatgacatttgtctgggatctcattttactgaaacaccttcgaaatctgcagcacaaaatggaaaactgcaccacaaatctatggaggttattccattcggatttgtttttgaagatgatactctcgttgaagcatctgacagcttagtagaacctcacttgcgacatctgccatgtaacagcgttcttgatgttgaccggcttcttaattcggttttggaaacatctcagcatgttggaaggatgtcagtttcaacagaccaggatttgcctttcaaggaggtagccaaccaatgtgaagcacttctgattgggaagcagcaaaagctatctatctgcatgagtgttcgtgaaaaaaaggtaaatttgaaatgagatattgagattcac

SEQ ID NO: 15878 - DNA, 1463 bp, Zea Mays
cgaacccctgacctggtgaaagggacaacgccgccttcacctctaggctatcaacccaaccgtggagcaaaatatacttgttgaagatagtggttttagcaatggcttcttccccttcataattgctgagaaagacatatgctttgaggtttctgagctggagagcatatttgagtcctccagtatcgaacatgcagatgctaatgataatgccagggaacaagctctggagtttctaaatgagctgggttggcttcttcacagagcgaacagaatgtctaaagagaatgtaactgatacatctgtagctacctttagcatgtggagattcaggaatcttggtgtatttgccatggagcgggagtggtgtgctgtgatcaaaatgctgttagatttcttatttattggccttgtcgatgtgggatcccgatctccagaagaggtggtgctttcagaaaatttgttgcatgctgctgtacggaggaagtctgttaacatggttagatttctgctgagatacagaccaaacaaaaactccaaggggactgcacagacatacttatttagacctgatgctctgggcccgtcaatgattacccccctccatatagcagctgccactagtgatgcagaggatgtgttggatgtgctgaccgatgatcctggactgattggaattagtgcttggagcaatgcacgggacggaacaggttttaccccagaagattatgctcggcagagaggcaatgatgcttacctgaatctggtccaaaagaagattgataagcatcttggcaaaggccgtgttgtcctcggtgttccgagcagtatatgctctgtaataactgatggtgttaagcctggcgatgttagcctcgagatctgcatgccaatgtctgcatcagtgccaggttgcctcctctgcagccgtaaggcacgggtgtatccgaattctacatcgaggaccttcctttacaggccagcgatgttgactgtgatgggagttgctgtggtctgtgtctgcgtgggcatactcctccatacctttcccagggtttatgccgcgcccacattcagatgggagttgctggagcgtggacccatgtaagttttaggatgagccttagctgttgtttgtaacttgtaagttgagagttttagcgttgtggctaagatcaaaggaacatgattaccgtgtgaagaagttcatctgtgtttaacgcaagatgctgttgcggctgtaagctttatatacatcgtcgatttcaactatatttacagcctatcatgctcccattccattcatccattttgttttagaattcattccttgcggagaatttgtgaaccatcagaataaaaaacaggttcttgtatttataatcgttgagacataatatttcttggaatgatgctgaaaaactcatgattgcatttgctgaaagtatatgttacaatccaag

SEQ ID NO: 15879 - DNA, 582 bp, Zea Mays
ggcttgcctgctgtgacctgttggcttcatgggccgacccactaaggcttgcctgctcggacctgttggcttcatgggctgatgggttttttttatttcggtaaaattccgagaaaaaaatcggtaaccgaacaaaacggtcggtaaaatgacataccgattttgataccgtttccgataaaaaattccgataccgattctgtttctgaataataccgttaccggtgaattcgatcgaaaaaatcgataaaaattatttatcttcggttctagtgttaaaagcaccgaagagcaggttgtcttccaggttatatattgtagctgaaaataaagttattgaaactgttctgactcaggagatgaaagaaaaggagcatgttgtgacatatttgagtcgaaggttggtgaataccgaaaaaagatacacctttattgagaaattatatatatgcttgtttttatacatataccaaatttagatattatttactatctacctcttgtactgttacaaaaaatcaaacatgagtgatagaattaataaatagtcttaccgacctatagaatatggcttgatacatg

SEQ ID NO: 15880 - DNA, 3672 bp, Zea Mays
tcctgcatgagcctgacctcatctcatcatcgcctccaactcaccagagaagagaaatccttctccctcgtctctcgccaatcttttctatcaaaccctcttccttccatctcagatccctctcccgtcccagctcgatcctgcccgatggccaccggatcgtacgccgcttccgtccgacgctgagcaaccaggacaacgacctccgacgaccccccgagcacccacgagatggtcgcggaggcggcgccgttctcctcatcggcgatctggtcgtgtcaccgcgacgagatcaccttcgaccgcctccacaaggtatttgacaatgcacgtgcgagagaacgtgaacgtgagatgctttaccctgatgcatgtggtggcggtggcagaggatggattagcccagtgatacctaactatggcaggggccatggaacacgagatacctgtgctttgcacactgcacacctttcttgtgatactctggtggatttttggtcggctctgggtgaagaaactagatcatctcttttaaggatgaaagaagaggacttcattgaaagacttatgcacagattcgacagcaagagattctgcagagactgcagaaggaatgttattcgcgaattcaaggagctcaaggaactaaaacgcatgcgaagggaacctcgctgcactagttggttttgtgttgcagataccacatttaagtgtgaggtgttcgaggatgctattcttgttgattggcatcaatctttattggagcaagatggaatataccatcatttcgagtgggctattggaacagatgaaggaaaatctgatattctaaactttgaaaatgtgggcatgaatggacaagtccacaggaaaggcctcgatcttgatcactttgaagactattttgttacactgagagcatggaggctggatggtcgctgtactgaattctgtgtgaaggcgcatgccttgaagggccaatcatgtgttcaccggaggctaattgtgggggatggatttgtgacaattaccaaaggtgaaagtattagaagtttctttgagtatgctgaagaagcagaggaagaggatgaagatgatgtagtggacagagacagcaatgaccctgatggtgatatcgctcatccacagaagcatgccaagagccctgaacttgcaagagaatttctcctggatgctgctgctgttatcttcaaagaacagattgagaaggctttcagagaaggcacagcgcggcaaaatgcacatagcgttttcgtgtcccttgctctaaaactgttagaagaacgagttcatgttgcctgcaaggaaataattacattggaaaaacagaccaagcttcttgaggaagaagagaaagaaaagcgtgaagaagaggagcgcagggagaggaggagaacaaaagaaagagaaaagaagaatagaagaaaagagaggctgaaaggaaaggacagagataaggaaaaaacactggttcggtcaaaaaaaccagatctttcaccattttctctgtgcagccaagcaacaccaagtaataatgagtctcaggatgttctagacttgagatattcagatagtgaagaggaagacaatgttgtggtcggggaacactatcctgattcctctgctgatcaatcttcaagcaaggacagtgatgaacgaagcaatgggcatgaatgcagtgtaacaatagaatttgttccctcagattgtgatagctcattcttatgtgatgagcctaaatcatcaagaaacctgagatttagaagagacttccctgaagagaaagatgctagttattggcatgagggttgctgtgatgattctggagatactcaatggcagtctagagagaggaccagaaataacactagaaattataactctgtatttaatacaaataaccgtacaagagacaggtacaacccctgcagctgtagccatcaagaagactacagatattttaccacagcaactagatcaagtagggagacaaagatgcccaggaaaacagtggctgagaagcccaggttgcaataccgcaggtgctatcctccggatagctttgctgtgtcaaatggaggacgtgttggtggtacaccaaacaaaaacccaggtccaaaacaagtatgggagccaatggatgcaagaaagaagacagggaatgggaatagtgctactggggctgctgatggttcagatcaagtagaatgctcaaataatatcagtgaatgtgaaaagcttgaggcagtgtgtgactctcttgttgaaatttgttctgagatatctgcggaaacctgtaagtcagacacagatcaaccatggagacaaggtgagaagaatcagtctgcttgcagcgatgaatctaaatgcgtggataagccaaattgctccaaggacactggtaggacgacaaacttaaccacttcggatagctcctcgtgtctaagtgagggagatagagacagcagcatgacctcactgagtgttcagaatgtagaatcttcatctgcatctgattcagaagagtcttcagacaggaacaatagcagcccaggcgatataccagcgaagaatgtttctcgtacattacttgagatgtgtgcaggaaatggtttcagagagtaccaaccaaaaggcttgaaccctcctaatggtaaccaatttggatttatggtggccccttcacaggagcagatgttataccaacagaaggtccatgcaccgccgtactcgtcaccattcatggggttccacaatcaccccttggcagttccaacaaatgggtacttaccatatactcagccaggtcacttctaccctgcttctatgacccctgttggatatggagttgctggtgaccaatgtgtcgacttctcgatgcagtacagaaataacattcatccttactcgggtcctgaatttggttttctgccttcacagccagttcacaagacctcagtgaacttccatgcggtaccagtgacaccactgaccccgttgtgtagccgcggaatgccagtggcgacaaatcaagagaggcagcagagtcctgccctcttccctaaattaaaacaggcagtgctggtccctgagaccgtctgtgcaggagacaacaccttcaaacagaaaggcgatgacgtagacagcacacccttctccttgttccagttcaacctgccgattgcccctcccaccctggcaacatccaaagagcgaagtggggaactggcaccagctcagatagctcgagtccagccgtgctcgagggaggagaccaacgtcaaggaatacaacattttctctgggtgtgacggggtgatgtttcagctcaactagagacgaagaaaattgagcagctattcaatatacagcgttacatggtgagtgatttgtattctcgtaaaacagaataaggtagatcgaggtttttactgtgttgccctcgactattgattctcttttttctcattttgttttgctttgcttcccctcccagttttgtttttgtgtgtatggaaaactgaaaagatagtgagtggtatagattctgcagttttgtcactagatctagcgactttgccccttgatggttatgtggtataaacatggtttctccagagacggacggacagagataaaattaggttcgcg

SEQ ID NO: 15881 - DNA, 1232 bp, Zea Mays
cccaccaccgccagccacccgccgccccgccccgcgctgccgcgaccgcccacatgcgcctgtgtccgcccgcccgcacggagacggagccccggacccggacacagtaaaagcacgggacgggaattctctcgtctgcgcacggctcaccagtcaccccggacgacagtgcgcgcccgcgctgccaacacttaccccacctgacagtcggatcgagctgcccgcgcctccgtcccgtcgctttccatgatcgacggcgccgccgaaaggcccagggaatttaccccaatggcggggaatttcggcgtcaggcggggcggggtaacgagggaaacgaaggaggaaaaaaaaatcggggcccggtggggtcgtggcaagcgctgggattggtcggcgccagctcggccactagcagggggcaacgtggtggtggttcccgtccttctccttcccttccctcccccaccgggccccagtccccttcgcgctgcctgcccccttcgatctcctgctctctttccccttctctctctatctactgttcttgcttgagctgcgatcctcttcctgaggcgcgggcgttggatgtgatacgtggttggctccgcgccatctcctccggtggcgatgagctccaagtccacctgctgctgcttatgagatcttgctgaatgaattttgtggtttttgagccatcctggtaaaccttggcatggccagtggagagacaaacgcagggaacacccagagggggaatacccttccaaatggtgacatctatgttggcaactttgctggtttagttcctcatggatttggaaagtatatgtggacagatggaactctttattatggcgagtgggatacaagcaagatgagtggtagaggagcaattcagtggccttcaggtgcttcatatgatggagatctttgtggaggtttcattgacggaacaggcagtttcaaaggagttgatggatctgtatataaaggttcttggaggatgaatagaaagcatggaatgggcacaatggtttacgccaacgatgatacttacgaaggtttatggaatgagggcttgccagatggatttggtaaatatacatgggttgatggcaacatctacattggactttggaaatctggtaaaatgaatggcagaggagtgatgcaatggacaaatggcgatactcttgactgtaattggcttaatggactggctcatggaaagt

SEQ ID NO: 15882 - DNA, 3093 bp, Zea Mays
ccacccccagcaccccctctgacgtgcttgccggcgagttgcgtactggcctcatttgccacaccaaagctcaaccaggatgttcccgtgggagatggacattgatggagagtcgagcaaaactctgggacagatggaagacctggaaaaaattccattggagaatgagagttgtggcatttgtagagacatcgtcatcgacagaggagttttggattgttgctcacactggttttgctatacatgtattgacaactgggccgccatcacaaatcggtgccccctttgcaaaagtgaattccaacacataacatgcactccagtatatggtacgattggagctactgacgaagatgaatactctttaaccagctgtgatgatgattggtatgggcaagaggaaagcagcacactttccttcccgtcatactatattgatgcagaagccgtagtttgtttggatgatggtgattgcaagattcggaatggacttgtggcagctgaggatgattcaactttagatacatctattgcttgtgattcctgtgataaatggtaccatgctatttgtgtggcgttcaatgcaacaatggcatctgacagttcatggctctgcccaagatgcaagtttaacgaagtggaatatgaggcaaatgtaatcttgaagcaaaaccttggtgaggactgtgtgattggttctgataggacatgtaccaacgcatcattttctgggagggtgtcagtatctgttgctgatgagggagaaactgcccttgttgtatcaatggtgggtgcacattctgaaactaggggtggtctatcagaagcttcactaggacttgagacagcacatgaaacatttaactgcagtccatacccaagccattcaaaagatgtccttgttgcagatgctagttccttgaggaacacagatattgtcagtagatcccagaataaaccttctgaaataaatgttgtccacactctttgttctgagcctacagaaacatcactacaattttcaccaatacgtgagccagcaacaaccatatttagctcagagcaggataacatgtcaactgaacggttggaagtgccaaagcttgtgtcatcttgtccagtagtagataacagcaaggaggctaaaagtactggagaggagaatgcagcgcagcaaagcaataatgaattatcttctgtaatcaaatctccacaacctgcctcatcagatgcagttcatcagatgaaaactgcacaaaacctacagttgccacttaggcatgatgagcatagtagcgatgacaggaaagaagaacacattgaatctggaaatgaaatgatccatcctgcgaagaaagcaaaactggaagtgcaagaggacattaatgtaatcggaaactttgatttttcttcaatacatagtcatactactagtcctgcaaaagctattaccgacgacattatgtcagagtctgttgcacaacagaaatccattcctgatataatgagcattgttgacggtgaggtttacagaagggatcctggtagagagctggctaaacctgtaggaagaagagcaggagataagcctggtcctagagtgaaaaagatcttccgaaaggaagaaggaaaagaatcatctgccttggttcaaaagctacagaaagagattaaggaagtagttagagatacaggcacaaatatacttgagaaggatgaatcttttgatgaaaaactgttgactgcgttccgggcagctatagggaaatcagtggatggaccagccaaaagtactaacaccaatcaattaataagaacaaggaggtcattgcttcagaagggcaagaaacgtgagaatttgaccaaaaagttgtatggaacatctacaggaagaagaagaagcgattggcatcgtgattgggaagttgaattctggaaataccgttgctccccaggaataaatcctgaaaagattgagacattgcaatcagtacttcagctactaaagaaatcctctgaaatggacaaggaaagtgctaaggggaaaagggaagagaacaacaacagttccattttgtctaggttgtatttagctgatgcatcagttgttcccaggaaggatgatattaggcctctctctgcccttgcaggatgtgcgccattagaaaaaagtagccaaattaaagctagttgtaacaaatcgtctagcatacctgcaggaggcaacgagacaatgaaaatcagttcacccagcagcactgggaaagcatcaagctattcaattctgaataaagaggcacctagcagaagagaaaatagaaatagccagccctcccaggacaagagaaaccaatcctctggtgatatcaagcaggacaaaagaaaatgggctcttgagatcctggcaagaaaaaatgccagttctattacaaataaagatcaaactggaggcaatgatgctcttaagggaaacttccctctactggcacaacttccggttgatatgaggccgcagctggcagctggcagcaacaaaaaggttccggtatcagttagacaggcacaatttcaccgaattgctgagcattatttgcagaaagcaaatttggatgtcattcgcagatgtgcagatactgaattggccattgctgatgctgtcaatgtagaaaagggtatttatgaaaggtcaaatagcaaatcaatttatgtgaatctttgctctcaggctactcgccagcatgccaaggcaaaatctgataatgacacttcaactctaaccaaaaggactgaatcaggcagtgatcagatatcacaggaagctacatctgagggtaccaatgttagtggcagtgatatggaagaggatctaaacagagcagctatctccaatcaaaagaatgaactagaggatgatactgccccagaacatattgtgcacaaggatactgttagcttcaacagtgcagaagacgcactaaggaaagcgggcctttttgattcccctcctaacagtcctgagagagggaacacggcggttgaaggtaactctgaatccacggcagtttctaattgtcctaagttttcacaaaagaa

SEQ ID NO: 15883 - DNA, 957 bp, Zea Mays
cttggttgcatgaagaatagatgtgtgtaaacttgggggagcaatgggaggagggaaagacaagcatgacgagagcgacaaggggctcttctcaaacttgatgcacggcgttgccggtggccatgggtaccccccgcagggataccctccgcagggctacccaccgcaaccaggagcatacccacctcccccaggggcgtatcctcctccacccggcgcatacccaccacaatatgggtaccctcagccgggtggctacccaactcaaggtggatatcctcctgcaggctaccccggctcatctcaccagggttatgggagcagccacgccgggggccacatggggacgggggcaatgctagctggaggtgccgccgccgccgctgccgcttacggagcacacaagctttctcatggccatagcggacacggtggacatgggccctttggaggccatggtcgtggtcgtggtcgtggtggttatggccgtggtcgtggtcaccacggcaagttcaagcatggcaagcacggacacggcatgttcagcggcaagttcaagaagtggaagtgatgtgctctccttggttgatcgtagctagcggtggtaatgaatcacgatctaaatgttttttcacaatatgttagagtccgtaaataattttagtttaaaaatgaataaaaatatagctcgatcctaatcagattcgatccttaaattttgtagtgtaaaatttatggcacattaccatccctaatgatagctgaattcaggcttctaggacatgtgttgccaggaatgccttttcagtatctatctagattgtggcaagtgacatgttgctaataagtgacataaataaccatttgctggtatgctgtatatgttggtctcgtggatggagcgctttaaagattatattctgtgtgttggaatgatatggttgtactgtaaaaaga

SEQ ID NO: 15884 - DNA, 141 bp, Zea Mays
cggtactccggatctactactaacggcggcgagttcttcgtgtctggcgcagaggtaatctaatatacctgttgtgtgactgtgatctgtgtagtagtaacttgtttacctgatttatgcttgagtggacaatggttcttg

SEQ ID NO: 15885 - DNA, 141 bp, Zea Mays
ggccgcggcgggccgcctcgaagctcccttcccaacgggcggcgtgctgaatcctttgcagacgacttaaaacgcgacggggcattgtaagtggcagagtggccttgctgccacgatccactgagatccagccccgcgtcg

SEQ ID NO: 15886 - DNA, 157 bp, Zea Mays
cgggccgaagcgaccataaactttaatagtaatatataaaaaattgtacggcgaaacaacgttgtcatatatgttaaaagatgacatacaagttatgatgtagctccttccaaatgtatcatatcaacatcaacatcagtgcttcttgctccagaac

SEQ ID NO: 15887 - DNA, 1037 bp, Zea Mays
ccttattatactttctcggactcaacgtcttatctatactatctatatcaccttgttatactttctcggactcgcgtctttccttcgtgatttactcactcatgccaccctctcaaacgcatcccaagaggcggaaagggaggagcgtggagcggcgaattattgtttgtttccccaagatgtcttctccaagcaagcgccgggagatggacctcatgaagctgatgatgagcgactacaaggtggagatggtgaacgatgggatgcaggagttctttgttgaatttcgtgggcctaacgaaagcatttatcaaggaggtgtatggaagattagagtagaattgccagacgcatatccttacaaatccccatcgatcggtttcatcaataagatatatcacccaaatgtcgacgaaatgtctggttcagtctgtttggatgtcatcaaccagacatggagcccaatgtttgatcttgtcaatgtgttcgaggtcttccttccacaacttctgttatatcctaatccttctgatccattaaatggagatgcagctgcgttgatgatgcgtgatcgccctgcttacgaacaaaaagtgaaagagtactgtgaaaaatacgccaaaccaggggatgctggtgtcaccccagaagagcagtccagtgacgaagagctgagtgaagatgaagacgactcgggtgatgaggagataatgggcaaaccagacccatagtcaagttggcacctactatacctgtaatctgcacacgatgtttactgcagcaactgcaattaaacaccccatgaacatccgcgtgcagtctgagtgccatgtaaataaactgcaatttcaccaattggatttccagcataactatgtcttcgaatcatgagtgtagtgtaggttcgtgcgtttgaattggctgaaggtttcaatatttgtgcaatcattagcagaactgcagaagcaagttcctcaatacagtaattcagatgatgttggcgtagacctttttaagctagtgcatagctaatgcgc

SEQ ID NO: 15888 - DNA, 2536 bp, Zea Mays
catggatgtacctttgtcctaccaaggaccgtgctacaaagactgttttttttcttcttcgtcgaccagcgagcgagtgcaagaagctcctgttcgatcgatctcgggagctccgatactgcgcgcaatcccaaatttgacacagagtcacagcaatgtcagtgagccatgccgacgagcacgagatatctctgtgcgaccccagctccgaggacgaccggcggcgccggaagatcgggtccctgccgctcaaggctatccacgcgctacggaagaagcgcgcccggcgtcgcgtcactgacttccggttccccgcggccatctccatcgaggacgtccgcgacgccgaagaggagcgcgccgtcgccgccttccgcgaccgtctcgccgcgcaccgcctcctccccgacaagcacgacgactaccacatgatgctgaggtttcttaaagcaaggaagttcgattccgacaaggcaatgcaaatgtggtcagagatgctgaggtggaggaaagagtttggtaccgacacaatcttggaggactttgagttcgacgagctcaacgatgtactccactactatcctcagggctaccatggcgtcgaccgtgaaggccggcccgtgtacattgagaggctcggcaaagttgatccgaacaagctcatgcagatcacctcggtggatcgctacatcaagtaccatgtgcaggagttcgagagggccttcagggagaggttccctgcctgcacactgtcagccaagaggcacattgactccactaccactatactggacgtccatggtgtggggttcaagaatttctcaaagaccgcaagggagcttgtccaacgtatgcagagaatagacagtgactactaccctgagacgctacatcagatgtatgttgtgaatgcaggcagtgggtttaagttgatctggaacagtgttaagggattcctagacccaaaaacttcttccaagatccatgttcttggttccaactaccagagcagacttatcgaagttattgactcaagtgaattgccaaaatttcttggcggatcatgcacatgcagtgagaagggtggttgcctcaggtctaacaggggtccatggaatgaccctgtcatcatgaagctaatacacagtatggaaggtggtagtactagagaaataaagcaagtttctgacggggacgaaagaagtggctcttccctaagggcagaaaacctgaagggcatgcttagtgacatatcaaatgctgaatctgagtcggatgttgatgacgttggtttaacagttgtccaaaagagtacggaccacagtttactaaccccagttcatgaagaagtcaaggggtcagatacttcgatattttgtagttctagcagtaagcatctcctagatacaactcctggagctcctcaggccacccctcaaatggagatgcccattcagttgacttgccgtaaatattttcctacctttgggtggctaaataatttagggaatgcttacattagtttgcatggtacatccgctggaaggactctggaaaaccttgctaccggactgatcacactcttgatcaggatatcatctttcttccacctttccgtctaccggcaagaaagatttatagaaaccgtccaaccctgtgccgcggcacaggaaccagaacctcaaagggaagaggacatgagtgcttgtttacgacgcctcaagaagctcgagtcactgtgtgatcacctcatgagcaaacctccggatatgccgaaggagaaagaacttgtattgatgcagtccttcgatcggataaaatccctcgaggctgaactggaggcgacgaaaaacgcgctgcaggctgcggtggaaaagcagatggaactggtggagacggtagaagctctgcagcaccaatcgaccagcgttaggaggagattttgctgttcataggagtagggttgtcgtcgtcgcgccgaagctgtctgggttagcaaataatgaacctgacgctgcccttggcatcttgtttttgctcgacttctgaagcgtcatgacgccaaacctgtcgctggctcggcacactgtatgcgcggatgcgtgtgaaatcgatcattttttttgtagctacactctggcttctgtgatctccagagcttgcaaaatgtcaaagctttcgctgccctactgctgcgtattgttgagccgtgtcatttgcccttggcatttcgaaccatccatagcgctagctatttttgaccgctcccctcccatttgagttcttgatcgactcccgcccgcgtgcaccggcgccaacctctgcccacgcggccgcgcccctccgcctccgcgtgtcactcccgcacgtttctgctcgcctggtagtaacccgaacgcgcattgccgcgccgtcaagggtcgatccgatcggggaggaggcgtgacaagagatgggtccccacggaggcattgcgctccgcgcagccgtactcgccgccgtccgcttcgccgccgccgggttcatctcaagtcag

SEQ ID NO: 15889 - DNA, 138 bp, Zea Mays
taaaagaagggttgtctaggaaggaaaatataggttggcaatggcaagagtctgctgctccaacaactccctgcttctatggacctccgtgggagccttactttgtacttggcttcacgtcgacatggatgaaggctt

SEQ ID NO: 15890 - DNA, 958 bp, Zea Mays
aggcttcttttccccatatattaaatgtctcaggctcgctttgagaggctagcagatttgcttgcttcagatattttgaagccttgtaccaaggagcagggttccatagggattactgccaatgaagatccatataatgctaatgaaatgagcccaagtgaccaaagacaaaaccatgtttcagcatcgagaaaaagacttatttccctcccaacaagtgaagaagcaaaaactggaaagagacagagagagaatggtgatgatatgatcccaacatcagagaactatagacctgaagatgccctagaacatctccaagatagcaagggaactgatctaccagaatcatttacagtgaagaagttaagggagggtgacaacgatgatgtaggaaacattgtctcttcaagcaatatttttgcggataggtacacgggcgatgatgaggaagttgatgttgattagtgagcggatgctgtcggtggttgataatgatttgagctgtaggaagctatctcaacagacgacatggatgccagcttctaaaactacttttatgccttttgcattgggtaataggggctggtatatctggtagagctatttatgtgcttagacttgagttgtgatgctgtcaaacatatctatacttctttttcttttgtgtctcctggggctcgaagaggatactaatctgtgctcgcctcatgtattattcttagccagtatgagtattatttgagacttttggattggttgtgttattccgcctcagcctcaggttacaaaccatgcatccatatccatctacctatcaggaaatgcatgcgtgatccttaaacttaccgaaggtcttctaagtctgtattctgatactagaggttcatagagtttgtggacttatgttcaaagtgcacaaaaaatgtttacaagtttgacttgtcaacatggaatctca

SEQ ID NO: 15891 - DNA, 1009 bp, Zea Mays
caatagcattcccaactcccaaagcaaatcatattctgctggcaatattaaatctatggaagatgaggtgcggcaacttcagcacgagatcattaagataaacagcaattcttacaccgttgaatcattagcacatgatactgagaaaagggtggaagctttgagcttggaggtaaaaaagatagaggatatgactgcagaacaatggatccaaattcgacaacttgaacaagcatttgtgttaaccaagatgatgacgtcaaaagttcatgagagaagtaggccatcagatacagtttataagtggcctggaaaagaaataattgttaagtatgtcaggaatatcaagcttgatggtatttatattagaggggcgtcatacgtgaggtcctgtttttcacatacatataaacagtccagaagttttgtacaagcaataagcagatgctaccatgagacttctcggttccgcaaagcaattcgtcacaggtatacatctgatattaacaagcctgatgtgttctttttgggtggtaccatttcaagatcaaacatttctcttccatataaccaattcaagattttcatctcattggcacggaagtttcattacaaggcccaaggttttatacgtgatgtgatggaatccaacaaatatagttgtggtttgtcgaacgagccagttacatttatcttggcatatcttgttgtcatttctccattgtggatcgcttggttcctttattcaacatggttcagctcaaggaagtgacaacttgttggaaaacaggaacgttgcagtcatgggttcttttttcttcttttttaggttcaaaaggtatacacgtgtgacggaagacaaatatgtggaaaatttgcaatcaccaggacttctaagaaatataactgtcggcgtttcgaccccggggttcctggactgatgagtaaattgtcgctgcgtgtcccagcctagatgggtagacgcgagatggaacacaagggggaaaaa

SEQ ID NO: 15892 - DNA, 2699 bp, Zea Mays
gacaaatatcaaattgtctgaacgaaaggctgccgtatggaggaggggaacagctgaaatttctccaaaaataccaatccgccttccatgttctcgtcgctgcctccgtctgacggctcgaagctccctccagttccgatctaaacccgccgaaaccctaatccccatggctgccgccatgggcaaccccatcctgaccctccccgcaccggagggcaacggcaccgggggcggcgacgccgaccagcagctgcagcaggcgccgcctaagccgcctcctcccggcgcgaagacggaccccccggcgacggtggccacccacacgcgcaccatcggcatcatccaccctccgcccgacatccgcgtcatcatcgagaagacggctaccttcgtcgccaagaacgggcccgagttcgagcgccgcatcatctccctcaaccagggcaacgccaaattcaacttcctgcagccctcggatccctaccacgcctactaccagcaccgcgtttccgagatagccgctgcgccgcccggcgcggacggcccctcgggcgccgatactggcgcggctcccgacgaatcgccagcgtcggccccggccgacggcgccgccgccgcacccgtagatggcgctgctgcggacgcaaaggccgatcactccgcgcccttccgcgtggggccgccgcccaaggtgctggtgccacccaaggctgagctgtacacggtgcggctgcccgagggtatcacaggggaggagctggacatcatcaagctgaccgcccaatttgtggcgcggaacgggaagaacttcctgacgagcctggcgcaacgcgagagcaacaacatgcagttccacttcatccgacccacgcacagcatgttccccttctttacggccctcacagatgcgtactccagggtgctgaggccggcagagggggtgcctgcattgctaaaagagctgagggaggggtcaaaggacctgactacagtgttggagagatgcttgaaccggttagagtgggatcggtcgcaggagcaggcaaggcagcaggcagaggatgaggttgagcaggaacggatgcagatgtcaatgattgactggcatgattttgttgttgtggagaccattgaatttgcagatgatgagtatgaggggcttcctgtgccacttacactggaggagttgaagcgccagaagaggatggagaacttgggagaggaggaagcgatggatttgactgaaccttctaaggaggttgagatggaaatggatgaagaggagatgcaacttgttgaggaaggaatgcgggcagcacggcttgaggagaatgatggagcagcacaagttagcttgccgggtgatgacgaggcacctatgaggattgtcaagaactacaagaggcctgaggagaggattccggcagagagagacccaactaagtttgttgtctcgccaataactggggaactcattccgatcagcgagatggaggaacacatgcgcatctcactcattgaccctaagtacaaggagcagaaagagaggatgttagccaagatcaaggagactacccttgcacctgatgatgaaatatcacggaacattgttggccttgctcgcactcgccctgatatttttggaaccactgaggaggaggtgtctaacgccgtcaaggcagaaattgagaagaaaaaggatgaacagccaaagcaggttatttgggatggtcattctggtagcattggacgcactgctactcatgcattatctcagcctcagggtggtgaggaacagtttgatgctacgaatgttgatgggaggcctgttcctggtccagctccacttgtccgacctggcatgccgttgcctcgacctcctcagccacttcctcttgttaatgttcctcgttttatcgctccaccagcaccatactctgttccacccccaggttctcatatgcctggagttccacacatgatgcctcacatgcatctgcctccacagcagatacctggccagccgccgatggttaggatgccaggtcaaatggttcatatgccaaccagcattcctccgcctcctggccaaactcagtttatgcctggtccaccacgcacatttgctatgcccccatcatcgcacatgccacccatgatcaatcccattggaatccctcagcctccagcaccgcctctgcctccacagcctcctgctgaagagcaaccacctccacccgatgaaccagaacctaagaggcagagaacagatgatgcttctctcatcccagcagagcagtaccttgttcagcatccgggtcctgctagcatctctgtatctgtacccaaccttgatgaagggaacttgcgaggccaaattttgcagattcctgtccaatcactgtcagacacagttggtagtctgaaggagcaaattgctggagagttgcaactccctgctaataagcagaagttgagtgtgaggactagtttcctcaaagacaaccttactcttgcttactacaatgtgggtcctggagtggtgatcaatctaacactgagggagcgtggtgggagaaagaaatgagtcttttggttctcagttggcagtttaatgcttacaactataattcagcagctatcatggagaaccagtcattggcatacgtacctgtttttttggtatggtgctgcatgca

SEQ ID NO: 15893 - DNA, 818 bp, Zea Mays
accgtcaacggcggccgcgcgctcacgtcccggcggccacgggccgtgacagactcgagcccgtccgccgccttcgccgcgccgcctccgcctcctccatcgcacgccgactccgctgcctacatccgcgcacgtccgcctccactgcctccatccgctcgggagccgccgccctccgcgctaggcctcgcctccgtctggtctggattcttcgacatctggccatctgggcgctccgcgtcgccgacttctcgcaggcagagagcatccttgatagacctgatggctatcgcagagagctgtgttgatgcggtggtcatggagatggtggcagtctactgcggtggcctctacaccgccaaaccagagcttgctgcccgccgcatcgaggccatcggcttccaagtcgggcaccagctctctgagagatataccatggagcgccctcgatttagtgatcatcttgaagcaatcaagtttatctgcaaagatttttggtcagagctgttcaagaagcagattgacaatctgaaaacaaatcacaggggtacctttgtccttcaagataaccgttttcggtggcttactcgtgtttctctagatccacgtacagagaacacagattcaactgaaaatgattctgcagcattgggtgatactgcagcccaaacgactaccatgcttctgtatttcccatgcgggttgataagaggtgccttgaccaacttaggaatttcgtgttctgtctctgctgacatgtcaaaccttccagcatgggcctccaagcctccgaagaacacatcgttgtgacgtaattt

SEQ ID NO: 15894 - DNA, 941 bp, Zea Mays
agctgcttaaagtgagaaatactgacgacgacaacaaaagtgagtgtcccggggaacagcatgctcagcatggtgacagttcggtgtgggcactgcacaaatctactgtcagtgaatctgagagcactcatgcactcagtcccagaacaagatcagctccagcaggagaacatcagggtccatggcacgttgcgtgagcatcatcagtgcggcggcggccaccatctggagctgggctcttcgtcgtcctcaaggttccggctgccgatgatgatgtcgtacgcgccgcagaacgagcacttgctgcaggaacagacactgaacaacgctcgtccggctcctgagaagaggcagcgggttccgtcggcgtataacagattcatcaaggaagagattcgcaggatcaaggcgaacaaccccgacattagccacagggaagccttcagcacagcagccaagaactgggcacattatccgaacatccatttcggcttaaactccggccgagagggtggcaagaataagctcgtggacgaggctgtcgcggcggtggcggtggctccgaagaagatccaaggtttctactgatcgatgccggtcgatcgagggatcagcgctcgtcgtcatcaactggccggccgggtgtggaagaattaataataccacacaaattataaatgtactgtgatgagtaaattaaagagttatagtggggaatgaagggagagagagatatatagcaatacgtatattaccttaccttattaatgagtgcaaaaaaaacacttgtgaaggtttctactgatgcatgagtgggaagtgaagcatcatacaatcacatgaattatattactactggcatggtgggcgccatgcatggtttaaattaaccgagaagacgacttaataaatcattatttgacctaccatgttattgcaca

SEQ ID NO: 15895 - DNA, 2095 bp, Zea Mays
tcatgaaaaaatgtttttgcaatcaaaagcaaatgcatctagcacaatttcattactttgacggaatacattggggcatttggtttgctgagagaaccgaaatggggtcacttgaaggagttgcataaagctatcaagctttgtgaaccagcattggttgcaggagacccaattgtaacttcacttggcaatgctcagcaggcatctgtttttagatcaagcaccgatgcctgtgtggccttccttgagaacaaggataaagtatcttatgctagggtatcattcaatggaatgcattatgatctacctccctggtccataagtattctcccagactgcaaaacaacagtctacaacaccgccagcgttggaagtcagatttcacaaatgaaaatggaatgggctggaggattcacatggcaatcatacaatgaggatataaactccttgggtgacgaatcatttgcaacagttggattactggaacagataaatgtgacaagggataacacagactacttatggtatacaacatacgttgatattgctcaggatgagcagtttctcagcaatgggaagaatcctatgctaactgttatgtcagctggtcatgctttgcatattttcgttaatggacaactaacagggactgtgtatggaagcgtagaagatccaaaattgacatatagtggaaatgtgaaactttggtcaggcagtaacactatttcatgcttaagtatagcagttggtctcccgaatgtgggagaacattttgagacttggaatgctggaattctaggtcctgtgacactggatggcctaaatgagggaagaagagatctcacatggcagaaatggacctataaggttggtctgaaaggtgaggctttgagtcttcattcacttagtggcagctcttcagtagagtggggagaacctgttcagaagcagcctctgtcatggtacaaggctttcttcaatgcacctgatggtgatgagccattagctttggatatgagtagcatgggtaaaggtcaaatctggataaatggacaaggtattggaaggtactggcctggctacaaagcttctggaacctgtgggatctgtgattaccgtggagagtatgatgaaaagaagtgccaaaccaactgtggtgactcttctcagagatggtaccatgttcctcgttcatggcttaatccgacggggaaccttttggtgatatttgaggagtggggcggtgatcctaccggaatttcgatggtgaaaagaatagcagggagtatctgcgctgatgtctccgaatggcagccatcgatggcaaactggcgaacaaaaggctatgagaaagccaaggtccacctccagtgtgatcatggacggaaaatgactcacataaaatttgccagctttggcacaccacagggctcctgcgggagctactctgaaggcggttgccatgcacacaagtcatacgacatattttggaagagctgcattggtcaagagcgctgtggggtaagcgtggttccagatgcatttggtggagatccatgccctgggactatgaaaagagccgttgttgaggctatatgcggctgagtcatatgatccatataacgtactggtttctacaataatgttaccctatatcaagctggcaagaggtgaaagtggcggcaactgcgacacacggattgccagggtttacaggaattagttgtatgttagatttaagcatcgtatgtgtatgtaacttaggtcacatgagacttgcatggaagaagtggttaggaccctagctgtgagaaactaagtcttgtagctctctacacagtagaattggtctggcaggtgagggtgcagatgagactctgctttattacctgagtccatgtgcgcggtggctcttgggttggagattgccaaaaggccagcaattggctttgcattatctggtcattcatttttttggtcattggagggtgcaatgtaaatgttcagggtcaatcatttatgaatttttctagctagtaatgaaacagtaaagaaaatgttggttcagattataaaacaccagttatcttccatt

SEQ ID NO: 15896 - DNA, 1448 bp, Zea Mays
tgcccccgatccggcccacctacgtgttccagctcacctcccgagtcccgacgaccgcttcgtgccttcgtttcgtccgtcccctagtccctacgaccctactccctcccgcacgccaccgcccaccagcgccgccgaggggcaaggccgaacctttctccgttcgccgaggcggagcacgcccttccaggccagcttccaccggagcaagagctaagtcgcctcgaattcttcccagctagtagcgtgtgccgtaccccgtcgctcaaccgggatggcgtcgagtggggatccgcccggatctgctggatccatctattaaggagatggcagatcaaattgcaagggatcctgcattcaaccggatggctgagcagctacagagaagtgctcaaagcacaggagaacagggcacacctccattaaatcctcaacaatacatggaaacaatgcaaaaggtcatggaaaacccccagtttatgaccatggcagagcgtctggggaatgctcttatgcaggatcctgctatgtccagtatgctggaaacctttagtagtccatcacataaggagcagctggaagagcgtatgtctcgcattaaggaagatccagctatgaagtcaattcttgatgagttagagaatgggggcccttctgcaatgatgaagtactggaacgaccctgatactcttcaaaagattggtgaggcaatgggagctagcttcccatttggtgcaggttcttctgctgaaccttctggtactgaagaaactgaggaagaaggtggggatgacgatgaatccatcgttcatcacactgccagtgttggtgatgaagagggtctcaagaaagcactagatggtggagccgacaaggatgaagaagactctgagggaagaagggccttacattttgcatgtgggtacggtgagttgaagtgtgcccagatccttcttgaagctggtgctgcagtggacgctcttgacaagaacaagaacaccccgttgcattacgctgctggctacggccgcaaggagtgtgtggatcttcttttgaagcacggtgctgctgtaacgctccaaaacctggacgggaagacacctatcgatgtcgccaagctgaataaccaggacgaggttctgaagttgctcgagaaggacgccttcctttgaataccatgcctttcgtatacacttggactcttggtgtcatgttttttttttcataccggttgtttttgtctggatagccacatgtcatggtccttaaatctgttatgcctaaatgctattagcatgtgggtgttcgaactggcctgtaatggtctaccgttcgtgacttgtgttttcccactccatttctgatacttaagcacatatgaaaaagttgtttccggatcaaattcaatggtggtgtatcatggttatctgtcttatgcttaagagaca

SEQ ID NO: 15897 - DNA, 950 bp, Zea Mays
gttctgagtaatctatatgattaggcaggatatatcccttcttcatggtctcgggatcaaatttgttcttgttcctggaacacatgtccagattgataagctcttggctgagagagggaagaaggctaagtatgctggtcgctaccgcattactgattcagattcattagatgctgcaatggaggcagctggccgaatacggctaactatagaagcgaagctgtctcctggaccaccaatgttaaatctccgtaggcatggtgttaatggccgttggcatgaaatctctgataatgttgcaagtggaaatttccttggtgctaagaggcgaggggttgttggtggcattgattatggattcaccggtgaagttaaaaaaatagatgtttcacggataagagaaaggcttgatagagacagcatagttgttgtgagcaacatggggtactccagcgcaggagaggtcttgaattgcaatacctatgaagttgctacagcatgtgctttatccatagaggcggacaagcttatttgcattgttgatggccaaatatttgatgagcatggtagagtcaatcgttttatgtctattgaagaagcagatatgttgatcagaacacgtgctaagcagagtgaaattgctgcaaattatgtgaaggttgttgatgaggaggacatcaatcatgtccgctgcctcccaatgaaacatggtacagaacatggtatgaatggaagggaccatattaatgggtatactgcatcttttcggaatggtgtgggtttcaatgatggaaatggtctgtctggtgagcaagggtttgctattggcggggaggagcgcttgagcaggtcaaatggttacctatcagagttagcagcggcagcatacgtatgccatggttccagcattccaggcttccagcaatgttcataacatccgtgcatgcagg

SEQ ID NO: 15898 - DNA, 667 bp, Zea Mays
tgtacacattggtgaaccacaatgtggtgggatttggatttctactcaggaacgacatcagttgaaggatctaaatggtcactttttagttgaaggacccaacatagaattcacgatatatacggccaaattttgagttctggtccttggtcaagacgacatacagtaacgacaacagcgatgaggacgacgaagagcttggcgacattgacgcacctggaatgaatgtgggcagcttggatgatcacttcgaaatagattttaacagtgacgatgacattgagtataagatgaataagatgtccataacgccgcaacgcactttctaccatccactggctacaaacagtgagtccaaccgcatgcctgcgaggatcagaccttcagtgagccccccatcatagcaagggcaacgcgtggaaaaccggtttgtgattgtatacttggtagtcagcccttaggaacaggtatgtgtttgtagcaagacttacgacgtgaaatgaggattctcttggggacattaatggtataacgtgcgaatgttagaacctaattttcaattatcaatgagtcaggtgcagcctaattttcaaggacctgttcgtagcatgtaatgtaacgcatctaggcaaaacaaccctctgttgcccagttcatgctgaagtct

SEQ ID NO: 15899 - DNA, 1299 bp, Zea Mays
tgctccggttgatagattggtgaatggtgatgaatccaagtatgaaagggcacacagtacagttttgcaaatatgttaaagcatgcgtgcatttactattgagatggcaaagttgtagaaagctgaacttatagcttttggacgtgcagagtgaaggaactggacatgtcatttgtgataataaaacatttacgttggtaaagttgtagaaagctgagcttatgggcttatagcatttggacgtgcagagtgaaggaactggacatgtcatttgtgataataaaacaattacgttttcattttttctctttagattaagcaatgaagatgaagcattgatggatatattagcaaatggaaaatggaaatatcaaagttcagatatgagctatgcccaagatacatgaaagagcgcaaattctggcgggtatattttttgctagtaaacagctatatagctccgtttgagaagaaatacttcgaggagctgaaagtgaaagcagaggaagagaaaaaggattcccagaaggaagcatcccaagcatctacaactgcagaaccgaaagacacaaaagtgccaagcaagacctcttcgacaaatccagaacatgacctggatgtatttctgctgggggatctgggtagcgatgatgaggcttctgttggtggtgatgatgggctagatgatgactttgataagattgatgcgacctcgggattggaaagtgatgacgatgacaaaaaggcagcaacagggaaggcagaaggtgtgtagtagtagactatggttttgagagatgacgccaatgatagcgaacttcaggattccatgatgatattgtatattagttgatcgcatgccgtatgttcatttgttatctcccaatgaaggaatgctaagcacttgttattacaattttcgattttttttactaaactgagacacctatctatggatggtgttactcttttcttattagaagtgttctgtgaactgtctctacgaaattgaactccgactgctcgagactgtaattcacatgatgcacccgtgtgtgaagataatagatttggtatatggtgcgatttttcaagcctgacgtacgtttttacacctgattacctgaaataatggggtctcattggaccacggtaaaatttctcgcctgagatttggcgaaattcggtaaaatttactatttctggtactgatcaggaaatggttttcaaacctatttcgttcaattttgtatttttttttgaaatttctgtaaaatcagaaaaatatgataaaaatac

SEQ ID NO: 15900 - DNA, 4747 bp, Zea Mays
ctccctcccactcctgtcctctcctctcctctccccgccatttggctccgaaccctcacaacagtgcatcgtctctcctgtccccgccatttggttcggaactctcgcggcctcaactcctcctcgtcatcgtaacacccacgcttagagttcgtgagggtcgcccccaggggatctcgagacgtccgtttccaagagtggaccggctcgcaggcgctgctgttaccttgggtggagctcggacctgcggatcagttggattctcaagggagacggagtcgggagcaactggttttgggcgtcgcggagcacatggcttaagaataatttcttccagcccggcgacaaattcgcagttggattcagcatatgcattttttatgctgacataggatgtgctcaaccatccgtggactccctctagttgcacaaaccacctcagtgctctctctttcttcgaatcgggctaataatgggcagtgcttgccaagctggcacagacgggccttcccgcaaggatgtgttagggatagggaatgccgccttagagaatggccaccatcaggctgaagctgacgcagatgaatggagggaaaaggaagaggacttggccaacaacgggcacagtgcgccaccgccaggcatgcagcaggtggatgagcataaggaggaacaaagacaaagcattcactgggagaggttcctacctgtgaagacactgagagtcttgctggtggagaatgatgactctactcgtcaggtggtcagtgccctgctccgtaagtgctgctatgaagttattcctgctgaaaatggtttgcatgcatggcgatatcttgaagatctgcagaacaacatcgaccttgtattgactgaggttttcatgccttgtctatctggtatcggtctgcttagcaaaatcacaagtcacaaaatttgcaaagacattcctgtgattagtaagtagatttcctcaactaccctaatgcacgtgaaattttatcttgttaattgttgggtttaaatacttttagctgctacactgatgtgttttgcatgcagtgatgtctacgaatgattctatgagtatggtgtttaagtgtttgtcgaagggagcagttgatttcttggtaaaaccactacgtaagaatgagcttaagaacctttggcagcatgtttggaggcgatgccacagttccagtggaagtgaaagtggcatccagacacagaagtgtgccaaactaaatactggcgacgagtatgagaacggcagtgacagcaatcatgatgatgaagaaaatgatgacggcgacgatgacgacttcagtgttggactcaatgctagggatggaagtgacaatggcagtggtactcaaagctcatggacaaagcgtgctgtggagattgacagcccacaacctatatctcccgatcaactagttgatccacctgatagtacatgtgcacaagtaattcaccctagatcagagatatgcagtaacaagtggttaccgacagcaaacaaaaggaatgtcaagaaacagaaggagaataaagatgaatctatgggaagatacttaggaataggtgctcctaggaactcaagtgcagaatatcaatcatctctcaatgatgtatctgttaatccaatagaaaaaggacatgagaatcacatgtccaaatgcaaatctaaaaaggaaacaatggcagaagatgattgtacaaacatgcctagtgcaacaaatgctgaaactgctgatttgattagctcaatagccagaaacacagaaggccaacaagcagtacaagccgttgacgcaccagatggcccttccaaaatggctaatggaaatgataagaatcatgattctcatatcgaagtgacaccccatgagttgggtttgaagagatcgagaacaaatggagctacagcggaaatccatgatgagcgaaatattctgaaaagatcagatcagtcagccttcaccaggtgcaaaacataatatcagtgtcattactaggttattaacataacagtaagttgcatgctaacccattatgatttctgcaaggtaccatacatctgtggcttccaatcaaggtggagcaagatatggggaaagctcttcaccacaagataacagttctgaggccatgaaaacggactctacatgcaagatgaagtcaaattcagatgctgctccaataaagcagggctccaatggcagtagcaataacgatgtgggatccagtacaaagaatgttgctgcaaggccttcgggtgacagggagagagtagcgtcaccattagccatcaaatctacccagcatgcctcagcatttcatactatacagaatcaaacgtcaccagctaatctgattggggaagacaaagctgatgaaggaatttccaatacagtgaaaatgagccacccaacagaggttccacaaggctgcgtccagcatcatcatcatgtgcattattacctccatgttatgacacagaaacagccatcaacagaccgtggatcatcagatgttcactgtggttcgtcaaatgtgtttgatcctcctgttgaaggacatgctgcaaactacagtgtgaatgggggtgtctcagttggtcataatgggtgcaatgggcagaatggaagtagcgctgtccccaatattgcaagaccaaacatagagagtattaatggtaccatgagccaaaatattgccggaggtggcattgtaagtgggagtgggagtggcaatgacatgtatcagaatcggttcctgcaacgagaagctgcattgaacaaattcagactgaagcggaaagatcggaactttggtaaaaaggtagcctgttttcagttacatgcctgttgtagctatgacttgaaatcagtaatagttatttgagggttgaagggccttccacttaatatataaaagtaagggtagggattcaaatggtttgcacaattataatcagaaaaaagatagaagtgattattaataatctctacctttggaggatataaaaatgcttatgctacttccagctatgccttttgtctttttttagaaaaacttccagttatgacttaattgttaatattgacaataccagtgtaggaatactgaaattagtcttgaaagtaagacattagttgctgctgtttgcgtgatggcccctagcttgaggatactttgccgctactcttgcggatgctttgccgctccatgtcatctctagcggacgctctgctgtcgtgctgctggatgtttgtctcgtctcctctcaggggatgctctgccactgcagtgtcttcgtctttattggcaacctggagttgatgtgcttttccttctgcaggttcagtcggttagattttaggtggagagtccttcttactgcattttctttctctggttctttgggtcggtttaggttgctaaccacttctgtgcttttgtaatatgggcgacggggtctctcagtagctttgtcataaaacaattctacttccccttaatatagtacatgtgactctgacatgttatcgaacaaaaaaaaacattgctcgctctaaattttatgagatctggcatgatttcaaactattcttcttttcaaaatcctgttttctgactgcagtttttacaagattttatggtcttgccgcttcatttttctgactgtttgcattggaccgataccttctgatggccttgtccgcctattttcaggttcgctaccaaagcaggaagaggcttgctgagcagcggccacgggtccgaggacagtttgtgcgacaatctgagcaagaagatcaaacagcgcaaggttcagaaagatgacacgtaatttctaatacaacgtatcatcttcttcggcagatctgagaattaggcggttcttcctattgcgcatcttcgtcgacagatctgagaattaagtggtccttcccattgctgatagtagcccactgattcccaacgttagagtacacaataaataagactctagttgtcaatttctgtggttgactgcagatgatcaccctagcgctatggagtcaacaatgtaatatttatatactatgttcgtgccttggcgccttggcggtttgcaatcttcagtttcctttctgagagattcttggccaagtgccttgaggaggagcaaactagcagcgtcgccattgctatattaatagctggaatcatgtagtagtagttcatccattcattcgaagatcgtgttccaaatcaacacaagtaggggtttgcttctcctctttccaagaaaagtggttgtagcgtgagatgcaaataggtctcttgtgctagatcaagctcaataaactttaggccgtgttaggcagctgatctacttcaccaatgtggcaaggcattcgtcgtattctgttgacagaaacaaggtgttcactgcacgggcatgccgcacgactcctcgcagatcaaaagagggaacacggcatgcttttaccaaaattattttcgaataacattgtgaggaacagacaataattaacttcccaaaacgtctcgctatactggatttttcgatgttggattcgtaatcagatccttttgacaataattttcgtacatcaggcatgtcaacagtaactgaagaatatgttagagccacatgtctcaaaagaaaaaaaaaacagagataatctcttcagtggttcagacatttcggaagagatatacgctcttcaac

SEQ ID NO: 15901 - DNA, 1196 bp, Zea Mays
atctatcaaaaaccctagcaaagccacctcaactctcctgctggtccggcgcaggctccgctccgttcccccgctgtagttcgagtgttcgacccggcggccggcggcgacgcgctcgtggtttccagcgatgtcggcgcaggcgggtccagggacgtactccccggcggcggccgcaggagacaggcgacgccgactggccgcgggccgacggccgctccttccacgactgccggccagcgtttatgcagacaggaccaactactgctgcatcagggtctgcttatgcagaatttgggaagacaaaggtcattgtatcggtttttggaccaagggaaagtaagaaagcaatgatgtacagtgacgttggtaggctcaattgcaatgtgagctatacaacctttgccactccagtgcgtggacagggagcagacaacaaagagtattcatcgatgcttcataaagctctggaaggcgcagtaatgctgcacacttttccaaagaccactgttgatgtttttgccttggttcttgagtctggtggcagtgatcttcccatcattatatcatgcgctagtcttgcattggcagatgctggaatcatgatgtatgaccttgttacatctgtatccgtgtcctgtttcagaaagaacatcatcatcgatccaacctcagacgaggaagcatggcaagacggaagccttgtggtggctttcatgccagcccgcaaggagatcacgcagctcacgctcactggagagtggagcgatggcagaataaccaatgcagtagagctctgtatggatgcttgcagcaagctgggtgacatattgcgtgaccgcttgaaagataccgctaccttgacgtgtgaatgacgtgttagagagagcactggcaacaacagatgttcttagctgtacaaattctgtaggcaggggaggctgatcggcctgatgtttgagtgagcatgatgcatggttatgatgatggtctccttcacggcaaaagctgtcaaaccgggaagaaattgcagggcagtgtgtatttggcatgtaacgtacttctgactgacctttgccttcatgtagcatctgtatctttctttttccgcgtactgtaacacttcttactctaccaggagctggaatttttttgaaaaagaaaatcaaccgatctatatagaacaccacatcaac

SEQ ID NO: 15902 - DNA, 1136 bp, Zea Mays
ttgttcccttccaaagtaactaatgatgctcctcaatcctcattgagtgtgccaatgcggtgcggaaacaatctcattcatgcttgcatgatgttctcctgagttttcaaaggcaaacaattttgattccagcaagtgaagcaataacaagatcttttgagcggtttctgctgcttgctggaggatctagtgctgtaaatacaggtgtatcagaggaaggccccaagggggctaaggaggtcctgtatattttgaatgctttgatatgctgccttccccttatggcctccaaaccttccaatactatcttgaaatattttaaaccactattagatttgcatcaaccaattttgataaggagtcttctggacattctgcatgctgtttgtgagagtccaaccgtacagctcaaatctgatgtgttattggaccttctgtgctcgttgggtctgtcagtgtcttcagaaaggaaatcaggagatgaaatggcttcaattgcacgacttctacatgttggcactaaaaaaatttacaagcaaaacagggacatttgtgttgtaaaacttccattgatatttacctcacttggagatatattatcaagtgaattcgaagaggcgagattttcatctctggagggttttaaaggtttaatagataactgcattgatgaaaccttggtgtcacagggtattgctcagatgaaggctagacatcaagggttgaaatcagatccaacaatcatagataagatatgtgctatcctagaaggcttgctagatgtccgctacagtgacgtctgggacagatcatttcatgtaatttcagtggcatttgacaaactaggagagttttcagctgatctattgcccgaagcagtcaggaacttggcagacatgcaaaacttgtcagatgatgacttttcctttcggaagcagcttgatgcatgtcttggttcagcggttgctgcaatggggccaaagaatattctggaaattcttcagattcagtcaataagtgatgaaaatgaatggattctccctattctggagaagcacattgttggtgccagtttacaatttttcttaagagatattctgagtatggttggtgccatagagaaaaacattcctaag

SEQ ID NO: 15903 - DNA, 2040 bp, Zea Mays
tttattttagtgtagagttagtataagttatcagttgagtcagtgctgcgatgggactgaaagctccgcttcaacaggtaggggcgtagggtatccggctaccgctcgtcctcgtgcacgcggctgttaaacacagtgaccccctcgttagctctccgtccatcccctcttccatcaggatcagcggtggggtatcgatctgctctagttggacggcggcatccctgattctaccctgatcgatcccatggatgcccaagacggcgatgagagaccgctgatcatccatcgcctgccactactccaggatgaaagtacttccgaattcactagcgacgggacggttgatcttcgcaatcagcctgctcggaagcagagaactgggaagtggaaagcatgcttcttcatcttaggtgccgagtttgctgaatgtgtggccttcttcgcgatctcgaagaacctggtgacgtacctcacgggcgttctgcacgagagcaacgtggacgccgcgacgactgtgtccacctggatcgggacctcgttcttcacgccgctcgtcggcgcgttcttggccgacacattctgggggcgatactggacgatactggccttcctctccgtgtacgtcacggggatgacggtcctgactgcttcagctcttctcccgctgctcatgggcgcgtcctacagccgtagcgcccaccgcctcttcgcgtacctgggcctctacctcgccgctctcggcaccggcggaatcaagccgtgcgtctgcgcgctcggtgccgaccagttcgacgcgtctgaccccgtggagcggcgggccaagggctccttcttcaactggtggtggttgctgctgtcaggaactaccgtttggtgctgcctgagcctgacgacagctcggccctgctgcatcaggcgcctcccggaacgacggaaggaaatgattccacgatgcagcatacgagtcaattcaggttccttgacaaggctgccattgtagcgccatcctccggcgagaaaggagcgacggcaagcccatggcggctctgcacggtctcccaggtcgaggagctgaagacggtgctgcggatgttccccgtgtgggtgtcgatggtgctcttcttcgcggccaccgcgcagatgtcgtccaccttcatcgagcaaggcgagaccatggacaaccgcgtggggccgttcaccgtgccgccggcgtccctctccaccttcgacgtcatcagcgtcatggtctgcatacccatctacgacaaagcgctggtgccgctggcccggcgcgccacgggcaaggagcggggcctgtcgcagctgcagcggctgggcgtcggcctcgcgctgtccgtggccggcatggtgtacgcggcgctgctcgaggccaggcggctgtcgctcgcccgcgcagcggcggacgggcggccgccgatgtccatcatgtggcaggcgccggcgttcgcggtgctcggcgccggggaggtgttcgcgaccatcggcatcctcgagttcttctacgaccagtcgcccgacggcatgaagagcctcggcacggcccttgcgcagctcgccgtcgcggcaggcaactacttcaactctgccgtgctcgccgccgtcgccgccgtcaccacgcgcaacggggaggcaggatggatccccgacgacctggacaagggccacctcgactatttcttctggttcatggctgttctcggcgtggtcaacctgctgcacttcctgcattgctccgtcaggtacagaggcagcagcaacaacagcacatactcttcttgagtcttcacacgatctgtgccaagtatatggcaaaatgtcaacaaagagagatgtcaatcgaacttgttaacgagacacaacaggatgcccgcattctccatttggcgtctccacaataataatgtgtccctgcgtcggtccattgttttgtgacaaacacacgaatacctttgcgttgttattgagccttttgctcgtggtcacacccacacggcactacaaatacatacatcgaca

SEQ ID NO: 15904 - DNA, 633 bp, Zea Mays
gattttctatggttctggtgcttggatttgaagaggaacattgaaaatttggagaggaatggtgttaccagcatgcggtccatggtcaatcttggctcagaggtgtacatgcaagcagaagtaccagatacaaggcatatttttgtggatatcggtctaggttttcatgtggaatttacttggcaagaagctttacagttcatatctgtaagagaggcaaggttgactaggcaaatagacgaatacacgcatctcatcgcaagcataaaagcacagatcaagttggtatgtgaaggtatccgcgaagtgctgcagctgcctgcggagaaagagttatcgcccaggaatacgtggtagaatttggttctcaatggagcagggggtggtgttctttaaacgtggttccgtttcaactcttgcagttgaaattattgtggtgccgacagtattttagagcagagaatgaggttccccttcgtacaacaatctcttcgacgacaccacgtacaactcatactgatttctatgtattcattacgttggcatatggccttgccgatttgcagtttatttgagcctcttttccaagttaggttgagctcacaccaccgggccttccctgaccccgacgcg

SEQ ID NO: 15905 - DNA, 1992 bp, Zea Mays
gtgcgttgcggcagcgcacttatattagcctggtcagtacacccaccgtagcctcacacttcgctggggagacgaagctgctagccgatcaggggagaattcttttgtaatggagctgctgcgaccacgcggcgatggttgttgcccgcgcgtgctctcggtttctctgctgctcctcgccgccctgctgtggaagcacgtctctgcggcggcgattaccaggggtgatttcccggaggggttcgtcttcggcgccggcgcatcggcttaccagatcgaaggcgcatgggcagaggacgggaagaagcccagcatctgggacacatacacgcacagtggatattcgattgaccgtgatactggagatgtggctgcggaccagtatcaccattacaaggaagatgtgaagctaatgcatgacatgggcttggacgcgtacaggttctcgattgcctggtcaaggcttattccagatgggcgtggagctgtgaacccaaaggggttggagtactacaacagcctcatagatgagctcctcagatatggaatacagccgcacgtgaccatctatcacttcgaccttccccaggctctccaggatgaatacaacggcctgctcagtccgagaatcatcgatgattttaccgcttacgcagacgtgtgcttccggagcttcggcgacagggtgaagcactggatcacggtgaacgagcccaacatcgagcccatcggcggctacgaccaaggctacctcccgccgcgccgctgctcctacccgtttggactgggcgtcacctgcacccacggcaactccacgacggagccgtacgccgtcgcccaccacctcctgctcgcgcatgcgtcggctgtgtccctctacagacgcaagtaccagggcgagcaaggaggacggattggactgacgttgctggcctggtggtatgagccagcgacgcagaagcccgaggatgtagaagcagctgccagagcaaatgacttctcgcttggatggttcatgcatcccctggtgtacggcgactatccgcccgtgatgaagaggaacgtgggggcaaggctgccgtcgctgacggcccgagactcggccatggtgcgcggctcgctcgatttcgttgggatcaaccagtacggcgcgatcctggtcgaagcagacctgggccagctcgatcgggacctcagagactactacggcgacatggctaccaacttcgtcacggtaccgtttgagagcacagtaacgaggaaccagcaggtgcctcgacttgggctgcggaaccatgaggcgccgtgggctctgagcaaattgctggaacacctgcagacgcactacgggaaccctccggtgatgatccacgagaacggagctgggcacgagcccgacccgtccggcgggttcctgtacgacgacgagttcagggcccatttcctgcgggtctacgtcgaggcggcgctcgcttccgtccggaacggctccgacctgcgcggctacttcgtctggtccttcatggacgtgttcgagtttctcttctcctacaggttccgcttcggtctctacggcgtggacttcgccgccgacaaccggacgaggtacgctcggcgctccgcgcgatggtacgccggcttcctccgcggcggcgcggcgacctcacgcccgcctctgtttcaacgcggacacacggctccacctattcggagtgaaaatcagccgcacgtgtctgtgttatagattcatcgcgagtgaacaagtacatgatggatgttcttcaccctcatccatgtctgtcgtatgcggcattttcccgtcagttgtgtatttgtttgcatttgaggaataaattcagttctgtagtaggctgtcggcagatcttggcgattaaaagtatctctaacaaaagtgatttaaaagtgccccaaaatttaaaacactacataataaaacattgagaacgatgtagaaaaataaagatatgtact

SEQ ID NO: 15906 - DNA, 1758 bp, Zea Mays
tatcaaatgatgtttgtttagtaaaagggtatctgtgagcaatccagtgatgcttctagatgaaattgacaagactggttctgatgtacgtggtgatccagcatcagcactactggaagttcttgatcctgagcagaacaaagcattcaacgatcactatttgaatgtgccgttcgacctgtcgaaagtcatatttgttgcaactgccaataagatgcaacctataccccctcctctgttagataggatggaagtcattgagctgccaggctacacacctgaagagaagttaaaaatagccatgaaacatctcataccaagggtattggagcagcatggcttgagtacggcaaatcttcagattcctgaggctatggtcaaactgatcatcgagaggtacactagagaagctggtgtgcgcaatcttgagcggaacctagctgcattggcccgtgcagctgctgttaaggttgcagagcaagttaaaactcttagacttggcaaggaaatacaaccaatcactacaactcttcttgattcgaggcttgctgatggtggtgaagttgaaatggaagttattcccatggggcatgatatgtcaaacacttatgaaaatccatctcctatgactgttgatgaggctatgctagaaaaagtacttgggcctcctagatttgatgatacagaagctgcagatcgtgtagcaagcccaggagtatcagttggccttgtctggacttcggttggtggggaagttcagtttgtggaggctacagccatggtgggcaagggtgacttgcatttgactgggcagcttggtgatgttattaaggagtcagcacagttagctttgacatgggtgagagcaagagctgctgacctcaatttgtcacctgcttctgatatcaacttattggagagccgtgatattcacatacattttccagctggtgctgtgccaaaggatggcccttctgcaggcgtgacattggtaacggcactggtgtcactttttagtaacagaaaagtcagagcagatactgctatgactggagagatgactctaaggggcattgtattgccagttggtggtgttaaggacaaggtacttgcggcacatcgttatggaatcaagagagtaattttacgtgaaaggaacatgaaggacttatcagaggttccatcaccgattctctctggcatggagattctgcttgtgaaacacatcgaggacgtactcgaccatgctttcgaaggcggatgtccacttaaatcacgctccaagttatagcatccaactcgcctttgctatggatatttgcttcggaggatcatcgtcaacagtaccacgaatggtcaacagtcagaataagagcctagctctcttgccagcacaggtcttgacacgcccatttttgttaggcttcgcatctgaatgtgtatactggtcagaattcggagagcagtcagaagatctgctcgttcacctgctgggactcattgcatagtttctcgacaccagctgttgatgtttatgcacagatgcaacagaaatcagggaggaattacgctggttggtttctctgtcgtgggtgtatatatgtatgtatgcatgtaatctaatccagggaaatatagctacaacaaggttgtcaaaactaaagacatcgagaaacatcacacgtcctttgggcttgggtgactttattataaatgtatgtacatataacccaaaatgcgcacgtgcgtggtcctgca

SEQ ID NO: 15907 - DNA, 516 bp, Zea Mays
tggtgaataagaaaaaaaaccccggcccagtagcgcacggaggagctacatgtaaacaggcccggaagccggaacagttgctctcctagtcctgcactcgcacctctttgccgttttccttctcccgttcacctcgcgccgccgccgacctacgccagttgcacaggtcttcgtcggccgctttccggcgaagagcattcgcgcgagggaggggatggggaagaagcagaagaagcctgggaaggggaaggagaagacggagcggaagacagccaagggcgaggagaagcgtgcccgccgggattcccgcaaggtcggcgaggaggacgacatcgaagccatccttaggagcatacagaaggaagaagcgaagaaggaggttcatgtggaggagaatgttcccgcaccatctcctcggtccaattgctcggtaaaggcaccgcaaagcttcaaatgactgaattaaattagcatacttctgcacctgccttatggtacttctgtaattcagctggt

SEQ ID NO: 15908 - DNA, 311 bp, Zea Mays
ctgcatataccgagtagaatagagaggggagagggctagggttcagagcacgacgagccataacttcaacaagcagcgggcgggtctcgggcggcgcgcgggcgcttggtggacgacactcaagcggaggcgggcagcgcttgggagtcaggcatgcgaccttgcggctgtgctcaggcggggcgttgcgtgaagcgctagggagtcgggtgtgcgacgggcggcgctcgttcctcaggcatgtgcggacgatgctcagacgacgccgacacaggtccaggtccaggtccagctggctatgtacaagcctg

SEQ ID NO: 15909 - DNA, 614 bp, Zea Mays
ttttggcctattaggtcaaactatcagctcctgattttcggagactttgaagagttggatgagcagttgcgtgcccggccaagaggtggtcggaagaggaaagcattgacggtggaaacactgacacgcaagagggtgaccatctccggcgaggcttcatccttggatgatggagtggagtatcttcgctggttgctatctggtggggatgattcaattgattgtcagtagccggcgtctttttgctatcaccgctgctttgtacatgggttagattatgtaatgtaagttgtttggtagactacgatggtgttcatgacgcgtttgatatattgtcagcagtatggtagtgcagggctctcatagtaaagcttgccatttttgttgtatctttaacccacgtgggtccagatgatgtgtttattcctatgtatttacttatctacatgtatccacatgtgcgactttggcgtttgtttgagattataatctgttaaaatatgttggattatataatttgggcagattataattccaaacaaacactgactaatgctctatttgtttaccctctagtttatataatctagcttaaataagttaaaagaaacaaa

SEQ ID NO: 15910 - DNA, 1637 bp, Zea Mays
cttgcggtgagaaacacggtgtcgccctcgaggctcgaccccgaccttttcctcccctcttctctagatcgcgacgaggcggactccccactcctgctgcccggagcgaagcggaccgcgtccccgccgcgtggcctgatcgatccctcagctctgccggtcgggccaatgctgcgtgcatcgagctgccgctgatcacgattatagggtttaatacttgtatattttgattgtcacaaatgttggatgaagtttgacttatctatggaaatggatgactcacatggcaccatggttaataaaagtgaagagaatgactttgaaaagaaaggcacttctgatcctgtggtttatcagctagttcgggttgaaggtgatggaacacttgttcctgctacagaggatgatgttttgcagtttgaacatttccttcacaacgagaaggttgatcttcctcctattgaagatgcagaccatgtggaagagtttttcaacaatgactgcatgttactgaagaagcctgacttggaagatggatcttccaaattggagactgtggaagcacacacacaaaaattgggtgccaacttagaggataagggaccctcggttgaacctaaagggattcagccatcagttgagatgatattagtgaaggatggtgacaagggaaaccacctgaggaaagtacctgaggttccactaaaggttagttctgagaacgagcatgcagaagcagttgatagcaaaggggttcggaacctacaagcaaaggtctgcagtgctgtttccaagcctaaaataaagcatggtttaacgcggaagcatcatcgagcatggacattgagtgaggtcgtgaagctggtggatggtgtggctcggtatggagctggcaagtggtctgagattagaaaactgtccttcgcctcgtattcctaccgcacttcagtggatctcaaggataaatggcgtaatctgatcagagcaacccagacacagcttccggcgcaaaaagatggtgcctgtccacggaagactaacccttctatcataccaataccaccatccattttgttgcgagtgaaggagctacatgagctgcagtcgcaagggggtggcttcacagccccagtcaagttctctgggcaggacggcaaggttctacagggaaaaggctcgggttttttgtgatccgtgtaatgcagatatacgtgtacgcttctggacgatgtggtatatatgagtaaatattatttgaagtaggtgtaaccacgttatccatcacaatgttctctacacgctggaacatgtgtaactcaggacgtccagaaaatattgttatacttagataagggcagacgtctgtcgccatgttttccaaacgtgtcaggcgtacacaatttaaaaagcaaatgcaaatctagacaggaagaggaaagttagagtaaacggagtatttgcggtgcattacaggaaagttgttgcagcaataatgaactaaactagtatttgcgatgcattacagaatggaatccgcaattcccttgtaaatagaggcaaacagctttctcgtttcggcttgtgctttataaattgctttggctcaaaagacgacgttttctccagcactggttgat

SEQ ID NO: 15911 - DNA, 1045 bp, Zea Mays
ctgatttataaataagcgctgcctgcttggcttcatatcttctcgcccagatccacaagtttcgtgggtagaggaggcactagatactgtgccagatcggggtctggtagtggcagttgggtgattacgacggagtgggatgggcctcctcgacaagctgtgggacgacaccgtcgcgggcccgcgcccggacaccggcctcggccgcctccgcaagcagcccgcgcgccccgccgccgttaagatcagtgatccggccggggacgctgcagcgctcgtgccgccctcgccggcttcgggtagcgaggagacgccggtgaaggtgacgcgcagcatcatgatcaagcgtcccgcggggtacccgtcttcgccgaggagcgcggcaagcacgccgccggcctctccactagggactaccccgcccatctcgccgtttgccggcgctgaaggaaatcatcatccgacgcatatgagagggcaacccctccagggacgaccagccaccctcctcccttcgaagtgtgaaccggctgcaccctcacacttgttttgctccttgacaagcatctcttcacctataataaggtagaggcagggaggagagaagacgacatcaagaggggaacggggatgagttgcgggtttacctctgctgtgatatattgtaggtgccactatgtgtattgttcccccctatctactacgtggcataggttgtattctagtatgttgaaagctcatggtgccgtgctgtatcaataaggtgttatgcgcatagagtggctcaggaccagggctgcgtttgcgctttgccactggctgtgttgtatgtttcttctgctgctatgccattagggtttagggatggtgtgtggatggcgtcgtgcttgtagtgttagctgggtttgaagcggactacatgtaggtttgttcaatgtctggtatctattagctgaaggtgtttgcctgtaagttgtaactctctgtgaactgtgatgcgggataatgctaagaatagatgatcgttctaagtgaccaaaaaaat

SEQ ID NO: 15912 - DNA, 1568 bp, Zea Mays
tataaattcatacatttctacggtttttatttatatttaaacataaaatataaatcataaaaacatacgcattatgttgactagatggtagatgtatgtttgaagccgataactatagtttaaatttctatttgtaataacttttagtttttttaccgtttaagcgacgacatgcgttcagaaagccatcgtccttacagacgagacacgagaggcaggagccagcgaccggcaacagttttctcggaaggcagcctcttcctcgtcgccgccgacgtcacccgccgcggctgtcggggatgccggtcagggtggtcgataccgccacgccttcctcgcagccctccccagggcaagaagcaaatactggacacccatctcctcctagatgttcactcttaagtgctggaagatcttttgctggaactcagaatgtttcaagtctgcagaaggatgaagcatggaaagtgaatgtccgcatccatggttgcgatcttgaacagggttatctatgtggaacgatggaagcgcttaatgttccattagcagatacacctaccagaggatgatataagacattggtccaagttcccatcatttatgcctcttctgagtcagattgagacagacggtggcaagtctctggactttagcaactatccttacatatttatgagatggaaagaacagtattttgtcaatgttggagttgactgtgggttaaccatcgctggtttctactacgtctgcttttcttgtagcgatggctccatcagtggattttattatgatccaaatagcagtccatttcagaagctcgaattgaagtgtaccaacgagaaaagttctggattcaccttttcatcctatgagctgcagtgacagggccagatgcatatagtgtgtactgaactcatactcgcctaatgctgctgtattgaaagaaacgagtggtggtttatgcaacacttcgttttctcgcaagagcaagaccaagcaaactgtcactttgtaatctgcagaagcatcttatcttttctaaaatgtacctttcgtattatggttgtgttcatggtatggtgcgtccaaattcagttggatagggaatgtgagggctagatgttgatccagagaaatgctatataccttttccacaattgttctctgccattggggatttctatttcaacatgtctatgatatacacattgaacgggtctgacgtagtggtgagagccgcctctccatatttacgggagaaaatgcttttgcctcggtttatccaccccacagccttcagcactaggtctattcttttacgatatacacattgtgtttggctcctagttacatgcatcgtgaatacatggtctttactgaagagaaacttcatcaagattgcctattgctttctctcactcaaatctcaggtacaaagccgtggagacctttgccttcagcttcctgacatcgttaggtaaatgaactctaccgacgtagtttcataatgtctcgatctcttgcttcaagctgctctgtcaattctctaaggaataaaacacatctgc

SEQ ID NO: 15913 - DNA, 649 bp, Zea Mays
ttgaggggaagatggtgaggtgatatatagacatggacaacagaaccgaggtttctgggttcgactggcagctagaattgatctctgcaaatcagatgatgataaagcatgatttcacatatgtagaaaattttactttctatggatggtgttatcttttatctcaaattaatctaactttgcagttggtttctctcttttgccttctcagaaagattatgaagagctggcggaaaatgtcatgaacattgttgaccggcttgttcacaagactaatcaaaagattgaacaatcaactgatgtgctgaaggcaattattagtcctgcaatgcatgaaggagatgtgaagtggccaccaagagatccagatacactcaaattgatggagaaagaaataacacgccgagaacaagaaggacaacttgatgagggatttctgtcagaagttagtgctcagttgaggcaagctaaacaagacggagataagccagggcttcaggctatgctgcaaaaggtgttgcagttatatgcttctaaatctctccaaaaacgtagttatgcatacaaaggggggcaagttgtagttcctgaaaagtttctcgaatgtgtaatacagggtctgtatttccacgtagagattttcttcgtt

SEQ ID NO: 15914 - DNA, 751 bp, Zea Mays
gtttcctcaccggttgggttacccctgtgggctggataaaatactcatggctcgtcagcttgctcggagatgttccccgagtatgtggtcagttggctgtctccagagcttttggagacaggaatctaaaatcactattgagatcagagcctgatataaaaatcgaagacatagatcacactgccgagctacttgttcttgcgagtgacggtctttggaaggtgatgaacaatcaagaggttgtcgatttggccaaaaggtacaaggatccctatgctgctgccaagcaattaaccgtcgaagcacaaaaaagagatagtaaggatgatatatcatgcatcgttgttcggttcaaggcgtaagtcggtctcgaaggattttcatcgagagcaaaaaaacaagtgaattaggctgcctgacgatggtagtgataatctgatggttgaataatgactggggtgttggatgtaaatgatttgtctgctccaatgtaaagttcatatataagtatgctaggattatttggtttggcgatttcaaaggtacaggtgcgagggcccgagagctactaaatagctaccatctgtaaataatggttatattggatgttgaatttgtaagagtagactgagcaaaagacatctggatagttcctaaaagaacaaggtactctttatgttcagaaagttctacaggtgtgtatgtgcttcagttagattttaaataaatcctagcaaggtggaagaggaat

SEQ ID NO: 15915 - DNA, 2139 bp, Zea Mays
cccgtcgcattctgcagcgccagctcgctcctcgccccgcccccttctctcagcggcgacgcctcgggcgttcctaccctgccccctctccggacccccacgccgtcggcgaagcagccgggcaagagcccgatccagaccccgcgagcaatccttgatatacctgatggctatgattgatgagcctctgtacccaattgctgtactgattgatgagcttaagaatgaggacatccagttgcgtctaaactccattagaagactttcgacaattgcacgggctcttggagaagaaagaaccaggaaggagctgattccctttcttagtgaaaacaatgacgatgaagatgaggtgcttcttgcaatggctgaggaattgggtgtgttcattccttatgttgggggtgtagaacatgctcatgttttgcttccccctttggaaacattgtgtacagtagaagaaacttgtgtccgtgataaggcagttgaatctctgtgccgtattggtgcacaaatgaaggaaactgacatagtcgactggttcattccagtagtaaagaggctagcagctggtgagtggtttacagctcgtgtatcatcctgtggtcttttccacatagcctatccaagtgcattggaccaattgaaaacagaattaaggactatctatggtcagttatgtcaggatgacatgcctatggtcagaagagctgctgcatcaaatcttggaaagtttgcagccacagttgaacagaatcatttgaagacagaaataatgtcaatatttgatgacttaacccaagatgatcaagattcagtgcgtttgttggctgttgaaggttgtgctgctcttggtaaattgttggagccacaagattgtgtagctcacattcttccagtcattgtcaatttctcccagagctgatttggtgcctgcatatgttcgtctccttcgcgataatgaggctgaagtgcgaatagcggctgctggaaaagtaactaagttctgccgcatattaaatccacagctttcaatccaacatattcttccgtgcgttaaggaattgtcatcagattcatcccagcatgttcgttcagctttagcctcagtcattatgggaatggctcctgtactgggaaaggatgctaccatggaacagcttcttccaatttttctctctttgctgaaggatgaatttccagatgttcggcttaacataatcagcaagcttgatcaggttaatcaggttattggcattgactttttatcccaaacactgctaccagccattgtagaacttgcagaggataggcactggagagtccggcttgcaataattgagtacatcccattgctggcgagtcagttaggtgttgggttttttgatgacaagctgggggcactctgcatgcaatggttggaagataaggtcttctcaatcagagatgctgccgccaacaacttgaagcgccttgcggaagagttcggtccagagtgggcaatgcagcatataattcctcaggtgctggagaagatcaacaatccgcactatttgtaccgcatgacgattctgcaggctatctccttgctagctcccgtcatgggtgcagagatcacttgtcaaaagctgcttccagtcgtcattaattcttcaaaggacagggttcctaacatcaagttcaacgttgcaaaagtactaaagtcacttgtaccgatcctcgatcaatctgtcgtggagaagaccgtgaaaccatgccttgttgagctcagcgaggaccctgacgtcgatgtgaggtactacgcgaaccaggcgctgcaggcgtgcgatcaaatgatggtgtcgagctaactagccgtgtgcccgagtacttagagttcgatgcctcatagtccaattttggattacctgtaatttgttgggccttttagattgaagagttttccgtctagcctcggtggacagatcgacgctgcccatgctgataaatggacggtcctgatccattgttcgttgtgttattaatgttgtataattgagcaggacacaacacgtacgttactctctgtgtctgtgtgtgtttgcatggcattgtctcgcaggtagttgagcaaccacgtaataattctttccagcgcat

SEQ ID NO: 15916 - DNA, 851 bp, Zea Mays
taccctgtatcccaccccgcgcctccaacttgttcttccgctgcaagacagcagtcccgagctgtatgcctaggggagccgcgagggggcggagatgccgacgctgacgaagctgtacagcatggaggaggctgccctccacaacacgcccgacgactgctgggtcatcgtcgacggcaagatttatgatgtgaccaagtatttggaagaccatcctgggggtgccgatgttctgctcgaagcaaccggaaggagcaggacacgggatttgccagcaagcttaaggacaacgtggtgcagtactgggcaatcccagcagctgtaattgggatatcagctgttgttgctatattgtatgcgcgaaggaagtgaaagttaatgtgccatgcttgggcagatgatccttttaggctttgttcgtttcatccctaatccatggggattgagggggattggggtggattgagggggattttgacttgtagtggattcaatccctctcaatccccatgggtttgataaaaacgaacagggcattagagggatcaacccatggtgcatggatgggtatatgtactcctgtcccaaattacactatgatgttcgattcttagacacacttaggcaaacatttgcctgattaatgacactattttatcgatatgacaatcaattgatggatttatactcttggaaccaattgtcatgcttgctggcttgaatatgttccatgcagcctttgatgcctttgaatgtcatggattgccgttccatcttttacctttatctcaaccgaattccgtgctatctgctgtttcacattattcataagatgtgaagctgaattgctg

SEQ ID NO: 15917 - DNA, 436 bp, Zea Mays
actacctatgtacaaacttagttccatggcttccgatgacactgctgaaatgtgaatgttctgtttcgacgacgttgccaagaaaattgttgggaaatcatacaactctcctatcatcagttacagggacttcaactatcctactagatttaacattgatcgtatctcttaaattcacatttgtagttgtgtacaaccaaatatcatttgtggatttagagaaagaactcttcatgaagtcattcatagcatcatatggaagaaatgtcattgccatcacccagatgaaacattccactatctgtcaactccaacaaaactattgtctagaccaaaacaatcattctccaaattaacaggatagtcctggagatgaaggccaggacctaccgtcgtttgagtcaccataaaaaagaaaaggcacttgaagttcaaa

SEQ ID NO: 15918 - DNA, 2019 bp, Zea Mays
gtttcactgatttctaccgcggatgttggatatgatgtttggccgaaacatcaatgatggtgaaactgaagagaagaatggcgaggaagaggatggcgacggagaaaagaagcacgcatcacacatgttctgcaagacactcacagcttctgataccagcacacatgggggattctctgttccacggcgagctgcagaggactgctttccaccattggactatgagcagcttaggccttcccaagagcttattgccaaggatttgcatggcatgaaatggaggttccgtcatatctatagaggtcaacctcgaaggcatcttctgacaactggatggagttcatttatcaataagaagaaactagtctcaggggatgcagtcttgtttcttagaggtaatgatggtgagctaagattgggtgtgaggagagcagttcaactgaaaaatgaagctctacttgaagctgtcaactgtactgattcgaagctacttatgctgtctgctgtggccaattctttggacaacagaagtatatttcacatctgtttcaacccaagggttggtgcatcagaatttattgtgccgtattgcaagttcttgaagagcttgaactatcacttttcagttggaaccagatttaaagttggctgcgagaatgaagatgctaacgagaggtcctttggattgatcataggtattagtgaagttgatcccatacactggcctggatcaaaatggaaatctctcctgataaagtgggatggtgctactaagtacagccaccagaatagagtatctccatgggacatcgagggagttggcagctcagtttcagttactcaccgactttcctcttctgtttcgaagcgaacaaaactgtgcttccctccaagcgatttggacacgccaattctagatggaaacggtcgtccagactcagtggaaactgaacgtttccacagggtcttgcaaggtcaagaattggtgcactctagtattcatggtactgcatgctctcattcatcagatagccccagatgtcaaggctcttatggcaggagattctctgctgatgcgtggaactgcaagatgaatgatgtaatgagtgggcctcgacacctaaatgccactgggtttgcttaccagcccctaggcttcagtgaatctgtcaaattctcagaggtcttgcaaggtcaagaaatgtctcaggcggttccttccttcatgagatctgctttcaactctggcacgcagaatggcagggttcgaccatttgattatgtgcagagatcagatgcaactcaaggatacgctctccagcagtttaatctgccagcaacagaagtgcattcgccctcttctgttcttatgtttaaccaaaccatggtaccacatgctgagctagatggtgcgaccaaccgtgaagaagtacatggcagcaggtacttgtcatccaatgcaatagggagagaagctgaaccatggccatccatgcagcagcaaagagcgagtgtaaatggaagcgagcctctcgacacaactgaagcctcagctcctgcaaggaacgctgaatctggatcggtcggcaggggcgcggggcgaagcaactgtaagctttttggtttctccctgactgagaagatccttggaacggatggtggtggtgtgaaagaagggaactacgaagtggaccgtcaaactccccgggtgctagacttgtttgggcacggttctacgcctggagctctgcatgctctctgtgctgctcccttgggaatatgatgctgttctgcctagttttacaacagttagatttatgtaatccttcagccattttcatcgcgttgtacttgaccaatatgtccagcgtatgatttccagttttaattgtatgctgatgctacatatcctctcttgagatccatgcatgagaattctggcagaatgaacagaggtaaattgatgtccagctgttttctttatgaacaaataggtaaattgatgtttaatttcagaat

SEQ ID NO: 15919 - DNA, 109 bp, Zea Mays
tcccttgcctacattgttccattgccagaggctgttcaccttggagacctgatgcggttatgagtacgaccgggcgtggacggaattcggtcctccagattttcaagtg

SEQ ID NO: 15920 - DNA, 550 bp, Zea Mays
acaggatgaacctaaaatcagtaaccactacaaatagggggtgaagaaaaggcttggattcaatgtctatgccgagctcaggtagggtcttgcgatggagatgtcactgaataaatttgatgcatgggatttttgttatgagttttcggagtgctcatttgcttgctgcagcctgcagctgcaacatggattcttcacggattttcgttattatgttttggagatgttcatttggttgctgcagccagcaaattagaaatgctattctggtgcacttacctctctactgtatgagacctgagctttgtgattggaacaatgtgaatacaaggcttagcaccatggtaacactacttcgttgtagttggctgtgtaaaaccttttcgttgactgcacaaaataggacagtattgatagtagtcacaactcctttggggcacaagatggtgaactgattagccttgattggagattgctggtagaatcttgtgttttggttacttcaagtcttatatataacttctgctaaaaactctgccgtattgattaa

SEQ ID NO: 15921 - DNA, 781 bp, Zea Mays
tgagaacactttatctccgtatttaaggtaagaaacatgttggatgatatgttagagaaaaatctcgaaatagtcaaagctccgtgcttgaacttagtagaccccatggaaacaggaggaggaataaagttatttaaaaaagcaccacctggtattagcatggattctacggataaatggcacgtgcaactcaagcgaccaagaatcgtgcctggggaagaggtcgatgagaaatcaaagaagttccggcatatgctccggtctgttgttgtcgacggcagtgacatagttgtttctgcaaagaaagcatctgagagatcattggctagattggaagtgagagaagctgcagcaaaggcaaaagccaagagggaggaagaaagggtgcaggaactaaagaaggttaggggagagaaatggcttccttctgttgctagacaaatgaaggaggaaaaggcttgggagctgcgaaggcaatgagctgatgatgcgccagatcaatggggctgcgtaggcttatctccgagtccagttatcctggtgcctgttctgagtggccacaaaagtaatgtggcctatttctgaagtttggcgatggcaataggattagcagaaagagtacatagaatggaagctttgttctaactgagaatgtagcactggatatgccagcgttcatttccatttaacttatgtagtaaaatttgtggctctgatgttccagaatatgatttgacatcaaactcttttggaagtgcattgcgaatcgttgtcttgtttc

SEQ ID NO: 15922 - DNA, 1651 bp, Zea Mays
cggatgttgggtgttgtcttgacgtctggtttggtttctcaatctctgccgcacggcttggattaccagatgttggtctcatctcgtacggggaaatgatcgatcaggggcgtctgatgactgaagcagtttcaatccctgtgatcggtgatgcggataatggttacggaaactgtatgaatgttaagaggacagtgaaaggatttattaatgctggttttgctggaattattcttgaagatcaggtgtcaccaaaggcatgtggacacacacaaggaaggaaggttgtctcaagggaggaagcaattatgcacataaaagctgctgttgatgccaggaatgagagtggctctgatattgttattgtggcaaggacagattctcgtcaagctgtgtctcttaatgaagcattatggagagtacgggcctttgctgatgctggagcagatgttctattcattgatgccctcgcctcaagggaagaaatgaaggcattttgcgctatcgcgcctggagttccaaaaatggccaacatgttagaaggtggtggtaaaactcctatactgagccctgttgaactggaagaaataggttataaaatcatagcctatccattatctctaattggtgtatcgatgcgtgcaatggagtatttcattgcacgactaactgcatctcagtggatcatgcacattgtttgccattagcatttgggcaaaaggaggaatcaacatttgtgtatgcatgccatacgaaacttgtggatgctcttattgctataaggggtggtcgcatacctcctccaagcagcttgccaacatttgaggagatcaagaatactcttggcttcaaccactattacgaagaagacaaacgatatgcggtgacaccagcccaaccattgtacgggactggctatgataattatacaagtgaaccgaacagtccgggagattccaggtccagggctaaaaaaacacaagaacctgttattgacatattgcctcagctctatgatattggttccagtgacagcagaggaccttcaactggaatgtggtctcgaactcttcgactaaagattacaggaagagatgggatccagaaaatcgatgccaggatacctgctgggttcttagaagggatgacaagaattattccaggcttggctggagctaatattatggaaaggcttcggaatgctcctgttgatacagacaacccccagaatggtcaaatactgcttgattttgaggacgccatgggagataggatccaggtgtttattgcatgagctgacggtgtctttgctagaatgctcgtgcacagcaaactctggaagcatggtcgtttcaagtagcatcagggtacatgcatcttgctattggcgcaaccctatctagtagttgaattagataatttggacatcgattatatcttggcgaactagtatttacaaataacagacttgttcctattcatcgaggctgggtgtacatcgttgggattccattaaaacacagctggggactgcgggataagtttttctccgtagcgttgtttctgtgttgaaaaaaaaccctgaagttgaatagaaataaagaagtaaactcttgttgagttatgaaatactgttgaatatatatccaga

SEQ ID NO: 15923 - DNA, 322 bp, Zea Mays
ttgtgcgattttagacgaatggctgtcgacggagaacaatggagtggacgaactgattagacgccatcttggagggggattgacgcttcaaggtccccaagatcgcagtcgtaagctgatgggtagtcctttgctagacgatgataataggcccgctaattcagcagagacggacatttttattcatgctgtggaacgtgtcttgcctaatttgccaaaaagttgcatagacaaaatcaagagactaatgggctgagctagcaagtacgtgatagcgacctgcaatggcacctatggacccgaagggaatctacaatgacca

SEQ ID NO: 15924 - DNA, 399 bp, Zea Mays
atatgatacactcgacccgaaatggacacttgaatgaaacccgattcacaaaaccctagcgacctcgattcctcaccagcatggccgtcggcctctactctctcggcctctctccgccgccgcggcttgataccatcctcttcccacagctgcggcctcacctacgccgccgcgtgcccgctcgggttgctgcagccggcaccagctggtctcccgccgccggtgactccgaagacggggtcggcggctggtggtttcccgagtacgagaaatcgatgaaacaggcgagggggaggattgggtttaagagagctgtcgtggttgggttgggagcttctgcggcgatcgccttggctgggctggcgtggcgcttcccatcttcccagaagccaactaatg

SEQ ID NO: 15925 - DNA, 5086 bp, Zea Mays
ttaaggggctggaagctgttctagacaaggctgttgaacttgaagatgggaagaaagtgtcacgtggaattgacctggacactgtgaacataatacagcgggatgcactattgctctttcgaactctttgcaagatgagcatgaaagaagaaagtgatgaagttgctaccaagacaaggctgctatcacttgaactgctccagggattgctagagggagtcagcaacgcattcacaaaaaatttccacttcattgattcggttaaagcatatctttcatatgctcttctgcgagcatctgtcacttcatctccagttgtttttcagtatgcttgcggtatattttcagttctgttgctccgttttagagagagtctgaagggggaaattggtgtcttctttcctctgatagttttaaggtctttggatagctctgatagctccctcagccagaaggctagtgttcttaggatgttggagaaagtttgcaaagatccccaaatgcttgcagatgtgtttgtgaactatgactgtgatcttgagggaccaaatctttttgaacgcacggttagtgcactctcaagaatagcacaagggtctcaaattgctgatactaactccattgtgtcatcccagacagtttctgtaaaaggctcgtctctccagtgtttggtgagtattctgaagtcattggctgtttgggagcaacttcgaagatattccttaaagcaagggagcattgttgaatctcatgaaggggatgcttcaaggagcgtgacaactgatgagatgaagagccaagaggatgttcggaatcagtttgagagagccaaagctcataagtcgacactggaggctgcaatctcagagtttaatcgtaaaccaactaaagggattgaatatttgttgtcaaataaattgatagaaaataaggcatcatctgtagctcagtttctcaagagcaacccgggcctggataaggttatgattggtgagtacttgggacagcatgaggagttccctcttgctgtgatgcatgcctatgttgactccatgaagttttcaggattgaagtttgatgctgcaattcgtgagttcctgaaaggatttcgccttcccggtgaggcacagaagatagatcgcataatggaaaagtttgctgagcggtactgtgctgataatcctgagcttttcaaaaatgcagatactgcttatgttcttgcttatgctgttataatgttgaatactgatgcacacaatccaatggtgtggcctaagatgtcaaaatcagattttgttcgtatgaacactgcgagtgatgcagaagaatgtgccccaaaggagctcttggaagaaatttatgattccattgtcaaggaagagataaagataaaagatgattctcatgatacttcaaaaaccacaaagagacctgaaacagaagaaacaggccgtcttgtcaatatcctcaatttagcccttccaagactgaagtcagctagcgatacaaaggctgagagtgaaaagatcatcaaacagacacaggcacttttcaggaaccagggacagaagaaaggtgtttttcacgttgcacagcaggtggagcttgttaggccaatgcttgaagctgtaggatggcctttgcttgcaacattttctgtgaccatggaggaaggtgacagtaagcctagggttgtatcatgcatggaagggtttcgtgctggtatccatcttactcgtgttcttgggatggacaccatgcgctatgctttcttgacgtccttagtgaggtttacatttttgcatgctcccaaggagatgcgtagtaaaaatgtcgaggcactgaagactcttcttggtttagctgacactgatatggatgctttacaagatacttggaatgctgttttagaatgtgtatcgagactcgaatatatcacttcaaatccttcaatttctgcaactgtaatgctgggatcaaatcaaatatcaagggattctgtagtccaatcgctgaaagagttggctgggaagcctgctgaacaaatctttgtaaacagtgtaaaactgccaagtgattcaattgttgaattcttcaccgccctttgtggcgtttctgctgaagagctaaaacaaacacctgctcgtgtctttagcttgcagaagcttgtagagataagctattataacatggctcgcatacggctggtgtgggctagaatctggtctgtgttggcccagcattttattgctgctggaagccaccacgaggagaaagttgcaatgtatgccattgattcgctaagacaacttggtatgaagtacttggagcgtgctgaattaaacaacttcacatttcagagcgacatactgaaaccctttgtcattttaatgaggaatagtcacaactcaaaaatccgaggtttaattgttgattgcattgttcagttgatcaagtcaaaagttggcagcataaagtcagggtggcgttgtgtattcatgatatttactgcagcggctgatgacgaggatgaatcaattgttgagagtgcttttgaaaatgtagaacaagttatcttggaacattttgatcaagtcgttggtgattgcttcatggattgtgtcaactgtcttattggttttgcaaataacaagtgcactcctcggattagtttgaaggctattgctctcctgcgtatatgtgaagatcgtttggcagagggattcattccaggcggtgctgttaaacctattgatgttgttccagaggccaattttgatgtgtctgagcattactggtttcctatgctagctggtttgtctgatttgactttggactctagaccagaagtcagacattgtgcactggaagtgttgtttgatttgttgaatgaaagaggacataagttctcttctcccttctgggagagtatttttcatcgtgtactatttccaatttttgatcatgtaaggcatgctgggagggatggactttcttcttctggggatgattggcttcgtgatactagcattcattcactgcagttaatctgcaaccttttcaatacattctataaggaggtatcctttatgcttccacctcttctcagtttgctgcttgaatgtgcgaaaaaaacagaccaaactgtcgtttcaattgctcttggcgctttagttcatctgattgaagttggtggtcaccagttcagtgatggtgattgggatacattattaaagagtattagggatgcatcatacacaacacagcctcttgaattgctcaattcattaagatttcagaaatcaaaacaccagcagttactttcaagagaagaaagcaatgcacaaggcaatagttaccttgacagccagggggaaccctccatcagtgacagtaataatggtgagcataatcatccagaggcaggtctgcaaactatcctggagaattcagaagggagaacacaacctgccgttttcccacgtggccaaagctttggacaaagaattatgggcaatatgatggataatattttggtcagaagtcttacgtccaaatcaaaaggtcgaacagatgatattgctccaccctcacctgtgaaggcccctgatgatgaggctgacaaggctgaagaggaagaaagccctatgatggaaactgtcaggagcaaatgtattacacagttactgctgcttggggcaattgagagcatacagaagaagtattggagcaggctaaaagctacacagcagatagcaataatggatatcttgctctcactcctagaatttgcttcttcatataactcaccttcaaatcttcggacgaggatgcaccatatacctccagaaagacctccactgaatcttctccggcaagaactagctggaacaacgatttatttagatatcctccataaatcaacagtggagcaggatgaaaaggactccattgaggaaacaaatggtttaaatgtggaatctgatgaccaggaaaagatcaagtacctagcagaagggaagctggtttctttttgcggacaggttttgaaagaggcgtctgatttacagcctagcactggggaggctgccagtgcagacatacatcgtgtattagacttacgggcacctgttattgtcaaggttttgaaaggaatgtgcatcatggatgctcagatcttcaaaaggcacctgaaagagttctatccattaattaccaaacttatctgttgtgatcagatggatgttcgtggagcccttggtgatctctttagcaaacagcttactccactcatgtcctgaagtatggcagtatttcctccgttgcatatatcttgttggaatatattcgtcatcagcatttttgtgcaaacatggagcaccgtgttttccctagcgacttggatgacacaagggatgatgcttccattatacagtagagtagtgttggtgacatgtacgcattgttcaggacattgtacttgaggcctgttgttattttatggcaatagtagattatttgcggcaagcctcgtttttgtgcgtctaataaagtgaggtcctgatgtatagccttgtctgacttgcagaattgcgttggcaaattccctttgtcctccaagttgctgtaatgttgacatgacggtgcatttatctgctggtactagtgtcttgtccgtattgggttcatgcattgtttgatattccgtagttgaaagcaatgcatatatcattattttctgtattttccattaaagcaggtgcatttatcgggtttccatattttcagtcacctgtggagaatccgataagtcaagcgaatccaaccattcatttgctgccacagcaggcgcattgcaaattgtttatttggtttcgtattttcaatcatctattgagaatccgagacggtcaaggtgaatgcagcatattgtgtattgaatattgatacttcatcttgtgtactagaattgatcgctgtagaacgaatcggcaagaccgataaatccacaatgaccaacaccaacccaagtgaacaggttgcgagactcgggtcactataatatggccagaatgtttgattgtac

SEQ ID NO: 15926 - DNA, 1332 bp, Zea Mays
tgtggttcctaagagaagagattccggttttgcggaatggtggagaaaggcttcagctaggattcctaaaagcaaaagaaaggggtttaatagtgtggtcatcctcggggcttggagtctttggaaacagagaaatagatgtgtttttgacggagctcggccctgcctttctaccttagaggatggattcaaagatgagatgtggctgtggttttctgcaggagccaagaacatgtgctccctttttgaccctggttagagaaaggaaagtcttgtagcctcttggtaggctggggtggtggtgtgtcgtgtggctggtatgtgtttgtgtgtgtgtgtttggtgtgtgtgtgtttttgtgtgagtctggtgcgtatttttgtgtgttgtgttctatttgtttcaggcctcaggcctttttccctctcctttaatataatgatacgcaaccctcctgcgtattcgagaaaaaaagagtctatgtagttagttgttccttcttgtttgtattcatgctttgtagctttgttgtcatgattattgttttattataaaaagttcaaatacaaattgtaatattacacttcttttgtttcaggagattagtattggtgagggctgacatatctagactcccttttgtgagtggttcaattgacgctctgcatgcaggtgctgcaattcattgttggccatccccagcttgtgctgttgcagatatcagtagagtccttcgcccagggggaatttttgttgcttcgacattcgtggcagatgttattccaccagctattccagtattgaagatcgtacgcccgtacattagccaaataactggcaacaataccttcttatctgaagtggagcttgaagatctttgcaaagcatgtgggctggttgatttcaaatttgtcagaagtggattctatataatgttttctgccactaaagcatgctaactaagtagcagcaatcgtccagtcgtttatgtcaagactcctcggttttatactgcaaatggtttccttctgtgcattgtgcggttgtgccatttgctctaaaggttgccaactttcctcaagggggtgtggtgtaaatagtgaacacatatattttacttctacttgaccgacctcattatagcatgaaaatatcatattttttgtgtacagcttcatagatctttgcaattatgtaatttaaggcttgtttggaacagctctaccaacctaaaaactgaatctggatatagaatttagttagatccatggtgaagcagctccaatagttaatggagctgatgatggtgtttgttacagctccatctgacca

SEQ ID NO: 15927 - DNA, 765 bp, Zea Mays
gagtccagaaaaccagagcgatattcctctgcagcgccactatcgcctgatgcaaggcaacgtatcgtatcagagcgagttgacatgatacacaatgttgtcatctcggtctcgattgggccaccgaattcacgttttttgccttcaaaagacaagagctcgtgggatccaaaagatgttgctgattgcattttatctgatagatctaccatgaaggtgacaactggccagcgcatgacagagagttctgtccttgacgcacacgttgcagaggttgatggagaaccatactggtattatgagtatcttgttcggaaatcaccaacaaaatctgcaccagaaccaaatttgtttcggcacaatgtagcctgcactgctgagcgtgatgggtacctgtactcactgaatgcttccactcttagcaaacagtgggaatctatggggccctttctacaaaagaccgtggcatcctttcgccttctccccggtacagaaaactatgttcctccctacaaggatccttggagattttggtgaatggagattcttcttgtagtcatcatttttatcccttcagatgactttatagcttcaggttttagaccatatttttcacgtcagatgtttagtgagtgtctgtcctttcagcttgacagataaaattcagagacccagtttggtatcagtttcgcccatcgtgttcgttctgattaataacagtcccagactaaaggtgtgtttgaatgcactagaatttttttctcg

SEQ ID NO: 15928 - DNA, 427 bp, Zea Mays
atcagccgagtggttgtgccgtggaagctttcgtttaccgttcccatcccccgtcgtctctcctctccttcccactctcccacccgtcctccattgctcccttcctctctctcgcggagtcgctgcgatctagccaccgagcacgagcgtcctactcgccgcggaccttgctcatggccgcggggtcgatccgggtcaccatggaggtgggcgccgacggcgtcgcgctcatcaccatcgccaacccgcccgtcaacgcgctccaccccatcatcatcgcggggctcaaggacaagtacgcggaggccttgcgccgtgacgacgttaaggcaatcgtgctcactggggatgtatcacttatgccggacgtatccgtcgagcttgtgtcaaacatgatggaagagggaaaaaaaccttctgttgcagc

SEQ ID NO: 15929 - DNA, 1864 bp, Zea Mays
atttgggcctttttcgagtagcctgttctcagttgctacttgctacaccggaggaagaagaacaagtagtgcttttcttctcttgtcacgttcacggggcggccgatcgaccgttcacctcgcccgacggcccaagcagcccatgtcttcgtcgggcccctccccggcgacgggaatccacgcgtcgccgccgttgggccttttgccggcgacgggaacccatcacaccaggtcatggggcaaaacaacctccacaagttttactggttctaccaccaaacatgagcagagcttgcatggaaatgttaagccgttgcaattggcggcaaatgaatcctctcgtttggcttacagaagtccagcacttaaaaaccagtggaatcttcctgctagttcttcctccactaatgtggttaccacctttgatgataacgaacacgtgtcttccagtgttattgaagaaaaagttggagtactgttattaaaccttggtggtccagagacacttgacgatgttcaaccatttttattcaacctatttgctgatccagatatcattcgactccctaggctcttcaggtttcttcaaagaccactggccaaacttatttctacttttagagctcctaagagtaaagaagggtatgcttcaattggtggtgggtcgccgttaaggaaaattactgatgaacaggcgaatgctttgaagattgccctggaaaagaaaaaattgaacgcaaacatatatgttgggatgcggtattggtaccctttcacagaagaggccattgatcaaattaaaaaggataagattaccaagctcgttgttcttcccctttaccctcagtactccatatcaacaagtgggtcaagcattcgtgttctccaagacattgtcaaggaagattcatatttttctggtttgccaatttccattattgaatcatggtaccaacgagatggctatgtgaaatcaatgtctgacctaattgaaaaggagctctccgccttctccaatcctgaagaggttatgatattcttcagtgcacatggtgtgccacttacctatgttgaggatgctggagatccttacagagatcagatggaggattgtattgctttgatcatgggggagttaagatcaagaggaatcttaaatagtcacactttggcgtaccagagtcgggtggggccagttcaatggctgaagccatatactgatgaagttttagtagaacttggtcaaaagggtgtgaagagcctcctggctgttccagtaagctttgtgagtgagcacatcgagacattggaagaaattgacatggagtacaaggagttggctctggaatcaggcatcaagaactggggtcgggttcctgctcttggatgcacttcaacattcatctccgaccttgcagatgctgtcgtcgaagccctgccctctgcttcagcgctcgcgaccagaaagcctgacgacatcgattccagcatggacctgacgcattacctcaccaagatgctgtttggctcaatcttggcatttgtcctgctgctatcaccaaggctagtttccgccttccggagcaccatgctttaagtttttctccaaagcactaaatttgagattgagaatgagatatttcattttggacctttttttcctccttaatagaatgatgtgcagttcttctgctcgttccagagaaaaaaataactgctaggaactcacaaggtagtaggggattgcaaaagggatgtgaacagctgttttgatcgaagttgtctataaataccgtgctcacggactctgtattttaatggtttcttgtgctcgactaattttgttgttcttgtccaaggtttt

SEQ ID NO: 15930 - DNA, 2255 bp, Zea Mays
attttttaactagtctaaatacttgacagaagaaattcccgttttcgcttgactattcttcttcgtccctgatttttatccccaaactcaccgccggggcacaacaatccagttctcctttcgccggaatctgtccctcctccccctcctccccgcctctgcgggtactggaccaccgtggagcgggcattcatccaggctaggtccattccttcctttgctcgttctcttctccatcgcggaagctccacccgagttgacgccagaagagaatcggtgccctagggtgttctcgcagaattattttccagaagatttgcagatcgagtcgaaccctatgccccacgttaagcctgccgccggcctgcccccttaccaccaccgggcgctccctggccccgggcagggtccagttcccacgggacatgggatgatgcaccgggaggtccgtgatcagtacgggccgctggggccgaggatgcacctaccaccgctggggcacgggcccgctccgttcccctacgacatgctgcctccgctgcccccaccggaggtcctggagcagaagcttgtggcacagcacggggagatgcagaagctggttatagagaacggccggcttgctgcaagccacgcctcgctgaggaaagagctagccgcggcgcagcaggagctgcagaggctgcaggcgcagggggaggccgcgaaagccgctgaggaggaggagatgaggggcctccttgacaaggttgggaagatggaggccgacctgaaggcccgtgagtccgtgaaggtggagctgcagcaggctcatgctgaggcgcagagccttgtggccatgaggcagaacatggtggcagacgtgcagaagctgagcaaggacctgcagaggaacctcggtgaggcacagcagctccccgcgctcttggctgaacgggatgttgcaaggcaagaaaatcagcatctcaggagtacttatgattacgaaaggaaactcagggtggatcactctgaatctttgcagacgatgaagaggaattatgactccatggttacggagcttgaaaaacttcgtgctgagttgagggacacatctaatcttgacaaaagtggttttttctacaatagcaccacccaaaaggccgatggtatatctagccatctttctgttggacaaattgcttatgatactggctatggaagtacacaggcaagggcaactcctaccggtctggcagacttaagtggagtccctggaggcgctggccttcgttctggattcgacccatcaagaggcaatgcatacgatggctctcatgttgccaatttcagctcttcaaaaactgggacccatgatgcatcaaggggtgccactggctttgactctctcaagggttctgggtatgatgcttcaaaggcgcatgtaactggacaggcgtcagctacagcggctcatgggggcattgctggttactacgggtccaatcaggcagcacatgcgtggggacaatctgcatcgccctacggatctgtacaggtgccaccatcctacgcatctgggtcaaacacatcctatggcgcagcagcagcagcagcagtgcgtccctatggttcagctcaggcgcaaccatcatatggacaaacgcaggcaccatctgcgtatgggcacacacagctaccatcatcctacagtctagcacaggcgcagtctcccttcaccgctgcgcaggggtcctcgccctatgggttggctgcgcagcctccagcctatggatctgggcgagcaggctccaatgctggcagttacgaagctcctcaaggacgtaaataagttcgcgccaaatttgcatacttggccacttgcgaaagagagctttgttacaccgagtccaaatcctttctgttgctacttaaaccttgtttaactgtgatgtcagaggaacctgttacagccgataaaacgattctctgtaaacgtattatcgtgaccgatgatgccgatgcatttttttgttcagtagagtaggccatttgggaacgcagatttgagttgtgcgatattggttctatatctggcttcactggttggttcattcataacgttaaattatgtttgtttaagttcaaccgtaatcagataccacactaaaaattgctaacagcgtattcgatctttttattgctgatacatctttttattgtcgatactcgagtgtaaatcattatcatttaagttaccaaacagtatccaagtt

SEQ ID NO: 15931 - DNA, 1409 bp, Zea Mays
acaatccacagatacggtcataccgactgctgttgccccccgatttcccgtccgcccgcagtttctgaaggcacaccaaaacgatcagacctgtagacagtactccagtccacgaaatcctcgtacttgtcgaggtggtgtaggtgtttggcggagcagtcggggcgttggaatctgaggaggagaagatggtggtgctggtggtggccacgacgtcagacccggcgtccattgggcccgccgccgccttcctcgccatgcccggatggtcccccggcccgcccatcgccgaggcgatggagagttttactaatgggaatgttcgattactgaagcatgagcgtagcattgtcgcagaggatgatcttgaccagcgatggcaggaagccactggagagtctgtttctgaggtcatattcctcagcaaacacactgcagtctccaaacgtccagcactcacagtgcatccaattggtgtgccacatctgaaggaggatgaaaccccaccccaaggaggaactcctggatgggcagcaattccaagtcctcgaattggaccttggctccggttgatgcaaaagatagctgtagaacaaggccttgttccagagtttgaggttacgcttgaggctactcaccatggaccagttaccagcacacccaccatgtttgttgagataggaagtacagaagaccactggggtcgacaagatgctgcacaggcaattgctctagttctatggaaaggtcttggtctggaggatggaaatgctgttggaacttggcagaggaattgtgaaaaggttctattaggtataggaggtggtcactatgttcctcgtcacatggatattgtcatcaaagatggtgtatgggtcggtcatttactctctggttactccttgccaatggacatgtcgtcgcaagtaaatgtaaagagttctgaagaggttgctggaatgtggaagcactccatcaaagtttcttatgaagcaacaaaggcagcatttcctggtggtgaagttatcgcgcatcttgatcacaagagcttcaagggctggcagaagaatgctgttacatgcttcttgcaggagcagaacatcaggataggaaagcctagcgatttcctgtgacgtgctacgacagtgctggacaggacaggtggagaggctgtgaatgcttgagctgatttccctatgcgcacgctgaataaatatgagacataggggctgtttggttcgtggctaaatgtgtcatactttgcctaaggttagtcgttcgaattgaataactaaccttagttagaaaagttagtcaaaatgtggtaaattaggctcaaaccaaacagccctatagtaagactcgatccttaatgcggttcaagagcttgaatttgccgttagcccgca

SEQ ID NO: 15932 - DNA, 1061 bp, Zea Mays
gggtttgttattttcactcaaaccccagcatctcctcccagccggcagcacctaacccgtcacgagcgcaccgccgcacgttccggattccccaccgccgccgggatcccgaccggatccctaattccaaggggtaaacgatgaggccgcacgcggtggggacgggcggcggtggcgtggggaggcggaaggcgggggccgccgctgctgccgcaagccgggagtggatggtggtgccggcgtcgggtccggctcgggtggaggaagccgggaagcacgcggtgatggcgcgtacagggcttcccgcgcgcgatctcagggtactcgacccgttactctcgtacccgtccacgatcctgggccgcgagcgcgccatcgtcgtcaacctggagcgcgtcaaagccctgatcacagccacagaggtgctgcttccaaacaccaaggatcccgcctttgcgcgcttcgtccgcgacctccagacccgtgtcctcgcatcttcgtctgaccaggcagctgagttcactgacatggaaggtgaatcatctaatgttgcttcaccatttcccctaccaagtgcatccaaaggacatgaaatggagatgactaagaagactactgctgttgtgcctgagatgactagtagcagcagtatgcccaatttagctattgcaaaagatggaaacaccaacgttttgcctttcgaatttcgagctcttgaagtgtgccttgagtcagcctgcagatctttggaagatgaaacttctactctggagcaagaggcatatccagcattagatgagctgacatcaaagatcagcacattaaaccttgaacgagttaggcaaatcaagagtcgtctggttgcgatatctggtcgagtacagaaggtgagggatgagctagagcatttactggatgatgaaatggatatggctgaaatgtacttgacagagaagcttactcaacaagaaattagtgaggcttcatctagagctgaggttgatgatccatctcaaacagaagaggatagcctcccatggttggcgagcccaccccatcat

SEQ ID NO: 15933 - DNA, 1114 bp, Zea Mays
tttatgtgatagcttgaatgaggaattttgtggtccggtgttctctgacaaccttggttatgaggagactagagaaaacagcaaggtatttcaagaatttgggtaccctggggttctggtcccagttggtgtgcacaattgtctctgctggaattttggcattctctacagttgtaacggggaaggtgacagcaccctttacattctatgcgactgctgctggtattgctgctgcttttatctcatccttctggtcatttggttacatccgtctctctgaaaggcttagaagaacatcaaaggaacctgctaaggctcctccacgcgccgatgttgttaatagcctgaaaaatggcattgtgctgaatattctcgggatgggcgccgctgttctgggcatgcaagccaccgttggtgctttggtagcaaaagctctcacaacctctgcagttccctattatcaggctgctgctccaggccaaagccctgtgttggccttagatgttttcctagttcaggcttcagcgaacaccatcctgtcgcatttcctcgggctggcgagctccctggagctgctgcgctcggtgtcgctgcctccagcagaagctgccgcccctgccggggcctgagccatggcccgtgggcggcagggtcaaggaagaaccttcgttccctcggcggcggcggctctggtagacgtagacgctctcgctgttgctgctccggattgtgtgtacagctcgcatcaagcttggtacatactacacacacatcgatgccttgcccttcggttcagctggaaccaacgtgtctgtctgcctagttcccgccgggcgtgaggcgagctcttgcatgagcacttgcgagttgcgaatcacatgatgtgtgtggcgcatgtttgctgtacaagtgagcgactgggttccctcctagtcattgtacccgcttcgctggtcgggtataaaaaacggacagtataaatatccattttttatacggattcgggcccctttaagtctagtttgggaacaccatttttctaacggagtgtttggatcccttcattttagaagaattggaatttactaaataaagtaacttatttagtttggaa

SEQ ID NO: 15934 - DNA, 1139 bp, Zea Mays
ggagcttgtcatggtacttgaaattcgacgtggaatcgtatgtgggtttagcatgacttggatggagctggatattggtgccttggctaaagtcgtaggagataatgcgacttcagaattttttttaaatgcttcgaaagcacgtcatattgcaattgactctattttgtggaactctgagatggaacagtggcttgactattggcttcctggtgatgcagactgtcaggaagtacacgaatggaagcctaactcacagaaccgcaacatatttgcttccaacttcgttccgctgtggctaaatgcataccattccgaattcgtacgctttgctgatgaggcaaaatcaaacagagtcatggcgagcctcaaggcatctggattacttcatgccgcagggatagcaacttccctgacaaacacgagccaacaatgggatttcccgaatggatgggccccactgcagcatcttatagctgaggggctgctgcattctggatcagaggccaaaaaactagctgaggacattgctacgaggtgggtgagaacgaactacgccgcttacaaagcaacgggtgcgatgcatgagaagtacgatgttgaggcttgtggagaatctggaggcggtggagaatacaagccccagactggttttggctggtccaatggcgtggtgttgtcattcttggaagaattcgggtggccagagggcaaggaaatagcttgttgagcggcgaagcgctcacgacagggtggatctggtcttgccggagagcaatctggttaggcatcgttcatgtcacacatgtctagctacgagagtggcgcattgccttctgcagttcgtcaagtgcgtttgtgtgttcttgtttgcttttagttgcgactaggctgtagatccttcttgtatcacaacaatatatgtactgctactgtaccggccccggcctcttgtttaatctgaaatgctcattgtatatcctcttacgaaacgcaaacacgtgctttggcacgttcgtcgtcgaaaagagaagagaatataccattttgctctcttgaatacaaaatcagtgcatcgttctagatctcgcccacagggcgtggactggcagactgttggccccttttctgttcaaata

SEQ ID NO: 15935 - DNA, 2452 bp, Zea Mays
ctttgtgctctccgatatattagtccagccccaagccctagaagagctaaaacccttgcggcggctaccttttccccagctccctctcgtctcgcggccgccgcaggcgaaaccccctcatcgcttcgcgctgtccaccgacgaatcttccccagagcgtgtgtatctgttgtttcagctgagttaatcggggactggtcgtgtgcggagatgttggtgctcttcgagacccccgcggggttcgccctattcaaggtgctcgacgaggggaagctcgacaaggtcgaggatctatggaaggagttcacgacgtcggactcagcgagaaaggtggtcgagctgaaggctttcaacaagtttgagaacacatctgatgccctatccgcggcaaccctgattattgatagcaagcctagcaagggtctgcgcaagttcttgcagaaacattaaaattgactgccttcacaatagtgctgtgatggagctgatgagaggactgagaaatcagcttaccgagcttataactgggttgggtgcacaagaccttggtccaatgagcttgggattgtcccacagcttgtctaggtataagctgaagttcagccctgagaaggttgatacaatgatcattcaagccattggattattggatgatcttgacaaggagcttaacacttatgccatgagagttcgtgaatggtatggctggcactttccagagctcaccaaaatagttacagataatatacagtatgccaaagttgtgaagatgatgggcaacagagttaatgcagtcaaccttgacttctctgagatattgtcagatgaagagctagaaacacagctaaaggaggcagcagtaatatccatgggaacagaagttagtgaccttgacttatcgaatatcagagagctatgtgatcaagtgctggccctttctgagtacagagcccagctgtatgactatttaagaagcaggatgaacactattgcaccaaatttgacagcactggtgggtgaattagttggtgctcgccttattgcacatggtggaagtttgttaaatttggccaagcagcctggtagcacaattcagatacttggtgcagagaaggctttattcagagctctaaagacaaagcattctacacctaagtatggcctcatctaccatgcatccttaattggcaaggcttctcaaaagcacaagggaaaaatctctcgttctcttgctgcaaaaacagctcttgctatccggtatgatgcccttggtgatggtgaggacaactccattggcactgagagtcgacttaagcttgagacacggcttcaagttcttgagggtagagaacttgggaaatctgctggttccacaaaggggaagcccaagatagaagtgtatgaaaaggaccggaagaagggtactggggctttaacaactcctgctaagacatataaccctgcagctgatctggtactcacggaagaaacaccaaagaagtcagaattggcttcaaagaagaggaaacataatgaggtggaaactgaaccattagcagagcctgcagaggaagcaatccaggaggatggtgaccaggaggatcggaagaagaagaagaaaaagaacaaggaaagcaaggaggctcctgctggtgaaggtgatggtgagaagaaaaagaaaaagaagtctaaggaggtcgaggaagagcctgttgtggctgctgcttcagaagttaagaagaagaaaaagaagtctgacgctgatggtgaggatgtcgcaatgcaaaccgaagaatcaggtaagaaagagaagaaaaagaagaaaaaggcgtgctgatgatgagtgagacattcacactggaagagaatttgcgggtaccaaactaccaaaggctgggactcagctgttctgtaaaatggatttgcgggtagaaacgatatcgacatcagtttttttggacccggcttgtattcaagtacttgctcgatcctggtgatgatggaatttaagttttgctgttgcaacctgatatattagtacgatgattgtcatggtaacgcggcagctgagagatcttccatgctcaatgttgacccgaacgtgctctggtaattggtagttttaatgctggaggtcatggttaaaattggcagagaaacaagtagtggctgatattttagcaaaaaatagacacgttttgattcttagtttttgttctcttgtgagtcttgagcacattcctgaaattgtactattcaggtggctctcaaaagctttcaatggagtgttttttagcctatctaaataatttgcatttaaggtttaaatgaaagttacccttaaaaacttgcaagttttctatgtacatgtaacggataaaagtggatatccgaactgtttgaataaatttaatattttaatattaatatagatgtgtatgaaatttgatga

SEQ ID NO: 15936 - DNA, 1671 bp, Zea Mays
cagaagacagccaccaagtgaaggaacaccgaaagatacacggtcgatcaagctcgactactcgatccatcacacaaacccttgttacacacggcagcagccaacccggcccggtccagaaccagcaggcggcagcagggagaagagagggagatcgagtccgtttgctgacgacatatcatgccgtggttcccagccgtgccgccggcgctggcggccgccgacgaggcgcggatcgtcaagaagcgcgcggggctgccgaggctgctgcacaagctcttcatcaaggtgctccgcctgaggccggcgttggcggcggaggagtactacggcgcctaccggatgggcatgggcgtgggcgccgcggacgaggactgctgctactactacagctacggcggcgcggggtcgtcgtcgtgggccggcgtgctctcctccatcccggaggaggactacgacgacagctccgacgagggcacgcccgacgtcgccatgcccggccccgccgtgctccgcaaggccaagtccgagcggttcgtcgtcggcccacccgacggcgccgccgtcctgcacgtcgaggtcctcctctagcgccagagcacacgcacgcaaaaggcgccgctccttgtccttggccgccgtacgtcgctcatctcatctcccgatggatcggatacagtgctactactggactttggagggagcaaacgtacgtgcgcttgcggccggcttgccatcggcgagctagagtatctcaaacagtgtgccttataaattttaaagtgttttagggctcaaaatagtttttttagctctaacagtggcgccagcgaatagttttggcgccctctcccctgacgttatcttttccccgccttgtttctagcaccagttgccttcattctctccaccgaatgcagctgctcccagggttctgcctgtgcagctcctgctcccacggcaattggctgcacgccattattgcttggcctctacaagactacaacactacagaaagatatgatggccgggatgccgaaaagttgcaaacacaatgttgatatatgctcttgtgatgagtgattatcaacaagggtaatatcttggatcgagttgtgtgggctaaccggaacatgagtgtgtccgtgcaacatgtttcttagcttgtgaagcgcaggtgtggagtccggagacgatggttgatggcaaaagtgaagatcatgcgagttcatatcaatagaccaagagcagcgaaagatgaatgttgggtcacaagggactagagaagccgcccatagtggctaatacccggggacactgagaggcgcaaggatacggaggcggatcgcgttgccagtgcagttacagactgacgagatgcgcgtgtcaaggatgtgggggacacgtatggcgtacgctaccgcgaggtgtttcatcggtcgagcttcaaaaccaccctgcgaaaatgtgctggtttcatcgtgtttgcacctcaaaacctgataacatggttctagagggaatcagagaagcaaagtggcgtcaacgcggagggtgcatcaaggcgaaacaattttgtgaaaagtgcatgtaacacccaaaaaccaattttgggaatatagggaaaaagtctccaaaataattaaattaaatcatcttttaaaaaaacaa

SEQ ID NO: 15937 - DNA, 3815 bp, Zea Mays
atcctgccttgagtgttcgtgcaacgctgcccctgccgcgtcgtcttctggaccgcttctccactccgcccagctcgcagtcgcagctcgctcaaagcagcacagcagcaagcagaaggaagaaaaagagcagcgagagccgagaagagaagcgcgccgccgctcgagctcatcccgccgccggacacaccgcatggccatgaggcacagggcgcggtcctcccccacctccccgctcaccccgtcctccagcgcaagaacaaacaagatacttggtttctctgtatctctcatcctcatcaatctggcttcaattatggagcgtgctgatgagaatctccttccagcagtttacaaggaagtcagtgcagccttcaatgctggtcctgcagatctgggatacctcacctttgtaatgaactttctgaagtcaatagcatctcccttggcaggttgcatctatcaagcaaagatgttcttcctccgccttctatctggagggattcttgggtggcaacaagatctgtcatgaaagtgaagacgtttcagatcattgtcctgcaagggatcattggctcgttgccgtggactgctatagttttcttcacaatgtggttcgaactcattggttttgacaacaacagctcagcagcactgaacagcctcttcgccatcgggtgtgccagcggagcatttattggcggggtgatagcagatcacctgtcaaagtacttcccagattcggcacgggtcatgtgtgcccagtttagtgccttcatgggcatcccgttttcttggatcctcctcacagtcatcccccagtcagttgactactggtatgccttcgccgtcacgcttttcttcatgggcatcacgataagctggtgcgccacctcggcaaacaaccccatgttcgccgaggtggtccctcccaagcaccgcaccatgatctacgccttcgaccgcgcgttcgagggctcattcgcctcgttggctgcccctgccgtgggcctaatcaccgagaagatctatggctatgataccaagaccgtgaaccttgcgaacgggtcagcggaaggggcgtacgcgctctcaagggggctgctgaccatgatgatcgtgcctttcggtgtgtgtgtcctgttctacagccccctgtaccttgtgttcaagcacgacagagagaacgctaaatttgccagcttcaaggagcaggagctagtatgatcaatgatcatacgaatgtgcttccttggtccgcattcataacctctcgtcatcccgggctggagctttgcgtgatgattatgaagataactgccttgatcggcattcagaacatctggtcataccgtcctgggtcattctgagtttcttgttgagattatggcaattgtgccacggagaggaaaaaatttctgtgttttttttgggaaaaacacaggaaattttgcttctgttgattatgaaagcagtgctagcagtttgatttcatctattaaaactatgtgcggaagcaaattccgcaaagaagcaaaggaagaaaatggaaaatgctagctgcctcacgtgggacctcctgtcagagacagacccctttgcacgctttggagccgcagcaaagctcgaactcgatccgggtctccgggccattcgatctccgatcggacggcccagacagctcacttcctctccacctttgcacgctatagctcctctccgagtcgtcgtctccgtcgctgcctgctctgcttgctgcgccactccaaacccaacccaaaacccccacacgagatctgcgcagcaatggcgacgcggtgccacgtcctgctcctcctcgccgccgccttcgcgtccctcctcgcgctcgtggccgcggaagggggcgaagaggggccccgcgggcgccggctgctcgtcctcctggacgacctggccgtgcggtcgtcgcactcggccttcttcggctcgctccaggcgcgtgggttcgatctcgacttccgcctcgctgacgatccaaagctctcgctccaccgctacggccagtacctctacgacggcctcgtgctcttcgccccctccacaccacgttttggtggatcagtggaccagaacgcagtcctcgaatttattgatgctgggcatgacatgatcctggcggcagattcctctgcctctgatctcattcgtggcattgcaacagagtgtggggttgattttgatgaggatccagaggcaatggttattgaccatatgaactatgccgtcacagatgttgaaggtgatcacaccttgattgctggtgacgatcttatccattcggatgtgatactagggtctgaaaagattgaggctcctgtattgtttcgaggaattggacacatggctaatccatcaaacagtttggttctgaaggttctatcagcctctccatcagcatattcagctaatccaaagactaagttagcgtctcctccatcgctcactgggtcagctatatcattggtttcggttatgcaggcaagaaataatgctcgggtgctgttatctggatcactcgatctgtttagcaaccggttcctgaagtctggtgttcaaaaggctgatagcaaaacaagatatgagagagctggaaacgagcaatttgtggcagagataagcaaatgggttttccatgagaggggacatctaaaggctgttaatgttaggcatcacaaggttggggagaccaatgaaccaggcatgtaccgcattaatgatgacctggaatactctgttgagatctatgaatggtccggaacaagctggaagccgtatgttgctgatgatgtgcagcttcaatttttcatgatgagcccttacgttctgaaaactatgtcgactgacaacaagggtttgtattcaacaaccttcaaagttccagatgtttatggagttttccagttcaaagttgagtaccaaagactgggatatactggtctgtcttttacaaagcagattccagtacgtccttacagacataatgagtatgagagattcataacatcagcgtacccatactacaccgcctcattttcaacaatgggtgctttcttcgtattctcgtttgtgtacctgtaccacaaataaaggactcatgggagcgcacaagtctctggaggctgacgtgaccaagatctgtgggcactgaatgttgtgctataagccaagagttacccggcgccaattttatggaaccatgtttttgtactgccaacttagataacatttgacgaccgtgaccgcactcatgggaaatttactcgtgctaggatgttcgatctgcccccacttcttttttttctttcttggaccctttctgatcagcacttgtcagaacgtttacagtctatagcactgaaacgtgattttggaagtactacacccccagtaattttgcactcgtgcccagttctgatttctgatcctgggtgtggacttcaaagtctgcctattatacttccgcaattgttcgtgtttataacctggacgcacgtattttttttcacgggcttattgaacatgatgctcgaagagtgcactaaacatgccatgcacgtattttttttcacgggcttgttgaacatgaatgctcgaagagtgcactaaacatgccgcttcatgtacagaattcgaaatttgtaatgttatatgagcattttctcgggcagtggatgcattttaggtgccgtttggttcacatttgtcatgtacatttgtcatgtaatgggtaattgataacgttaaaccatgtttatttaagtttaactgtaatt

SEQ ID NO: 15938 - DNA, 136 bp, Zea Mays
ttacattgaccttttgaacagctccatatttcaatttatagtaaatcaacgcagaagcatcagaaattatgataatataaatgagaacaagtgcaggctgccgcaatgaaacatgtaaggatgtatcctctaccga

SEQ ID NO: 15939 - DNA, 4126 bp, Zea Mays
ctgatggaaccatatgtatccatgattttgtggattggatgatataatgatgaaacccataaataataatgataaaattacaaatgactcatttattaatataacagctgatcggacgataattactgcaggcaggaaccactggagacgagggactgacgactctcgccggcgccgcgacatcgacttgtgtcgtcaccctcccaccccaatttccccgcagcttccttccagtgtcgctgccgcagtcatcactctgcagtcagtctgcacccctccctccctccctccttccctccctgcctgttggccgcggctcgcgggaaccaacaccccatcgccacgccgatcccccaccgaccagccaagccgctacaagtcagccgtgccccgcacgcgtgcacctgattggtgcttggccggccggctgacccacccggggcggaaggaggaaggaaggaccggagaagctgcttccttgccgtcgcccagggggacagggtaagcaaaggagcgggatggagagctacctggaggagcggttcggcggtgtgcaggccaagaactcctccgaggaggcgctccgccgctggcgccgcctctgcagcgtcgtcaagaaccccaagcgccgcttccgcttcacggccaacctcgagaagcgcggcgaggccgaggccatcaagcacgccaaccacgagaagctgcgtgtcgctgtgctcgtctcaaaggctgcactgcagtttctacatggcctcacccttcgaagcgagtacgtcgtccctgaggaagtcaaggctgcagggtttcagatctgtgccgacgagctggggtctattgttgagggtcatgatagtaagaagctcatcacccaaggtggagttgatggaattgcggaaaaacttgcaacttcgaagacggatgggctaagcacagccgatgatagtattaagcgcaggcaagacatatatggagtaaacaggttcacagaaagtgaggtccgtagtttctgggtgtttgtatgggaagcgcttcaagatacaactcttataattcttgctgtctgtgcgttcgtatcgctggttgttggcattgtggtggaagggtggccaaaaggtgctcatgatggtcttggaattgttgcaagtatcctcttggttgtgtttgtcactgcaacaagtgactaccggcagtcactgcagttcaaggacctggacaaggagaaaaagaaaatccatgtacaggttacaaggaatggttttaggcaaaggctatcgatatatgatcttcttcctggtgatgttgtccatttagcaattggggatcaggtccctgcagatgggctcttcatttatggattctctctgttgatcaatgagtccagcctaactggtgaaagtgaacctgttgctgtaaatgaagataaccctttccttttgtctgggaccaaagtacaagatggctcctgcaagatgctggtaacaactgttggcatgcgcacccaatggggaaaactgatggccactctcagtgaaggcggcgatgatgaaaccccactgcaagtcaaacttaatggagttgcaactattattggccagattggattattttttgctgttataactttcattgtcctgtcgcaagggctattcagcaagaaataccatgagcagatgcttttaagctggtcaggagatgatgcattggagctgctggagcattttgctattgcagttactattgttgttgttgctgttcccgagggattgccgttagcagtcacgctgagtcttgcatttgccatgaagaaaatgatgaatgacaaggcacttgttcgccacttagctgcatgtgagactatgggttcggctactaccatctgcagtgacaagacaggaacactgacaactaatcatatggccgttgttaaggcctgcatctgtggaaacatcaaggaagttaatggttctcagaatgcatccaagttacgctctgagcttccagagattgttattaaaactcttttggagtctatatttaacaatacaggtggtgaggttgtaattaaccaggatggtaaatatcagatcctgggtacccccacggagacagctttactagagtttgcattgtcactaggcggagattttaaggcaaaacgtgatgaaactaagattgtgaaagtggagcctttcaattcaacaaaaaagaggatgagtgtcattcttgagcttccaggaggaggatgccgtgcacactgtaaaggtgcttcagagatagtcttggctgcctgtgataaattcgtagatgagacaggtggtgttcatcctctggataaaataactgctgacaagctcaatggtattattgatagttttgctggtgaagctcttagaacattatgccttgcttataaggatatggaagaaggtttttccaacgcagaccatataccgctacaagggtacacatgcattggaattataggtataaaagatcctgtccgcccaggggtgaaggagtctgttgctacttgccgggctgctggaattatggtgagaatggtcacaggagataacataaatacagcgaaggcaattgctcgtgaatgtggtatacttactgaagatggcatagctattgaaggaccagagttcagagagaaaagcctagctgaactccttgaactggttccaaaaatacaggtaatggcccgatcatcaccacttgacaagcatacacttgtaaagcatttgcgcacaacattcaatgatgttgttgctgttactggtgatggaacaaatgatgctcctgcattgcatgaagcagatattggacttgcaatgggcattgctgggactgaggtggcaaaagagagcgctgatgttataattctggacgacaacttctccacgattgtaactgttgccaagtggggacgatctgtttacatcaatattcaaaagtttgtgcagtttcagctgactgtcaatgtagtggcactgctagtgaacttctcttcagcctgctttacaggaaatgcaccactaacagctgttcagcttctttgggttaacatgatcatggacacccttggcgcgcttgccttagccacggagccacctaatgatgacttgatgaagagagagccagtaggaaggacagggaaattcattacaaatgtgatgtggaggaacattcttggtcagtctttctaccagttctttgtgatgtggtatctccaaacgcaagggaaaaatttctttgggcttgaaggctctggtactgatattgttctgaatacgataattttcaactcattcgtcttctgtcaggtgttcaatgaaataagctctcgggagatggagaagatcaacgtgctcaagggcatgacaaggaactacgtgttcatggctgtcctcagcagcacggtgatcttccagttcatcatggtgcagtttctaggagagttcgccaacacgacgcccctgaccatacaccagtggctagccagcgtgctcctcggtctggccgggatgcccatcgctgccgccgtcaagctgatcccagtcggctcgtcatgataccattgaagattgctgctgcctgggatgggaagcacggcatgaaaagcgtcaggctgtccaagctgcatggtattcggtggagctgagctctctctctgtctctctgtgtgcgtaaacttttggaatgcacggagggcaggctagggaaatggagcagccgctgcagtttgagaagttttgtagcctggaaatgtggctagattgcctcggacctgtaagaaacatcgtgtttgttggcgccgggaaaaaagcagctagctgtggtggtggtgcagcagagttgttagattgacttcgaaatggaatttagactgcaggatatttatggtggatgaatggacggaaaacatggttcgttggttatttttactcttgcttattagagctctggtttggtctttttaccttagtagttgaaaaagagtaaaatttagcatcgggtcgtcgaagccaaagttgtcttgaaggcgtcatttatgtctacaaaaaaaacgtaaaatgtatttttgggctccttaagatcgcctcttgttccactcgag

SEQ ID NO: 15940 - DNA, 192 bp, Zea Mays
ttgttccattggccagaggctgttcaccttggagacctgatgcggttatgagtacgaccgggcgtggacggaattcggtcctccggattttcaagggccgccaggggcgcaccggacaccgcgcgatgtgcggtgctcttccggccgctggaccctacctccggctgaaccgattccagggttggcgggccg

SEQ ID NO: 15941 - DNA, 3327 bp, Zea Mays
ctcctgacctcctctgacctctgcccccccctccattcccatttcccacgcggcaggcagctagccctacctctggtctcctctgccacctcctcccctgccacctcctcccctgcctagggtgcgccttcctcgccggacgccggcgcagggtcgggacgcttccgctgccgcgcgttccacgacccctctctgggagacgaaactcggcgccggcttggtagatacagacctgggattgccttttcctagttcagcatggagggcactctagttcagtctgcggttgttccaaccgtttacagaagcagctcaggtcggttccgtgtgcgtgcaagggccagaaccaatgctacaatggtgcgaaatatgccaacaaggactcttactcttggtggtttccaaggattgcgtcagacaaactttttagacacgaggtccgtgatcaagcgtgactttggatcgatcgtggcaagtcagattgcaagaccgcgtggatcagcctcaagaggggtggttcgtgccatgtttgagcgcttcactgagaaagcaatcaaggtgattatgcttgcacaggaggaggcaaggcgcctgggacataactttgttgggacagagcagattttgctggggcttattggtgagggcacgggtattgcggcgaaggttctgaagtctatgggaatcaatcttaaggatgcccgagttgaagtcgagaagataattggacgtggcagtgggtttgtggctgttgaaatcccattcacacctcgtgcaaaacgtgtattggaattgtcccttgaagaagctcgtcaacttggtcataagaatggttggggaaagcacagaagctgttggggctggagttggtggaggaagcagtggccagaagatgcccacacttgaagaatacggtactaatttgacaaaattagcagaagagggcaaattggacccagtcgtttggtagacaagatcagattgagcgtgttactcagattttgggcaggcggacaaagaaacaacccctgcctaattggagagcctggtgttggaaaagactgctattgctgaggggcttgctcagcgtattgccaatggggatgttcctgaaacaatttgaaggaaagaaggttattactcttgacatggggctccttgttgctggaactaaataccgaggagagtttgaagagagactaaagaaacttatggaggaaattaagcaaaatgaagacattattctctttattgatgaagtgcacacactgattggagcaggtgcagcagaaggtgcgattgatgctgctaatattttgaagccagctcttgctagaggtgaacttcagtgcattggtgccacaacactggatgagtataggaagcatatagagaaagatcctgccttggaaagaaggtttcaaccagttaaggttccagagcctactgtggatgaaacaatacagatcttaagaggacttcgtgagagatatgaacttcatcacaaactgagatacacagatgatgctttaattgctgctgcacagctgtcttatcagtatatcagcgatcgtttcctgcctgacaaagccattgacttgattgatgaagctggatctcgtgttaggctgaggcatgcgcagctccctgatgaagccaaagagctggacaaagagctgcggcagataaccaagcagaaaaatgaggctgtacgtggccaagatttcgagaaggctggcgaattaagggaccgagaaatggagcttaaggctcaaattacagccattattgacaagagcaaggaaatgattaaagcagagactgaatctggtgaagtcggtccgcttgttactgaggcagacattcaacatattgtctcctcttggactggaattcctgtggagaaagtgtcatcggatgagtctgaccgcctcctaaagatggaagagacgctgcatacacgtatcattggacaggatgaggctgtcaaagctattagccgtgctatccgccgtgctcgtgttggcctcaagaatccaaataggccaattgccagcttcatattctctggaccgactggagttggcaaatcagagcttgcaaaggccctggcggcctactactttggctcggaggaggctatgatcaggcttgacatgagtgagttcatggagcggcatactgtctccaaactcattggatcacctccaggttatgttgggtacactgagggaggccaactaactgaagcagtccgtcgccgcccgtacacagttgttctctttgatgagattgagaaggcacatccagatgttttcaacatgatgcttcagatcttagaagatgggcggttaactgatagcaaggggcgcactgttgatttcaagaacacactattgatcatgacatctaatgtcgggagcagtgtcattgagaagggaggtcgcaagattgggttcgaccttgattatgatgagaaagacacaagctataacaggatcaagagccttgtgactgaggagttgaagcagtacttccggccagagttcttgaacagattggatgagatgattgtattccggcagctgactaaattggaggtgaaagagattgcagacattatgctgaaagaagtgtttgacaggctgaaggccaaggacattaatctccaggtgacggagaagttccgagatagagttgttgacgaaggttataacccgagctatggtgccagacctttgcggcgtgctatcatgaggcttctggaggatagtctggcagagaagatgctggctggtgaggtgaaagaaggtgactctgccatcgttgatgtggattcagatggcaaggtaatagtcctgaatggtggtagcggtgttgctgagccactggaacctgctctcagtacctaaccgaggttaaaatctttgggccgaaatggccttctttacaagtcagctgggctcttcgtgatggtaaagtagactgttattacttggccgctccattagttgctttatctttcattgatttttttttgttggaagtgaggcagtagggtcactatggaaacgaatagacggagaggcattagccgaaatgaatgtttttcagtttgatgcacttgtattattaggccttgctagcaacaaggtgcagatgcctctccgtttgctgttgtactttagtgtaacttaccttccgaatgtattattaggcgttgctagcaacaagatacggaggttatacatttgattttcagtaaaaaggtagactctttgttgcgccgcagctgttttattgtctgcgcactgcagtgttcgttca

SEQ ID NO: 15942 - DNA, 648 bp, Zea Mays
cattcgcccacacgagcctacccaaagagcccagagcccgggaggttacttcgctgcctgaggagtccccggcaccggaggtcttgctaccggctggcggcttcttcttccgttcctccccaagtcctcttcccggaggaatcatgatcgtctgcgtcgccgttgtcggccaccagtgagcaatcctaagaggagtgcacctacattgaatgagacatttttgggtcttctatacccaactgagaactacaaagtgtatggctatttgacaaacacaaaggtcaaatttatcatggtcacgactgatcttgatgtcaaagatgcagatgccagaaattttttcaggaagttccatgctgcatatgtagatgccgtctcgaacccgttccatgtcccagggaagaagattgcttcaagaagctttggtgcaagagtaagcaccatcgttaaatccttcggttcagggaccagttgatcgaatgctacttttgtcagactttctgtaatcaaacatatgtgttctctccctgtttgacaaaattactccctaccgtgtacttgtctggtgaacgagatgctattggtactgattgctgaacaaagaaaaatagtggtttattcattcaaaatcctcctcaattccatcca

SEQ ID NO: 15943 - DNA, 359 bp, Zea Mays
ttttgtatcatgttgtcatcgagtactcagtacattagtattagtagaggcatacaagagtggagaactgcaggaaactctagagaaagcaatgtgttcgtagaaaaaaaatgaacaataagcagatggcatacaattaatcaaaatgttatagtatttgctgtacaattcaggcttgtcatcaactggagatgcaagttgtggataattcatgtccaaatgttcagtgcactttcgactggaaatacatctttctgcagtttgtgactagtcatccagtttgaaccccgatcatatattgtacgatttgtgactaccagattgctccgttttcagctgcaactaccgcgtccgcccgc

SEQ ID NO: 15944 - DNA, 1242 bp, Zea Mays
gagaagtctgcagaggaagaaaagagagcgaagggggttaaaccgcggaccgcggaggcggagcaaagcacacgccatccatccctggcccgtctgccgtcgcagtcccagtcgccctcctcttcgtctgtggtctccaccccgcgcacacgcacagttcgtcgacgcgagcgagggccagccgtccagggcacggaagtgggagcccgcagcttctcgtcggcggggggtgggggctgagtcgcgggagtgatctagtggtttcgtggtctgcggcgcggcggggcggggttcgagatggaggacttgctgaacacggagatcgggaagaacgactatgactggcttctgacaccccctggaacacctcgtgatcctacattagatgctgctgagaaagctccatcatcaattgtgactaaacatactgttaccagatcatcctcgacaactagagcatctaggctttccacttatgagacagagaatgggcatttgacatttcccactaggccagcacggagtatatctgtctcttgccgggcagttcaatctacaccaaacaacatcaggtcatcaatcgtcaatgcaaacatttcctctgttaattcaagatctacaacccaaagcaagcggacagccactcttactgcatcaaagccatctgttgcatcgtcacgtccagtgccaacacggtcctctacacctgtcgaagcccgtctgtcatgctcaagatcatcaactccaacctctcggtctcgaaccttgtccagttcatcttcaagcagtacaagtgcagtgagccgtcccagctcatcctctggtaaagttcctgcaataacttatagcagttcttcatcaagtacagtttcttcagtgagccgttctagctctcggtcatccacacccactcgtcagcctgccatgcgttcatcaacaccatctgctaggcggatttctggcagcaataacatgacatctaatggcagacccttagccagcagtggtcggagttcagcaccttcctcagcgccatcatctcgtccaagttccccaaatatacggacgcaagctccagttcacccactaggtattccagattttccaaatgaaactccaccaaacttaagggctaaactgccagaacgaccactctctgctggtagagtacggccaggtattacttctggtgtcaggtcaaccccaaatcctgaaccggtcctctcagtcactgtaaaaaag

SEQ ID NO: 15945 - DNA, 3497 bp, Zea Mays
ctgaagctttgcaactatccaaggttaggcctgaaaagttcagttctctacgccagaggttgagttctattgaagcacacaaggtgaccttggagactctactgccttctggacacaaaattaatgacttgttaataaacatctggagagtttgcaaagcaggctatcaaccaaataacaaacacattctgggtgttcttggtaatatgggatccggtggctcccttctgggccagcttactggagctgggaggcctgcctgctggataatatttgatatatatgtggagaatgcaattgatgggaagcatctaagtgttacatcagctatcgggattataaaagaaatgaccaagacaatgcaagtgcttaatgaagcaagctggcaggaaacatttaaagctctttggatttccacccttcgtcttgtacaacgggctagagaacctcttgaaggaccgattcctcatctagatgcaaggttatgcatgttgttagctcttataccattatcaattgccgcgattcttcaagaggaaagtgatatgtttggagttgaagggaacaaaattcttccacaaagacaagggcttatatcatctctccaggatctgatccagtattcaggacttcttgtaccaccttcatcagtggtgaatgcagctaatgctgcagcctcaaaagcagcaatatttaaggccaactataaggctggggctggcaacactagcatgatggaccagactgactcttcaatgaaagctgctgggaacatgctccatctcattatcgaagcctgtatctcgagaaagttgattgatacatctgcttacttatggcatggttatgttgtaccatctaggactttaaaagatacagctttgccccaagaatccccctggctgaactttatgaaagggtctcaactttcagaaccccttattgatgctctggtcgcaactcctgcttcaagtgttgcggaattggacaagttatacagtgtagcaacaaatggttcagaagaagaaaaaacagctgctgcaaagattctttgtggcgcatcacttgttcgtggctggaacattcaggaacatgtggtcagtatggtggtcaagctattatcagcttctttaccctcagattcctcaacttcaactcctgggagcatgagccactaccttgctcatatgtctacgttgaacgaaatcttactcggtgtgtcttatggtgatgtcatccacattctttcgttgtatggaatggttccagatgttgccgtggctttaatgccactatgtgaggcttttgggtcaatagcaccgccacctaatcacaagtctaccattcttggtgaaacatctgtttatttggtcttctcctgtgcatttctttgtcttcttcgcttgtggaagttttatagaccccctcaagagtattgtcttactggtcgtggaggctcagtaaagctggaactgactctggactatctgttgttgatgcacaataatcgcattttctcaaattcgtctgcccctaatagggattcttacaacagtatgggctcagtcaatgaggtctctgctcagccgatttatattgattctttccccaagctaagtgcttggtatttccagaatcaagcttgcatcgcctctacactttctggtctttgcaacaaaaaccctgtccatcaagttgcgaacaaaattttgaatatgatttgccgaaaaatgaataaagaagctgttccttttgtacttgaagctgttctgacagcatgtgctcatgggcggctttccagccgagacttgactacaagcttaagggatcttgtggactttttgcctgcttctcttgctgcaattgtaagctacttctcagcagaaattacacggggaatctggaaacctgttccaatgaatggaactgaatggcccagtcctggtgcttctcttcattccattgaagctgaagtaaaggaaattcttgcatctgctggtgttcagattaacagctgctatccacgtggtgtgccgccaatgcttcctttgcctatggctgcacttgtcagcttgacaattacatttaagctagataggagtttggagtacattcaaggggtcattggacatgcactagagaactgcgcagggggaagttcctggccaagcatgcccattatcggggcattgtggacacagaaagtgcgaagatggcatgacttcattgtcctctcttgtatgcgttctccatttggcagagacaaagatgcagttgcgcagctcatccgaagctgcttttcgtcctttctgcagtcatcatccagtggttctgacataatcgcaaaccgtggagttggggctttattaggggactcaatcacggatcaaggtcttaggctcccaatggcacctggtttcgtctacctgagaacatgtcgaactttccatgacacatacttcgttagtgaagtgatcctcaagcaagtgattgaatgggctcacaaacttgcaaatggatggtctttcaatgggcctccgcagttgaaatcaggccggacaccactatcttgtgcagcatctatggcgcatcaggtcgcgatgcttggtggtggtctcctatgcatagcaggtggaccacttgtggtccaggtgttgtatgaagacacactaccgacactgctgctgtcagccagagaacagagtttgaaagaccctgggccagtttctagcacactccaaggttacgccatggccaacatgctcttttactgtggtagcctactttggggagcggacaggagttctcctgtcatgaaattgtctttcctctcgaggcggccacgggtggtgagaaaccacatggatttcatagctggtgtactggacggacacattcttctgggctgtgacccgggtacctggaaagcgtatgtttctcagtttatgttcctggtggtgaagtttgttccatcatggttgccggacataaagctggacacgctaaagaagatagcagctggacttcggagttggcatgaacatgaccttgctctatcccttcttgagcgaggaggaccacaagcaatctctgttgtagtcgagacctttctgtgatcctgccatttggacattttgccccccacctgacatcgcagccgctgttagggtttgaagtcggtggtctgaggtctagctgaagtaatcaggatgacccttccagaattccacttgagcaaccaggataactgatgtttttctcatgtatggcgaacccattttgtttttgtgaattcaatacggaagaacattcaacctactagagtctagagtgtattgacatcagccctaacatgtaacctatgggaatttcattaactttattgcactgacttcagccctaacttgtaacatacgggaatactctatcgtgttttatatcggcgttttagttgggataaccgaactttactctccatggttcgcatcactcttagg

SEQ ID NO: 15946 - DNA, 88 bp, Zea Mays
cgccgccgcaattgaatcaagaggcagcagcctccctctctcgtgccatcgccggtggtaccaatttgggcgccattgagggtgactg

SEQ ID NO: 15947 - DNA, 1298 bp, Zea Mays
ccgccgacagcaacgcctcattgaattcggttagatgataatggaagcaggcgccggggaagcagcaccaagcgcgccgcgcagactgaccctgccgtggaaggtgcggctcctgctcctctgcctcgatgtcgtcgccggtctctcgatgcgtcgcgacggcaccatcaaccgctccatcttcaacctcttcgaccttcgtgccaccgccagcacgcgcccggacaggcagggcgtccggtccgccgacgtggacgcgtcgcgcggcctgtgggcgcgcgtgttctggccgtcgccggagtcgtccgcggccccgctcccagtcgtggtatacttccacggcggcgccttcacgctgctctctgcggcctcgtacgtctacgacgccatgtgccgccggttctgccgcgagctgggcgccgtcgtcgtgtccgtcaactaccgcctcgcacccgagcaccgctggcccgccgcgtacgaggacggcgtcgccatgcttcgatacctcgcctccgcgggtctccccgacagcgtcgacgtccccgtggacctctcccgctgcttcctcgccggggacagcgccggcgccaacatcgcccaccacgtggcgcagcgctggacgacggcctcctccccgccgcggtccatccccgtccacctcgctggcgccatcctggtgcagccgtactttggcggcgaggagcggacggaagctgaggtcaggctggatgggaacgtgccggtggtgaccgtgcgtggctcggactggatgtggcgggcgttcctgccggaaggcgccgatcggaaccactccgccgcgcacgtgacagacgacaacgccgacctggcggacggctttccgccggtgatggtggtgatcggtggcttcgacccgctgcaggagtggcagaggcggtacgccgacgtgctgcggaggagggggaaggaggtaagggtggtggagttcccggacgccattcacactttcttcctcttccccgagctcaccgatcatggtacgctcgtggaggcgatgaaggcgttcatacgcgagcaacgcatctgatctaattctgcctcacggtcacggatcaccaacctacgtggacctacatggtccgtgcaaataattttgtttcccatgcacgtaatggtccctacatggtccgtgcaaataatttctctataaaccactattcaagtctcccatatatttattcagttcatcgagcatctcttctagatcttaattctggatcgtcatgtacattatgttatggattcatagttgccttttt

SEQ ID NO: 15948 - DNA, 2369 bp, Zea Mays
ccttcttggagctgttccgaggggttgcccgttgaggaggggttaggcttcgtcatgtcgaagtcggacctggatgatctgcttcttcaggctgccggccggacggggaagaaccagtcccggccgagcaatccgcggtggaactctggggggagcggctccgacggcttcgacgacgacgacgacgacgactctgacgccgcgccgacctactcgaggaagaagccttcgtcgcaggtaccgctcaagaagcggcacaagccggagaagggcggccggcgtggcggtggtgggtggaacgacgaggatgatgaggacgaggatgggcgtcggagtggcggggaggactcggacagcgccccttcagtggggagtgacctatacaaggatgaagacgacaaggagcgtctggagaacatgtctgagttgcaaagggagttgatcctagctgagcggggcacccgcctcgacgactacaagctcaagcagcgggcacgtgcgtcctcctccaagacggacaaggtgggtgcgccaaaggatagcagcccacccccaccgcctagccggatgcggtcttctacccgaactgacaagtctgggtccgccgctaagagcgcgctggacgagctgcgggcaaagcagcggatgcggcaacaagctccggaggcacgcaggatcacggacctactcccacatagtggctcatccattaggcgcagggctgggagcccaccaagtgatgggagcaacgatggcaataacagggggaggatgaatgaccatgggaggattgctggtgatggcagggatgatgaatttgatgaatcgccgagtaggcttgatccactcaagtttgatgatgtgaagagtattaccctcaggaggtcaaaactggtgaaatggttcatggagccattctttgatgatctaatttctggttgttttgtgcggctaggtattggtaagacaaagaatgggacccccagttacaggctgtgcatagtgaggaacgtggatgcaagcgatccagatcggaattacaaactggaaaactactcgacatgcaaatatctcaatgttgtgtgggatagtgaggctaatgctgctcggtggcagatgactcaggtatcggactccccacccaacgaagaagagttcaaggactggctgcaagcggcagagaagaatggtgcacgcataccgactcggcaggaagtcctggataagaaagaagccattcagaatgcctataactttgtgtattcagcagcaactgtacaacagatgctgcaagagaaatcagctgtgagacgacctatcaatattgctgctgagaaggatcggttgaggagtgaattggagatggctcttagccgtaggaacgaacatgaagctgagaggattcgtacgaagctgaaaaatctgcaaaacagggcacaaccagtgtcaaaagataataaggctgcaaagttggaggctatgaaccggaagaaccgcgctgataacttcaagaacgcttcagaactgaaacctgtaaatacatctttgaaggcaggagaagctggttatgaccctttctcgaggaggtggacaaggtcaagaaattattatgcatcgaagccaggaggaaataatgttgaagaaactgccaatgggtccagtagtaatgtagcgcctagcaatgaagatacaaagagcaaggctcaaactggtacagcagccacaacagcagctcaagtggcagcagctgatgccgggaagctcattgataccaatgcaccagtggatctgggaacagaatcaaatatgctgcatacatttgagcttcctatatcattgtctgctctgcaagaatttggtggagccaagggcctgtttgatggttacatggcaaggaggcagaagatagaagctacaatggggtacaaagtgcctgacaacgatggaaggaggcatgctttaaccctgagtgtgagtgattacaaaaggcgacggggtctcctctgaagtgtatctgtgattgtgctgggtgctcagcggattcaaatatctgcctggcttcagcgcctctgcattgctgtgacaattgtccagatcatctgcattttgccttatcttcctataagtaacataaaacatgcgataaaacatgcggagtatacaatttctttcataaatattacctgatgtatgactgattatgttactgacatcatgtttatatccgtggattgtgtcgttgtcatcatcatcatcgtatccttgttagctgcaaaaactggattccataattagttcaattaaaataaatgcagctttcatttttcggattcatgttttacatggttggatgtgtgtgtgatcatctt

SEQ ID NO: 15949 - DNA, 923 bp, Zea Mays
accgatcaaggcacgggagcttgccttgcctcctaggtttgagatgtttgagggatacatgtatacctgaagacgctatgcttaaggatccaaggaggctttatgcaccaggccggatttatcacatagtcgaaagaagaacgtgcaggtgcggaagatatccaccggtagtcaaaacagctgtgccggtggatggtagatttgagcacatagttctttcctgcaatgccacagcggaccatgccattatttggattgagagggaggcccagaaggctttggatctgatgctggaggaggagaacacgctggcagtgccgtcggagcagcggatggagcggaacgaaaccctgcagagggagcatgtggaggagcacagggccgctctgcgccgggccgtcacgctgtcggtgccagacgggcggcgaccgtcgccgtacggtacgtttgacgacgtggagcagcatcgccagcagccggagaggagcgagagcttcccgccggcggggcccaggcagcgcatgagctggaacgacctgatcgagcgagtgttcgacaaggacgaggacggccagatcgtgctgcgcagctcggttcttctctgacgggcggctgggccgttgtaaattcctttggtcttgtagctgtgctgcctctccctgtagtacccccatttttcctgtgttattattggttgttcaatgtaattccttcattcattgaagaggattctttttctcatgcgcggttcatttagcgacatcagctccgtgcagacaagttttgtgaataaattatcaaggtagagtagatcaatttttgaaatcattttcctgttgattttgatatgtaaagttaggatccaaaatcaaaacctgcattgctgaacatcattcagagcaaacctaccaaatcgtaacacg

SEQ ID NO: 15950 - DNA, 1247 bp, Zea Mays
caccagcgtggtagagtctgctcaacaccaaacttcgacgactgcgccggccgtcggccgtcgctgccgccctattttgaccccatcgccggcgacgataatcgccagctgaaggacaataactatcatggatgctactgcaaattcagatgtgcaaagggctgaggaatttaaacttaaggcgaatgatgccttcaaggcaaacaagttctcgcaggctatagagctttacagtcaagccattgagctgaatagttcaaatgcagtttactgggcaaaccgtgcatttgcacacacaaaattagaggaatacggaagtgctgtgcaggatgctacaaaagccatcgaaattgattctagatattcaaaaggttattatagacgaggcgcagcttatcttgccatgggaaagttcaaggaagccctgaaggattttcagcaggttaaaaaaatctgcccaaatgatccagatgctacaagaaagttgaaagagtgcgagaaagctgtccaaaagatccgttttgaagaagcaatatctgctggggatgatgagaggcggtccgtggcagactctattgactaccatatcatagaagtagagccacattatgcgggaccgagaattgatggggaagaaataacgatagagtttgtcaaagcaatgttggatgaatttaagaagcagaaatgcatacataaaagatatgcttaccagattgtgctaaaaaccttggatttgctgcgatcgatgccttcccttgttgatgtggatgttccaaacggtggacattttacagtttgcggtgatgtgcatggccagtactttgatttgctcaacatatttgacctcaatggccttccatcagaagaaaatccttacctcttcaatggcgattttgtggaccgaggatctttctccgttgaagtcatactcaccctttttgctttcaagtgcctctacccaaaagctatgtaccttgcaagaggaaatcatgaaagcaagagcatgaacaaaatatatggctttgagggggaagtgaggtcaaagctgggtgagaagtttgttgaactttttgctgaagtcttttgttggttacctcttgcccatgtcatcaacaacaaggtctttgtggttcatggagggctatttagtgttgatggggttaagctttcagacattaggtccattgatcgtttttgtgaaccacctgaagaagatatactggagctccattacttcagcttgc

SEQ ID NO: 15951 - DNA, 3445 bp, Zea Mays
caatttctatttttgattattccgtactcgatttcattttagatgataaaatatggatacatgagagattttccgtccgttttgatcctgcaaagatctgaggccgtcgtggtgtggcctggccactggccacccgtgccctatcctcttccgcacggcgtcctatatatataaggaaaggaaaaatctgccactccacacgcgttcctctctcgccgtcgccaaccatcgccgcctcgcgtccggacccgccgttcctccgaggaaatggctgcactgcaaccctcattttcaccagcaatgactttgaagagtagctgcagcgccctgaagttcccaaaaactgcactgttatctggttttggtggcattccacgccttcaagatgcgcaagacaggaacactagcgtcgcttatttgatccccaaggctgcttcagtgactgaccagtcaatagcagagccaccaaaaaccaagcaaaataggcacacagtcgacccaacagctccagaatttctgccactcccatcttttgaagaatgctttccaaggagtaccaaagaatcaagtgaaatcatccacgaggaatcaggtcatgtcctcaaggttccattccggagagtccatttgactggagatcagaagcactttgatacatatgacaccagtggtcctcaaaatataagcccaaggattggactcccaaagataaggaaggaatggattgataggagggaaaagctgggtagtcctcggtacacacaaatgtattatgctaaacagggaattgtaacagaggagatgttatactgtgccagccgtgagaaccttagtcctgaatttgttcggacagaagttgcccgtggacgagccataattccttccaacaagaggcacctggaattggaacccatgattgttggaagaaacttccttgtaaaggtgaatgcaaatattgggaattcagctgttgtgagctccattgaggaggaagttcacaagctccagtgggccacgatgtggggagctgatactgtcatggacctttcaacagggcgacatatccatgagacgcgggaatggattattcgcaactctccggttcctattgggactgttcctatttaccaagcacttgagaaagtaaatggtattgctgaaaatctgagctgggaaatttttagggataccttgattgaacaagctgagcagggcgttgattacttcacaatccatgctggtgtcctgcttcgttacattcctcttacagcaaagagaatgacgggcatagtttcacgtggtggctcaatccatgcaaaatggtgcttaacttatcacaaggagaactttgcatatgaacattgggatgacattcttgacatatgcaatcagtatgatgtggcattatcaattggtgatggtttgaggcctggttccatttatgatgcaaatgatagtgcacagtttgcagaactgctgactcaaggtgaactaacacgtcgagcatgggcgaaagatgtgcaggtgatgaatgaaggcccgggtcacatcccaatgcataaaattcctgaaaacatggagaaacagttggagtggtgtaatgaagcgcctttctatacattgggtcctttgacaactgatattgcacctggttatgatcacatcacttcagccattggtgctgccaacattggagctcttggcactgcacttctttgctatgtaacaccaaaggagcaccttgggttgcccaatcgtgatgatgtcaagactggtgtaatatcctacaaaatttctgctcatgctgctgatttggcgaagggtcatccctatgcacaagcttgggatgatgcacttagcaaggcaaggtttgagtttagatggcttgaccaatttgctttatctctggatccagtaactgctatggctttccatgatgaaacattgccctctgagggtgccaaagtggcacatttctgctcaatgtgtgggcccaagttttgttcaatgaaaatcacggaggatatcaggaagtatgctgatgaaaatggttatggaacagtagaggaagctgtgatacaaggaatgaatgctatgagtgctgaatttttggctgcaaggaaaacaattagtggggaacaacatggtgaagcaggaggggagatctatgtaccagaaagctatgcagctcagaaataaggtttcctcggagacatccattccaaatgaggctaaggcatcagcagctgttctggctagtggctaaggcatcagcagctgttctaccatcttatctaatgagatggggtgcctgtgttctcaacagtctgagagcctcttagcctggactgttgtgagatgggctgagaaagtccctttgaacctgaacaggataatgcctgcgaagggagtgtgcaattctattttcctgttttccaggaacctatcaaccttttggtggaaattgaggtattgtccatgattgcatggagctcagcaacaaggtacctgttctctacttgtttgcatttctcaaggggaagattcttaacagatggacgatgtttgtcaattgagggtgggaagtaccgaccagattgcatttgacttcatccggccatccggtctattaataaataaccaaggaagtggttcttggcaactaccttttcccgttcttgtggtttttttttcaaataggcgtgcttaaatatttcggtcttttaaattaatattataaaattctcgtctgaatatttttcaagtctagtattatgcatgataatttacatatgcatgttgtctgaaagcagaagcagattctcaaggcacctgctaattcaaaaccaaaaataggttgtaacttcgaagttgctgcattggtgaagaataatatattttagttttactctcagctgattgcttgtttgtcatgtttcactccatgcttcactctcggctgtattctgcattataccttgtttatatccaactgccatggccgatgtgagatgttaaatgtgtcggtgaagtaaataattctgctgtggcttttccgctttctgtggttccaatgggctattcccatttgcaaatattgtgtccataaggcggatttccaaatcctgcggagttgaggtgggcacctaatttcttgacgtttctgatcaatttctcatgttatcacaatgtcccttataagtgcttcccgagcagaattgagatgttaattattataaacttccattttggtttatctgaaaccaggaattctatatgaatgtctccttgagtatagtttcattattgtttaaaaggtgcgtctggttctgctacttatgttacgagctgtgaaaaaagttgttgtgaaccgtttgcagtgaaaaaaattaatatcctatttagataaagatattggacaacggaattgagaattgaaatcagc

SEQ ID NO: 15952 - DNA, 1606 bp, Zea Mays
acaaaaattcggaatttcctgcgacgagagcaagatattattaattaacgggcaagtgggcatggccgagtttctggaggcttcctgcgtcgcgtggaggcagacagagctcagggagggagggaggggaagaacgaagcagcagcaacagcgccatccgctcgcttccttccccttctctccctcctcccccaccgccggcgtcgcctctacgcgcgcgcgccccgccgggggctgccgtcgctgcacccgtggcccgtgggcggcggccgcgtacctgtacctacgtgctgccgggggggggggggggggggggagctacgcgtctcctctcgccatggacgccggtgtagagaagtgcggcgacgcggcggcggagggcggcggcgacctctacgctgtcctcgggctcaagaaggagtgctccgacgccgacctcaaggtcgcttaccggaagctcgccaagaaatggcacccggacaaatgctcctcctcctccatcagcgtgaagcacatggaggaagccaaggagaagttccaagagatccagggcgcctattcggtactctccgacgccaataaacggctcctctacgatgtgggagtatatgatgacgaggacgacgaggatagcatgcaggggatgggggacttcattggtgagatgacccagatgatgagccaggtgcggccgatgaggcaggaaagctttgaggagctgcagcagctttttgtcgacatgttccagtctgatattgattcaggattctgcaatgggactgctaagggccatcaggttcaggggcaagccaaaagtagaacatgctcaccacggtcccctcctactactatagtaaaggaggcagaggtgtcatcatgtaatggcttcaataagcggggttcatcagcaatggactcaggaaagcctccaaggcctgttgaatgtggtgcaggtcagagccaggctggattttgttttggggtgagcgacacgccaaagccgcgaggtccgaacgccaaccggaagaggaacggccggaaacagaagctgttccccaagcactacgttacatccgaagatgatacggccggttcctagcatcagcagcacggtagcagtttgaccgttggctttggtgatgtcagcagtagggagggcacatcatgtcgcctctgccagctgctgtgatctgaagaggcgtttagctcatcatatgcctttagtcttttgagaggtctttagggttgaaaggtacttcgaaaaccgaaccagcgtctacaggcctaagagggatttccattgaaactcgtcgatgatactacagttttctttccccatctgtgccggttgtgttgtactaccactaccagtgacagcaatcgtgacttgaaagcggtcgaggtatatcttgttattttgtttccctccgatttttcaatatccgattgattttgttttgaagcaaatagagagcatgtccgtgagaatagtcatgaagcaaatagagaacatgtccgtgagaattgtcggttaatataatttttagtttttaatttgtacatgccactcttgagaaagatctctctcaagcttgtccatgtgcgt

SEQ ID NO: 15953 - DNA, 427 bp, Zea Mays
tttcgctaaggaaccaaaccaaatggacaaggttctagcactgccagaaatctataagaaggattacatacttcagatgctcagtggtggacaatgtatccaatattcagccggttagtttgtattcagcatgatagtagtcggctagatatttgtaaacagttagtagtgtaatgtgttacgattattttcacttccttcgatgtggtcctttccaagtgtaatgtgttttcgattttagattagatgtggtatatatatccgcatgtgcaatgttagaaaccagcacgtatatttattttgggaatattatacaatgtagaggctaagttgttttgaagactttattctattctaattatattcaaaggtgattagaattgaaataaattttagttgctccattattatacatgtttaatttaaa

SEQ ID NO: 15954 - DNA, 1200 bp, Zea Mays
agatttcgtgccaggattagcaattggtgaaaacagtaaaagttagcaatctttcattaaatgctttgaaaagagagatcacagagttcttcagtttctcgggagatatagaatatgttgaaatgcaaagtgaatctgaatggtcacagcttgcttatgtcacatttaaagactcacagggagcagacactgctgttcttctctcgggggcaacaattgtggatcgtgctgtcattataactcctgctgagaactatcagctgcctcctgaagcacacaaacaattatcgggagcaaacgtctctactgaatcagcagtgaggaaggcagaagatgttgtgagcagcatgctggccaagggcttcgtcctcagcaaagacgcactcaacttggcgagatcatttgacgagcgtcacaacatcctatccaacgccactgccactgttgcatccctagaccgccagtatggcctgagcgaaaagatcagtctcggaagggccattgtcggcagcaaggtcaaggaggtggacgagcggtaccaggtctcagaactcaccaagtccgccttggctgccgccgagcagaaagccagcgtcgcgggctccgctatactgagcaaccagtatgtctcggctggtgcctcgtggctaacaagcgcgttcgatatggtaacgaaggcagcgggcgacatgacctcgatggccaaagataaggtggagagggccgaggaggagaggaaagccatcatgtgggaggagaggagtgggctggtcagcgagtacgcgaagatccatcttgacgagccctcttcgtgggagcccgcggttctgcctctggaatcagtggacgagcagaagctccaagctgtctgacacgcacagaccgagtgtctcgcacgaaattcttttgcagctcgtcctatatatagattgttctttttcgttgatgcactggattaaaacaagtgcgcttgtcggccagtgccgtgtaaatttctgagagttggtcttgtgttattaccaggttttgttcgtttcttttgttttggagagagtggtgctaccagcattactacactagactactctgtgtgaacggaatactactgtactttgtctcttctactactactacagaaacagaatacaacttccttcgttagattcagattaatacaatggtgaggttgtaagtgtggca

SEQ ID NO: 15955 - DNA, 4502 bp, Zea Mays
tttcctttcccatttcacttcgagtacacttcacgtctcgtcttcttcgccccactgggtgtctggcccaccgttgccacaggtcacccggggcagtacgagttccttgtctctccttgacggcctccttgctcagcacgatctcggctccgtctctctctagtctctaccaacggtagcaccatctcgctcccactcccaaccactccgccaccaccgctctcctgcgcctgcgtccgcgcctcctccctgcggccccggccgcaccggcgacatggccatccccgttgaggaggccatcgccgccctctccaccttctcgctcgaggatgagcaaccggatgtgcaggggttagctgtgctcctgtctagtgaaagatatgcgactaacagtcctattgagtacagcgatgttgctgcttatcgtctatcactaggagaagatacaaaagcaatcaaccagctgaatacactgatcaaagaaggaaaagaaatgacatctttgctgtacacataccgtagctgtgtaaaagctctacctcagctgcctgattcaatgaagcataatcaagcagacttgtatcttgaaacctatcaagttcttgacatggaaatgagccatttacgtgaaattcagagatggcaagcttctgctgcttctaagttagcggctgacatgcagagattctctaggccagagagactggttaatggacccacaatcactcatttttggtctatgcttaagttgcttgacgtcctactgcagcttgatcatctcaagaatgcaaaagcaagcataccaaatgatttttcatggtacaagagaacgttcactcaagtaagcacccagtggcaggatactgacaccatgagagaagagctggatgatcttcagatttttctgagcaccagatgggccatcttgttaaatttgcatgctgagatgtttcggacaaataccgttgaggatattctacaggttcttatagtattttgtgtggagtcattggaattggactttgctcttctttttcctgagcgccataccctacttcgtgtcctcccagttttggttgtcctagcaacctcatcagagaaggagagtgagtcactttataaaagggtgaagataaatcgtcttctcaatgtttttaagaatgatccagtgatcccggcatttccagatctgcatctttctcctgctgcaattttgaaggaattgtcatcatattttcaaaatttttccagtcaaactcgtctccttgctcttcaagcgcctcatgaaattcagggtcgtgagctacaagattatcagaggcattacttgattttgaatcacatgggaactatcagagctgatcatgacgacttctctatacgttttgcctctgctatggatcagatgataaggttgaagtcatcagatggtgtgtataatgactggtcccgcgatatcaaagggaacatgtatgatattgttgttgaaggcttccagcttcttagtcgttggactggcaggatttgggaacaatgtgcatggaaattctctcgccctatttcagattctcaacaaaactccatgacatgttttgactatgaaaaggtagtacgctataactatactgctgaagaacgaagggctctgcttgaattaattggttacataaagagtattggattgatgatgcagcattgtgatactttagtgtctgaagctttgtgggaaacgatacacatggaggtccaagattttgtacaggataaacttgatactatgcttcgtacaacatttagaaagaagaaggacctttcccggattctctctgatatgcggaccctctcagcagattggatggccagcactagtaaagcagacccagagcagcactcgctacaccaagaaactgaggaaatgagacaaaacacattttacccaagaccagttgcaccaacagctgcacagattcattgtttgcaatttcttatatgtgaacttgtatctggtggtaatctgagaaaagttggaggactatttgggaatagtggctctggcatacctgtggaagatcttaaacaactagagacatttttctacaagcttagttttttcttgcatattttggattatacagcgactattggtactctaactgatcttggatttctttggttcagagaattttaccttgaatcttctcgtgtcattcagtttccaattgaatgctcgctcccgtggatgctggtgggccatgtcattgaatcagaagatgctggtcttctcgaaagcattttgattccatttgacctgtacaatgactctgctcaacatgcactaacttctctcaagcagagatttctttatgatgaaattgaagctgaggctgatctttgcttcgatcttcttgctcagaagcttaatgagatcatctttacatattataagagctgtgcagcaagtactcttcttgatagttcatttacatatgcatgcgatgatggtgacaagtattttgtcaaacctttgcgattcgacgcgattttcaagttaaggagagtaatggttttagggaggacaattgatctaagaagcataattactcagagaatgaacaaaatattcagggaaaatattgactttctacttgagcgctttgaaaatggagatctttgtggtgttgtggaactgcaacaactgctggatattttggagcttacacaccaatcaatatcaagatttcttgaattggattcttactctcttatgcttagcgagatgcaagaaaatctttcgttggtttcttattcaagtcgcatctcttctcagatatggagtgagatgcagacagatttcttgccgaatttcatcttatgtaataccacacagcggtttgtccggtccgcaaaaggaactcaccactcttcgcatagatcaagcgcttctactgggaaaccttacttctattgtggatcacatgatttgaccatggcataccagggtcttgctgggctgtaccgtgacttttttggagtccctcatatgtttgcagttgttaaacttcttggttccagatcattacctgcaatcatccgtgctttactggatcatatatcaagtaagattacaggtttgctaccgaaaataaatgcactgcaagaagcattaccaaaatctattgggcttctttcatttgatggtggtatagcaggttgccaaaagatagttcatgaaattttgacatgggaagcaaaatctgaagttaaaactgaagttcttcatgaccttaaggaaattggaagtgctttgtattggatgagcattctggacattgtgttgagacaaatcgacactacacagttcatgcagtcagctccgtggctaggattggttccaggaaatgatgggcaagtgaagcatgcctactctgataatactccatttaccacacttttaagtgctgcctctaatgctgtgacatcaagccctacatgcccaaatccatctacgtttcttgtcatgtcaaagcaagctgaagctgcgagtctgctgtacaaatcaaacctcaactctggtagtgtgctggagtatgctcttgcattcacaagtgctgccctggatagacactatagcaaatggagcgcaactccaaaaacaggctttatcgacattactacttcaaaggatttctatcgcatttttagcggtcttcagtatagttacttagaagatagcattaacaatccttcgaagaaacaagaaatgctgggtgattctgtagcctgggctggctgtacgataatgtacttactgggacagcagcagcacttcgagctttttgatttctcctatcaatttctcaatgtggcagaagtagaaagtgcgacagtatcacactatcaatcttcagagaggactaaaagttcaaatttcttgcaaggctacgagggcatcctggaagcgatgaggaaggctaggaggctcaataaccatgttttctccatgttgagggcacgatgtccccttgaggacaaggttgcatgtgctatcaagccaagtggggcaccgcttcaccggatgaagtttatgaacaccgtttctgcattcgagacattgccacaaagagtcacctaaccagcttccaggcaatgtgcagaatgtactcttgtatgcggggttatatgttatgttgtaaggtaaatgtatattatgtagtcacaagtcacaaccatcaaccgtggatcctggacctgaacaggagaatgtgtttgcttgctatatatgaaaattaggtgggtatgttgaagttgaccctgagttcgcaagtttagctttcaactttgagactatctcgctgaaccaaatatgtaaaccagctggagagttgagccagaggacacgtgctagttagctgttcttctcgtgtctgtatttctcagactgctctcaaagtatatttaatgtatgacgattcagattagcttaaaaagttgtgttatccgag

SEQ ID NO: 15956 - DNA, 550 bp, Zea Mays
ccctgacaaggatgtgctccctcctgcagtgtgttgcagggtaactagcatcgagaaatcgatttccagagggaacaaggtgccggaggtgcagatcacgacgctgatcgagctgctgatgcggcacgcggtgaagctggagagcatacctgcggccggggactcctcttcgcagaagaacattcaggcgaagcgggtgcagaagtgcgtggagacgctggacgtgctcaaggtgtccaacgcgcggctgcaggcggtggtggtgacgaccaaatgggagacgttcgacgcggcggccaccacgacgaagtgggagctcttcgactgagatctgtgcagtgcagcagggcactgcagccaagaggatacgtgtatacgtgcatggtgttttatttccttgtctctcccggttttatttggtgcacattattgaattcgcgcgttgtaatcaatcatgtacggtgagacgacgacgctaggttagaacatgctataagggccgatcgaaacgaccccactgttaaccgtttgtaatcacagcaccactccc

SEQ ID NO: 15957 - DNA, 1437 bp, Zea Mays
  misc_feature (1436)..(1437): n is a, c, g, or t
gtcggagaacctcccggctccccgcagtccccctggcctcgcagatccgcggcctgcttcgttgctgccttgccagcaagcagccgcgctcatcctcgcggacgccagcggcggggcagccccctctcctgtgatccactccggcgcccgtggccgcggttgctccccgccaggtctcagggagcgacctaccccaaggtggggagttcgttccttttccagtaacgaggagggcaaactcatattccatcatgatggaagaggacatggaaaatggaaggtcgtatcaagaaagaccaaggactttttcaacagtacgaagcaagtcatctatcccgctggccttacgtttgttgatgaggataaatccccgtgccttgattattctttctcttttggtattcagtggtgtgctatatgtgggagccagtacatcaccaattgtggtctttgtgttctgtatatgtactctcagtctattcttctctctctaccttacaaagtgggttcttgctaaggacgaaggaccaccagaaatgtctgagatatctgatgccataagagatggtgctgaagggttttttaagacacaatatggaactatttctaaaatggcatttattctggcctttgtcatccttggcatttatctctttcgcactactaccccacagcaggaggcgtctggcttgggaagggcaacactagcctatattacagttgcttcttttcttcttggagcattatgttctggaatagctggctttgttggaatgtgggtgtctgtgcgtgcaaatgtacgagtttcaagtgctgctcggcgctctgcaagggaagcattgcagattgctgtccgtgctggtggtttctcagccatcgtagttgtttgcatggctgtatttggcgtggcaatattgtactcaacattttatgtttggcttggagtagattcacctgggtcaatgaaggttactgacttgcctcttctccttgtgggatatggttttggtgcctcttttgttgccctttttgctcagttgggtggtggaatatacaccaaagctgctgatgttggagctgatctggtcggaaaagttgagcagggaatacccgaagatgatcctcgtaacccagctgtcattgctgacttggttggtgacaatgttggagattgtgctgcccgaggcgctgatctttttgagagcatagcagcagaaattatcagtgcaatgatacttggaggaactatggcacaacgctgtaaaattgaagatccctctggctttattttgtttcctcttgtcgtccattcatttgatttggtggtgtcatcagttggaattctctcaatcagaggaacacgtgactctggactcatttctcctatcgaagatcccatggcaattatgcaaaaaggctactctgttactattatnn

SEQ ID NO: 15958 - DNA, 944 bp, Zea Mays
gaatttataagctggaagaaactgaaatgagaaccaaactctatattaagacctcaatagttacagtgtcaatgatggctggttatttgtggtatgaatacatttataagctggataagattacttacaacaagttgcatccatatacatcctggatccccataactgtctacatatgtctacgcaacttcactcaagaattcaggggcttctccctcacactatttgcctggcttggaaagattacactagaaacatacatatctcagttccatatctggctcagatcaagtgtgcccaatggccaaccaaaatggctattgtcaataatcccaaattatccactgctcaatttcatgctgactactgctatatatgttgcggtttcccataggctcttcgaattgactaataccttgaagatggtatttgtaccaaatcgtgacaacaagcgcctctcatacaattttgtggcaggaacagccatttctgctgccctgtactttgtatcgtttgttctaattggcattgcaggatactaggaagtctagttattgcctttttctttgttcgattagttacaacaaggcctgatctactgatcaaatttaaggcgacacagcacgcagccacgcactgctaaggaacctgcaatttcattcactggagtcaggttttatctgggtttcatggtgaagaaaaaaaattgctgtgcaaggcagaagatctcgaagagtgtaacatatgagtgaaccccaatcccaagaggggatatgataaaaatatctctgtataggcgttggaacacataccgacttaccgagtggtcacgtcgtctgtgaaaatcagattttgttccttgttttgtttaaaagcttgaaatagacagaattgttccttttttttgtttaaagcgtaaaatagacataatggtctcatgcgtt

SEQ ID NO: 15959 - DNA, 4498 bp, Zea Mays
cctggtagtccgcgtgaattacggcatctgccatctcgacctgatgggcctcgattggcggctggcgttcccgtgaatcctgcggtgggccaagggtagaagcggtaactcgctgggccagcacctgaagataaatcttgtgaaatgatgccaaatgcggtcactaactctactaaagatgtcttggaggctgatgacacaactttcaataatgaatttctgatcaagttagatcagctcggtgatgatcctgttatttcccttggaaacatgcttgttgaacttatccagcacgaggattcttgttctggggattcaaatggcccgaccagtacatataagctgctcctactgaaggaaagcatttccaaggagattgaaaagactgaactcgagattgattcattggaaggcgaacttaaatctgtgaatactgaggctgcaactactcttgaaggttctcccacaggggtgacacatacagaaaatctttcaccctctagtgggacatccaaggttcctggaagtgtggagatctgtgatacatctgatatgataaaagaaccaggggagctcattggttctcctaaggtacctgtggtgcagtatgatgatgtcaaaagtgctgatatgatggaaattgaaacagctccagttcataatgcaaaaacagttccttcagaagctggtgctatatctcctgtagtcgctgagggtaaggcctgtgcagctgctgatcttagctcattgaaagcttctgaagaagctgggtctcaaaatgatattgacaatggcaggctggaaacttcttcacgccaagctaatgctgattccatgaaaatagaaattagtgatgacctaccagtgaagaaatggacataccatgatcataagtctgatttgctcagttctgtcacatctgcaaatagtgctatagccaaagaaattaatgaagtgctatttaaatcattgcctgctgatacacctcgccttgatttgtttgcatcaagtcatcttctgagccaaaggaagagcgatttgattgtcaaagaaaggcttggagtatgtaaaaccaggctgaggttgaaagagcagatgcttacaatgaagttcaaggcatattgtcacttgtggaaagatgtccaactattttctgcaaataaacagcgttcaaagtctaataagcgcactgatcagagcaaccgaacatcacaaattggatctcagaggcaacgctcctctaaccgctcgcgattaaccatgcctgctggtaatttaagtacattctcaactccagaaatgtcagatgttgcaatgaggttgttttcagagttcaaaattaagcggtgcagaaattacttgaaaatgcctgcactgattattgatgagaaagagaaggagtggttgaagcttatgaacaagaatggtctagttgaggatcctgttttagttgagaaggaacgggtgatgataaatccgtggactcaagaagaaaagaaaatttttatggagttgcttgctaaatttggcaaggatttctccaaaatcgccagtttcattacacataaatctactgcagactgtgtggagttctactataagcatcataaatcagatagcttccgagaagtgaagaaactattggaccttcgtcaacagcaacccaccagcaattttcttggagcgaaatctggacataaatggaatcctgagtcaaatgctgcttctcttgatatgcttggggtagcatcagtagtagcagcccatggccttgaatatgcaaaacaagtggagaaaatttctgcgaaatccctcatccggactgcatatgggcccaatgtgacttccgtggctaataaatcttctgataaggagtgcattgaccatgtgcctttgcacgagagagaatctgtagcagctgatgtactagcaggcatatgtggcactctctctcctgatggaatgggctcatgcattactagttctgctgatcctggacagaagattagcatgaaaagagtggagcatgtcttgtcccaagaaaatgacaaaaccgttgaggaggaagacacactctctgatcaagagtgtgaagttgacccagttgattggaatgacgacgagaagtcaattttcattgaggctatgaataactacggaaaggattttgctcggatctcgtcatgtgtgaagagcaagtcatatgaacaatgcaaagtgttctttagtaaggctcggaaatcactcggtttggatttgatccatcaaggggcagccgatgttagtatgccagctagtgataccaatggagggaagagtgatactgatgaggcctgcgctgtggaaatggattcagctatctgtagcacacagtcatgttcaaagattgcgatggatgtttgtcctactgaaggagccattggagggcctaactctgttataatctctaagcaggcagaagcatatatatcaaatgggtgcaatgctgatgttaaaattgaggaagatgagaaggtagctgataaaaattgcagcattgttgatgctaagaggtccagtgatgctactcacgaagctggtcctattgacatcaattgcccaggaagcacagataagctgcaaggaactgatgatgtcgttgacctagtaaacatgcatagtaatagtggcatcagctcttcagctaagcatgcagtggccattcactcggaaatgagatccactttacattctgtagaggtccttcaaacagacaaaggtgaaggtactggtactgatttgtcctgggtggaagaatgttcacaccatgctctggataacacaccaatgaaaaatggaaattctggtgccccggctttcttggcttcagatagtggtatcaaggacaatgttcgcatctcaaacataactgctgcttccaccgttagtcctgcattcacttcaagttatcagcattctgtacctggagatatgcccctgccaaaaccaaagccacttgttaccccgcttaccccaaaggatttaatgcctgtgcagttcagttcagtgcttcctgaccccactgcaattcgtttcgagggcatagcctcaataactacgcccaacttcgaggacactggcaacagagtcagtggtgctctaggggctaaagagatgagcaagtacccagcttttagagacccatctggtaatcagcaaagcaccttgttttgtaatattgatggttatatgaatcatcgtctgacaactgaattaccatttttttctgaaagaactgcgagtggcactgtgaatacttcacaggcggatcggttgacccaaacaaaattgcagaatggcaggtccagcagcttgtgccttcaaaacaattccgatggcattcaatggcccagagaccacgaaggaggactggaaggctctttgaggccttgctctcgcaatacaagctccgagggtgatgagcaacaaaagcggcctggtgatgtcaagttgtttggacagattctcagccatcagtcaaccctgcagagttctggcttgtcttgcaatggtaacaagagcaagcctccctcaccaaagatcgacacatctgtgagatccatgaacaatccaatggaccgtgtggtttgttcttccaggcctggcaccactccacatctgggtctggaggaaagattggcaaggtgctatggtcatctggatggtagcacggcacagcccgagccactgctcgtgatggcaaagcgccagcggtccttggccggcgtacagttttactcggctaagaacggcacgcttggtgtgttaccagattaccaacaaccttcgacgcagccacagcaatcagatcccaagcgtgtggaaaggttgtctgatccgcagaagaggaacgtgctggaactcatctcgggtttccagcagcccggcagagtcgcccgtttcgggggtgctggcatcctcgtaagcggcaacgtctcggaccctgtggctgctgctctcaaggctcagtatggtcccggttctaagattatgggcagcgacgtggatccttggacggacataggaagcaggtagcgccgtagcagctctactgcttctgttgctccttgtaccatatatttagttttggtgtaacttgaatgaaatcatcagaatatgagatgtggggggtggggagtgaatggctttcctgcccatactatctgtaggcttttggccagtagcagtcgggtttcgctgtttactggcattaacatttttactctttcttctgcagctccatacccttttggtatagcttgacatgccagcagtggcacagtgccgtaggttccctagaggtgaactagatgtttgtcagcatggtttgattttgccagcctatgcagaaaacctcacttggtctttgtaatgtggtaatgccatgtatcagtatcctagtctgatggagttttggttgagacagttctcattgcccgctggttcatcttctgtttct

SEQ ID NO: 15960 - DNA, 1031 bp, Zea Mays
aatgcagcccaggagtggagaaggagggcgtggcactggtacccgattccggttccgggtaggggaggaaggtaagcgaagaagcatccggactctctcgctcgagggtagggcagggcagggcagggcaggcggcgatccgaatccaatcgccggagggaggaagccaccggtggccgcagtgagggcggcggaggtagaggcaaagggatgacgcgcgggaagcagaagatcgacgcgcagcggcgtaacgcggagcgaaaccagaaatccaaggggtctcagctcgaggcccgcgccgtcggcctcaagatcgtctgctccatctgcaaggtacaattggcaaatgaaaaacagctgaccgatcactatggatcaaagcatccaaaggagaaacctccgagcacatcgagcaccgaataaccatggctggtcgtgacgcagaaatatagatcctgcttggctgtgtgttcatttcctcttgtttcaggtattgtgttgtcgtgctgccaatgtgtctccaaactgtatgtggtcaccatggcattgggatgatgcgaaaaaattatgagcgtatccaatgtttgtgtggcttacaagatggtttgtgcccgtgcgttcgctccctaaacggcttcgcccgtgccgcttgaatggtgccgtgcttccgaatgaatgaaatgaaatgacgccccgtttggatcactagaattgaattctattctaataatagtaatttaggcatatatcaaattaagctaattcacttttatacaaacgccccgtgaaggaaattggccggtcgatcccaaacaaggaaggctcctgctcctctgactcggatgttatgccattagccggatgtaattttcttcttaatcctcgaaaatcctagaggtaatttaaattttcaaactagcctccttatataaatgtctcttagttttgtactccttgcgctctaaattaactgcacgtctcgcataacatactagcccttatataatattaatgtttaccaaataaacatt

SEQ ID NO: 15961 - DNA, 169 bp, Zea Mays
cttaccagagtgggctggccacggacgagctatccacagtggcttagagacccgagttgggggaaaatggtgtcgcggcggctctgggtgaaattgggggtggagattggggctacacggccgttaggaactgtagtttcatcatgcacactcaatttgagaggagggg

SEQ ID NO: 15962 - DNA, 1390 bp, Zea Mays
ctggcggcggagagtaagaaactcgcgatgaccggtgaccaggacacttgcagatccatcattcccacataaaatgtctttggagtttatagctaccattgcgtcatctatttggtgtgaaatgaatattcgcaaagagaggtttaaacaagaatgggatttggtgattgttaatgctttgactgcagcttgttgcaacttgatggttcttggacttttagcaccatgccgttcatatgcgagtacatctcgatttgacttccaaaatgcaattgagaaacttccgaacaacatatttgagaagagctatcctttgagagagtttgatctagcaaaacgaatcagtgcattcttttataaagctgctgagcttagtctggtcgggtttgtagctggctctgtgcaagggggtatgtcaatagtcttgtccgcaagaaaagaaaggaggttatcggtgactattccctctatcagcaccaatgctcttggttatggagctttcctaggactctatgctaacttgcgttatcaattgctatgtggagtagaccaatatatggtcaagcgcttcgatgttttgggtgtggcaatcttcttcagcacagcagcaagactgatgaatattcagattggtgaggcatcaaggaggacttggcttggcgaggaagctgatccacagtactcagatcgactgttgagagcatacaagagacctgtggaggttgacgcggaccaatcaaggtggtttatatccaaggatgcaattgtatctggccttggtcttctaggtatcaagcagggtggacctgaggcaacattttctaagtctcgtcgaaagagagtcatccgcaaaaaggtcacttcaggttgagtttagtggatttggatagcaatgctggaacaattttgcttctgttccactatgccagagggaggtctacccaaattatggtaaatgagaaaaaggtatcaagtcaaccagcacgtggtctgtcggcgaagggatcaaagggtttgttactgggaagggttagttaaaaggtgccaattactattttataatttaattgcagttatttaaggtaagaaaatatgttgttttcttgtattgctgtgaggcaaatagacacgtttagtggtagttttgtaagattgttaatgtactgactttacatgagaaatggattctgcatttttatatagatcaagtagctgccacatgcttgtatctatcttttgaggtcaattaggtcagggtcctgctttgttgctggttaggactacgcttttataaaaacttattttaagtacgaaggccgatctctgtggaagtttcatcgtgctatttccaagactactacattttctaaagaggaatgaacctcaatgg

SEQ ID NO: 15963 - DNA, 1333 bp, Zea Mays
tgtatgtatccgggtcggatctgagcaaagtgtatacacattggtcactggaggattgctgccgttggtaaggatgagcaaaggcccagttccgtttgccaacatcgggaagagagcaaaagatcttctgtacaaggactacaactttgaccaaaagttttctttgtcgacgtctagcggctctggtttgaatctcacagccactggtgtaaagatcaacgaagacttcattggtgatatacggacacaacataaaagcagtagaactactattgatgtcaccgttgatagtgattctaaagtgtcaaccacagtcactgttgatgaagcactaactggtttgaagacttcattcgccttcaaggttcccgatcacaagtctgggaagcttgatctgcaatatgcgcacaatcgtttttcattgaactcgaccattggtttgacatcagcacctttggttgaactggctgcaactgtcggcacaagtgaacttagcattggtgctgaggttgggtttgacagtacttcagctgctgttactaagtacaactcaggaattggatacaacaagtccgatttctcagcttccttactactggctgataaaggggagactttgaaggcatcttacgttcatttgttcaatccgaccaatggagctacagttgcagccgaggtaacacacaagctgaagaccagagagaactatttcacagttgggagctcccatgcccttgatccttcaacattgctaaagatgagattcagcaactccgggaaggtcggtcttctctgtcagcatgagtggaggccgaaatctcttgttactctttcagctgagtatgatctgaaggtggtaagtgcgccttcaagaatcggcatggccatatccctcaagccttgagctgggttaagtcaccttctataaaacagtacaagcataccgtctcccaagaacacaagctttggagcgatacctagaacaaccctccattttagccttttttattttgtaagagtcttttgcaaaggagtattgtcacttgtcagggagttagacttgttttgtggaacgtttccattagagccaactccacacgaaggattgaaaatacagaggtttgcattagaacagaagctccactgcgatattttcccatgttttgctagtcgacgcaaaaaatgattttttggaggtgatttgaacacctaacatcttgagtcgatggtggttttaacagctctggaaatcaacaagggccatttgtacccagcaacagcagaattagttctggaaattggttattttgatgagttttgtttgtgagttggg

SEQ ID NO: 15964 - DNA, 5241 bp, Zea Mays
cagagaccagacccgcgagctcaccgctcagactttaccgccaagccttttgttcaccgttactccgttcaccccgcgaggcgtgactcgtgagctctccgtgtcttggcgatgactgggcgaccgacgatgcagccgtaggccaggggccccaggtcttcctctggtccttctccggcgaagagcaccggtcaggtcctgacacatctattttgactggataacaacgaaggtttctctgatattctgatgttgtagcagttactgtggacgatgttcgtttgtgtttatcattttcttggtcttgttcggggcaacaacgacattgggaataagtgtacggcagacaaacagtaacatgggaaggaaaggctcagaaatgtcaccaagtaaaaggtatcccttgaggtctccacatagtagtggtagagttcttcgctctgccttagccaatgataataaggacagtgagcctctgaatgctgctgctgctacccaagccgctgtgaaaaaaagaagtggcagtcagttggatagtcctaatagcagtgtcaggttgtttcactctacatcaaaaaataagaacgaggcatgtagcgggcctctaaatgacaggatccctgataagccagctgcaaataaaagaaaacgtgccagtccttcacaggtgggaagttccagcaacagtgtcagggtgcttcgctctgcaataaaaaataaagatgaggcatgcagtaaatctctaagtgacaggaccgctggtgagccagctgcaaataaaagaaaaaacgtcaatcgctcaaagacggggagtctgagctgtggtgtcagggtgcttctatctgcttcaaaagctaaggatgagacatctaccaagcctttaaatgatagtgctgctgttgaaccagcttcaggtaaaaggaaaggcaccagtccgtcaaaggtgggaagtgccagcaatagtgtcagggtgcttcgatctacttcaaaatataagaatgagacatgtactgagcctttaaatgatagtggtgctgttgaaccagctgcaaataaaaggaaaggtgtcagtcgttcaaagaagagaagtctcaatagcagtgtcagggtgcttcgctctgcctcaaataataagattgaggtatctattaagcctctaggtaatagtactgctggccaaccagctgcgaaaagaagaaaaagcggcagttccttcgaggcaggaagccctgtgagcagtgccagggtgcttcgctctacctcagaaaggaagaatgaggcatctaagcctttaaatgaaagtactgctgctcaaccagctgcgaggaaaaaaaaagctggggtaatttcaaagaccgacaatccaaagattggtctcagggttcttcgctctgcctcaggaaagaagaatgaagcatgtattgggcatgtaaatgatagtacttctgctgaaccaactgtgacaaaaagaaaccgcaagccttcaatggatcgcagtcccaagaaggactacttaaaaatttgtcaaagagttagatatattttgaatcgaatgaactatcaacaaacctttattcaagcttatgcaagtgaaggttggaaaggccaaagtttggaaaaaataagacctgaaaaggagcttgaacgagccaaggcagaaatcctccaatgcaagttaagaatccgtgaagcttttcgaaatatggactctcttttatccaaggggaagcttgaagaatctttgtttgattccgcaggagaaatttcaagcgaagatatattttgtgctgtatgtggctcaaaggatgttactttacaaaatgacatcattctttgtgatggagcctgtgacagaggattccaccagaactgtttgaaccctcctttgctaactgaagatatacctccgggggatcaaagatggctttgccctgcatgtgtctgcaaagcagactctatagatgcactaaatgaacttcaaggaagcaagctctccattcatgactcatgggagaaagttttccctgaggcagcttcaattgccaacggttctaaacaagttgatacttctgatctgctgccagatcatataaagcacagtgacaaccctgcattggttgaagggctgatggtgaatgaagtcaggctttctgcagaggatgacagcaaagcggatgaccttggcttgccttcggaggactcaggggatggtgacttcgatccgtcaggtccagattctagtgaagaccaaaaagatggattgaactcagaagagtcagatttcacatctgactctgatgatttttgtgctgagattgccaaatcttgtggccaggatgaagtctcggcatctccattatcaaatgtgataaaccatacttatagaatgaaactcagggccagcaacaaccgctctaatgaagaaaaccatgatcatgtatttatggacatggagctagggcaagacatggtgctaccagtttcaagcaggcggcaggtggaacggttggattacaaaaaactatatgatgaggcatatgggaaagaatcatctaattcaagtgatgacaaagagtggtctggaaaagaactattagaaggcagtgaaacagattcacttagtgagcgacctcatcctgtaaaacggtgctctagaagagcacaagcagagcagcagaataatgaacatacaccacagagggagcgccttcatggttctgaaagtgagcagaaaactggaattcttcgatccaatggcagcagtagcacaggacggaagtttggtcctgtagctacccagaaattgaaggtacattttgagaaagatccatatcctagccgtgaaacgaaagagaatatatcagaagaactaggcttgacatttaatcaggtctccagatggttctctagcactcgtcactattcaagggttgcttctgccagaaaagaaatgcatcctgacggccatactagcgagaataatgataccacgactgtagatagcatgcaagcaaggcaacccaacactgtggtgatggaaaagttgactgggaatagaaatgacattgtttctgagaaaccgatggtgcagaacaatcttaaccaaggggtggcagaaaagttgactagggatagaaatgacattgttcctgagaaacaggtggtgcagagcaatcttaaccaatgtaataatgaagatatcccgctttctggaacagaaattgagatggagtcttacgaacaagaatcatctgaaagcagtgatgaagagtggtccacacttagcacaccacgaaaaacaaaattacaaggcaacgaaaaagtatcacttactgaatcactacgttctgcaaaacggtgttctagaagagcaccagctagggagcagaataatgaacatactcagagtgagcagcttcatggttctgcaagtgagcagcaagctagagagcaacttcatggttctgtaagtaaacagcaaactgaagttcttcgctccaatgtcagcagtggcgatgcctcaaaatgtcattttggccctatagttactcagaagctgaaggaacattttgaaaaagatccatatccttgccgtgcaacaaaagagggtctggcacaagagctaggactgacatttaatcagatcagtaagtggttctctgccacccatcattattcaagagatgctgttgccaagaaccaaaaatacccaggagaaaatactactgagaataatagtagcacaatctttgatggtatacaagtaatagaacccaattttggtttgatagataaaccagatgcagatacaaatgacatgatttctgaaaagttgatggtacaaattaatcttaacgaaggcattgaagaggatatcccaccgagccaatatactaccaggtgtgaagagaaattaactatgactcaagctgccatctcaagggaagctggacctccaggttatggtcctggagaaaactttcttcaggtcagttcaaggattactagctgtgagcagagtgtgataatggctcctagcgctatcgcaagaggagttggtccaccaggatatacgcctggagaacaccagggcaatggggctccatggaatacaagctatgagcgaagaccgtttacgagtcctacgactagctcaagagaagtcggacctccaggatatgggcctgaagaaaaccaaggcagtggcatttcctgtaatacaagcagagagcaaatattgtttatgagccctacaaccatctcgagagaacttggtccaccaggatatttgcccagagaaaaccagcgcagtgacacttcatggaatacaagctgtgagtcgggactatttatgagtcctgcgaccacctcaatagaacatggtccaccaggatatgggcctggagaaaaccaggagaatgacagtacaagctgcgagttgagaatgtttacaagtcctacaatcgtctccagagaagttggcccaccaggataccagcagggagtgtttatgagtcctaaaaccatctcaagagaagtctgtcctccaggatttgggtctggagagaaccagggcaacgacactacatggtacaaacagagcgcgtttacaagtcctacaaccatctcgagagaagtcggtccgccagggtatggacaggaagatcagggcaatggtggttcttggaacacgagttgtgagcagggagtgtttacgagtcctactagaggcatctcaagagaagtcggtccgccaggatacgggcccggggaaagtcagggcaataccacttcgtggatttcgacctgccagcagagaatgcttgcaggaatccagagaactggtggctcaaggagtatggacttggaagcctttccaccgggatacggacctggtggtgcttcagggagtgtcataagcccccaagctcggtctgcagagaatgtagaattttcggacgaggctagaaaaaaggctatacagcgggagctgagacggcggcagaagttcaggtgaagacaatatatccagtcttgatggctgaatgagtgggcgaccttagttgccatcaagcaaaacccttgttgtatcagctgcttatcttccttttacagacttgcttggtttgtcaaggatttcttatgtgaaccctcttgaacctgaagtattcaatgcgctgtgaatttgtgcagttgcctttcttctgcatgatagtacatgttatctgggttgcacggcat

SEQ ID NO: 15965 - DNA, 1095 bp, Zea Mays
cgggtgagcctggcccgtgctcgcctggtaaaagtgctagggttcttctcgcccatcgcagccgccgccgcggctctcgcctcttgactcgctctcgcctctcggagcaaaagctgtgtccgctcctcctggtgatcccggagccagtcctcgccgcaccgcgctgtgtctgctcctcctggtgatcccgcaccgtgctgtgtccgctccatcttcctccgccgccacactcagcgccggtgcgagggcatgtctacctacccgaggacctacgatctcatccatgcggactcggtgttcaccctgtacaggaacagggagaagatcctcctggttgtcaagacgtattggactacccatgaggccatgaccaagatcagtagcaggactgtcaagtaaaattctcaatgttgataagaatttttcatgtttggagttgtaccaccgtttctagctccttgaactagtgatctcttgacggtttgtgcttgctgttctttctggacagtacttgctcggataggaaatttaacatgtggggggaaggaagggtaggtagtaagacccctggcccctgcaaagttttcttcaattccgaattgtgtccaaatggtaaatagaagtcattgttgcgagtcaccccgaccccggataagcataatcacaactggattcattctagcattacaattttgttctgtgtaatttcctttttttaaatcttattagcatgtgttgtcccagatctattaatgatatgaaagaacactgcttctggtcccaaattatggagagaaagggtccaacagtcgagacgcctgaatggtgccaggaatgaattggtcatttttactgtagcccagaggcttcgcgcatgggctatgctacagaggcaggactcatgcaggactcagtttttttcccgggagcatagttggcggtctagtcttcggattgatagccactagtgtgtgtttttagattctgttgggctgtgtgctcctatgggcagaggccggaagtgactttcaaggaattgtatcatctcgatgtactgttcttgatgaataaaaatccttccctttcaaaaaaaga

SEQ ID NO: 15966 - DNA, 1270 bp, Zea Mays
ctgcaagacgcagtcgcaatgatggctaggaactacaacgacggttgagaccagcaagaagacactgatcctccatggtaccaagactagtgctgtgttgaactctgtgctgtcagatatttaccacctaaagcgtgataatgctgtgaaatataccaagaagaatgacaacattaggccttttgaaagtggtggagaatcttctctggagtttttctctcttaaggcagactgtagccttatatatggttctcattcaaagaagaggcccaacaatctgattttgggtagaacgtatgaccaccacatatatgaccttgttgaagtaggagttgagaactacaagtcaatggaatcttatgtttatgataagaagctagcaccattacttggatcgaagcctttctttgctttcataggggaacactttgagagtgctgaagagctgaaacatttgaaagaagtgctgcttgatcttttcagaggagaggtcgtagagaatctgaaccttgctggtgtggatcggatctatgtgtgcactgcaatctctcccactaccgtctacatgatgcactgtgctctccgtctaaaaaggtcaggtacatctattcctaggatggaactggtcgaagttggaccttcgatggatctggttgtaaggaggcacagacttccagctgaaagtttaaagaaagaagctatgaagaccgctgaacatgctaagaagatgaaaaacgtcactaaggatccagtgcagggcaagctgggcaaggtctacatgccagaccagcaggttggaaagttgaccttatcaaacgacataaagggactaaagagggagcgccgtgaagccaagaaaaaccaggactcaaagaagcaaaaggtcaaccccgagtaaagatcactgaagtttacctttgcattggatacaggtcaggttaagaaaccctggtttgtatctgttcccatctgctgtgttatccaattagaagttgctcgttgtcagattgtgttaaatagtttagggccatcttgttaggctaaagacatgtgtacgactttcacaacaatattgcgtaccaattcatgttaagacgtaagcatggaaaaatttgggagtgttatcctatcaaatatcttttgatgtctcaagcttggataaatgaggagggttacgataggcttggcgagccaacgttaaaggtagcaattctggagattgaaacataaaatacctaaagatttagccttgattaggaatgcatgaaaa

SEQ ID NO: 15967 - DNA, 3612 bp, Zea Mays
caggaactgtctacatctcaggttcgctccggacactttgctgctggttttgctgatggttctgtcaggatatatgatgttcgctctcctgataggttcgtctatgtggccaggccacatgccccaagaacagaaaaggttgtgagcataggatttcaacctgggtttgatccatacaagattgtaagtgcatctcaagctggagacatccagtttcttgatgttagaagggcagcagaaccctacctgactattgaggcacacaggggttcacttacagcattagtggttcatcgttatgccccagttgttgctagtggctcagccaagcaaatgattaaagtgtttagtcttggtggggagcagttgacgataattgggtacctgccatcttttatgggccaaagaataggcagtgtaaattgcctttcttttcacccatacaagtcactcctggctgctggtgctggtgacaatgctctggtctctatctatgctgaggaaaattacaagtaagatgaggccttatatctcatgacaatgcagccacagtgcaatcggtaggccttacattttttcggccaagtgatgctccacagcatggttcagcttcaagatccaagatgacggtaagccttgtcacggagatgtcgacggtaccgtggctctcggtgcatattggctgttggacggcgtgtgcggtttgtaagatacagtcaagattcattagcctccttgcagaaggtttgtgaaccctaacctgatcctgtcattgaactcggaggctccccccagcccacccaaataattagccatacctaggctataaccaaaatgtaaatagccagcgcattcgggttgtactttgccagcattcaagtgtaaaaaggtctgaagatggttgatgtgataaacagggcttggtaggggctgctgcctgggcaagtggggttgtgcatatgggcccaggtagtagaatggttgcagaagtctgcccacagatgttgaagagaaaagtgtatttgtccagctaaaatatggcgttagatgggggtagtattggcctgcatgaatgaatgaatgaatgttgagtcatttgcattgtaattgtaacccttggatagatgactgcccgcttgtatatatgagtcgtgtttgtacagttgtctgctttctgtccccaagttgtaatccgtccaatgatgtgttttatgctggtgcattccggtagagatgaaccggaggtgctggaacatataggtggtcttgtggtctgtaactgtaatggatatgtgaatcttaatatgagtaattgattaccgccgcgtcctggacatggacaatacctgcatgcaaatgatcagtagctgatttacggcatactgtatgcagacatgcagtagctggtctggtgcattattttacagcgacggtgtctagggtgaggaattttctttgggaaatcaaggatcaggtccatattgtcatctctagtccttgcgagaggccctcaccggcggcggcgagtcaccgccttctgaggaagaagccactgtcagacacaggcgagggagtaaggattccccaaccccaaccccaaccccaaccccccaagaagcaccgcacagaaccctctgctcctctcaccctcacgctccaaggcggcggcgccatgcacggcggaggcgcggcctcgcccgatgccgccatatgcatctccccagaagctgggcccatcgtcggggtcgcccccgccgggatcagggtcgaaaactgctacgtgttcaagagccggctgcaggagtatgctcagagggttggcattccaaccccggagtaccacacgctgaaagaaggcccatctcatgaacctgtcttcaagtccacagtgttcgttaataataccaagtatgagtcgctgcctgggttcttcagccggaaggctgcagaacagtctgccgcggaagttgcgctcatggagatagccatgtccgctccggtgaccgaaattaggaacatgccagcagttcaagaaactggcctgtgcaagaatctccttcaggagtatgctcagaagatgaattacgccattccatcttatatttgcactaaacaagcttcgggtgtagctcctttcgtatgcagtgttgagattggtggcatcctatacattggtgctgcagctaggacaaagaaggaggcagagataaaagctgcccgaactgctcttcttgcaatccaaagtcaatcagaaggtggtgcaaatggtgccaaaaagtacattgttgttcctgggcaaaggccagataaggagacgaataaaaatccaactgaaacccccataccacttagagtcaagaagcgtggttccaggaagaaatggaacaagaggaaattcaggaggatggctgaccgaattgttgatgctggaaaggatgcagaggggcttggaacgcttctacatgatgactatgaggaagctagaagaataggatatgagttacctacagatactgctatggttcaatttaacaaggaagttgtaatgacacaacctggtgaaggagataggatagtacaattggagccacccagagatcctgcagaggtccaatataacaaggaagctagaagtgttgaacaggacccacccagagatcctgcagaggtccaacataacaaggaagctagaagtgttgaacaggacccacccagagatcctgcagaggtccaacataacaaggaagctagaactgtcgaacaggacccacccagcaacacagaagtgtggaagcctgacaataaggctacaactacagagcaggagtcggtgagcgctttcatagcattgagatctaatggggattctacagatgtggaggcggcaccaggcgataccttgatgatgcagggccaggagtcggaagccacaatgcaagaagcatctcacgctggtgaacaggcccagcctaactaggaacctgaaagcaaaaaaaacttcctgaacaggaagaccgaaatgtaggtcgaatgcatgcattgctgtaggagaataagtccactggaggtacatgagcctaaaataatttgtggagtggtggttgactccagtggtaagtgccttccagagtgtaccggcatgcccaaaactgaaatttccggtttagatagaattgggggcgcggaagagggtgccatgtgtgtgtttgtgtgtgttgcctgtggatggaggaattgatgggagtatgtgaactgatgtagctagtctatgtttgttaccattgagggcttgttcggttagctctcaatccatgtggattgagcgggattggatgggtttgaatcccaaacagctcaaacttcttcacaattttttccaatcccatccaatccatgtgtattgggaataaccgaacaagccctgatgatgattgtgtttggccatgttttcactgtcatattggttggcgaccgctacttgcatgcacaatgcattcgaggtagccggtccaagcctccatttggtcactggatgattgcttaaatgatgtttgagttctcttgtgttaaattattaatgcacaaggaaaataaaaacaattgcaaactgga

SEQ ID NO: 15968 - DNA, 1342 bp, Zea Mays
gggagaaaccctcctcttgctcggccgtgggcagaggcccccggacggcattcctgcacatcgacctcattctgcaatcccctcatctacgtgtgaacagtaccacaccgtctccgccagcagctccaatcccccaccgatctagcaactataacattaatacattttcctataaacttggtcaatgttagacaaatctatgtcatatcgaatgtttgaatgataattatgagtattaaatatatttcaactataaaactaattatacagatattcagacatttgatgtgacatgaactaaactttagtcaagggaaccaaacacaaagattaaagtcgaatctgcataagtgcatgagatttagaatactggatctaacgaatagcagcaagtgaaaaggccaccgaaatgtaatccccggcctacaagtccctagcaaacaagccgtaccttcccagacctaccctcacggagtcaaccagactaagccaaggcagaccgaaatcaagggacgctgcgccccaagggcgcgcgcgcacggcgcacatcttgtagggtttgcggaggggagagaaggttgcgtaccgaatccagcgatgaggcaggaggccgcgactacgggctccttaacgacaaagatcttgagcttctccatcaccgccatggctgccgcctctgcttccactactccgcttcgccttcgcgtaaccctcgcccgctgccgtcgctggagacgagagaggccagagggatacaagccagtgctctcctccgatctgtggacgtgggcccgtgtcttgagcggagagacttcgacgcccagcccgtctacgaccgtggtccagtgggccacgatccattttgtttgttgggctgaggcccgtaccgataatcccattaaatgatatggtcacggcatattcagagctgcagactggaatattcctcgcgcgcgcgcgaataatctacccggacgagcgaatctactgtcggtcgcagcgccgttttctcgctctcgcgctcgccttacctgggatgggatggcaccgcacgcacacgaccatccttctctcctctcttcacctaccgattctgcgcgcatagaagaggcactccttcatcgtcagctgcctttcgcatgtcggcatgcatcttgcccgacaccacgctggcccgtggggtagtcgccgcacgccgagcaccggcaggctgcgcagccgtcgaccatgattttgccaaggtacctcagcaggagctaacaatcattttgtgaacgatgtgatttgagttttcacttgaccaacctgctgctccatcctaggatcctgcatgcagcgtgat

SEQ ID NO: 15969 - DNA, 1750 bp, Zea Mays
ggaattctcaccgcctccccgtgcggggtgagaggcggtgggtcgtggttgcggtcggcgcgcgaggagggtcgacggcctcgcgccattgggtacgaaaccggccgagactgtgagcggtgggcggccgctgcctggagacagctcaaggcaggttgatccaggttcgagcgcctcgggttgctggaggatttgcgggggggtgcgtgtttatgggcggctagatcggtgattcttcagctgctctcggtgtgatggcagctgactctagcatggggtttcaccaggggatcaccgcctcgctgtacaaccatcacatgctctcgttccagtccaacagcgacgtcggcatcagcggcgacgccaccggtgccatggtcatggccccggggagtgtgggtggcggcagtagcaacgccgggctgttcctctccgcaaacacaggggtcatgggcaacgcgccgggggtcgccccgtcaaggacctcgtcgggggatgcactccttggtaccgggacgcccaagtataagtacgtaactggtcctccttcggattggagtgaccgcgaggtggccatactgaaggaaggacttgtgagatatgctcgtgaaccgagtatcatgaggtacattaagatagcagctatgcttcctaacaggaccatcagggatgttgcgttgcgatgctggtggtctacaggtaaagagagaaggaagaaacctgatggattctatacaggaaaaaaaatgagagacatgaagccaatccaggacaaaatggttgcatctgtcccaatagctaattttcacatgacacctacaaccaatgtaacccctttttcgatatcaatgcaacatccaaatcaacaaagtcaggttcccaaagaagctcctattgtcgacagtgcaacccagcgtctcctggaggaaaataatcagttgcttaaccagatttctgcaaatattaaaacattcaagacagtggagaacacagatctttttctccgcacgagtaacaacatcaaaacaattttaagcagaatgagcgaaacgcatggtatcatgggtcaaatgcctccattgcctttatccataaatgaagaccatataaattcgcttattcaactgaacagactggttgcatcatatggtacgacaagcatttctcatcatacgaagcaagagccatgaagctagtttaccatacccagggggaaaaacgagacgaccagatggccggacctcctgcaatcctgtaaacgtgctgttgaggaaggcttacatgttgttatactgaccaagcaccagggaaaaatcactgttttccagataatgtttttgcagtgatcaccagagtatcagacactttatcctggactccgcaagtgactgtaaatatcggatgactggaggcattccatgttttgttttactgatcgttcgtgaatgcatttcttcttttcttgttttttattgttatcccagacagggttgcattgctcccaatatgtaactatgtacaatagccactgccctagactgctaggcgtagaacgactccattttctgactatttggacactggaacccaaacatgttgtccaggtgttctgcattcttttttatcttcacttcagaagctttggattagcacttctgatgcagcaatggttagctgtgccccaacatggacaacaacagtttattccttttgtttcgtttcaaattgtaagccattttagcattgtctc

SEQ ID NO: 15970 - DNA, 1621 bp, Zea Mays
cgacacacctattctggttttgccagtttgttttgctaaggtttggtctaaccgcataagggtggttggtatgggttcaaagctcgttggatgtggatcagccatcccaacacttagcgtttcaaatgatgacctttcgaagatagttgaaacatcagatgaatggattgcggctcgaactgggattcgtaacaggcgagttctttcaggagatgaaacattgcggggactctcgatacaagcagctcaaagggcacttgagatggccggagtaaaagctgaagatgtcgacctcgttcttctttgtacatctactccagatgatctgtttggaggtgctgctcaggtgctgtccgaagtggggtgcacaaaagcttttggatttgatattacagctgcttgtagtgggtttttagtcggcttaatcacagctactcgctttatcaaaggcggaggttttcagaatgtcttagtaattggtgcagatgctctttcaaaatacgtggattggacagacagaggtacatgcattctttttggtgatgctgctggtgctgtgttggtacaggcatgcagtgctgatgaagatggcatgcttggtttttgtgttcaaagtgatggcaatggacaaaagcacctaagtgccatagcggctaatgacgagtctatcttgtccaataccaatggtgttccaggatttccgccaaagaaggcaacctactcatgcattcaaatgaacggaaaggaagtttttcgctttgctgtccgatgcgtgccacagtccattgagaaggcactccaagaagctggtttgcctgcctccagtatcgactggttgttgttacatcaagctaatcagcgtattattgatgctgctgccagtagattagatatcccatccgacaaggttatttcaaatcttgctaattacggcaataccagtgcggcatccatcccattagcattggatgaggctgttcgcagtggcaaggtgaagactggtgatattattgccgcatcaggttttggcgctggacttacctggggttcagctattgtcaaatggggctaattattctacgtgagccataacaacatcaatgagatcttcataggccttggggacctacatctatttggtctctccccccttccacccattttctgtgcaacatttttctatcgcatgtgtcggtcttccttgcacatgaaaatctagtgccattttaccgtattcctttggctcattacacaactgagagtagattggtggatgaaaatggttgaattttgcatcgaggatgattgtggtggtactaaagatgagattacactgtaaagttaatgagcctttttgtcagggaattttactgaataagcatgtacaaggagaggtgggccgtggacatatgctgtaggacaattcttagtaattttgttctgcttttattatacacctattgttagtatattttgttctattatgcacctaccgtgaaaaaaagtaaccttggtttgcgcgctgttagatgttttgtattttagctatctgatcgatcaggttggcacatgaaaaatggtattgcaagaatgtagttaacaaaaagtaaccatgtttttc

SEQ ID NO: 15971 - DNA, 2514 bp, Zea Mays
aggaactcaaaccggtcggactccacgacgagtcgacgacgcacacaaaaaaaaaacagcaggcgaggcgggatttagaagctgcgcagcgcgcatccctcccccaatcccgacccgacccgaccccgtccccgtcgccagatctcgcgccccctccccggggctcgatcggatcagcggcggccggtgatacggggacggggagatctcgccgaggtttgggccgggccgggccgggctggtgggagcaggggagccatggcgtcggcgcaggcgccgtcctccgccgccgcgccgtcgcgcaaggaccatctcgaggccgggaagaagcggctcgagcagttccgcaagaaaaaagcggcgaagaaggccaatgcagctggtgcagagcaggcaaaagtgcctgctcctgatgtagagccaaaccaagcgagcacgtcttcggtgccatgggctgtatatgagaatggcccagagagtgcttccagcggtgcagaattcctgtcaaatgctccggtcaatgtatatacttctgttggtgttagtagtgttagaccccagcaagatgctgttactgatggaggaagtaagttctatgggaacttaagcttctctgatcttgttaatggtcatcatgagaactggagaggcgatgaagcccgtaaaagggatgagcacagccctgacaaggatgtgcaatcaacatctaaattaagtgcctttgggaacagcagtttaactttaccttctactgacaacatgccaagttggggaagaatttctttatcaagtcaagtacatgataccaagcaatctagttcatattcatccagcaccctttttggaaagtctgaaaatgcttactctcaggactactccacaaagagtgatacctctagtcagttgagagatacctccaaagactcttcccaagtggagcaatctctgtatgccagcactcgggattatggcaatgccttcaatagttcaaggactattgttactgtagagcatgatacaaatgttggaataactcggacatctgcagattccgcacctggtgttaattttgaaagacaggatccttttctgtcatctggttatccaactacatacactcgttcaaggccatcgtttcttgattcaattggagtacaaagagtccctccaacaactcaagcctcatatagggagcctgcaaaggctaatcaactatcccacaattcgaattatcagagttcatttgtgaagcaatcaaatcaacaacccacttcaagtaatgctgcagatatttcttttgcatcagaaagtcaggaatatagtcatgaaaaggggtcatatggcagctccaaccatcctgatttctcacttcctaaagaagaaagaagtatacaacatggtaaacaaacattccaaaattttgcaactcatgggaaagatgacgattttgcaacattagagcagctcattgaagatttaacaaaagagaagttttccttacaacgatctcttcagaaatctcaagagctagcagaaactttggccacagataactctgcactaactgacaagttcaaccaacaggcacatgtaatcagccagttgacatctgacatggagagattgcaggaagaaattcaagctcaattgctggctctggagtctgtcaggaccgagtatgctaatgcacaactagaatgcagtgctgcagatgagagggcaaaagtacttgcagctgaagtcattctactagaagataaggctttgagactgagatcaagtgagctaaaacttgaaaaggaagttgaaggtttgcattctgagatttctgcttacaggcgcaaagtttctagtctagaaaaggagcgccagcatcttcaatccactgttgaagctcttcaagaagaaaagaagctcctatattctaaattgaggaacattcctgtgaatgagagggcaactactgtagagaaaccttcagttgataaaaaagatgcatcaaccgtgacagaagatttagatactggggaaatcagctcttcagagacactgaccagcactgttgacatattggaagacgctggaacatctgttttgcgttccaacattgtgtctgattttccttcctcggaacaggtctcatctagcattccagatgatcagcttagaatgattgacaacatcaattctttgatgtcagagttagcagtggagagagaagaactgctgcgagcactgagaattgagtcatccaactgctccaagctgaaggaattgaacaaggacctaacacaaaagctggaggttcagacacagaggcttgaactattgacttctcaaaggatggctaacgagaatgccctggcgaaaccaattgacacacgccccatcaacgaggcaacaatgtatgcggatgaaggagacgagaagataatgtaattccctggagtatggggcggcagctgtattggcaacgaaaagattaatcgcaaagaatatacccttttgtatcca

SEQ ID NO: 15972 - DNA, 687 bp, Zea Mays
aagaagattctgttatttgcttgacatagtccctagatttgtaatcgcggtcaagatatcttaggctgttacgttctatcagactgacattgaaccttatagttgtaatggtgcctacgattttctgtcatggtctagtgatgttttggttagcttatgttctgtcatgttgacatgcggaatcatgtaattttcttgtcgcggtaataaaatttgggcacaccatgtggtgggagaaaaggaagattgaaagagcaaatcaataaaccttggaagcaggtatgccctatgtgcagcgcagaagtatcaacctcgggtaacaaggagccatgactgctcctccgatggctatcttgggaacttggtgggaataactagcggcatcactgcagcatctgtattgtcgaaacaaaagcagaaaaaacggtctacatacatgcaaggagatcaggatataatcctcttgtcagtctaaagttctgcccttggttccctgctaactggattgattggccttgccgcttattatctcagttccctatgaacgccttatggctgttgtatgatccataaattatgctaattatattatattgttagtcattctttttactgatcgcatgatcatcttatatatttgcttgtcaactgattttagtttttttcttcttaattctaatcccttcg

SEQ ID NO: 15973 - DNA, 1879 bp, Zea Mays
gctagtagcctctgatatctggtctcagccaagcagtacaaatttcagacaatgcattgtttcaaactctcataaaaagcaagattctcatacgaatggttacattctcataaatgcaaatggaggtttgaatcaaatgagatttgggatatgtgacatggttgctgttgctaagatcctgaaggcaactctggttcttccttcactcgatcatacatcctactgggcagatgacagtgaatttaaggaccttttcaactggaggcacttcattgagtcactgaaagaagacattgatattgttgaaacacttccccctgaatacagtgacattgaacctttggctaaagctccggtatcttggtcgaaggtgcattattacagagatgaaatcctcccccttctgaagaaacacaaagtcatttactttacacatacagattctcgccttgctaacaatggccttcctagttacattcagaaattaagatgccgagttaattacagatctttgaagtattctcatacaattgaagatcttggtaataccctagtttcaagaatgcgtcaggaccgaagcccatatcttgctctccatctaaggtacgagaaggacatgctagcttttactggttgcagccataacttgacatcagaagaagaggaggaactgcgtaaaatgcggtatgaagtcagtcactggaaagagaaagaaatcaatgctactgagagaagaagccttggtggctgtcctttgacgccaagggaaacttcaattttactcaaaggactgggtttcactcgaagcaccagaatttacttggttgctggtgaagcttttggcaatggaagcatgaatgctctgaaggacgattttcccaatatttattctcattctacgctggcaacagaagaggaacttgcacccttcaaaaaccatcagaatatgcttgctggtcttgattacatcgtggctcttcagagtgatgtctttatttacacttatgatggaaatatggcaaaagctgtacaaggacatcgtcgttttgagaacttcagaaagactgttaatccagacaggatgaattttgtgaacctgatagatgaattcgatggaggaagagtgccttgggatatattcagctcagaagtgaaaagattacacaaagatagaataggtgctccatattttagggagcctggcgaattcccaaagctagaagagtctttctttgcaaatcccttgcctggctgtatatgtgagcaacatagtgaagaatgaagatgcaggtgtgctgatggttcttaacccacgcctctgaagtcagaaaatataggcctcttactgcctgccagatgttacttacaccgttgtcgagccacggtcagtgaattcgttccaatgaatacaccactgctgggacaattaattccagtctcagcccttactggactacacagtatggataatggatgttctgcaacgggcgtgactgaatcagtttttgcacgactgtagtatgagtggctaggcctatgaggctatgaaatttgctgcaattggtacataaaagatacacacactggaggagtgtatgccgagggcttataattttccacaacttttgtacttgattatttgtaacaagacattgtttgcagaattgcacaactacatttgcaaatacaatggtacatacaacatacatttccagtgctagccattcagaatgcagcaacggattttgattgtgcatacaaccctagcttatatgttcaagtctcaagaaaacagtttgaacttgtgcaaaatgtgtcaggttatagctatccatatatccgactaatttacatgaaactggccttgtatcccccactg

SEQ ID NO: 15974 - DNA, 371 bp, Zea Mays
cagtggcaaaaacttttgcttgaccagttgaccatcccgttcacaaaatcatctgatcgaagatggtggaagcaacagcttgtgtatcaaatgcagaattgttcaacaattgtgtatgcattaactttttgatcaaaccggttccagtgtggcggctaacacaagcaagtgtccttctgcctcttgctgttctcattcatcatctcgtatttgctttgtctgtagatatgtgccatctaattctcaagattcatagtgatctgtatagataataaggacccttgaaattttctgtgttgttaatttttttttcatttcttgaaaggattcttgaaagttaatatacatgttgtgtgttgcccttgttaagc

SEQ ID NO: 15975 - DNA, 1367 bp, Zea Mays
atatgatcctgatgccatttaaatttgtatggtaaatatctttgacttgacatctttgttgtcaatgcattgtttcacttcatgcttgtgtgtcagtgttactacatagtgttttgtatatcacgtgaaacttctgcaatctgcacgatattgcaaattgccaccataaagaacgaagaggtgaattaagaggtggtcattgtgtatcacgtagataagccaagcaaagaaaaagaccggtgttattgctccaaaacgttttgttcagagagtgaagaaacagaatgagttgtttcgcagctacatgcaccaggatgcacacgagttcttaaattttcttttgaatgaacttgttgatattctggaaaaagagtcaagtgctgctaaggactcaccccaatcatcatctccagaaaaagctccaaatggcccagttcaacctttagccaatggagttaaaaaagaaccaccagttactctggtccataaaaatttccagggcatattgaccaatgaaacaagatgcctaagatgtgaaacagtaactgcaagggatgaaacgtttcttgatcttagtgttgacattgaacaaaatagttctatcacaagctgcctgaaaaatttctgttctacagagactttaaacgcagaggataaattcttctgtgacaaatgctgcagtttgcaagaagcacagaagagaatgaagatcaagaaggctccccacatactggtgatccatctaaagcgtttcaagtacattgagcagcttggccggtataagaagctttcataccgggttgtattccccatggaactgaagctcagtaatacatctgacgatgtagacactgagtattccctctttgctgtcgtggtccatgttggaagtggccccaaccatgggcactatgtaagccttgtcaaaagccacaaccactggttgttcttcgatgacgaaaacgtcgagatggttgaagagcagaccctacaaacattcttcggttcctcacatgaatactcaggcaacacagaccatgggtatatcttgttttatgaggggcttggtgggaagagttagatgggtttattcatcttccttgtttcttttctccttttctctttggagcttgcaaattcactcttgtgcctacacagctactatttcattacctccatgggaaacgggtcaatcgaaggggtgttgtatgaggtgaggacgccagattttgggtggtttcagtgtacaggggataatggaatctagctccaacgatgaaataaggtgtattttttttaacttctcagggctaaagagttggactttactattgagcacaacgtacatattttccagtgatcttgtg

SEQ ID NO: 15976 - DNA, 688 bp, Zea Mays
tgagcctctaaaatccctttgggccttccatgtatgtcagcctaaatagtaaccggatgatggaggattaccagggagacgacgccctgcagcttgattaacacccagatgactagcactcctgggtccacgagatccggccactcttgccaccgcagggtgaacgctcctccggtgcacgccgtcccaagttctagggagatgaatgagtacttcgctgccgaacagcgacggcaacagcaggatttcattgacaagtacaacttcgatcctgcaaacgactgccctctcccaggcaggtttgagtgggtgaagctagactgatggattcagagggacgagagagcagcaggcatggaatggaactcactccccgctccctccacaccaccccagcgttgtggcagaggcgcataccgtcgtgttagcttcgtttctgctgtaaaaaaaaacccttagtgttttatttagcatgtagccttaactggtcgtgtgttacagtacagaactgatgctgagttacaacaccctgatctgatccctcaactccaatgtaacccttaacagctcattctgtaaggaacctgtcaccctgttacctgttgctgaactaatgaagtagagctagataatgacgttttatcgtagttattattaataacttatcctctgtgatgttgcacctgaa

SEQ ID NO: 15977 - DNA, 2254 bp, Zea Mays
ccatcaccgatgcggacgccggcgatgctccggtgggccgcggcgctcgcggtcctgctcgccgtcgccgcgccggccgccgggttctacctccccggcgttgccccgagcgatttcgcgaagggtgatccgcttccagtgaaggtgaataagttgacatctatcaagactcaactcccgtatacatattattcccttccgttctgcaagccagataccatagtcgacagtgccgaaaatcttggggaggtacttcgtggcgatcgcattgagaactctccttatgtgttcaaaatgggagagcccaagatgtgtcagattgtctgcagagcaccgatcactgagaaagaagccaaggagctcaaggaaaagatagaggacgaataccgagtgaacatgatccttgacaacctcccgctagttgttcctgttacaaggcaagataagaacagtattgcttatcaaggtggatatcatgttggtgccaaaggcctgtattctggaacaaaggatgagaaatacttcatacacaaccatttgtcatttacggtgaagtatcacaaggacgataatttggaacattctagaatagtgggatttgaggtcaacccacacaggaagttgaagttggcaaggaaatcatattcacatatgatgttcgctttgaggagagtgagatcaagtgggcgtcacgctgggacacctacctgttgatgaccgatgatcagattcactggttttctattgtgaactctctcatgatcgtgcttttcctatcaggcatggttgccatgataatgcttcgcactctctacagagacatttctagatacaatcagcttgaaactcaagaagaagcacaagaggaaacaggctggaagcttgttcatggggatgtgttccgtcctccaacctactctgacttgctctgtgtttatgttggcactggcgtccaattctttggcatgctcgtagttacaatgatctttgctgtgttgggtttcctttctccatcaaaccggggaggactcatgactgcaatgcttctagtctgggttttgatgggtctgcttgctggctactcttcttcccgcctttacaagatgttcaaaggttcagagtggaagaagataaccctgcaaacggctttcctatttccaggggttgcatttgttattttcttcatcttgaatgctcttatatggggggagaagtcatctggtgctgttcctttcaccacaatgtttgccttggtcctcctttggtttggcatctcagtaccccttgtcttcgttgggagttatcttgggttcaagaaacctgccatggaacctccagtcaagacaaacaagattccacgtcagatccctgagcaggcttggtacatgaatccgcttttcaccattctgattggcggtgtccttccatttggagcagttttcattgaactcttcttcatcctcacctccatctggctgcaccagttctactacatatttggcttcctcttccttgtgtttgtgatcctgatcatcacctgcgccgagatcacaatcgtgctctgctatttccagctctgcagtgaggactacatgtggtggtggaggtcttaccttacctcaggatcctccgccctgtatctcttcctgtacgctggtttctacttcttcacgaaactgcagatcactaagctggtgtctggcatcttgtacttcggctacatgcttctcgcctcatatgccttcttcgtgctgactggcacaattggtttctgcgcctgcttctggttcactaggttgatttactcttcagtgaagatcgattaggtgccaagatgacagaacagcacatgtttcaatggagtcaagataattgtatgattaatgtggattggggaattaccccccctcctttttttgaaggttttcaggaaaattttactgtttaggatttagtttacagatggtttatgttttgttattgtcaggttatacactttagtgatttggaactgaaaaatataagggtaaacacattatgatgaggctgtaccttgtgacaaatttttttgtggggctctatataaattaaattcattgtgacaggtatatgcttgtaccggtgaattactgtagggctccaagaccagtatgaaatccaccgtttggatcctggaattgaatagtaaatttagatatagattaattaagctaatatggttttatgcagaatatatttgtatattattgttggt

SEQ ID NO: 15978 - DNA, 1032 bp, Zea Mays
atacctgtatcacattgtattttggccgtttcaagtacctacctggacaagtgagagcattaggaatggtagctggaggatcaggcattactccaatgttccaagtcacaagggcaattcttgagaacccaaaggacaacacgaaagtacacttaatctatgcaaatgtcacgtatgaggatattcttctgaaggaagaacttgacggcatggccaaaaactatcctgatcgtttcaagatctactatgtcttgaatcagcctcctgaagtctgggacggtggcgtcgggttcgtgtcgaaggaaatgatccagactcattgcccagcgcctgccgccgacattcaggtattgcgatgtggacctcctcccatgaacaaagccatggccgcgcacctggacgaccttggctacacgaaggagatgcagttccagttctaagcgttacattctctctaccagtaccagaataaacgggggtggaacaagtttcgtcgcctctttgagcagacgaagcctgaccatatcgccatatagctccaaacagacgcggtttgccactgacagtcacagagcgtcgtacttaaggggtgtttggtttatagggactaaactttagtctctccactttattccattttagttcataaattattaaatagggaaacttaaatagagttttagtttctatatttagtaatttagggactaaaatggaataaaatagaggactaaaaattagtccctagaaaccaaacacccctttactctacctggatgaaagcagcagtacagtacccacctaatttgtatcggtgtcgggacattgtaccatgccgttcttttgtatcggtttgtcactcactcactccgcgagccagcagcccagcacacgatccatcgtgtcattttggcaacgtcatacagatacaaaaaactgcatgtgcagcagatgtgctctgttctctcctgcagagcgatgaacgcgtacgcgcacggtagcaagcaggcgagcaggccgacatgtgttcgc

SEQ ID NO: 15979 - DNA, 375 bp, Zea Mays
acaaatcctccaatctgagacgatctacgcgatacaaggattaagacgaatcgctgggggtagaacttacctaggatggccgtgtgggaacacggggtcacattgaggcgcggcatcacggcgacccgacagcgccggcgacaaattccgggcaaccagctaggtttcccagctcaagactcccacgatcccgtttctggtgattcaacggagcttctaaatggcacctcggccgggtggtcatcccagagaaggatcgatggcagcggctgtgcacacaaatctctctgcgctaatggcggctcgacaagttctccccttggatggctcagagggggaaggcacagctttaaactccggactgagtccgagcag

SEQ ID NO: 15980 - DNA, 150 bp, Zea Mays
ctttaatttaacacttaggtagtgtttgctgggggaggtattcgcttggcgagcatctactgggtaagtccaccattcttcaggtcgtccaccaactgcatcttgtgggtggcaccacatcactggctcgatcatcatctctcggtccta

SEQ ID NO: 15981 - DNA, 1958 bp, Zea Mays
tcctcgccttgctttctccgccatcctctctgctttccaccaccctataccaaaccagccaaagccctccactcctccccgcctccgcctccgacgtcgaacattcttctccaatggcgacggcccccgcatccctctcgctctccgcctctaccctgcccacccggctccgtgccgcagcggtgctggcgggcatgcgctggaggcagccgcagcgcgggcggatggtggtgcgcgccaagatccgggagatcttcatgccggcgctgagctccaccatgacggagggcaagatcgtctcctggtccgctggagagggtgatcgcgtctccaagggtgacgccgtcgtggtcgtcgagtctgacaaggccgacatggacgttgagaccttccacgacggcatcgtggcggtggtcctcgtccaggctggcgagtcggcgccggtgggcgcgcccatcgcgctgctcgcggagtcagaggaggaggtgccgctcgctctcgccaaggctcaggagctctccaacgggcagccgcagcaggcgcctcctgctccgacggaggatgccgcagcgacgccgccccctccttctgctccggccactgctcccacgccggtggccgtgggtacgaagggcattgccagcccgcacgctaagaagctggctaagcagcacagggtggaccttgccaaggtgactggcaccgggccgtatggtcgaattacgtcggcagatgtcgaggcggctgccggaatccagccgaagtcaaagcccgctcctgctgctgctgcgccaccacctgtggctgcaccttcagtgggtgcggtgcctcaatcggcagttctaccaccggttcctggcgcgactgttgttccattcactaccatgcaggctgcagtgagcaagaacatggtggagagtctggcagtgccagcattccgcgttgggtaccccattattactgataaactcgacgagctgtatgaaaaggttaagccaaagggagtgacaatgacagtgctgctggcgaaggctgcagccatggctcttgcacagcaccctgttgtcaatgctagctgcagggatggaaagagcttcacatacaacagtaacatcaacattgcagtggctgtggcaattgatggtggccttattacacctgttcttcaggatgctgacaagctggatatatatttgctctcgcaaaattggaaggatctagtgaagaaagcacgagcaaaacagctccaaccaaatgagtacagctctgggacttttacactgtccaacctgggtatgtttggtgtagatcggtttgatgcaatccttccacctggccagggagctattatggctgttggagcctcgaaacctacagttgtggctgataaagatggtttctttagcgtcaagagcaaaatgctggtcaatgtcactgctgatcacaggattgtatatggggctgatttggcagcattcctacaaacttttgcaaaggtaaggtccttcccgacaagccttatcaatcgagccagtccacgtgatagattcgagattgaacttttcaagtgtggcttgacaagatccagaagttccactgggcttatctgaagcctttgatccctgcgatcgctccatctcttggacgacaaagtgcaggagggttgtcttcccgtcagctccacgtatatctgacagcttcagcagtgcgtcaagtctgaaagcatttgcccctcctcttatagttccaacattcattctgtttccagtcttgagtaccgcttcaagtaatcttagaaacaatttgctcgacctgagctcgctgcaggctccctagtaaacaaagaagcagttgcagcttcaatagagtgtttctatctttttaaattaatcaaatagctctacttactctaatcagtgcaaaggacatcctgagatgggcaacttcgtcgtcaaaag

SEQ ID NO: 15982 - DNA, 1079 bp, Zea Mays
gtcgcaggctcgcgccccagcctcgtttttcagctttataatggatcccaacatgaagcagcttcaagaggctctggttgatattgagactgatgcagaaaaagttcttctggctagacatcagttggtggaaaatgataagataagaaatggtaacagggaggctctgacagcccttcggaaacaagctaggacgtccaagactagcgtgccatctccctttgaggtcataatgaaagagatggaaggaagctctggcaagcagctgataaaggagatatgcccaacttgtggagatcatgaccccaaggaacatacttggctaatgtttcctggatcagatatgttttctcgtgttccatttcatgtggcacacactgttgtggaaaaagaccaagaacgcctggatttggataccaagaaactgcaaagctttgtcaaggagaaatcacttgtgattgcggagaaaggcgccctagcaggcagattcggtgctgacactgtaaaatctttggtcagccttacagacacaactaaatcaacacgggagggcggggaggtgaagtaccagttttgttgagtcgtcaactgttcagccacaatatatttcttggatatccggtgtttgttcggtatatcccctgccggaagggattgaaggggattggtgttgtttaactcaattacctgcagtccacaccaaactgaacaaggctatatgtatagattttctttgcttttgtttggaacaaaattttgcatggttgttagcaattgcgaaaaaattgttctcgattgatgtgtgtattcttatttgctgtgagattgtggcatagtcagtgtgtagttcctgatgatgagctgggtgtagtcaaaggttctcaatctgtagtagtcatgtttgaaactgaagtaaaggtgggtggcgtatgaatttattcattcagctattccctctgtcccagaatagttgatgttttagggttgtacatatgaatttataagtataaaaatgatgtggcgcattgaaaacaaggagaaatacagatatattgggaaaaaaaagatgtgagcccgga

SEQ ID NO: 15983 - DNA, 118 bp, Zea Mays
gctggacggtggcgtacctgtgctctcggttggcatgaacccgttctagtcttgagaaacccggtggcgagttgacatatgcaagggttaagtgctacatatgtcatgtggttggaga

SEQ ID NO: 15984 - DNA, 2630 bp, Zea Mays
aaagcgagacagagagagagaaaaagcagcaggttgcaacttgcaaccctagaactaggaggagccagcactagggtaggcggtaggcggtagcctcaccaagggcggtgacgggaaaacctagcagtataacccctgctcgcagtcgtccacactcccgctgcttcacgcagtcggcgcctccactctgctccctcgctcgccgtcttcttccatccaggcccctcagctttccctgtttcccatatattctcgcgcggctccacgctctcgctctccacactccacaccgcagacgcctggggggcgctcctactcctcctctagggaaggaggggctcgaggttccaccaattcgccgacaggtcccttgcgtgccatccccgccgcgcgcgcagctccagaggcctccatcccatccatggacgccaagaggcagggcttcttctccgcgctgcgggaggaggtggcgcgcgggctgtcgccggggcgcgcgcggcggcggtcggcgtccaacgccgcggaggtggcggcggcgctgcgccgcctcgggggcggcggcgaggcgctcgcgccgctcatggagggcccggatccggaggcgggccccggcgcgacctgcggcggctccgcgaggaaggaaggcgggtgggggcggtgggtgcgcggccagctccagctcacgcgcgcgccggcgctggaggccggggccggagctggctccggcgccgccgccgccgccgccgccgccggcaggcgcaacgacctcaggctgctgctcggcgtcatgggcgcgccgctcgcgcccgtgcacgtctgcgccgctgagccgctgccgcacctcagcatcaaggacacccccattgagacgtcgtcggcgcagtacatactgcagcagtacctggcggcgtcgggcgggcagaggctgctgtcctccatccgcaactcgtacgccatgggcaaggtgcggatggtggcgaccgagttcgaggcgggcggccgcgtcgtccggaaccgcatggcggcgcagcgcgccgagcccgggcgcttcgtgctgtggcagatggcgcccgagatgtggtatatggagctggccgtgggcgggagcaaggtgcacgccggctgcaacggcaagctcgtctggcgccacaccccctggctcggcgcgcactccgccaagggccccgtgcgcccgctccgccgcgctctgcagggcctggacccgctgacggcggcgagcatgttcgccggcgcgcggtgcatcggcgagaggaaggttaacggggaggactgcttcatcctgaagctgagcgcggacccggagactcttcgggcgcgcagcgaggggctggcggagatcatccggcacgtgctgttcggctacttcagccacaagtccggactcctcgtgcacctggaggactcgcacctgacccggatccagtccgccaccggcggcgacgcggtgtactgggagacgaccatcagctcgtccgtcgaggactaccgcgccgtggacggcgtggtggtggcgcacgccgggcggtccgccgtgaccctgttccggttcggcgaggcggccgtggggctgggccacaccaagacccgcatggaggaggcgtggaccatcgaggaggtggcgttcgacgtccccggcctctccgccgactgcttcatcccgcccaccgacgtcgggcccggctccgtcagcgaggccgccgagctcccgcggggcgagcggagcaaggccgccgccggcctcgtcctcccgtgccaccgcgctagggtcgccgcgctcgagaaggccgacgacggtggcgtcgcgtggagcggcgccctgcagctcgggtgcaagtgattcgtggtaccccgtgctctctcgcagccgtcttgcatttcctgactgactggttttggtaggagacacagaggtaaggtcaggaggaggacttggaggagctttaccattccaagtttccctctgtaaataggaagctcacatcgccttccgtatccctgcctcgtctcgtccggagatctggtagtaggtagtctttgtctgtaacgctgtgtcggcacctcgaggacgaagatccaggggagcggggtgtttgtgtttcttctccgtccagccatatggtatggatcctagtgggcggcggtgcttcttcttctcttctgtcgtagccaaaactaatcatctgaggctagtgaggaagaagggtttcctcgcaggcaattgagttctgtcgtcgtgtacgtggagtctgattagcagcagtccagtatgcttggttggcgagtcaaactaactttttttaggggggagggcgcaaattatgtagtgacctgcctgtgggtggtcctggccgcggggtggtccgtccggtcaggctgtgtaccctttttccttcacatctctctttatttattagtacgatgagatggtgtggttatgttctacacaagttttatgtaagccaaaacttgtatgaaatatcatggtttgagtttgctttttttcctctcccattttctggctgcccactcccacaacttttttgtaatttagccatttttgattttatttttataaatataccctttttagttttattttaaaaaataga

SEQ ID NO: 15985 - DNA, 1117 bp, Zea Mays
gcagaaacagcagagcaggggagcgcgaaaccgagacagggacagcgagacgctgacaggcaggataagcgtcgcgaaacgcgaccggcctcgtgccctacccctcgtcccgtcccttccatcacgtattcacgggcacgagctcgagccctcgtaccctccttcccttcctcgcgcgcggtcctccgatcgaactgccggacccgagcggaggagagcagggccctcccgagggccctcccgcgcggcgaccccgtggcgttcctgcgaggctgctgctcgttcgggtcggcggggcggaagcggcccaaggcctcgcccttgccctccccaccgcgcctgtccgccgctgcagcggcagcggacgacggggccaagatgaagggcctcttcaagaccaagccgcggacgcccgtcgacatcgtgcggcagacgcgtgagtgcctcgtccacctcgacctccactcgggctcccggagcggcgacgccaagcgcgacgagaagatgacggagctaagcaaaaatatcagggatatgaagtctatcctttacggcaatggtgaatcagagcctgtaactgaagcatgtgtgcaactgacccaagaattcttcagggagaacactttacggctattaatcatacatcttccaaaactaaatttggagactaggaaagatgctactcaagttgttgcaaacttgcaaagacaacaagtatcctcaaagatagttgcatctgagtacctagagtcaaataaagatctcttggacattttaattttagggtatgagaatatggacattgctttacattatggtgctatgttgagggaatgtattcgccaccaaagcattgcaaggtatgttttagagtccgaacatatgaagaagttcttcgactatatacagcttccaaattttgacatagcttctgatgcttctgctacctttaaggaactattgacaagacataaagcaaccgttgctgaatttctctccaacaattatgattggttttttgaagaattcaactctaggttgctgtcatcaaccaactatataacaaaaaggcaagctatcaaggagcatgactggccaattcacattatttcttttc

SEQ ID NO: 15986 - DNA, 1455 bp, Zea Mays
gaagaggcaacacgcgaacgagaacgacgaagccaaagcaacacaccagcgcgcacgcacgcgcagcgtccggcgggcatcaccacctcctgtcctcctccctcctgccccgatccgccctccccgccgctcgccgcacccgatgtcggccgccgacccttccgcggctccggccgcggccgccgacccggacggccctgactccgtgcggctcacctggaatacctggccacggtcaaaggtcgaggccagccgctgcgtcgtgccgctcgccgccaccatctcgcccactcgcgtcccggatccctccgcggcatccccgccgccgctcccttaccctccgctccgctgcaagcctccctgttccgcgctcctcaaccccttcgcgcgcgtagacttcgctgccaagatctggatctgcccgctctgcttctcccggaaccactttcccccgcactatgctgccatatctgagtccaacgtccccgccgagctcttcccgcagtgctccaccgtcgactacatcgtcggcggagccggcatccctggggtaggcggcgcgccgccgcccccgccgcccgtatttctcttcgtcatcgacacctgcgtcatcgaggaggagctggagtacgttaagatggccatgcggaaggccgtcgcgctcctgccggagcacgcactcgtgggcctcgtcaccttcggcacgcaggtgcacctgcacgagctcggattctccgatctcagcaagatctacgtcttccgggggaccaaggagatctctaaggaccagattttggatcagcttggcctggcgggtgctgggcggccgggcttccccaagatgccacagcaaccgggcgggccacaggtgaatgggatgcatccgccgtccacggccggggtcaacaggttcctgctcccggtgtcagattgtgagattgctctcagcacgttgctggacgagttgcagcctgaccaatggccagtcgaggctgggaaccgtgcgatccgttgcactggtgttgcgctcagtgtagctgctgggttacttggtgcttgcatgcctggaacaggtgcaaggatcatcgcattgctaggtggtccgtgtactgagggacctggaatgattgtttcaaaagatttgtcagaaccagttagatcacataaggatcttgacaaggatgcagctcctcacttccagaaagcagttaaattttatgatggtcttgctaagcagttggtcagtcaaggtcacgtgttagatgtttttgcttctgctctcgatcaggttgggctagctgagatgaaggttgctattgagagaacaggtggccttgttgtcttgtctgaaagttttgggcattccgtattcaaggattctttcaaacgcatttttgagggaggtgaacagtctctaggactttctttcaaggggtaactgcaagcccagaaggt

SEQ ID NO: 15987 - DNA, 1913 bp, Zea Mays
cctagggttgcctcccgccccgcacgcggcaggcgttccagagaaccattgaatttgaggaagaattggcagagaaattcagtggtggaactacaaatgctagaaataaagagacaacaagtgatgatgaagatgagggtgggggacacaataaaattgtttcggacatacgaaagaaatatgagaagaaattggctgcacccagtgatgaggacaaagataagcagaaagatttgtcagttcctggtgctgggttcaactttcatgggatcatatcttcttgttttgaaccatatatgactgtatacattgaacttgaggagaaatctttagtggatcaattagaaaaacttgtccaggaagaaagatgggaaatcgaggaaggaagtcagacgaacattctatcaagcagcatgcaggttttcttggtgattagaaaaagcttaaagaggtgcagcgcattaacaaagaaccaaacattgttcaacttatttcaggtatttcaaagaatactcaaggcctatgcggctaagttatatgccagattaccaaaaggtggaactggtattgttgcagctgccactggcactgatggacagatcaggacctcagacagggacgagagaatgatatgctacattgtcaacactgctgaatattgtcatcagacatcaggtgagctagctgagaatgttgctaagatgattaaccctcagtttgctgacaaggtggacatgtctgaagttcaggatgaattctcagccgtgatcacaaaagcactaatgactcttgttcacggacttgaaaccaaatttgatgctgaaatggttgcaatgactcgcgttccatgggctacccttgaaagcgttggtgatcaatcagaatatgtgaatggtatcagctctattctgtcaagcagtattcctgtgcttggtaccctgctttcacctacctacttccagtatttcctggacaaacttgcagcatctcttgggcctcggttttatctcaacatatacaagtgcaaacatatatcagaaactggtgcacagcagatgcttttggacacccaagcagtaaagactattctcctagacatcccagctcttggaaaacagagtacaggtgcagctagctactcgaaatttgtcagccgagaaatgggtaaagccgaagctctacttaaggtcattttgtcgccagttgattctgtcgctaacacataccgtgccctccttcccgaaggcacgcctcttgagtttcagcggatacttgacctcaagggcttgaagaaagcagaccaacaagctatcctggaggacttcaacaaacacgcccctgcaccagcccccgccatcaaacaccctgccgttgctccgacggtggcgacaccagttgccacagcatctgtccagattgtgccctcggtggcaactccagctgtttcgattacaccaagcatggcctccttgaagggagcactggcgaaccaagaggacgtcctcgcccgagctgccgcccttgggcgcggagcagccaccacgggcttcaagaggttccttgcattgacagaggccgccaaagatcgcaaggatgggccgttccgcaagctcttcaacgcctaaaatgtcgctcaccgttgtgttcatagttcgtgcccctcgtgcagtgaacatagatataggaaatcctttccacatcgtgtacacaccattaccgttaaccgacagtctataacaaccattttgacagattatcctatcccatcctgcggagaacgattagctcagttgtagcatagagattttgagacagtttgagctattagataagtttttccccctggttttgtgcatgcaaacccaagattctatactcgtgattgaataatcgtttctctccttttttttttc

SEQ ID NO: 15988 - DNA, 980 bp, Zea Mays
ggcaacggcccagagtcttgccggctttgctcccccgccgcggcgccgcgagcgcgtatgtataacgcgacccccctccccagtccccccagcggcaaggcggcaaccgttctcccgcgtcccgcactcccgccccttttccttttgctccttccttcctcgggaagcctagggcttaggctttaagcgccgcgatgtacggcggcggcggcggcggcgggcactacgacggaggcagcggtggcgccgggaacgctaacgcgctcttcggcggcgggggcttcatgccctcacagtccacggtggtcccggagaacagcggcctctctaagggtcggagcgcgcagacgctgctcccgctcaccgtgaaacagaccatggacgcggcgcaaaccagcggtgacaggtctaatttcgccatcaacggcgttgaggtgtctacgattaggcttgttggacgcatgctaggtaaggttgagcgtgtcacagatgttgtattcactcttgatgatggtactggcaagatagatgtgaatcgctgggaaaatgaggcttccgatgctaaggagatggctgatgctaataacgagaactatgtcatagtcattggcggtttgaaaggttttcaaggaaagcgccatgtagttgcctatgctgtgcggcgtgtgacaaacttcaatgaaataacctgtcactttctgcactgcattcaggtgcatatggagctcacagggttaaagcagatctattcttcagctgcaacatatggaggagtagcccatgccccatcacagccaaatccggttgatggaaactacatatccaacttggtcttgagtgtttttcatgacccatctgtcatgagcatggactgcacatcaaagatgtcatagatcgtctcaaactaccagatgatgtagtcagaaccagactggcagcttgttttcctgcacatcgtttcttcaagttcttggttgtta

SEQ ID NO: 15989 - DNA, 1508 bp, Zea Mays
cagagatgtcttctgccggcatcagcggatgcgtgcctacaactgtaaacataagaacaccatatacaaacgaatcatggacctgtatctgttgcagtgtacggtgaccatgacaagcctgcccttgttacttatcccgatattgctttaaactatatgtcctgcttccaaggactattgttctgtcccgaagccgcttcgctgctgcttcataatttttgcatttaccatattagccccccaggacatgagttaggagctgctccaatttccccaaatgctcctataccgtctgttgacgatttggcagatcaggttgcggatgtcctcgatttctttggattaggctctgttatgtgcttcggtgtcactgcaggtgcctacattctaactctgttcgcggcaaagtatagggagcgggtactaggtcttatccttgtttcacctctgtgtaaaggccccacttggactgagtggttatacagtaaggtaacatccaatctgctgtattactatggcatgtgtgggttagtgaaggagtgcctacttcagcggtacttcagcaaggaagtgcgaggattctctgaactacccgaatcagacatagtgcaggcttgtaaaagcctgctagagcagcggcagagcatgaacgtgtggcgcttcgtacagacaatgaacgagagatacgacttgtctgagcatataaagcggctgcagtgcagaaccctgatttttgtgggcgacaattcccagttccacacggaggccgttcacttgacgtcgaagctggacaggagatactgcgctctagttgaggtgcaagcgtgcggttcactggtaaccgaggagcagccgcacgcgatgcttataccgatggagtacttcctgatgggatacggcctgtacaggccgcctagccaggtggtggagtgcagcccgcgcagccccctgagcccgttctgcatttcgccggatctcctgtcacctgagagcatgggggtgaagctaaagccgatcagaacgcgagtcaggcttgaggtgtagcagagggctaggctaacttttgcaggtctgtgtttagtttttggaggtatagttatactgccatgtatatataaatatataggaaacgctgttctttgatttgtagcctgaaagaaaataatagcagaagtttgggtgtacagtctctctattatgccattatacccgctggtttggttgggtggcaggattagatgtggttcccaaagaagcatatgtcttaagaagataagagatggaccagctgtagtatttgttcggtttgttgtttggtgtcgatttgattcctctgcgttgctttaggatcgggacaaggattggcttgcagttgtgtcttgttgatgtctgtctcctgctgttgtaataagcatatatgcaagctggtaaagaccatggtctggaccagaggtgagcatcacaagagacgatggcctggctgagtcgatgcacacaaagaaaaaaaa

SEQ ID NO: 15990 - DNA, 378 bp, Zea Mays
aagccgccgccgccaccaccgcctcacccaagctttcatttgtcatgctggttgcccccgccttatcgtgtgacttttttctgggatggagctcatatttgcaggtgattgattcatcttggggctgagattgaaataggatatggcacatatgataatgatcagagtggtttctgaacatacgaagtagccgcccaagagctttcaacctgccaagtttcagagctagtgctgttacatcgttggcaatgccacaacattttttcacatacatttatttcccaatgcgttgtccttaatgccatgtccttatgtagcagttcatgaacaagattggaaggatataagcactcaacgaccttcgtcgacagagctgaa

SEQ ID NO: 15991 - DNA, 1063 bp, Zea Mays
taataggaaccctccaatgatttgatttatgctggatatagctgcactcaggggtggttttgtacaccttgcacagcgagtccacagctaagggggcttaagaacattttgcgactttccattaaaaaggccaattgttcagagtgggagcaagtgaaaatgccttcaagcgttagatccctagttgtgttaaatttatacaattatggcagtggaaggcatccatggggtgatctaagacctgagtatctcgaaaagaaaggctttgttgaagcccattcagatgatggcttgcttgaaatatttggtctgaaggaaggttggcatgcttcatttgtcatggccgagcttatcaaagcaaagcacattgcccaggctgcggctatcaagttcgaaatgaggggtggcgagtggaaccgagcatatgttcagatggacggagagccgtggaaacaaccgctgctacaggagcactcaaccatcgtggaaataaacaaagttccgtatcattctctcatgataaacggggagtaatgagatttttactccgtcaaccagatcgttaggatcgtgtacagttcaggagcagcgggcactagatccttagaactgggtcggacggactgcagcgaggatggcatgcatgttcgttggccttttgtcgtgctatggtcgaagccatggccggagcgtgatgtggcaccatgcattgttgtattcgtaccataatatgtgcgttgttgtatcctaagttctttttgaaggaaacatgattgatttgtttgtattgtaacgttgtgtcattgcaaaagaataacctggtgtaaaactgtaaaatgtgacagtctgccgtttgcacagccctgtagcattttttttttgttcttgttaactttttttttatgaaagcattaactgatttgacttgtcagagttttctattaggaatgccagggagcaatttccctctaccaacttgtacgtagaaactaggaagtactagtgtggtagtaatttatgaggccgttgatcctggcatctccaccgatacagagtgtggcgc

SEQ ID NO: 15992 - DNA, 2283 bp, Zea Mays
gttgggagagagcaatctatatacaggttccatgtattactagatttcgatgaagataaaaggagttgtagaagaaagttggagcgtcacaacaaaagaagacgaagaaaacctgattccaaaggaacattagataaagaaattgatgaaccattggatatgccagcagatgttagtggcagcgatgaacttagagaagagaacatggaaggcataaccagtgagattcttgagactgttcttagcaacaaggtgatggacagagaaacacctgtgggatctgaagatgtgcttagttcaccaacctgtacacaaccttgtttgcaaaatgaccaaagtaaaagtgtagttacctttgcagcttctgttgaagcctgcattggtgcaaagcaggaaagcataaaacttgccaattccccaatgcatgacaccaagagtgcatattcatcctcgtgtccaacagggcgcatctcattcaagttgtatgattggaatcctgcagaatttcctcgacgactacgacaccagatcttcgaatggttgggtagcatgcctgttgaattggagggctacattcgtccgggttgtattattttaactgtatttattgcaatgccacagcatatgtgggacaagttatcagatgatgcagcagatcttctcagaaacttggtaaattccccaaacagtcttttgttgggtaaaggggccttcttcattcatgtcaataacatgttatttcaagtactaaaagatgaaacaacattgatgagtaccagattagatatacaagctccaaggattgattatgttcatccaacatggtttgaagcagggaaacctgtcaatcttatcctttatggaagttctcttgaccaaccgaacttcaggtcacttctgtcttttggtggagactatttgaagcatgattgctaccgtttaccatctcatgatacctttgatggttttgagagtggtgattttattcctgattctcaacatgaaattttccgaattcacatcactcaatcaagaccagatatttatggacctgcatttgtggaagttgaaaacatgtttgggttatcaaattttgttcctatcctttttggaagcaaacagttgtgttctgaactagagaggatacatgatgctctttgtggttcttacagtgaaaataatgtacttggtgagttactcagtgcttcttctgatcctcatgagcaccggaaactttgtagttctgtgatgtctggattcctgatcgacattggatggcttatcagaaagcctactcctgacgaatttaaaagtgtgctgagttcaacaaatatacagagatggatatgcatgttgaagtttttgatacagaatgatttcatcaatgttctggagataatcgtgaagtcaatggacagcatcatgggttcagaggttctttcaaacttggaaagggggaggttggaagatcatgtaacagcatttcttggatatgtaagccatgctcggaatattgctgatcgtagagctaaccatgacgagaaaacacagattgaaacaagaggcattattgttacttctccaaatcagccaaacttaggcgcctcagtgccatttgctagtgaaaacactgactttggaggggataacaaattgaactcaactgatgaggaagaaattatgccacttgtgactagagatgtctcacaccggcactgctgccagcctgatacgactgttaggtggcttaagccctcactgattgttacttatcctggtggtgccacgagaatgcgacttgttacgactgtggcggttgcggctgttttgtgtttcacagcttgtcttgttcttttccatccgcatggggtaggggtgcttgcagctccagtgaagaggtacttgtcgagtgactccgcatcgtagttgatgttatagatcagatattctattttgccgtgccgctctgctctgtctgtatcatttgcgctttgttaaggcatagcttgtgtatctgatttttttgtaagggaaccaacacgcaggtgcttttcatctgtgcaaaactggcatcttttgtttttttcagactgtaagtataggcgccggaagctctgacctgctaatgtttgggcatgtaaacttctaatgtagtgcatcagttaatggaaaatagctgcattgctgcaaagggtggtgtgcgtctgaactgttggcatacaatacaattgtgctgttctcgctgctgcgggttttactggcatacgcatacgccgtggagaa

SEQ ID NO: 15993 - DNA, 975 bp, Zea Mays
gtaatctatttcgtttgaagaatatgttgaagactcttgtatctgaccaacattcctttattgtgcttctaagcgaaaaagaggtggacctggtggtttaaataaaatttgtgcaatttcacctgaacttcagaccattgttggtgagactgctatgtcaagaacccagattgtgaagcagctatgggcatatatcaggcagaacaatcttcaagatcctgatgacaaaaggaagatcatttgcaatgacgaacttcgtgtggtttttgaaactgacaccaccgacatgtttaaaatgaataagttgttggctaagcacataaccccacttgacccaaaagatcagcttcatgaagtaaaaagaatgaaggctcccacagtggttcctcaaccacctcccattaatcagcccagtgtagttatttctgatgcacttgcaaagttcatcggaacagatggaacatttcctcaagatgatgccctgaaatacctgtgggattacataaaagcaaaccaacttgaggatgtcatcagtggatcaatattatgtgattcaaagcttcaagagctctttggctgtgagagtattcctatgtcaggactatcagaaatgcttggtcaccacttcatcaagaaaacatagcaaatcctcgttaactgaatggacagcatagcgtctgtatttcttcaatgttatggaatatgaatggtgtctggcaaagatcatattatttgcggtagaggtagcctgtgctttgttacgtgtgcaggccaccgctgcggcgtctggtggaacctctttactgaattcgtagtgctagttcttaaatgtcaaaatgtcatttctgactatgtaaagttgctttctatttgagtgccagattgtactcttaaaaaggaatttgaaggaatttctgtaggtaccgataatcttgttacttccgaattgcgaagatgaaatctttgaaggtcagc

SEQ ID NO: 15994 - DNA, 735 bp, Zea Mays
gccccagacctgtgcctttctacttgcttcgactatgtccacctctacctcggtatttcagttctatggaaaggtcttggtctggaggatggaaatgctgttggaacttggcagaggaattgtgaaaaggttctattaggtataggaggtggtcactatgttcctcgtcacatggatattgtcatcaaagatggtgtatgggtcggtcatttactctctggttactccttgccaatggacatgtcgtcgcaagtaaatgtaaagagttctgaagaggttgctggaatgtggaagcactccatcaaagtttcttatgaagcaacaaaggcagcatttcctggtggtgaagttatcgcgcatcttgatcacaagagcttcaagggctggcagaagaatgctgttacatgcttcttgcaggagcagaacatcaggataggaaagcctagcgatttcctgtgacgtgctacgacagtgctggacaggacaggtggagaggctgtgaatgcttgagctgatttccctatgcgcacgctgaataaatatgagacataggggctgtttggttcgtggctaaatgtgtcatactttgcctaaggttagtcgttcgaattgaataactaaccttagttagaaaagttagtcaaaatgtggtaaattaggctcaaaccaaacagccctatagtaagactcgatccttaatgcggttcaagagcttgaatttgccgttagcccgca

SEQ ID NO: 15995 - DNA, 1608 bp, Zea Mays
gtcgaatcgcctgcccttccgccgtttggaacctacaccgccgccgtaaccgctcctcgatggagtcctccagcaagtcatcatacagcaagctgtccgctgcaaatgacaagatggattccgatgccgccgggagccacgagagtgcacggtcgaatggcctctcggttgatgcagccgacaaggcgccggccgcgggaggagcgggcagagctgacaagacctccgacgcttccactggtagcagtgacgacagcttggtggatagctccggtggtactggccgccatacgaagcggcacactgggagcgatcgcaggtgggaggccatccggtcggccagcgccgggggctccccgctcagcctcgtccacttcaggctcctgaagcgcctgggctacggagacatcggcagcgtgtacctcgtggagctgaggggcacgggcaccttcttcgccatgaaggtgatggacaaggaggcgctcatcagccggaacaagctggtccgcgcgcacacggagaggcagatacttggccttctcgaccaccccttcctgcccaccctgtacacccacttcgagactgacaagttctactgcctcgtcatggagtactgctgcggcggtaacctccattcgcttcggcagaagcagcctaacaggcatttcactgagcaagcagccaggttttatgcctccgaggtgttgcttgctctcgagtacctccacatgctcggcatcgtctacagggacctgaaaccagagaacgtcctggtcagagatggaggtcacatcatgctctccgacttcgatctgtcgctgcggtgctcggtcagcccgatgctagtcagatcctcatcggtccatgccgccgccaacaacggcgtggtccatgccgacggtgccagccagcagggccagggctgcatacagtcaccgtcagcgttcttcccgcgcatagtactccccaagaagagccgcaagaccagcaggtcggactccagcatcaaggacgggtcgatcctggagttcaacgcggagccgacggacgcgcggtccacgtcgttcgtcggaacgcacgagtacctcgcgccggagatcgtcagaggcgagggccacgggagcgcggtggactggtggaccttcggcatcttcctgtacgagctcctccatggcacgacgccgttcaagggggacagcaaccgcgccacgctgtgcaacgtggtggaccagccgctgcggttccccgacgcggccccgcctgtgcctgtgagcaccgtcgcccgggacctcatccgtgggcttctggtgaaggacccccagaagagaatcgccaccaggaggggcgcagctgagatcaagcagcacccgttctttgatggggtcaactgggcactcgtcagggatgctcaccctccttctgtccctgaccctgcagacttgggccggtttgcatctaaggagaagccggcggcggcagttgccactgctcatcgtgctcctgcagctaaaccaaagaccggcaattttgttcagtatttttaggttgtctatatatcatgtttttgtttttggcagacaaaaaatacaagtcattttttaagaacaa

SEQ ID NO: 15996 - DNA, 654 bp, Zea Mays
gagatgaattaatatgtaaagtgcctaacttgtctgagccacaaggtttttggaaatgacagaaaatattggttcatccctgcatattcagaagaggatctgagaagaattccagctctacagggtcttgattatcctgtcagtgagaccagattttgatggccaggaattgtaatggggcaattctaacagtgtcctcgtcagatacctcagtgttggacatctactcatacaactgtcagcattgctgattgccctatgcaaggcatctagtgaaatgtgcacaagatgattgtagtaatagtaaccatgagttattcatctgttgcacttcatgtatgtgacgaaggggaagtcctcctacctttgccagaggaagtttgttgtgatgtaaattagttttagcgcctggttagatggaccaaatcttggcgatgcgccaggattttggacttaattctttatccatccacgtgaattgggcaggatttcatccatgcaaactgggcattagtgtggtttgaaacagtcttgtacttcagtttagttatatcatgccatgcaatacatttaccatttgagatatttgtgccgctgttatacactatcaatagtaaatggataagcgctgcgtaattaattcgacattgtaca

SEQ ID NO: 15997 - DNA, 4639 bp, Zea Mays
caaaaacctctcgttccgaaagcgcacacaacaacagaaaacacgcgcgacggccaggtagagacagatccatttctcaccttgccccacctccctcgccgatcggggtcccccgcgcccagatcgcttcttcgcttcggtgcggaggtggccgagggggaggaggagctcccggatccgccccgccgtcgtcggctggtcgtggcgcgatccgcgggagagcagcaatgacggcggaggggacggcgtgcaacggcgccggcgaggcgctgaaggcggaattcgcgccggagaaggtggtggccgtgtccctggaggagaagccggtcggggagcgcgagggcgaggacgtcggcgggccgttcttgatcgtgaacggcggcgattccgacgggcactccgagcctggctcagatctgggcaaggcgcccgacgaggaccctgcatccgaggaggacgacgtgcccaccttcaatgcagctccggacgcggccgtggccggagatcacgggaccgccgaagggcaagttggtgctcagggtgcggcactcggtgcttcgtcggcggacgggggtgatcgtgcttccgacgggtctgagggtagcgcggatgagagcagaggtgacccaagttccgattgtgttgccgaagtggcgcagcaggaggctgttggtgaagaggacagtggggcagctgctctggcgtcccgtgaatgcgaacctaccatcaccagtgctgactctgaggcacactatgtggattctgaggttgaagacaaggagggcacagtggatggtagtgctgttgttgatgccgttgaagcggtggtgcatcaggaagctagtacagagcaggatgaagatgctgctgtgatgtcctctggccatgatgatgccctaacgtctcccaagtcttgttctgctgccgtggagtccgaggttattagagaggatagcaaagaacagagtatcactgatggtgtggagccacagcagcagggtacagttggggcaagtactttggtggagaatgagcatctttgtgccgacatgatggctgattcatttgtagctgccaatgagcctgacagtcaagaggatgctgctgtgatgtcctctggccatgatgatgccctaacgtctcccaagtcttgttctgctgccgtggagtccgaggttattagagaggatagcaaagaacagagtatcactgatggtgtggagccacagcagcagggtacagttggggcaagtgctttggtggagaatgagcatctttgtgtcgacatggcggctgattcatttgtagctgctactgagcctgacagtcaagaggatgctgctgtggagtcctgcgggcacgatgatctgctaacttttactgagtctggttctgctgacattgagtctgaggtttatggagaggatagcgaacaaaaagagagcaacactgttgttgtggagatcgtggtgcagggcgtaggtagggcagatgtgctgatggcaaatgggcatctttgtgccgacacccaagctggttcttctgaagctactactgagcctgagaatcatgctaatggcagcaaactgactgatgttgcagaatcagtggagggggatgccggcagtggagaacaggatacaatggattcgtcgcaaaccaatgggcatatttatgttgccttgagtgctgattcttgtatagttccttctgagtccaaggcccattcctttgagacagatgggcaacgaactgatcagctacaagaggaagctccaaaacttgaagctgaagtattggagggagtgctaaaaccaactgaaaggaactgtgcaggtagtgttgagaaactcataggagaggaagttggcacagatgggcatgcaagcataggaggtacagctgatgcttatggggagcaagaagccaagcctatgcaggtagaaggtgaagtcacttgcggtattctcgaatttgaaaaagtggataaggatggtgaagagggtttgtgtgatgactacacggttggtgttgtttcttctaatgaggaaacagagcttcctatgaaggaaaaagtagatgaagctgtccccagtgttaatgttggtgggccagagaaagtaactgacaatacaagccaagataccaagacagttgattttattgatgaaatcacagcagagtcaaactttaaagctgaaaatatggttgaagtgaaaagtgcagctcgtgaagttgacaaaacagaggtaaaagatcttgcttttgctgatgaggctaatgtagctcctttacaccttcaacgtgactgtgaatctgttatggaaactatagagcatgagaaggtagaattaccaggtggttgtcaagctcatgaaattgtgtattcttcagaactagaaccgaagaaagagtttgagatgggggttgatggtgctgttccattgcaaggagctgcagcttctgttgcctctgttttccaccatgagccaatgtccattgatttgtctgagaatgatagcggtaaccattctggcccaactactgcgttggaatcctgtgaccatgtgcaaaatgaagagagcatatcccaagaaatttccatgaccactattgagcaacctatagctattgatcaagttgaacctgtcaacctgaatgtagatgaacttgtggttgatgatgatcaacctggttttgctccaaggtgtgaatctgctaggctggataaacctggatgtacttccaaaaaggatgattcaaatgagattgttgaagatagcaaatcactggaaaatcagttagaaatttgcaatgcagctactatgtctgatgagtgttcctccagaaatgcaaatgaagatccctctccaattaatatgtctgctgagtgttcctccagaactgcaaatgaaggtttctctccaattaatgaggcttctcatctagctgaggagtcttgcctttcagacaagtcatacaatgctatcagttatgaaaatggaaatgggcctgctaaatcttctgaggagcctgacaagtcatgcaatgctatcatttgtgaaaatgaaaatgagcctgctaaatcttctgatgtggttgaaaccagatgcgtggaagcattagcgccttcatctgttggcacggttgtcacggcagaacagaaggacaatggacaccgtgcttctggtgagtggcatggagataatgtgcaagtcattggacaacaacagaagatctacataattaaagttccaaagtttgccggtgatgatctctggaataagatccaggctgcacaggctcacttagaccacctgacccaggaaagagatgcaattaaccgtcgtaggcaaaagcaaaaggctgtatgtgatcaatacagggagaagcttgaggcagcacgtagagaagagcgggaagctaggactgcacatggagataagaagaatgatttaaataatgtacgttcggtactagggaaattgcaccaagcaaattcagctgaagaacttgatgagctgattgcgaagaaagagaggactatgcaacatgagaccatttctttgaaagaagaaaaacttttaattaaagagattaatgaattaaaagcccaacggaagcagctatccaccactatgggctcaaaggctgaaatcaatgaggcatttgaccaaaaagatcacattcatgaaaggcataaggtgttaaagaaggattctgatgttttattgaccaacctgaaattcctagaggaaaacacaagaaagattcaaaagtctttcgaagatgaaagaacaggtctcagaaaattaacagaggaacaccgagcagctaatgaaatacgtcaaaaggcctacattgaatggactgagcttagatcagagccctccaagaagaatgaatacttcttcaggtacagggatgaccggaatgcagcagaaattttcagagctaatggcgatataaatggacttaaatcacactgtaatagtcagattgagggagtcatggaaatgtggaacaaaaacgaggaattccgcaagcagtatgttgagtcaaacaaggttagcacactaaagagattagggacccatgatggacggaaacttggccctgatgaggaccctccagtcatatcaagcagaagaccaagcagcatctatccattgtctgcctcaagcccgggagtggccactttagcttcaataccagcacctgtggtagctgctccagctgcagtctctgccaaagaggactcatttcctgttttggaagccccccagaccagcaagcgcaccaagtcaaaagcatctgatatctgtgcccagaccgagaacaactctgttatagtatcggaggcagaggctttggaacagactttgaaagagaaagctcgtctattggaggaacaattggagttagctaggaaggcagaggagttggcacggaaggaggaggaattaagcaaagagagggctgccgctgagaaggagcggcttaggatggagcagaaggctaaggccaaggaggccgaggagaggaagaggcggaaagccgagaaggacaaggagaaagccgagttcaaagcgcgcaaggaagctgaggagagggagaaggtctccaattctaattctga

SEQ ID NO: 15998 - DNA, 1839 bp, Zea Mays
ggacaacgcactattccactacaaatgactctgcaagtgaaatttgaggaagttgccttcagctttaatggtgggaaggattcaactgtgctcctgcatttgattcgagctggttactacctttacaagaaggactctggtgatgtagcccaaacagatgctgttaaaaactgtccactgcgtactatctatttcgaaagcccttgtgctttccctgaaatcaattcattcacttatgagattgtctcaacttatgggttacctctggaaaccatccattcagatttcaagtctggtctagaaggccttctgaaggagaagcccaccaaagcaattttcattggcacaagaattggtgatccaaatgcggttggtcaagaacagttctctcctagttcacctggctggcctccttttatgagggtgaatccaatcttggattggtcatacagggatgtttggtcttttctaataacatgtaaggtcaaatactgcagcctttatgatcaagggtatacttccattgggagcatacacgatactgttccaaatgcactccttagtgattcatcatctgagaaaagttttagaccagcatacatgctaactgatggaaggcttgaaagagctggtagaacaaaaaagattaatcctaaagtagaaatgaattctgctgcaagcaatggcatcaacgatactgagggaggacggatgatctcacgggcggcatcaatcattgtagtcggtgatgaaattttgtttggtacaactgaggataacttaggagcagccttgtgcaagaagcttcatgcaattggctggcgggtttctcatgtagcagttgttcgcaatgagattgattctgttgctgaagaagttgaacgttgtaaatctactgatgacatggtgtttatttttggtggactcgggccgctacattcagacgtttctttggctggtgtcgcgaaagcatttggagttcgtctggctcctgatgaagaatttgaagattaccttagtcaactcatgggaaacaattacactggtgaccgaaatgagatggcacagttgccagaaggtattacagaattactgcatcacaaaacgctaccattgccattgatcaaatgtagaaatgtcattgctcttgctgcaaccaatatggatgaactagacaccgagtgggattgtcttctaggtacccaggagagtggtctaatgccatcaaaaccttttgtgtcaaagcatctcagcactacactttcagatgttcaaattgcttcagtccttgcaaaactgtgcttagagttttctgatgtttacatagggtgtcatcggatatcaagagctggtcctttggttgtgaatcttactggaaaggataaccagagggtagatgcggctgccgagaagctgacaagcagctttgaaggacaattttcccaacttaacagttgcaaataagctgtcagagacacccctctatttttgccaaattctttccgcctgaagctctgagattgtgcaggactgatgatggtgctcaactgctctaaaccgacgaccaaaataaaccacggagctggtactactttgaagctacaaattttatttagggaacataggaattttgtactaggaattggtaactgggttctagcataatgtagctttgcagctaatattttgacattattatacgttccaaattatttcatttatactataatttatagcataactttactgctcgatcatgatgtcttcagttgtttgacctttttgctacttgttcgagcatagctttgcagtgcttggtgatgcaaacattgatgctga

SEQ ID NO: 15999 - DNA, 1500 bp, Zea Mays
cagcccacagggaggaggcctgcaactgcaacggtccagccgcacccgcgctcggcatacggcgcctctcggcctacgttctccgtgggccgtggcggcgtgccgcccatccgccctctgccctcgccccacccggccacccgtcgacgacggtcctccgccctcgccccacccgtcgacgacctcgtctcctccgtgcgcgggcctcggctagctcctgcttggcgctgggtagcgggctcgtcggtgctgggtagcgggctcgtcggtgctgtgcagatccacccgcgccccgccttgttctgtgctgccgcttggcgctgcgtcactgaccaagtgcgtgcctgccagccgaccgacggccagcaccacatttcgcagagccgttggtgctctctcttggctgtcagcaccagaagcacagcgcagagtcgccccagccccctgcgcctgctgcatagtctgccactgcccctcagttgttgtggtggccaagggacgaatcactctctcattctcaatgtggcacagtttcttttcgatgcaccggatagcctctcgctcgggtttgcttggtaggagatgttacagctatgccatgaaagggggcacttcgatcgccggagtaggcgacatcattgctgtcgcatcagggaaaggaggcgtaggcaaatccaccactgcagttaacattgctgtagcacttgccaaggagtttaagcttcaggttggtttgctagatgctgacatatatgggccatccattcctacaatgatgaacctccatgctaagcctgaagtaaatgaagacatgaagatgattccagttgagaaccatggtgtgcgatgcatgtccattggttttcttgtagacaatgatgcaccaattgtttggagaggtcctatggtaatgagtgctcttgagaagatgacaaggggagttgcttggggggaccttgatattcttgttgttgatatgcccccaggcactggcgatgctcaactatcgatgtcccaaaggcttcggttatctggtgctttaattgtttcaactcctcaagatattgctcttattgatgctagaagaggagccaacatgttccgcaaagttcaagttcctattctgggattggtagagaatatgagttgttttaagtgcccaaaatgtggtgagaaatcttacatcttcggggaaggtggagcgcagagaactgcagaggaaatggacatgaaattacttggtgatgtacctcttgaaatcagcatcagaacaggttcagatgaaggcagccctatcgttatatcatcacccaactctgcatcagcacaagcgtacgtaaatgttgctgagaaggtgactcaaaggctcaatgagctagcagaggagcggcgtatgggcccagaaatcttactttgagacattcaagccacttttctacacaccttctcctgtttgacggtggtcgcagaaggtttggccgaggtcggtctcgtgctggg

SEQ ID NO: 16000 - DNA, 857 bp, Zea Mays
atgccacactaaggaagcaatagattaaggacagtagggatgaatctggcaggtcctctggtgtcttttcttctagtggttcaccacaacttggtttctcaagaagttcaagcagattgtccatgcaggatgatactgatgatgcggattttccttttgctgtggatgatgttgatccagattcacggccagggagtagtggtggaaaggacacaggggatccagttggttcgtcattccataaatcccaagatgctgccgttggatatcttgtccacctgctgaaatctgcacgtccactgcgagattttagctactcatctcatacatcaatgggcgaatctatcgaagcaggaagcaccagctctttcatgtcccgcaggacatccgacgcactggaggagtttgaatctttcaaagaaataagagagaacctgctagcacgtagtagatcttggttgcaagactcattggataaatcctagtgttgatgcaatccgtggttccatttcttaacactgaaagcataaggttctgtgactagggataataactgggaattctccatcgggttttagctccccatctctgtccccacgacgattttttttcccgcggggatcctcaccaatacttgccgggatatttctttcccatccccgttccccgcggggataaatcccgtcggggatcttgccccgcttaaattataattagattgtacttcatttgttagatgtaaaaagattgtcacttatacacattgttagatgtaaaaattattatgtgtacattaaaatgaacacatttgtacaacgagtgatctcttaataaaataattatttatttttatcatt

SEQ ID NO: 16001 - DNA, 1716 bp, Zea Mays
ctttagcaaccctggcatgtttgctgtagtcacagaagcgatgtggcagatgaatttaggagatgccatggaactggggccatacccagagcgtgttggtgatccagactgtagctattacatgaggactggcatgtgcaggtttgggatgacctgtaaatttaatcacccagcagacagaaagctggctgttgctgctgcaagaatgaagggagaatatcctcaaagaattggacagcctgaatgtcaatactatctgaagactggcacatgcaagtttggagcaacttgcaagtttcatcatccccgagaaaaggctgcaatggcaactcgagttcagctgaatgaactgggctacccactccgcctgaatgaaaaggaatgtgcttattatttaagaacagggcagtgcaagtttggaagcacatggggctgtaacaagctggcccttgtcgagatctgcttctttcattgcaagtccaaggtggccaggtcattcaagttatgcacaagttattgttcctcctgggcttgttcaggtcccagggtggagtccttatgctgcgcagattggttcttcatcctcggatgaccaacaacggacacctggagctgcccaatactatactggctcacgccagagtggaacacctggcataggcgatcgaggaatgttttcatcctaccaagcaggttctgttcccgttggactttatgcagtacagacggagaatgtatttccagagagacctgaccaacctgaatgtcagttctatatgaagaccggagactgtaagtttggttctgtatgcaagttccatcatcccagggagcgaataattcctactcccaattgtgcactaagtccattaggcctacctttgcgcccgggagaaccaatatgcagtttctataatcgctatggcatgtgcaagtttggtccaaattgcaaatttcatcatccgatgggaaaccctatgtatggccatgcttcatcaccgacaagtgaggcccaaacatctcggcgtatgctggcacatgtaccatcgcatccagaagtatcacctgacagtggctcgggaaggtctaggaggattgttcattcagattcccagcaaataccctctgttgaaaggatcaccgagagagaggcgtcctaagccatcctcggtgtcttcgttcatgctgcctcccctcccctcccctcccattcttgacgagtaattaaatgcaacaacatctgagaatccgaagctgtacaggtcttttgcctcatctttgagctttacataccggagcttgcttcaacatgtattgcatccaggcatgaaaaagttcttgccggttcgggatgctcatttgcccccataaaaacgggaacaaacctaccttatttaaacatatgtatgaaactcactcacctctggacattcaaacccattcgagtaatggtcccggtgttgtagtttatagagctgtgtttcagtggacaaacctttgcgaaactgactggggatgcgcaagcatagcctcctttattaattattatctcgtttttttcctagcatctctcttttcataagggcaacccaaagtgttggaataatagattgccaccataatgctctgtattacccaccatatttaaacctggttacttgtgagtaattttctctttgtagttctgacttactcgatcaatctgccaggagattt

SEQ ID NO: 16002 - DNA, 90 bp, Zea Mays
ggtgtactgtgcttcgtcgcagcacaccgaaccgcacgtaaaaaaaaaaaaaaaaaaaaaaaaaaaaaaaaaaaaaaaaaaaacttgcaa

SEQ ID NO: 16003 - DNA, 997 bp, Zea Mays
ttcgtaatggcaattgtctccctagcagccacgtccatgacgttctcccgtttcgcccgccgtcggtcagcctgtgtccgtggctctcgcctgccacccaagcagccatggcggccgcgctgctccgccgtgcgctccacctccgccgcgtgctcccctcgcttccgcacagcgcctctcccccgccttctcggccactccgaccccgaagacctcccagcagaacgccgccaccaccacgatcgacctctcctccgacgagagtcgccgccgcctcctcaacaggttggtgtaccggagcaagcagcggggtttcctggagctcgacctggtgctgggcacctgggtcgaacagcacgtgcacgccatggacgagcccaacatccgcgcccttctacaagtgctcgacctcgaaaacccagatttgtggaaatggttgactagtcaggagcagccaccagaggatctgatttctaatccggtgttttctgccatcaaatcaaaggtcacagataacctgatcaagcatgcttctcccgagacccgatcaacacctggccaaccttgggttagaggatgggatgacataaagaaaggcaaagatggacctaactatggaaatcagtgacatgttccttgaaatggggatgacagctttacatcctaaataatccccccccccccccccatgttttgtgttcgtgtagattaaggtgaactgtgaccggcatgtgagaagtttgttaaatcgatattggagaatcagcttgtaactacagatggcactcctgatgtgtccctggcagtttgtctgcaactggaaagatggtatacatagcattgtgttacttatggcaatccttgaagcatttggactgaaacttaaatattgaaaatgtggacgacaaacatcatcagaaagaagtgtatttcttgctgcccttattattaaattttaaatgatagtttgtgtaaagaagcctttggtgcaaactcc

SEQ ID NO: 16004 - DNA, 3403 bp, Zea Mays
gccagcgcggcgcaagtgcgcaaagccgagcgcgagaacccacgaaaccaacccagagcccccattaaggcaggctcgctgcagcacgtctcgcgctccatcgccgcctgtcctcttcctgtaatgtcactcccccgatgcctgtgcgcagctcagtggccatgacgacgacggccgcccgtgctctcgccgccctcgtgctcgtcaccgccgccgccgccgccgccgccgtcgccgacgatggggcggcgctggtggagatcaagaagtccttccgcaacgtcggcaacgtactgtacgattgggccggcgacgactactgctcctggcgcggcgtcctgtgcgacaacgtcacgttcgccgtcgccgcgctcgacctcaagtcaaatggcctatccgggcagatccctgatgagattggcgattgttcatcacttaggacgctggacttttcattcaacaacttggacggcgacataccattttcaatatcaaagctgaagcacctggagaacttgatattgaagaacaaccagctgattggtgcgatcccctcaacattgtcacagctcccaaatttgaagattctggacttggcacaaaacaaactgactggggagataccgaggcttatctattggaacgaggttcttcaatacttgggtttgcggggaaatcatttagaaggaagcctctctcctgatatgtgccagcttactggcctttggtactttgatgtgaagaacaatagtttgactggggcgataccagacaccattgggaactgtacaagttttcaggtcttggatttgtcttacaaccgctttactggaccaatcccattcaacattggtttcctacaagtggctacactatccttgcaagggaacaagttcactggcccaattccttcagtaattggccttatgcaggctctcgctgtcctagatctgagttacaaccaattatctggtcctataccatctatactaggcaacttgacatacactgagaagctgtacatgcaaggcaacaggttaactggatcgataccaccagagctaggaaatatgtcaacacttcattacctagaactgaatgataatcaacttactgggtcaattccaccagagcttggaaggctaacaggcttgtttgacctgaaccttgcgaataaccaccttgaaggaccaattcctgacaacctaagttcatgtgtgaatctcaatagcttcaatgcttatggcaacaagttaaatggaaccattcctcgttcgctgcggaaacttgaaagcatgacctatttaaatctttcatcaaatttcataagtggctctattcctattgagctatcaaggatcaacaatttggacacgttggacttatcctgtaacatgatgacgggtccaattccatcatccattggcaacctagagcatctattgaggcttaacttgagcaagaatgatctagttggattcatccctgcggagtttggtaatttgagaagtgtcatggagattgatttatcctataatcatcttggtggtctgattcctcaagaacttggaatgctgcaaaacctgatgttgctaaaactggaaaacaacaatataactggcgatgtctcttctctgatgaactgcttcagcctcaatatcttaaatgtgtcatacaataatttggctggtgctgtccctactgacaacaacttcacacggttttcacatgacagctttttaggtaatcctggactctgtggatattggcttggttcttcatgtcgttccactggccaccgagacaaaccgccaatctcaaaggctgccataattggtgttgctgtgggtggacttgttatcctcctgatgatcttagtagctgtatgcaggccacaccatccacctgcttttaaagatgccactgtaagcaagccagtgagcaatggtccacccaagctggtgatccttcatatgaacatggctcttcatgtctttgatgatataatgaggatgactgagaacttgagtgagaaatacatcattggatacggggcatcaagtacagtttataaatgtgttctaaagaattgcaaaccagtggcaataaaaaagctgtatgcccactaccctcagagccttaaggaatttgaaactgagctcgagactgttggtagcatcaaacaccggaatctagtcagccttcaagggtactcgttgtcacctgttgggaacctcctcttttatgattatatggagagtggcagcttatgggatgttttacatgaaggctcatccaagaagaacaaacttgactgggtgactcgcctacggatcgctcttggtgcagctcaaggcctcgcttaccttcaccatgactgcagcccacgaataattcaccgggacgtaaaatcaaagaatatactcctcgacaaagattatgaggcccatcttacagacttcggcatcgctaagagcttatgtgtctcgaagactcacacgtcaacctacgtcatgggcactattggttacattgatcccgagtacgcccgcacctcccgcctcaacgagaagtctgatgtctacagctacggcatcgttctgctggagctgctgaccggcaagaagccagtggacaacgagtgcaatctccatcacttgatcctatcgaagacggcgagcaacgaggtcatggagacggtggaccccgacgtgggagacacctgcaaggacctgggcgaggtgaagaagctgttccagctggcgctcctctgcaccaagcggcagccctcggaccggccgacgatgcacgaggtggtgcgcgtccttgactgcctggtgaacccggagccgccgccgcagccgcagcagcagcagcagaaggcgcacgcgcaccaccagctgccgccgcagccgtcgccgccggcctacgtcgacgagtacgtcagcctgcggggcaccggcgccctctcctgcgccaactcgtccagcacctcggacgccgagctgttcctcaagttcggcgaggccatctcgcagaacatggtgtaggggaagacgtagacgttcggtgaggcgccttgagtgaggccgattgcagggggagtagtttgactgacattttgtgggacgcagcgcaggagattaacatgggactcagtagctagggtgttgttagctgtaaaaaaagtcatgtgacgcaagagcagcggagcttcttcctcttctttatcccccctccccatttttctttggtggtctaacttactaggaggctgtattgatccatcatcatctctcccgttcctctgcttgatgatcttttgtgactttcgcggtcctctgtattgatccatgatcttttgtgacctctgctttattttctgggatctttacctcagaac

SEQ ID NO: 16005 - DNA, 785 bp, Zea Mays
ctcagtatctttgattctggcaacactgattttggtgattccaagatcccaaacactactgagatcaaaaccaagcctgatggttgggaaactacttcaagaggacaggatgggaacatatgggatatctcacagcgagaagatgacattctaatacaggaatttgaaaggcgaattgcttttagtaaacagcagattgctagcttcatcaaaacccacatttttagtcggaggcgtcctatcgatggatggaagtacatgattgaagaaattggccccaacgcaagaaaaggaaaggggagtgtgcaaagattaccaagtgtcagtgatcctgcaacccagccttacagggaagaaactcctgcaattgcttctagttcctccttcagaggcaatcggccatgatggtgttcgataaaccaaatcttttgctggtttcactggcatagtttatacaggcattttccccttccttttggcttcaaatgtatggtggatgactccttgcgaagaacatgacgaactttccttctgcgttgtataattttgtaatgaatgtgacgctttctgatgaaccagcaatggaagcgtttaagttttctagttactactctctctgttccaaccctccattccaaattgttccaacttgtaagtcgttggcttttctaaagttactattccctccgttacaattcctttctttcaaattctaggtctagattttcaaattgtaagtcgttttagctttcctttctaattgtaagtccttttgacacttctaa

SEQ ID NO: 16006 - DNA, 1398 bp, Zea Mays
ggagagggagaggactggactggtactcgcagtcgcactagtgctaggcgcatccggcatccccatcccttgcctccgaatcggatcgccgcccccgctgccgctgccgctgccgccgagcggaagcagccatcaccccaaaccctagccagccatccaactatggagccgcccgccgccgccgccgccgactcctcgcccgatccgacgccgcaggaccagtttcctgccccgtccccttctccctccgcctccccggccaagcgctccgcctggaagcacccctcccccaacggccccgccgtcatggatgccaaccactggcccgcgctctccgacgccgccaagggcatcaagctcccagactcctcgtcttcctcgcctgcgcccgtcgccgccccatcgcaaggagaacctgtgctcagatgtttacttgaggcagcagatggatgatcaaggctgggttgatatatctcttatagctggcttcaaaaaggtccaagggctaaagaaggacctgcaatatataaaagagacggtgcagtcctcatctattctggaaatgaaggataacaagatcaggaagcatgatgactgggtgaaatgggtgatccctcgtgagagcaatcctgatgtcccgtcaagctcagcatctgtaccaaggcctgatgtcaataatctgacggcacatcttggaggcatggatctgcaggattctgctagctctgctggcgctgtggagccgaagcataatgatgtggtccagaacggatcgccttctggtaatgaagaggctgcagtagctgaggacagctctgatcagcagtagttacaacaaggcagtggtttggattcacaccatgactgcaggggttttgtcggtgcgcgaatgacagggcacaagtggtaacttttttttggcaacttttggaggggaggcgagaggcgtattagactgacaagcgaacgtgtttactggcgttcaggtaagattttggtttaccttgttatattcaggggtagcgatgaagatttggggcagttggtggaatggagatgaagcagaatagtgggaaaacgaaggtggtgatatctggaggcgcctaggaccgaggacaaagattatgtgtgataagttagtagcccccctgtggttgtttactggggggggttgcgtttgcacacgggcgcttggatgctatcatgctgttgttacgatgaactagttggttttcgtctgcgttaggatgggggatgttgtaggacctccgattttttttatggaggagctgaacttggagagccagggagttttttttttttttggacttgttgttttgtggcatgatggtgttaaattgaagtaagaagatgctcattctgctgtatggtattgat

SEQ ID NO: 16007 - DNA, 195 bp, Zea Mays
cacaggagaagtacatgtgcttcaagaggagccacacaacgaggagttcgacttgatctaggtggcgtctcccagttgactttatggcaccaaggatggactttagtttgttttatatttatcttttattttgtaagacttcctctatgtaacaagtattctgattatattgtgacattcatccctaaacactct

SEQ ID NO: 16008 - DNA, 843 bp, Zea Mays
cttctcttcatacaatgccttgggtctgtcttgtctccgcaggcaagagttgtgtccggagaaacgaatgctttattacccatatcttcctaaggtcattggctctgattttttggagaggaggctgagagatatacacagcaacagagaagacagagcagcttgccatgtttttgggcacactcatttctgttgggattctgtggttgatgagatcaggtacgtgcaggctcctctggcataccctcgagaaagaaaacgccggatgaacggtgaaggctggctgccattttgtgtataccgtgacggtttcaacccagaaatttatccagcactgtggtcagattactacaacaagaacaaaagggaacccgagaacactcagctcgcgccttgggttgccagccattacgcaaagtaccacaagttccactgaccctttctgagttgccttggctttttgccgaattgatgcagatcgtcccttcaggatggtgttgaattagctgggaaaaggagatattgacgttttacctgtacatgatcttttcttgtttctacccttaccataacttttgggcaagtaagcgccagcctctgttcgttgtatgttgcagaaatctgaataatgtgtataagattcttcaaagcattgctgcagagatagcgaaatatagctgattctgttcatctaacaagctccatctgtccatttgacttctctctagtggagtttataactgcaaagtcactgataattctgcttcaccctgatactattttaggttattttttattggtgtatctggaaatcatttgtctgaaatctgaagagaagggaaa

SEQ ID NO: 16009 - DNA, 2485 bp, Zea Mays
ccccaccccactgctgcagctttttaaggacaaaccaaatccgctgcccctgccctgcatcgcagttcgctgcaacttttgctcacaggacacaggcacagctttgatgagcagcggccaaaacagaaagagcgattcgatcgtttcctgctccactaccactagctagtctgccgccgcacgccgtgccgcgcgagctacgactgccggcgccggaggcaggagaggaaggtttgttgcaacagaactggcaacagacattgttatatccgttggggatgccaagttttatcttcataagttccctcttctatcaaagagttcactcctgcaaaggttagttgcttcaagcaatgatgagaaaaatgatgaagtggatatctctgacatccctggtggaccttcagcatttgaaatatgtgctaagttctgctatggcgtgattgtaacactcaatgcatataacgtcctcgctgcccgctgtgcagctgagtacctagaaatgtttgagagcatcgacaaaggaaacctcatatacaagatcgatgtgtttctgacatcaagcgtatttcgcacctggaaggactcgatcatagttttacagagcacaaagtcactgcaaccttggtgtgaaaatctgaaggtaatcaaccactgcattgactgtatcgcgtcgaaggcgtcaattgatccatcagaggttgaatggtcatacacttacaacagaaaaaagctcccatctgagaatggtatcgattcacattggaacggtgtcaggaagcaacctatggtccctagtgactggtgggttgaggacctttgtgagctcgaagtggatttgtacaagcgtgtgatcatgaccatcaaggcaaagggaagcacaccagctgctgtcattggagaagcattgagggcctacgcataccgacggctgcttggctcccttgaagatgctgtgagcaatggagtcgattgcacaaaacgccgtgcagctcttgatgccattgtatttctgttgccagctgaggaaggctcggtgtcatgtggttttcttcttaagctgctaggggctgcatgtttgcttgaatctggggagtcccatcgcgttaacttgatcaagagaataggcacgcagttggatggtgcttcagttccagaccttcttataccgctaaatactaatgaagacaatatatccagcatagatctgatcatggcaatagtggaagagttcatgtcacggaatggtgatagtggtacggagaaatttcaagacgatgaaggaatcgtggacatcgagaagtcgacatctgtttccagcgcgtcaaagcttgcagttgcaaagctgatcgatggatatcttgccgagatcgccaaagatcccaaccttcctcttccaaagttgatcgcactcgccgaaatggtgtcttctctaccccggccaacgcatgacgggctctatcgtgccattgacatgtatctgaaggagcaccccagcctatcaaagagcgagaagaagaaactgtgcgggctgatggactgcaagcagctgtcgcaggacgcgtgcatgcacgccgtgcagaacgagcgtctccccctacgcgtggtcgtgcaggttctcttcttcgagcaagtccgggcatcgtcgtcggttgcttctgcaaggagcgacgctaattcgacgtcggggctcccgtctgccgttcgctcgcttcttcccagagagaacggcaactccattggcagctccaggtcagccgcgacgacgatgacgacggaggaagaggagagtggggtcccgacgtcgagcgacatcaactctctgaggtcgatgaggctggccaacaacagcggtgggagcgagaggagcagcggcagcagtgacgtgaacaacaagagcagcgacgacaggagcgccgccgccacggggaaggcgaaggggacgatgctgatgccgaagaagatgctgagcaagctctggtccgggaaaacgaacgccggcgagagcagcagctcggacacgtcggatagccctgggtccgccaacccggaggaggcgaagtccacgcagtcgcggatcacatggcgctcggtatcctagtcgcgcgcgcgcggcgggggttcagcggggtcacaagctcacagccttagttttgttcttggtcttgattttgccttcgcctagcgagtacagcagtagcgatctcataacatatggagttactgctactggtttcacttgtcatgtcgccgatgacgttttctttttggcatgggattgcttgtagctggagtggagtaggtttggtcattggtgatgtttccagcgaagttccatgggatatttattatgtgacctttttttcatggtaggaatacaaagaaagtagtacagtccgttataattgatgtattttttgcaggcaaaaataatcatagtgttttagtttgcttcttactgctatataacatccgttatacctat

SEQ ID NO: 16010 - DNA, 1569 bp, Zea Mays
cgccgcagctgctaccggttccgaccccagcaacctcgacgccgcagctcagacggcggcggcgaaccctaaccctagctcctccgccgccgcctcctcctcggcgccctccgtcccgcccgccctcgcgccgaagaagaccgcgcaggaggaggcgctgctctccgaggagcgtcgcatcgacgagctcgacctcccacggcacgaggtggtgcggcgcctccgcgtgctgcgcgagcccgtcacgctgttcggggaggacgacgacgcccgcctcgcgcgcttcaagctcgtgctcaagtccggcgtcatcgacgacattgacgacatcgacctcccacggcacgaggtggtgcggcgcctccgcgtgctgcgcgagcccgtcacgctgttcggggaggacgacgacgcccgcctcgcgcgcttcaagctcgtgctcaagtccggcgtcatcgacgacattgacgacatcgacatgaccgagggacagaccaacgacttcctccgcgacatgatcgagatgcgcaagcggcagaagtccgggagggacacctacgccaagggcaagagcaagcgtgtaggtgggggtgatggtggcgacgggggtgccgctggagacagtgcagatgatggggatgccaaggggagcggcgatgatgctgacgcagacaaggactccaagaggatgaggaccaagtttgaggagctttgcaatgaagacaagattttggtgttcttcaagaagctgcttaatgagtggaaccaggaattggatgagatgactgagctagagaagcggacagcaaaggggaagtccatggttgcaacattcaagcagtgtgcacggtatctcagcccgctgtttgagttctgcagaaagaaggttcttcctgatgacatccgtcgagcattgcttgttattgtcgagtgttgcatgaagcgagattatttagcagcaatggaccaatatatcaagctggcaatcgggaatgcaccatggcccattggagttacaatggttggcatccacgagcgttctgcccgagaaaagatctacacaaacagcgtcgcccacatcatgaatgacgagaccactcgcaagtatcttcagtcaatcaagaggctcatgacgctttcccagcggcgttaccctgcactgccctcaaaatcagtggagttcaacagcctggcaaatgggagtgacctgcaggcgcttctatcggaagagaatggttcgggtaaagcttccgaggaaaggctccggttgatgccagcattgaaagagtgatgccttcgcagactagattggattacaagtagagcttgagatgcttgtgtaatatatacaatcaatcctgcctgtttttttttcttttcctgtttgtgctgaagagaaaagcaacagagttatgtatgctaattaaatcgctttaccgctacatctggtcaggcaaagtttttattaatatatctgccaattccggagaaccattttttactatttatcatcaagcagcagtcatgcttactgtattaatcaggtttggtgctatcctagttgtgtcagta

SEQ ID NO: 16011 - DNA, 1230 bp, Zea Mays
ggtgaaacatcggaatgctaatgccgaacatgtcgccactattattgcggggggaagtgatgcagtgacaggccacataatatcgactacgattgggggaaagaatggtgaaccaaagaggaccatcagctatatggctgagcgagttgttggaactggatcgtttggggttgtcttccaggcaaaatgcattgagactggtgaaaccgttgcaattaagaaggttctacaggacaaaagatacaagaatagggagttacaaataatgcgatcaattgaccattgcaatgtcatttccctgaagcattgtttcttctctaccacaagtagggatgaacttttccttaacttagtcatggagtttgttccagagtcactttatcgcgttctgaaacactacaaagacatgaagcagaggatgccccttatatatgttaaattgtatatgtaccagatattccggggactagcttatattcatactgtaccaggaatttgtcaccgagatattaagcctcagaatatcttggtggatcctctttcccaccaagtcaaggtttgtgacttcgggagtgctaaaatcttgattaaaggtgaagctaatatatcatatatatgctcacgctattatcgtgctcctgagctcatatttggtgcaactgaatacacaacatctattgatatatggtcagctggatgtgttcttgctgagcttcttcttagtcaaccattatttcctggggaaagtgctgtggaccagctggttgagattatcaaggttttgggcaccccaacacgagaggaaattcgttgtatgaatcccaactatacagaattcaagtttcctcagataaaagcatgtccatggcacaagatcttccacaagagaatgcctccagaagcaatagatcttgtttcccgtcttcttcagtattcgccgaatctgcgatgtagcgcacttgaggcgtgtgctcattcattctttgacgaattacgagaatcacatgcaagactccctaatggacgcccatttcctccactattcaactttaagcaggaagttagtgtgttggtttgaggacgaggaatggagtgatttatatctgttttttatgatggaatcatggaatcaatgtttgtaggggatgaaaccgaaccatccgtgttgcatggttttagggttgaaattgttcatgtcctatgtttgaaggggacaatgttatgtttcat

SEQ ID NO: 16012 - DNA, 472 bp, Zea Mays
tctgggagcggcaagcggcgtgagggattgacagactgctgactacgggagccgggagggggcatcgtgcgccgtgcgcggtggcgaaggaagagcgaagcggcggaggccgagctgctacggcgctgactggccgggtcgcacggctacgccgctactcgacgcttgctgcggcttgtgggaagctggagaagaaagtttgtcgcctgtacagctgtcggagaagaaagctcgtgcttggcggcttgctatgggccgcgattgagaggagatctgaaaatggagaaaaggtgcgagctgcaatcaaagttaaggcattagtcatcatttgcttcacctcttctggacaggctgcaaggttgctctgacataacgaggaagtccctcttcatggtcggagaaattgggggcaatgactacaacctacctcttcaatcgagtgccatttgaaaagggtgttctggacaaagaa

SEQ ID NO: 16013 - DNA, 628 bp, Zea Mays
cagcaagactgctacaaaagtgagtgaaatgttgggcaacgtgaatacaagtagcgccctttctgcatttgagaaaatggaggaaaaagttatggcgatggaatcccaagcagaggcactcggccagttagcaactgatgatttagaaggaaagtttgcactgcttgagacttcatctgttgatgatgatctttcacaactgaaaaaggaattgtctggaagctctttgaaaggagagcttcctccaggcagaacagcagtcagcaactcaggtgctgggcgccctttccccgacctagagattgagagcgagctaaacgagctgcggaggaaagccaaggaatattaggttcattccttgtcgattcagcaggcctgacggaatctcatttccaagaaaatatagtgcagctgcagattgctccattgcgcgtttcgaaagttgaaacacaagtgcgcattgactgtttgttaaagagtatggaatcggctaatttctcggcattttccccctcgagtgacatttgtacagctatccataaaattgttgtaaatcactactctctctagagcctttttttcatactatatataaagtcaaagttcgaagttcccacgccgtggtttt

SEQ ID NO: 16014 - DNA, 909 bp, Zea Mays
cggcactgggtctatggttttggtggagtgggtatggtcgttgaagttctaactgacaaaattacaagatcagttgctgacattagaaacgtggtgaaagactgcggagcaaaattggctgatcctggatctgttacctttagattcagacaagctcgagtggtgaacataaaagttactgatgcagataaggaccaactgctcaccgttgcgttagatgctggtgctgatgacgtccttgaaccaaattttgatgatgatgactctgaagaagaagcagaaaggttctacaagatagttactacatcagaaaactacccagttttgctatcgaagcttcaagaagaaggattgaagtttgaaactgataatggctacgaacttgttcctctgaacccaattgaggtggacgacgaggccgtggaactaaacaaggaacttgtttcaaatttgctagagcttgatgacgttgatgccgtctatacagaccaaaaatgagtgaattcatgagctacagctctcaattcaagacgcgctcggccaatggactttgttcgagtatattcacttttcattgatgggaaaaaaatgttaggtctttttatgaagcctggttgagcaccatcggctctacccaaaaacttaacctagttatccagcatctttttgatactttggcatttcgcaagctcatgtctataccttggtttcttcccagcccatcgtgttgggatggtttgatacatgttcagaaagcagatgtgagaaaccatagtaaaataatacgttgatgctgatccatttttgggtcttgttaaattgcaatggaaatgctatgattttggtaagcattgaaatgaaaatgctttggctctctgaataaatgaatgtgctcttcgctcctataag

SEQ ID NO: 16015 - DNA, 866 bp, Zea Mays
taaattttccaaagacccaataattgagtgttctaaatttagtacaatgtggtctaccggaactagaaaaggaagttgacgaaaagatagaccagttcagtgcatgggtggagaaacacccaaaccgcagaagccagatctgcctctcctttttcgacgagaaacacagacaccctggttggtttgtcaacaaaacagagcgcatctattgggagcaatggttcatcaatttgcaagtcatgttccccaaaagatacagcaagtcaaacagctccaaagggctgacaaacatccaagcaaatgccgtggaggagaccagcacaaggcgtgctgcattggaggcgtcgattaacgaagtgctgttccagatcataaagttcgccaacgagaaaaaggaccacattcctgctatccctgacaggattttcaatcacgagatcatgatcccaagctcggattctgtatttggatggaacacggacgtcattcgcagagttctgaatagcgggcacccatactcgctttaactgaagacgacatctcagtgggcgcccgtattcagtttattagcgtgctgccgccctgtttggaagacggctctgttaaccatcgtggtgaaccatataatatgcctaaggaaaaacctagttctgtgtacatcaccctgctcatctggcatgtacatactgtgttgggatcttgctcatcggtcaaacattcttaagttcgattaagtttataaataacaatattatgattctaaataagtttatcatgtaaaagtatttttcatgattgatacttattgcgaagcatctccgagtgagttaggtggttcgagtaacactccttaagtcttgaattcg

SEQ ID NO: 16016 - DNA, 2890 bp, Zea Mays
gccgtttggggccgtaggggggcgctgtttcgcgctcctccgtgacggtttggggtgcattgcagcgtggattcggttttcttcgtgcggcatttgtcggcgttcgccgcgcgctctttcaagcgtcgttttttattcgttctgtggttctaatttagcccttcgcaaggttgcttcccatgggggcgtagctctgaacccctccggtccggtgcggcggcggattaggctccgatggggaagtctccggcgaagtggatcaagtccgtgctcttcgggaaaaggtcgtcgtcgaggtccggctccaccaaggccaaggatttatcgaagggtacgactaacaaagcagcagctgctgctgctgctgctgccgggaaggagcccgcgttctctgagagctctccggtcatctcggagcctgtgcttgttagcgcccacaacaatgagaccgcgcgggaggccgctaagggtgagaattccagcgtgcaagaagtgccagtgactgatgtcagtcaagacttggagaagcagggcactgttgggtctgatacgtctaatgatgctgagaggttgagggaagagcaagcggccgtgaaggcacaagctgccttccgtggttatctggcacgccgagcattccgtgccctgaaagggatcataagactacaggcactgattcggggacatcttgtaaggaggcaagctgtttcaactctccgtgccacatggttgattgtgaagtttcaagcccttgtccgtggaaggaacgttagactttctaatgtttccattcaagcaactacggaactttcccaacagaacttcgggggttctaaacctggttcctggaaggagaagttgtcttcaaatgcatttgctcggaagcttctctcttcaccaattgtggttgaggctcttcacgtccagtatgatgagatggaccctaattcggccttcaattggttagagaggtggacagtaagtcatgtctggaagcctatttcccaaccaaagagagttggcactgatgctaagcctcatacaaggaaggccagttatgcaatggaaacagagtcagcgaaattaaagcgtaatgcacggaagagccctgcagtgccatttgagccttctcaaacaaacaccaccattgaaaatgagaagacaagacggaatccaaggaaattaagtagcactcctgctgagtcagttcccgatggccagttaacagaacttgagaaggttaaacgtagccttaggaaggttactagttccacggttgaaacctcaaaggtgcctagcccaacaactgagattcctgaccgtcaagaggtacaatgtgagagaccactaagaagtgcaaagcaagctccaattcatgttgagaatcaagaacctcagaatgttaatctatcggagaatgcaaagatggatattctggtaccagatatccagcctgacgtggaagttgcttcagatctagtcacaatcacaaatgaagaaaaagttgatgagacaccgtctgttgttgctccagcggctgaaattatgccactgcaagacatcaacagcgaagaaaatgctttggtgaatgatgtggaagagagatccaaagaagaacattcatctactgataacctgaaaggcagcaagaggaggtcttcattctcagctaaacctgaatatccagaaaatggctccaaaaattctccagccctgccaagctacatggctgctacacaatctgcaaaggcgaaactgcgggggaatagttcaccaagacttagctctgattcagcagagaaaaacgggttcactcgtcgtcactcccttccgtcccctaacaatggtaagataatttcacattctccacgtacgcaaaggccaacccatgctggtggcaaggacggagcaaaaggcgacaaggctatgctgtcatcaagagatgcgagcgagagaccactgaaagctgagtggagacgctgaggtggcgaatcaaaaccccaaaccctccatttggttagtgcaactatttgggtcggtggatggcgtctgcagtttgctcaacttatttacagggttttgggtcatgccttttgtgatgtatagctgaagtattttcccggtttgttttgtttcccagacccccagacttacccccccccccccccccccccccccccccctcctgcttactgagagggctgctgatgttagagagaacgagaacatgtatggattgagttgaacagaacaatcttagtcccgtttggtcaaatctgggctgcgttttgactgatggttgtgtgtcatttatggttattgcccttgaggtcgtagtattcttttccaaaggttcttgtcttcctgatctggttgtcatgcaacgcaaggcggcttgcgaaaaggaaccatgttgtaccatgcgatcaaagtagaagtaactctacgatgcttcagattgcttcaatgcacggtaactctacgatcaaaaagtagaagtaactctaggaagacatggccagatgttgttccaagtgacatgaggtcaagcacaggtcaatggccacagatgatgccatactattacatatgcatagttcttaagacgacgcctgttcccattttgtgctctcggcgaattgacgaattcaggctgagttctagatggctttgggaatagcaattggatctccattgtctatctgcagtgcttgtcagtcttggagcctaccagctcaatgaatgacaattatggtaggtgagcttggtcatcccatggatgcagattaaaggtggttggatgatcaatgaaccagggctacttttttactattattattgtgactgtcctgtagcttaggaccagatgaggtcgacctcggaagtgctt

SEQ ID NO: 16017 - DNA, 3569 bp, Zea Mays
gtgggaccatggcctcgagcctggttaccacggacaggagatggggtgctactcctgcaaggaaatctagtatgactgttctgggaaaagtcccaaaaccgattaatttaccaagtcagaggttggaaaacaatggtcttgatcccaatctggaactggttccaaagggcacccacacctggggcagcaaagcaccatctacaacaccaaacgcatggagttcctcatcaattctgtcttccaagaacgatggaagttccacttcatctagtcacttcaatgtccggcccacctctggcggaggctcaaggccatcaacagctggaagtgaatcacttggttcacccaatgcttggggtgcaaattctcgcccatcttcagcatcaggcacatttccatcatctcatctaccaatggccacaaatcgtccccaaagtgcggaaacaagacctggaagttcacaaatttctcgatttgcggataatgcttcagataatgtgaaagcatcgataaggactattgatagatcggaatcttcatcacgtgggcctgggttcacattaagtactggtgatttcccaacgcttggctctgaagcaaacagtcaacgagggcatagttcgaaagggcgcccaacttctagtttgggtaaagaggtgtcgcaaggtgaacaagtgaagagcctagcaactgcgggcaaaaatgaaggagttggctgcagaacgtgcaaaaaggatgaaagctgaggaagaggaacggataaagaaccaaaaagcaaaagcactcgcaaagttggaagaattgaacaggcgatcatcagtacttcagaagaaatcaaatgatacaaaagtagaaactgatgatgcacatgataagcaacagattggacttgatgtgaatgctaaacttgacacttcaactgaacaacatgatgttgttacgcctgataggcttactgctcttctgcctcctaatgatcccaatcatactatggttcagatacaggcccagtctactgcacaatcaaatgctttagatggtggcaaagcgcatgatgctcataccacctcatctttggtcaagaacacacacagcaacatggagcatgttgtgcagaagagtatctcacagtcgcataatatcagtatggtaaagactaagcaaggctacaggaaaagacaggttgtttcagaggagaaaatttctggcgagaaggcaagtgcttcagtaaccactgattccagtgtgcagaaaaatgttgatgttcccgtcgacacagtaacggctgttgttgcaccacatgatgatcccccaactcagaacaagaagggaacccggcatttgaggagtaagaaaaaggtagatgatgcttcagttatttctaaacatccacctgtggtgtttaatgaacagaatacagtgaaaatctctaccgagccaaaaacacatactggtggtgttattatcagtagctctattgttccgattgaaggtactattgtaactgttggaagtataactgttggtggactttcacttacagctatgaatcaggagcatgttaattcagcagatggaacaaatagtactgaaagtggcctatcaagacctcagcaagcaagaaaatctggaaagcatcagcatgttcttcggcctgttgagaagccacatgggaatgatggtgtcttgtgggcaccagatatgctaccattgcataatgagcagtctgatggagccatgccgactgcagcagtagctgacgtcactcagccagctgggaaagccatcaatgatggagagaatgtgacaagaacaaagagggctgaaatggaaagatatgttcccaagcctatgtccaaagagctgcaacaacataatccaagccatgataaggaagcaattgataagcccggtgctgctaaatcacatcctgcagccgaacccaagaaaactagcaaaggacatgggggcaaatctaatccttcttggcgcaagcgggatccagatcaacctgctatggtggcaccaaattctgttgaccaagcagacaactcttatgaatcaaaggaggttcagaactgcaccgatatgaatcagcctgttgaacttggcaaggaagatacacagttaaaatccaatgtagatgctgctgctgagaatagctcagctccagctcaaactgttccactatctgccggtggtgcaaaagaacatagtgcggctaacaggcaaaggcgacagcattttaaggctcaaagaaatgaagcaagtagctactcaaatgagagcaaagttagagagggcaagaacgactctgtctatcaatcagcatcaccggtgattgattcgaactcatccaatcacaagaatgtgccaagatcagatgtgaaaaacagcggcatagtttcacattctagagcctggaagccgaaaaccaattcccatcctcagaacagctcagacggcaagattgctgttgaagggaaagtggattcccatggtggtaggcttgagctgaacatgcccaaaggatctgatacaattacccatcaagacaccagcagtaaaccgatgaaaaggagtgatggcaccgatgaggcctcacacagcaaacaggagaacctgacacaggaagatggtaaccagaagatcgagactggacaggagcaggctaatcctgcaccgcgtcgccaaggccagcccaatgcaaggtatcacaggggaggtggggcacacaggggaaggggcggttatgacactgggaggccaaaccatggcacaaacgcggagaggtggaagggtggcagccatcttgaataccagccggtcggatcccaaaacaaagctggaggcgacttccagctgagtcagggcatggaagatcgaaccgaggggcctcctgcatctggacaagcgttcggggagcgtggccacagcagggggctacgcccagcaggccgctttgtccggcgaaacactgcctctacgtctaccactaattctcaccaacatgaataatcttccgcggctgccacatccgctgagctgcaggaaaaaactcgccttcgtggtggcgtttcacaacatatttggatgcacttgggtgggcggttggtgtccgtcgtcaacgacgagtctacggtggtgagcattaggatcatgtaacggtattagtctttgccccaaagggcacaccctggcccctcacgtgtcacgtgtgactagattttttccagaggaacatccacccttgtttgggatgcaacgttggaacgtgtgctaacagagttgtgtttgagaactgggtttaaatgttgttagcctgtgttgctgatgggaactgagagtgttggtttttgcccaactttcatggcatgtctttgtttgattgttggctctgttgttcatggcaatcgctttggatcctcgcgaccaaagaaaaaagtagtagctagacatgtagctgacaatttgcgtaagccatgtcagtgctaccatttcatcttctaacgtagcagtggtctacaacatgtaagtgatgggtctttgggtgtcgtggtctccgaaag

SEQ ID NO: 16018 - DNA, 2347 bp, Zea Mays
ctttttctccgccccccccaaaccacatcgattattgcgttgagcgcttagactcttgttgtctttgtttttgtggtcggcgagcatggaggaggcggaggcggctcacgggctctgattggcggatggcgcgtcggatcggagcagtcgagcttcggggatttcctgtccctctggaagggatgaaatgcggcgactacctggtgaactgggtggagctctagtgccagccagtgttcctgctgacgcctgcctcatctagtccccccttcgttcagttcttgtggcgagttgttaatccaccgtgtccgggatccgtttggcctggggttttgaggagatggacgacgaggactactcgtgggtgcggcgcaccaggttctcgcagtccatcgtcagatccagctctggcagggagcagtatggcgcgttcatcgagcagttcagccgtggcgccgagctgaggcagaatgggttgggcacagggtacaggaaccctcgccagagtgtacagcccttggcgaagggatccggggtctccaactctgcaaggctgccgattcccaaggcgaagtcagcagttgcccagtcggaacggaagctgaagcatgcgtcttccgaaggccaattgaacagagacggtgatcgcccgttgcaagaatcatcggcgaagcagagccggaaaggggccgtcggcctcagtctggacattccgcagctgcatgtggttcggccatccaaggagagcccagacgcgctggatttctctttccactcggacgagcacagccagaggctccagagagtgtgttccagcccggctcctttctctacgaaggatggtacggcaccagctggtgattccagagcgagcagtgcatctatgaagatcatcggacaagtgtccaaacccgcgccgaaacgaagagccaagtcccctatccccaagcgcgtcatctcggatgtgtttaaggaggcgaaagcagccaccaagaggttctccagcccgcagcggcagaggaagcccacatctccacggtcactagatgacagccctccattcggctttgcttcgctaagaacaccaagcaagctgaagattaatagcagaacctcctcatggccgagaaggaacctcgacagtgggctggcgaaagttgctgcactggagatccttgagaggtggacggtcgatcgctctgagttgctcattggacataggtttgcatccggggcttatagccgattgttccatgggatctacaaggagcaacctgttgctgtaaagtttatcagacagcctgacgatggtgaggatgacgaattatctgctaagcttgagaagcagttcacttcagaggttaccattctggcaaggctccaacatcgtaatgtcattaagcttgttggggcctgtaattgcccgccagtattctgtgtaatcactgagtttctgtctgggggttctttgagggctttcttgcgaaagttggagcgcaaagctcttcctttggagaaggtcatttccatcgctttggatatcgcccgcggcctggaatatattcacctccagggaatcgtacaccgtgacgtcaaacccgagaacatcttatttgatggagaattctgtgctaaagttgtcgattttggagtggcgtgtgaagaaacatactgcaatttgttaggggatgatccaggtacttatagatggatggcaccagagatgtacaagcacaagccctatggccggaaagttgatgtgtatagctttgggcttctcttgtgggaattggtcaccggttcactcccttatgaagatatgactccgcttcaggcagctttcgccgttgttaataagaacttgaggccggtcattccattgagctgcccagcagcgctgaagcttctgattgagcagtgttggtcctggcaaccagaaaagaggcccgactttcagcagatagtttctatcctcgaagatctcaagacagttcttgaaacagacggaacactccacaaggtcccaagctcgatctgccaggccttggaatccaatgatcagaacaagaagaaggccggtaactggatccagaggctgtcatacgctcaacctgatttctccgggcctccacccccaaagttactgtagctacgcgtcttcttgttcttggtagcttgtttatctggttggtagcaactgtgtaaattgaacctttcttgtttcttgttgagagaccacagatttcgtcatggtatatactcggacaaagtacatacatcaattcttttttcggctaccttaacaacttctatcttgatgatacatgggagcgatatgatagcaatc

SEQ ID NO: 16019 - DNA, 1483 bp, Zea Mays
tttcaatattagtgtctttatagcattctgttttcctaggggattcctgtagctcctctctgggactcattcagaggtcaatttgttggtctccttagcccattggatttcatactcatattgcgggagctagaaactcatggctcgaacttgacagaagagcagcttgaaacacacactatatctgcatggaaagaggctaagcggcaaactaatggaagaaatgatggtcagtggcgaccgcaacagcatctagtgcatgccaccccttatgagtccttgagggacattgcagtaaagcttttgcaaaatggcatttctacagtgccagttatttattcatcatcatcagatggatcattcccgcagttattgcatcttgcatcactttctggaattttgaaatgtatttgtagatacttcaaaaactcaactggtaatttgcctattctgaaccaaccagtgtgctccattccgctgggttcctgggttccgaaaattggtgatctgaacagtcgtccattggctatgttgcgacctaatgcatcacttagctctgcccttaacatgttggttcaagctggagtaagctcaataccaattgtggatgacaacgactccctgcttgacacttactctagaagtgacatcacagccctagcaaaagacaaggtctacacacatgttcggctggatgagatgaccattcaccaggctttgcagcttggacaagatgccaatacaccttttggattctttaacggccagagatgccagatgtgcctccggtctgatcctttgctgaaggtgatggagcgactggctaatcctggggtgcggcgggtgttcattgtggaagctgggagcaaacgtgtggagggcatcatatcactaagtgacattttcaagttcttgctgagcttgtgaggagaggagggcatggcggagtttttttaacagtagcaaccctctgggcctttgggtccttgcggataattggctatcgtcagggttcatggtctgtaaagttccttttttttttgtttcgttttttaccatttggcccctcccgcttgtataacctcaattaatataatggcaaccttcatttaatatgaggttacttgagggttacttgaaaaattacaagagatgttctttgcgaatagtctctttatacagagccttatacttgtaatatgcggttttttagctgtcccttgtatttagaaaattaatccgatgtctttggattgtatatgctcttagaacaattttaataatagcccacaacggattttataatgttgccatgtcacatatagttaaataaaagtctactcacataattttatgactaaacaacattttttttttgtcttcggtccgccatttacgttttggtctccatagtacggtaaggcatttttggtcatccgtgagtttttctgatcgattaggcattttaagtcttcggtctgcc

SEQ ID NO: 16020 - DNA, 1782 bp, Zea Mays
  misc_feature (1)..(1): n is a, c, g, or t
naagctttacaggcctggatctgttggttttgtgtctaaatcgggtggcatgtcaaatgagatgtacagcaccattgccagagtgacagatggtatttatgaaggaattgcaattggaggggatgttttccctggatcaactctgtcagaccacattctgcgttttaataacataccacaggttaaaatgatggttgttcttggggagcttggtggaaaagacgagtattcacttgtggaagcattgaaacaaggaaaggtccagaaaccagttgttgcatgggttagtgggacatgtgcacgtctattcaaatcagaagtgcagtttggccatgctggtgccaagagtggtggtgagttagaatcagcacaagctaagaatcaggcactaaaggaagctggtgcaattgtgcctacttcatatgaagctcttgaaagtgcaattaaggaaacatttgacaaactgtttgaggaaggaaaaatttctcctgttactgaaattacaccgcctctcattcctgaggaccttaaaactgcaatcaagagtgggaaggtccgagctcctacccacatcatctccactatttctgatgacagaggcgatgaaccatgctatgctggtgtccctatgtctacaattattgaacagggttatggagttggtgatgttatttctcttttgtggttcaagcgcagccttcctcgctattgcactcagtttattgagttactgctagggccggaaaggaccttgtttccagcttggtgtctggattattgacgattggtccccgtttcggtggagcaattgatgatgcagcccgatacttcaaagatgcatgtgataggagcctcacgccatacgagtttgttgaaggcatgaaaaagaagggaatccgtgtgcctgggattggtcacaggattaagagcagagacaacagggataagcgtgtgcagcttctacagaaatatgctcacacacatttcccttcagtcaagtacatggaatacgctgttcaggttgagacctacaccttgtcaaaagccaacaatttggttatgaatgtcgatggtgcgatcgggtcccttttcttggatcttctatctggaagtggaatgttcaccaaacaggagatcgatgagattgtggagatcggttatctcaatgggctctttgtgcttgcacgatcaattggcctgatcgggcataccttcgaccagaagaggctcaagcagccactctaccgtcacccatgggaggatgtactttacaccaagtgagaaagccattctttgcaaggcataataaagtattattatcgcctagagcttccagttgcctgtacacttcattaaatcgagcacttgcaaaaaagaaagccagagagagaggaagacgaacatcactagtcagcactagattgtgtgttttatgttgagttgcaaattcaggtcctgatttttgtcctgccatgaaccgttaggcgatattgtattggaaaggatgcttcctttattgtttcacgatatatggcctcagaatagaaatttccattaaaaatgaactctgatttgttcgtcgataaagtgcatttgtacagacacgcattacgaaactaggcattttcaatagcatattaatccagaaaaggatacaagttggtgacaacaaaaagatacacgtgtgaacttagtaagattttatgatgaatgtgagcatagtactgggaaatgtgacatgaaaccaaacaaaagaaatatatccaatagcagatattgtgc

SEQ ID NO: 16021 - DNA, 150 bp, Zea Mays
aggaccgagagatgatgatcgagccagtgatgtggtgccacccacaagatgcagttggtggacgacctgaagagtgatggacttaaccagtggatgctcgccaagcgagtacctccgcccagcaaacactatctaagtgttaaatcaaag

SEQ ID NO: 16022 - DNA, 1785 bp, Zea Mays
gaagctggccaatctcttgctcgttcacgtgcagcactgaagtatgttgtattggcaatttctgggcatatggatgatgtgctcacagaatataaagaagccatgcataagttacttttcgttctggagatgctagatccttttattgatccatctacaagtgccatggaagacacagtaatatttgatggtatctctgctatatatttggaaaagcaatcaagtgtatatgatattgccttaaatattatccatacagcagtaaagagagctgctgttctcccttctttagaacttgaatggcgacgaggagccattgccccaaggaggttttggatatatggagaaagatctctgcctagctctgtgccaactaaaaagtgaatcagatgctacaactgtactgccccttcccaccccctctccggtacttatgtactgtaacatgtttaccaagtaccgacttcaaatctcttccattaggttgcaaaagttctttctggatgtaatagtcaaccagtcagccctgatttcaagagcatccgtgaatcaatccttcaggtgatgtcctctttgagttctattgaagcatactttgagttcttcgcagccagatctgcacaagaacatgaggaacttgaagaagctgagattgaattggagcttattgaaaaagagaagtcagttcctaactttgttgagcataccaatgatacgatggtgcttgccatgccatcatatgaccgtgatggtagtgaggttaataaacggctccagcaaatccgggaaaatattcggtccctggaaaggtctaggctgaaagaggaaattacagcgcgcagacaaaagaagctgcttctaagacatgcccgtgaaaagtacctagaagagacacgctccagggaaacggagcttatgcaagagctcgacagggaaagagctctcgagatggaacgtgaagtagaaaggcagcgtcaactggatattgagcgtgcaaagtctagggaactgcaattcaacattgatttggaaaaagagaaacaaactcagagagagcttcaacgcgaactggagcaagtcgagttggggcggtcatcaaggcgtgagttctctgccaatcccaacagccgctccagggagaggtaccgcgaaagggatggtggaggcagagcacagcaggaggcggggagcctgaggtcttcgagcagccgaggccaggaggggggctctgcccaggcgcccgcaccggccgggccgggccctaccgtcatgctcgccgggtcaaggacgttctcgggggccaaccttccaacgattctgcagcctcgcgagcgcgctgccgacgaggacagcgcttgggccgaggacgctagcagcaacggagatcctgaactggacggcgtgaggccgcatgggccgcgaggcagcaggtcatcctcctctaggcaggttgcggagaggagggagcgggatggcactgctgccggcacgggcaggagagaagggaaatgggagaggaagcagcacccgtgactattccctgcttgtgttgtgcctaagcctaacggaggcttcctcaatcgcgttgtaattgtactcgtatgggcattggatcaggtggctgcttagtcaacggtaccgtgcattgataaaaaggttggatcatcgtatgggaacactaccaatcagctgcctgctcagtcaacagcaccattaccatcacactccgacttttgtcagatcccctaagggtgtgttcggttacaccaatccagaggggaggat

SEQ ID NO: 16023 - DNA, 482 bp, Zea Mays
tcccagtgccagtggcgacgacgggcgattgcgagccaccgccctcgcgaagcacctcggacacggcgactgccgactgacccggtacactgtttctccctccccatttctctctctcctgcgctgggtttaacgcagcggtaggcgatttcccccgatgcccccgtcgtgggtttgtccccgtggaaagaagcaccgctcccgtggaaacaagaagtcgttctagggatccaagatggcggcgcggatgctcatcgccgatccgcccagaatactacgccgtcaagcccccaagccccatgcacccacctctccagccactcctcccgctgccaaaaagccagatctggttgagcgcactgcagatttcgcggtaattgtttcatcgagactgccgtctccagcgcccggtggaccgccgccggtgtgcagcgacgacatagaactcgtcccagagactccacagttcaggttgaacaccg

SEQ ID NO: 16024 - DNA, 2468 bp, Zea Mays
cgttgatgtgctcctcgcctcctccagtcccaccttctccgctgtatgtgagtctgtccctctcgtgtgtcgcccaaatccatcaccccccacgtctctcccatcccatccccgtgtagatttcaaatccgcgtcagagctcaggtctgggtctcctccttcgccgccagttgcctcctccagtcgagatccgccgtcggggagaccactgaccatggaggccatggaggagctatcggagctcgccgagtcgatgcgccaggcggcgtcactcctcgccgacgacgacccctccgacgacgccgcgccgcgtcgccccaccaccttcctcaacgccgtcgccctcggcaacgtcggcgctggcaagtcggccgtgctgaacagcctcatcggccacccggtcttgccgacgggggagaacggggcgacgcgggcgccgatagtggttgacctgcagagggagccggggctcagcagcaagtccatcgtgctgcagatcgacagcaagtcgcagcaggtttccgcaagtgctctccggcattcactgcaggacagactcagcaggggagcatctggtggatcagggaggggccgtgttgatgagatttacctcaaactgcggaccagtacagctccctcattaaagctgattgatttacctgggatagaccagcgagctgttgatgattccatgatcaatgagtatgctgggcacaatgatgcaatactgctcattgtcatacccgcaatgcaagctgctgatgttgcatcatctcgagctctgaggttggccaaggatatcgatgcagatgggacaagaacagttggtgttataagcaaagttgatcaagcaaatggagatgcaaaaactatagcctgtgttcaggccctactgtcaaacaagggcccaaaaaaccttcctgacattgagtgggttgctctaattggacaatctgttgcaattgcgtcagcacaatcagttgggtctgaaaactcactagaaacagcctggagagctgaagctgaaagcctgaaaaacatcttaactggatctcctcagaataagcttggtagaattgctttggttgacacaattgctaagcaaatccgtaaaagaatgaaagtgcgggttcctaacctattgagtggacttcagggtaagtctcaaatggtgcaagatgaactggcaaggctgggagaatctatggtacaaagtgccgaaggaacccgagcagttgctttggagctgtgccgagaatttgaggacaagtttcttgctcacataacatctggtgagggatctggatggaaaattgttgcaagttttgaaggcaagtttccagacagaattaaacagctaccgttggaccgacatttcgatctcaacaacgtcaaaaggattgtcttggaagcagatggttatcaaccatatttgatatctccagagaaagggttgagatccttaataaaaatagtactggaaatggcaaaggagccatcacgactatgtgttgaagaggttcatcgtgtattgttagacatagtcaatgcttccgcaaatgccacaccaggacttgggagatatcctccattcaagcgtgaggttgttgcaatagcatcaaatgcattggagaccttcaaaaacgacgccaaaaagatggtcgttgcgcttgttgatatggaacgtgcttttgttcctccccaacatttcatccgcttagtacaaagaagaatggaaagacagcgtcgggaggatgaattgagaaatcgatcttctaagaaaacacaagaagctgaacagccaacatctaagagggcctcaagtccccaaacagatgctgagcaaggtggtggcagcttaaaatcaatgaaagacaaatctggccagcaagataaagacacaaaagagggatcaaatttgcaagttgctggtcctgctggtgaaattactgcaggttaccttttaaagaaaagcgcaaaaactaatgggtggagcaaaagatggtttgttcttaatgagaagagtggaaagcttgggtacacaaagaaacaagaggagagacattttcgtggtgtcatcactcttgaggagtgcaaccttgaggaggtagaggaggaagagccttctaaaagttcaaaggactcaaaaaaggcaaatggatcagaaaaaatctcaagtcttgtatttaagattactaatagggttgcatacaaaacggtcctcaaagctcacagtgctgttgtgttaaaggctgagagcatggccgacaaggttgagtgggtaaataagatcaaagctgttattcagagcaaagggggttctttcaagggtccaagtactgagggtagttcaatgaggcaaagcaattcggatggcgctttagtccccttgtatattttggatgtgccaatataaatatttttccattaaaatacacaaactaacatctgaccatacatttttcaaa

SEQ ID NO: 16025 - DNA, 852 bp, Zea Mays
agactataaagatgatgctggttgttcggtgaaaatgatcatggcaaccaaccggcctgatgttttggatcctgcactccttcgacctggtcggttggacaggaagatcgagatcccactgccgaatgaacaagggaggatggaggtcctcaagattcatgcagctggcatcgcaaagcatggggagattgactatgaagctgtagtcaaactagctgagggcttcaatggagccgatatgcgcaacttgtgcacagaagccggcatggctgctatccgagcggagcgtgactatgtcattcacgaggacttcatgaaggctgtgcgcaagctgaatgatgccaagaagctcgagtccagtgcgcactacagtgctgacttcggcaaggattgaacggggtatcagtgtatcacctgatccggagctgttctgatcatattgcaaactgtgttaggctgtattcatcttatcctggatggaagaactctcatccagacgccctgggagcaagagcaagcaaactcttgatttttctaaattctatctgatatctgatagattccaggatggttgtggagggaaatttggcagttggatagattccaggatggatgtggagggacatctggcagttgggtcatggatgtagtctgtagacgtccaaattcatgtgaagctcttgttcttgctttttatctctcaatacagggtgcgttcttttgcttatggtatggatacatactcctttacattattttaggatatgaaaaaaaaatcaaagaaggctatttttaatatatattattatattatcatagtagtttataaaattagaaagaattcatctgaaa

SEQ ID NO: 16026 - DNA, 2009 bp, Zea Mays
cacaagaatacctcggtgtagtgacgttgaactaggcaaacaaaggatgtggtgaaggcagtgaaaaagagattgcagaacaaggacccaaaggttcagttttttgctttaacgcttttggagacaatgatgaagaactgtggtgaatatgttcagtttgaagttgctgaacaacatgttctgcaagaaatggttaaaattatccagaagaagaatgatatgcaggtaagggacaaaatattattgcttttggactcctggcaagaggcatttggaggacctggaagtaaatacccacaatatcattgggcataccttgaagtaaagacgacaggtgtggtgttcccaaaacgtcctatggatgccccaccaatatttactcctccagctacacataattctgagacctatggttcacccagatattctgcgggaagtctaagtgacagaatgtcctcagatgttgagactctgagtttaggagatttgaataagattcgaaatgtgacagacctactgaatgatatggtgtatgctttaaacccatctgatcgaatggctattaacgatgaaattatcacagatcttgtgacccagtgtcgctcaaatcaacaaaagcttctgcagtttgtcagttcatcagggaacgaacagttactaaagcaaggactggagacaaatgatctcttacaaagcgtactttcaaagtatgatgctgtggcctctggtgctcctttggcggttgaagcatctgtgagagaggcaatcgaggctcctgcagtaaagtcatatgcaccccctgaacataatgataatgttaacgaagaggaagatgagtttgcccagctagctcaaaggaaaaacaaatccgtcgtaagtagtagcgacgatgcatcatccagcactttgggggaccttgcccttgtacccattgatcaagcagtttcagaatcgccatcttctgttgcaagcaatgcgctggttcttcttgatcctgctcccagtactagcactgaatcaaaagagctggacatgatcgaccttctaagcctcaccttgtgcagccctactcctgaaacttcaacagattcttcagcacaggatcaaaatggaccccagcaacctgcagttacacataatcaaaaagggcttcaggaacctacagttacaaatgggcaacaatatccttctagtgtgccacagtatccttcaaactaccagcctcacactgcaaaccaggcatatgctccacagaccagcaactatgtggcaccttgggcccagaccggagcatatccacctcagcctccggcatatgcatctggctatgcctaccctgcaccgccatgggtggcgcctacacatcctgttgattctaacccttttctttcggtcaattaccaagatccacgccctgctgccacttctgttgctcaaacagcaacatatgcacctcccccagcttcatatcccccttcaatatcttatgcacagtttgcaaccccccagtcaattcagcatagcaattctgtggcttcaccgagcaatggtcagattgcaaatcaagcacaaatgaatgtgaatcaacaaccaaaagattcttcggcagcatctagcagaccatactacatacctgataatctattcagtgatttgatcgatgcaaaaagttttggcggtggaaacaagatgggcgggcccactacaatgggtagctcaaatggtggccagcctatgattggtggaaagaaatagggttatttgtctatatatatacagctgatggtgatcggtagctgccttgttatttattatgattactttgtctggtgtacatttgtacttgtatatcgccattcccccttttgacagatttggctgcattggttgattcgtgggtgcaactgttaagtttaacagagatatggacaattgctcatgtacataaatgattagcatttgctccactgaggtggatggttgtgatgaaatctgttggtattgaattc

SEQ ID NO: 16027 - DNA, 2258 bp, Zea Mays
atccaacacgctgatggagttgattattacttggccgacatcttgatcgtttctgagattaaactgatgatgctgatgctcgtttagttatcttggtttggagatatatcagatatgggtgatcggaatcatggacgctctctccctctactgctctatctacatcttttgctgccaatacttccgtttgctatggcagatatagcctccgagaagcaagcactctttgcttttgcctctgcagtctaccatggcaacaagctgaattggagccaaaatatcccagtgtgctcatggcatggtgtgacatgctcactggatcgatcatgtatattggcccttagggtgccaggtgctggtttgattggtaccattcctgctgatactcttggcaggcttgtgtccctccaagttttaagcatgaggtctaaccgtttgagtggaagccttccgtacgatgttgtctcacttccttatttacaagccatatttgttcagcacaacgaattgtcaggagacttgcctccatttctctctccaaaccttaatacccttgatctctcttacaactcctttacaggacaaatcccatcaggtttgcagaatcttaccaaattgtctgtcttgaatttagcagaaaattccctgtccgggccgattccggatctcaaacttcctagcctaagacagctaaatctgagcaacaatgaactgaatggttcgattcctccctttttccaaatcttctcaaatagttccttcctagggaactctggattgtgtggaccgccgctaactgaatgttcttttctatcttcaccaacaccgtcgcaagtgccttcaccaccaaaattaccaaatcatgagaagaaggctggcaatggcttggtaatcgtggctgttgctgggagctttgtcatatttctgctagctgctgtgatgttcactatgtgcatttcaaagaggaaggagaagaaagacgaagcgggttacaacggtaaggttactgatggtggaagggttgagaagcgcaaagaggatctcagcagcggcgtccaaatggcgcataagaacaagttagttttcttggagggatgcagttacaactttgacttggaggacttgctgagagcttctgctgaagttctcgggaaagggagctatggaactgcctacaaggctatactcgaggatggctctactgtggtagtcaagaggctaaaggatgtcgtggcagggaagaaagaatttgagcagcagatggagctcatagggagggtaggtaaacatgcaaacatcgcgcctattcgtgcttactactactcgaaggatgagaagcttgttgtttatgagtatattggtagaggcagcttctcagctctgttgcatggtatcaagggcgtgtgtgagaagaccccattagattggaacacaaggatgaagattatactcggaacagcacgcggcctcgagcacatccattcagaaggcggctccaggctcgcacacggcaacatcaagtcaaccaacgttctgctcgacggagaccacaacccttacgtctcagactacgggctgagctcgttgacgagccttccgatcaccacttcccgagctgtcgctggctaccgagctcaggagaccttcgaatcgaggaagttcacccacaagtccgacgtgtacggtttcggcgtcctcctcatggagacgctgacgggcaaggccccgcttcagtcacagggtcaggacgacgccgtcgacctaccgaggtgggtgcattcggtggtccgcgaggagtggaccgctgaggtgtttgacgtccagctgatgaagtatcccaacatagaagacgagctggtccagatgctccgtatcgccatggcgtgcacggcgtggtctcccgaccggcgtccgacgatggcgcaggtggttaggatggtggaggagctccggcactctgcttccgggagtcgcgctctctccgttggcagtcccaaggaatccagtcctctgtcagcctgaattgtggttctgattcagaattcgtgtatccatgacatcgatgatcgatggtatcctgcatgtggttcacggtgcacacgttgtctgcctcgtcagatacttcgtactgctgtaactttggttcaatggaatgcttaagaaacaaggtcggaataggcgaatagctattttcgtctttcacctattgattttgtccttgcatacaaaaaaaagaatagacagaaaacagaaaagaa

SEQ ID NO: 16028 - DNA, 2871 bp, Zea Mays
gccatcatttctctagtctgccccctgctcttcgcggctctgccgcactcgtcttctctcttcctcttctctctgtctctcctaccctccgtcaccacctcgtccctatggcaagcgagcttctcccagcctcttcctaccagactatcctcctgccgcaacggacctgacggtttccctccatctggcctccctgtcgcgcgagctgatcgacccacgcaagcgcaatgccgtccagaggctagttcgagctgctgagcgctgatcacgggtattgtgtagagctatcatctccctcggtttcttggaagaacaattatttgacataattatcaccataagatgcctggaattacagaggatggagttgttgcagaggaggtgccgaacggggtgaatttctctccacagaacgaaagtctgcctgccccaaagtcgacagcagcttcaacgatggcgggtagcatgcaaagcgaggcgcttgagatgcatgttgaggcctccggtgctggggaaccctcaatcgagcaactctacaacaacgtatgcgagatggagagctcaagtgagggtggctccccatcacgcgagagctttggctcggacggggaggagtctagaattgactcggagcttcgacatcttgttgctggggagatggaggccatgaaggtgattgaggaggaagaggagaatgggagtgttgccaacgttgtaccccctgctcctgctgagaatgggaccccagtaaaggaacactcttccagttcgtccaagaagtcgaagaaggcatcaaaatcacagcttgagtctgatgcctctgttggactcaatggaaaggcgtccactgaggaaggtgagagcgaggtcagcaaaccggcaagccgagttggccgacggcggaaatcaaatgccaacccacagagtggaacagaagatgctgggcttgataacccagaccttggtccatttcttcttaaacatgcaagagacttgattgcctcagaaaacccacggcgggcattgaaatatgctctccgtgccacaaagtcgtttgagaagtgtgctggtggaaagccaagcttgaacttagtgatgagtttgcatgttgttgcagcaatctactgcaacttgggaaaatatgaagaggctgtacctgtgctgcatcgatccattgagatccctgtaatcgaggaaggccaggaacatgctctcgcaaagttttctggttgcatgcagttgggggacacctatggcatgctaggtcaaactgcacactcactgcaatggtatgcttctgggcttgaaatacaaaagcaaacattgggagagcaagacccaagggttggagagacttgtcggtacttagctgaggcccatgtgcaggcactacaactcgatgaagcacaaagattgtgtcagatagcccttgacatccacagggagcatcgcgagacggcctcactagaagaaacagctgataggaggctgatgggtctaatttgtgacactaagggtgatcacgaagctgccctggagcatctagtgatggccagcatgtccatggtagccaatggtcaggagacagaggtggcctcagtggattgcagcattggtgatatctacctctccctgggccggtatgatgaggctgtgtttgcttaccagaaagctctcactgtattcaagaccagcaaaggggagaaccatgcaactgtggcttctgttttcgtgcgcctagcagatctgtacaataagacggggaagctgagggagtcaaaatcctactgtgaaaacgccctaaaaatctaccaaaagcctattccagggacttctctggaagaaatcgccactggtctaactgacgtctcagccatatatgagacgatgaatgagcacgagcaagcgctcaagctacttcagaaggccttaaaaatgtacaacaactctgccggccagcagagcacgattgctggcattgaggctcagatgggcgtgctgcactacattttgggcaactatggcgagtcctacgactccttcaagagcgcaattgcaaagctccgcacttgtggcgagaagaagtctgccttcttcgggattgccctgaaccagatggggctggcatgtgttcagaggtattcgataaacgaagcagcagaattgttcgaggaagctagaactgttctggaacaagaatacgggccataccatccggatactttaggagtctacagtaatcttgctggaacttatgacgcgatgggaaggctggatgaggccatcgagatcttggaatatgtggttggaatgcgcgaggagaagctaggtacggcaaacccagacgttgacgacgagaagcggaggcttggggagctattgaaggaggctggccgggtgcgaagcagaaaggcgaaatccctggagaatctgctcgagaccaacccgtatatcgccaccaagagaaatgccgttgctgcatgagtcactctgtcctcagatgacacggtattgtgatggaaggcgaggattgttactaaggtattcgtattcatttggtttgttcagatggggggtaacgggagtagtggtgtttacatatttggaaatatgaaaatgcttaaattgattgttgtaaagtttcaaatgctactgtttctccttttctactacctctctgaggtgcgagtttgcattcgtcagttgtacctgggtttttattacatacatgaaaaaaaaaatcaatgacacagcaaattcgatccctacttaattgaaaattaaatttgccagcgagaatcggctgttggacaagttgaagatgacaaaagcaataataatcgaacgcggtcccccatctcaggcctagat

SEQ ID NO: 16029 - DNA, 328 bp, Zea Mays
ttgacggtggaagatcaagggaaggagttgaatctcaccggcggtagacgcgcagaacccccgaccacgatgaggggtggattcgtgatccatccccacaccggtgagcgtttcaaggtgcgataatgttgctcccgcctatcgacgatgccgagaacttcgtcaggatgcagggacgcgacttcggcgtgatttgcttatggcgggcgaggttctcttgttgctccggtgcgggcgcaaaaacatgcacaacgagcgccgcatttgggtataaatagcagggttctagcggatttggcgcggaggcgcatacggccgcattcggtcg

SEQ ID NO: 16030 - DNA, 2063 bp, Zea Mays
cacggacgagagacgccgccagctcagccgttgattgatgccgcacgagcctcgcgacctgcattcgatacaaacaaggccggcgcatcggcattcctccttccttaaacccaccccggcatcgggcacgccgcacgccacgcctcaccgagtcaccttcccagccagctacccttccccctaccaattccaaatctctcacccggcttgaggatggcggcgcaggtggtcgcagcggcgggcaccccggtggccaggccgctgggcggtggatctggggccgacgcgctccggcccgcggcgaggatgccaagggagagaaggaccggtgctgtggccgcgagaggacgccgcgagtctcaggtggtatccgtcataagccgcgccccacgccccgatgccggggtgctgccggtgtcgcccgacgacgacgcggccgtaaaggaagaagcaaacttccagcaccttaaggctatccagcaacttgcaactgcagcaaatggcgtgtggtctaaaccaaatgtaaggcgcaagacaaagattgtgtgtacaatcggtccttcaaccaacacaagggacatgatatggaaactcgctgagactggcatgaatgtggctcggcttaatatgtcacatggagaccatgcatcacaccagaaagttattgatctggtaaaggagtacaatgcatcacatgctgacaatgtgattgctatcatgcttgacacaaagggaccagaagttcgaagtggagatttgcctcaaccgatatttctggaaagcggacaagaatttacttttacaatcaaaaggggagttgggactgatacgtgtgttagcgttaactatgacgactttgttaatgatgttgaagtgggcgacatgctccttgtagatggaggaatgatgtcattcttggtcaaatcaaaaactgaagattctgtgaaatgtgaagttattgacggtggtgaattgaaatctaggcgccatctgaatgttcgtggaaagagtgcaaccttgccatcaataactgacaaggactgggacgacattaagtttggtgtggataatcaagttgattactatgctgtttcctttgtgaaagatgctcaagttgtccacgaactcaaggattatctaaaaagttgcaatgctgacatacatgttatcgtaaaaatagaaagtgcagactccatccccaacttacattcaatcatcacagcatctgatggggctatggttgccaggggtgaccttggagccgagctgcccattgaggaggtgccgctgttgcaggaagaaattattagaatgtgcaggagcatggggaaggctgttattgttgctacaaatatgctcgaaagtatgattgttcatccaactccaacccgagcagaagtttcagacattgctatagctgtccgagagggtgctgatgcagttatgctttcaggagaaactgcacatgggaaggagagggttaggcaacgattggctttgtaccaaggtgtatgtccggttcaaatggaattttctgatgatgctgagaagacatttggcaatgctttgtcttatttgctgaaacatggtatggttaaggacggtgaggaggttgcgctcgttcaaagtggtaaacatcccatctggagatcacaatcaacacacaacattcaggtgaggaagatctgatgcggaacgcacatagtattctgattgttggaggacatcgtttcttctagcaaaccgcaaggtcttgttacaatgataccacactggtagtaagtactggtattggtgagatagttggtgctgagctagtgttgtgattctttttcttacttgtgcactagtgctgttttccttccgtgtaaaaaggccaatccaattgccgcttggttttagctgtagctttgggaactgtaggcttgttgtaatacagttcgttctgtcaatgttaaggacttttgcctcgagagctaggcataactcgaagctcaccaaacagcaatctacctgcaaattgcaacgcattttgcgtctttacttccacgcttttggaacca

SEQ ID NO: 16031 - DNA, 758 bp, Zea Mays
gggaagccggtccaggctgcgctcctgctcaactacgacccctccgggccatctcgcctccttcccgtcgtagcagagcaagagggaacacaactttcagctcttgatatgcaaccactcctggactttgtcaagaggggtaatctgcagactgaattgttctctgttgggctgaaccaacatttggtcacctcaatccatgaaaactggttttgcgcccgctgcattaacagcacaaaaccagaaggtgaaggagtaatagttatgcagattggagcttgcttattagtcactatgtatgctggttctcttgctgcagcttcgcaagcaatggtggctgctgatcagtttgcaatacagtttaaccggaggagtcactaatttccagtatagtttcatgagtgatgttgatcgcaatttgttagtgtttgggatgatagtgctggaatgccgtagatgaccttatgtaacttgtaatgttacgatattctcggccgtagttatgctaatataatagcgaatattgactaatactgatgttcctagtgtgaggttgaagaagctcatgttgaatttgtggaaagtttccaaagcatccaaaagcttaaaagggacattagtttttcatcatttctcaatgtgagctcatgcaaaacattgaaggtttgaaatactttgaatcacgattcacagcaaaatgtatatagaaaaatactgcatatgtatcaagctaaaatctgattgtaatgagatttgag

SEQ ID NO: 16032 - DNA, 1388 bp, Zea Mays
aggaccacttcctcttctgcgttagtataaatgcatcagatttcactctcagtcccatcaagtgttctacatcaagttcctgaaggacatgttggggtatactggagaggaggtgctcttctgaagacaatcacccctccagggtttcatctgaagctccctttaatcacacagtatgagccaatacaggttacacttcaaacagaccaggtcagagatattccttgcggaacaaaaggtggtgttatgatcagctttgacaagatagaggtcgtaaaccgcctccgcaaagagtttgtgcatgaaaccctactcaactatggtgtgcactatgacaagacatggatatatgacaaaattcatcatgagattaaccagttctgcagtgctcacagtttgcagcaagtttacattgacatgtttgatcagattgatgaaacaatgaaagaagctattcaaagagactgtacacgctatgctcctggaattgaaatcatcagtgttcgtgttacaaagccaaatatacctggtagtatcagaagaaactttgaacttatggaggaggagcgtacaaaggcactgatcgccatcgagaagcaaaaggtagcagagaaggaggcagaaacacagaagaagattgcgctatctgaagcagagaagaacgcgcaggtgagcaagatcctgatggagcaaaagctgatggagaaggacagttccaagagacaggagaagattgataatgaaatgtacctggcacgagagaaagcactagcagatgcaaactactacaggattttgaaggaagcagaggcaaataggctcaaactgacacctgagtatctggagctgaggttcattgaatcaattgccaacaactcaaagattttctttggtgaaaagattcctaacatgatcatggatcaaaggttgctcaagaattaccttgatgctgttcctaggaaggaccattatgaaatgtagccgcgggttccgtgggttggaagcagaagtctttcttttttgtgtgatcccacgcagtagataggattaccgtgtagccgtccagtatactagtaagccagaaaggagtcatcaggatcctcttgaagatgaaattagcagtcatgagatctttggcttgttttgtgtagtagcagcattagggcacctggagcattcgcatgtgaccgacagtgatgcaaccagtgcaaatcctgtagtcttcaaaactgatggtcaaggccgctggcctccaaacccaggtaatctcttgaaaaggatctgggttataatttttgactgatgggcagaacaatttgtagcactgctgatgccaaagttttctcgatcataaatgtgcaagtttgctccctgacttaattatgtct

SEQ ID NO: 16033 - DNA, 1584 bp, Zea Mays
gcccccctgttcctcctgtcatcttctcctcctcagaaacccaccaaccccgtccagccgccggctgtctcggccgccgccgccgccgccgccgccctatcccggtccttcaggcgaaccaggttggtcatggccttcaacaagatcaaggtctccaaccccgtcgtcgagatggacggcgatgagatgaccagggtgttctggaaatctatcaaggacaagcttatattccctttcgtagacctcgacatcaaatattttgacctcgggcttccacaccgtgatgctaccgacgacaaagtcacagtggaggctgcggaggccacactcaagtacaatgtggctatcaagtgtgccaccattacaccagatgaagcaagggtaaatgagtttggcttgaaggctatgtggaagagcccaaatggcacaattaggaatattctgaatggcactgtgttcagagaaccaatcatctgcaaaaacatcccacggcttgttccagggtggacaaaacccatttgcatcgggaggcatgcattcggtgatcagtaccgggcaactgatgcagttatcaaggggccagggaagcttaaattagtttttgagggaaaagaagagcaagttgagctggaggtgttcaacttcactggtgcaggaggagttgccttatcaatgttcaaggacattttccaggaggtgtatgaagctggttggaaaaccaaatttgaagctgccggcatatggtatgagcaccgccttatcgatgacatggtagcatacgcacttaagagtgaaggagggtatgtctgggcttgcaagaattatgatggagatgtgcagagcgatttcttagctcaaggttttggctcattgggtttgatgacttcggtactggtgtgccctgatggaaagacgatcgaagctgaagctgcccatggtactgttacccgtcattaccgtgttcaccagaaaggaggtgaaactagtacgaacagtattgcctcaatctttgcgtggacaagaggacttgcacacagggcaaagcttgatgacaatgctagactacttgacttcacccagaagcttgaggctgcctgcgttggagccgtcgagtctgggaagatgaccaaggaccttgcccttctcgttcacggatcttcaaatatcacgaggagccattacctgaacacggaggagttcattgacgctgttgctgatgagctcagatcaaggctggcagccaactcgaacctttgaaatccttgccgaagttgtggtgctttcctgcgcgacgctttcgaaccgtttttattatgtcgccattttctttccctgtgccaccaccctgatgaatgaagaaggcctgagctaggcgaacatctgcaggctgcagcagtatgccaaatcattatcattaccgttaccattaccaattggagattgccgtagatttccgcgattatgggaactcatttacctgattatctgatacgtttgaaataaaaggtcgcccattagaatgatttctggttgtctcttcatctgtgcccgatttcgtgctagccattggatttttgtcaattt

SEQ ID NO: 16034 - DNA, 1584 bp, Zea Mays
gtcttatgtttgcatctccctggcaaccggtaattggtgacaagcatcagagactgtgtgtaactccaattgcagttgattgttcttcgtcagtaaaattctctgtgaaaggtttcaatatagttcagccaaccacaaaattactttgtgtgtttgatgaaaaatatttaattcaagaagagacacaaatgctacttgaagattcaactatgcagcaaggccctcaatgcctgaccttctcttgttcctttccttgtacaagtggaagaggattcatagagattgaagactatgatcaaagcagcctttctgttccctttgttgtcacggacaaagatgtatgttctgagattcggatgttggagcatggattggatttagtttcatttgatcaaacctccaaaagaatagatgatctgatgatttatcgcagtcgagcattacattttttgcatgaaatcggatggcttcttcaaaggagccatgtgcgagctacgtctgagcagcgacaatattgtcctgaccgcttccctgttgcaagatttagatggctgctatcctttgcagttgatcaggaatggtgtgctgttctaaggaagcttctgaacaccatgttccagggtgatattgatgtattgtcaccaattgaatttgccttgggagaaaatctattgcatactgcggtcaaaaaacgctcaaagcctttagttgaatttctattaagatacaccacaacaaatattgctccagtgggcggtggagatggtgctccagttcagttcttgttcactcctgcgatgactgaactgtcaaatatcacacctcttcatattgcagccacaatcagtgatgctattggtgttttagatgctttaactgatgatcctcagcagttgggaatcaaagcgtggaagaatgctcgtgacgccactggcttcactcctgaggaatatgctgcaaagagaggcaacatatcctatattcaaatggtacaggacaaaattgacagaagggtgaccagagctcatgtctcggttaccatccccagcacaattgatactgtcggaaagcatggtagccgaatgaagcctgccgatcaaatcacatttggtgttgagaaaaaacaactaagcatcaaccaaacattgagctgcagacagtgtgtccagcaggcccagcagcttgcattccatccccggacaaataggtttctgtctaataggactgcgatgctttccttggtctccattgctgccgtctgcgtctgtgtgggattgatcatgaagagcctgccacaagttggttgtatgaagcctttcctctgggacaatatacgttggggccccaattgatagactgcagaagagccagcccgattgtatcagtgtatgatgaagatgtttgcgccgagcgaagctagtttcttgtaatgtacatgtttcttatactaaatgtctaacttatttctgtttatagtaaaacctgtgaacttgcctagcttgtaactccattgcatttgcatcctgactgaagtaaagcttttacttgttttggttgagaggaagaaaaccttttacttctaaa

SEQ ID NO: 16035 - DNA, 1146 bp, Zea Mays
tacaactacaagctgtttgatagatggttcgtggcgccttaacattgcctcatggcactggcaagactgttagggtagcagtatttgctgaaggtcctggagcagacgaagctagagctgccggagcagatgttgttggtggtgatgagttgattgaggagatccgcacaggaggaggcaaactaagctttgacaagtgcatagcaaccccaatgttcatgccccgattgtcaaaggttgctaggatattgggtccacgtggtttgatgcctaatcctaagctaggatctgtgacgaatgatgtttctggtgcggtcaaagcggcaaaatcaggacgtgttgatttcaaaatagataaaactgctatagtgcatgttggccttgggaaggtaaactttactgaggagagtttacgtgaaaatattggtgcttttgtgcatgcacttttacttgctaagccagtgggcttaaagaaaacttcaaaatatgtcggatatgtgaagaagttcacactgagtagcacaatgggacccggacttcctgttaccataccatcactatctgtggccgccgatcactataacaaggttcaagtcagctaagtcaatacagtagaacatcgaatgtagctttctttctccaatagccgtggcctgcagatggcggtggagcttaaccagtcagcaaggttgagatttgggtggcttgctgttttgttattggggataataccttttgtggacaaggatcattcaacaaacatcataacctataactttattttatccttgtcactgcaattttgagattgcgttgctggtctacctgtgttatccagagtcttgtcatttgttgcacgaaatgtaatatcgaaatacggtagttttagggcattacttttgataataagaaatgaagtattgaaccatgattcgattcagaatccggagcgtacactcacaatcgagaataagctagctggcacgatgtctggagttattgatcagtttcttttaacttcttttcgagttatatttgatagggctggaaatggatgtctggagattcgaattattcgtatttgtatttgttacaactgctaatatggatatccgtattcgatttcaatatgaatgttaaatagat

SEQ ID NO: 16036 - DNA, 2753 bp, Zea Mays
cgggccggaccggcccaatcgaagttttacgagccaaaacgtgaaagtgtcgtccagccagccacgtggctccggcagggcagagcgtttatccaactcggctctcagcgactgcccaccaccaccactgaggattcctcttccggcggcggcggcggcggcagcgatgctcctcctgcgcgccaacgcgctcgccgccgtaccggtgtccttctccataacgccggcggcctcctatagctgcttcccctggccgtcttcatccaccactgccgcgagctgctccgtcggctcctctgccaggctcgacgccgccgtgcagtacgacccgctccgccccggctccgatgcgtgggcccatcccgacggcatggtcaccgcggagggtgacgaggagaaacagcgctatgacacggagggggagtccaacgactgggaaggggaagggccccaaggatcatcagaccccgagggcatcaacgtgccgcgccagcgctacatcgccgtccccaaggaggccctcctcgatgctgtcctctcgcagttcgcgtccgacgacgacgacgccgcggacttcaagcgctgcgccagatgcttggacgccatccttcacgccgagcacaagaggatgctcgaggagatgcgcacctcctacatgctcacgcaacgccaccgggacgaggaagaggagcaggatgacactgacaccgcctcgggctcggactacgtcaacggcaaagccggctccggatttttcggcatcacccaactggatggcacgttgttccttactagaagcgtggacttgagaactctgctcggattgaccccagaccccgattcccagaccagagttgcttttgcaactcaatttcagcgctcattcatgaccctactacgcaatgctcagtttgaagaactctccgcacaagatctgctcttgacatatgccctaaataacgattacctgctcacgctgcccatttatgtcgactggaagaaggctgctcaatctaatgcaataatattcaggcgtggatacgcgactgagaggcagaaaggcctcctgttggttgagaaacttgattacttgcaatcaaaactcttgcagaatgtctttttcagcctctccaaacccttgaaaaagccagggaaatggcttaatgaggctttgaaaagatcaacagataaccagggatttcagatctggatagacaaactgagactatggcttaaagagcaaacttatgcagataattcactgctgttgatagaaagctcttcatgggacaagcttagttctgatcagttacctgatgcagatgttcctatttggatcgctgcacaaagggcagtctctcgttatgaaggaattttgtcacctgttggtcctcgtggaagactgttaagaagattgcttaaatggactggactaataccttctctgccagaagcaacgataaaatccaacaatgaaactaaacatcttgaaggacatgtgaggccaaactttctaccaagaattacccttgctaatatatgggaacctgcaagcagagaatcttgcaataacaatatctgggagatggtgaaagcttcttttcgtattctgtttgggaggtctactcttcaggaaccagcattccaggagttaatactactttacactgatgaagttgttccaagtgaaacgaaggacgagatggttccgctgcaactgaaaatttatgagaggattccgatcccagatttgccagtagttttcccccacaagaaattgtccttccgcatcctagatacagtaaggctagatattgctactgtaataggtctattggcatatgtggtgaactacaaatttgagagtttagcctcatctccgtcagctttttcttcttgatatagttgctggtactgcactcgtcatacttgttttccgtgtagcactgggctacaaacagacccgggataggtaccagcttctggtgaataaaaccctctatgagaagacattggcaagtgggttcggctcggtttacttccttctcgatgcttctgagcaacagcagtacaaagaagcacttttggcatatgccatgttgctctgcagaaagaagtatgaggtctcatctcgtgcaagcataagagatgcatgcgagcagtttatgcacgagaaattcgaggcaaagattgagatgccgatcgacaaggcaatggagacactgctgcggttggggctggtgattgagcttcccactgatggtgggtcgagcgtgattggtctcccatgctcggaggcatacaggatcctgaaaagccgttgggacggcttgctggaacaagatacagaacaaggctgattagaacgagacatgtacgttggtggcttggagtggagtgggatgggatgccgtgctggtacatactcgacgcgtcggcaaagctcactcttgtttgtatgtatacgtaccagttgttgcagcaagtgtatatgtgctagctacgtgcatgtataatcgtgatctagtttgttgtacacaaacgattgcagtgtatgtatatgggagcacatgtttttttcggaagactagccatgtgtctgtaagtttttctatttgtaagttggtttccatttataaatatagagcataaacactgttctgttagctaggtgagtatcctcataattatagcataattttagttttttatcatttaaatatatgaaattttagttttttatcatttaaata

SEQ ID NO: 16037 - DNA, 171 bp, Zea Mays
tttccgaatctctttaatatagttattttcagatgtactcactggttaagattctggagaccgctacaaaaggaggaatcgcaacaacaaattctcgttgcttcgcacgttttggaagtggtggcgatggaagtcttcgcaaaccatggatggcgctcaaatacaagaatt

SEQ ID NO: 16038 - DNA, 2310 bp, Zea Mays
cgcgcagggctcatggcagctatcgctctgcctcttcccggcacgcaaccacctcacgcctctgcctcttcttaatcttaaagtcagtcagtccccgggccttgctctccctccacttccgccgcgacgatctcctcccacccgtagaccaacaacaacggtactaaccagtaccagccccgcatgcctctcgcggcggctgccgcggccgttgccgcatgtccttcgccgatcggcctcacccgctctttgtgccgtatcgaggcgcatccgcggcgccggcggaggttccggttggaggcaaattcgtcggcgtctacgtccgctcccgcgccgaccgcggcggatgagggaggcggagcggggttgtgccctgtggtcaggttcgacatggccgacttcaccgtcgccgaccgcgtcagcgtcgggctccatggacggtcggatgagatgatcttcgaggccacggtgtgcgatccgagcagcgagctgtatgggtcaacggtggtcctgcggcagctgaagagtttgcaggcgaagcgcagggggcgtcgcgctctcgaggtgctgaagaagctggctcgtcgccaaatgatgtaccactcctacgcacttcaggtccatggttacattgctccgtgcaatgccgtggaggaggaagatgtcccgttagtattggttcatgggtatcatgggagtcattccctgcgtcactggttgcaactctcagattggatcccaaccttagaggcaacattagcgttggacgaagaacaagtgaggagggtaggagatgactctgttggaggaccagctgtaactcgacagctgcgtcttatcaggatattgatgagagaccttttgattggtgtaaattatctacatagccatgggctggcacacaccgagcttaggatagagaatgttcacgtgagcccaatagacaagcatgttaaagtcggtattcttggaaatgctgctgattttcaagacaatgatcttagcagcagtacaattgcaagtaacaatgacaggcggaaaatgatgatagcctttgacatgagatgtgttggcttcatcatggcaaagatggttttgagagagctaatggatccttcgactttctttaaattcaaatcattcctgacaaagggaaatgacccatcctgtttgcgtgagttcctactaccaaccctctaccaaaattctccatctgggaatattggtttgcagatgctagataggcagtggggtgctggttggaatcttttagccttattgctggcaacaaaaccagaggaaaggataagttgtgttgatgcattgcgacacccgttcctttgtgggccaaaatggcgtataaatccgtcagcaaatctcattcggtggggcttgggatcaactgctgtccgcatggctgaagattatatatatgggcgtcatcagcgtagacgtttatcatattttgttgaattgatggaggttctaaaccctagtttaagaacacagaattggcttcacctcctacctggtcgttggcgcctcttgtactgcactggacgacacattggcctaacacttcaattatgccagaacccaattggcctcacgacaaatctggcagtgagggagttttgtctgtcaccgcatcagcaaggatagctgctggtaggatttatattaacgaacatgacagtaaagaggatatggtcacatcttctatgagatatcttcatgttaattctgcacaaaaggcgctgaaagagatccgtacacaaaccccgccggaaatgttcgatttgtcaaagattgtttgtgggacatacattgatgcgaggttgatgattcttcgtggtgttaacgggtcggctctgctcttcactagagcaaatccaatgattgacacctgaggagactccgtccgccgttatataaggccttgttcggttaatcccgttacctatggattggatgagattggaaaaaaatatgaagaagtttgacttacttgtgatttaaacccatccaatctcactcaatccacatggattgagagctaaccgaacaagccctaacgctgtattctttctttccctgtacattattatgtatttctagccgtacaatcaatttgtaacgagtgtagataacaaggtgtgtaggccatagttagaacgttgaaaattccttctcaagatgatctgttgcttccaagtacggagccttgacagggcttgagctgataaattattactctttccgtttcaaaatgaataaaattcacagttattgaggtcaacttcaaattta

SEQ ID NO: 16039 - DNA, 1873 bp, Zea Mays
attggttgcagtagcagccagccagtcacgctgttcgagcagagccccatcccctgatccccgtgccaggccgctcggccctcgacgccgtgagtcaggcaggcaggcgcctctttctgtccctccactcgggtctccacgccgccgccgccgccgccgcctcgaccgccccacgcatccgccgctcctctacccatcctcggcccgcggcccagggagaagaccgcacgggcgggcgagatggaaaaccataatccattacattctcagattgctgaagtgaaaatggacatctcagcatcagcttctgttgcatcagggaacaaattctgcaagggtggtgcctgtgatttctctgattccagtaactcctcgaaagatgccaaggagagatccacgtccatgaggaagcttataatcgcagtgatcctttgcatcatattcatgacggtggaagtggtcgggggcatcaaagcaaacagtcttgccatcttaactgatgcggcgcaccttctttctgatgtggcagcatttgccatatcgttattctctctctgggctgctggatgggaagcaacaccgcagcagtcatatgggttcttccggattgagattcttggtgccttggtctccattcagctcatatggctacttgctggcatactggtatatgaggctattgtaaggctcattaacgagagtggcgatgtgcagggctccctcatgtttgctgtgtcggcgtttggactgtttgtcaacattataatggctgtattgctaggccatgaccacgggcacggccatggacacagccatggacatccacatgaccatggtcatggtgattcagacgatggccattctcaccatgaagaaccagaacagggccatgttcatcatcatgagcatagccatggaagttctattactgtcacaacacatcaccaccaccactcaggcactggacaacaccatgacgctgaggagccactgatcaagcacgaggccgactgtgagggcacccaatctgctgctaagaagcctcgacgcaatataaacgtacacagcgcttaccttcatgtgcttggggactccatccagagcatcggggtgatgatcggcggggctatcatctggtacaagcccgagtggaaaatcatcgatctgatctgcaccctcatcttctcggtggtcgtgctgttcaccacgatcaggatgctgcgcaacatcctcgaggtcctgatggaaagcacgccccgtgagatcgacgccaccaggctggagagggggctctgcgagatggaaggcgtggttgccgtccacgagctgcatatctgggccatcacagtggggaaggtgctactggcttgccatgtgacggtcgccagggaagccgacgcagacgagatccttgacaaggtgattgggtacatcaagacggagtacaacatcagccatgtgaccattcaggtcgagcgtgaatagagggggagctgtcttttgggctgtcagggcataaatggcgtcacgccttcactggttatcttactctgtcggttaaaacttttttttggcacctgggaaggcatcaggcagccatcggagtcttgatgtgcttgcaagttcatctgtggttcaagctttgatggtcagtagtgttatctgttactactagtctattaggcgggggtaggcgtcaaccagtgtgtacgggtttgattttcggtcatgctgttaacagcattgcggttcgtcgaactggatatgtagtttagtacgctgtgtcatcacctcttgtgtaagggaacgcttcttttctgtggtatggaagatgtgaacttcgtgatataaacaaaatagtaatataaagcaa

SEQ ID NO: 16040 - DNA, 2110 bp, Zea Mays
ataactttaggaaacaacatgtataaaacttttgattggttctcctgaagtttgacagcgtcatgaggtactgcaagaacatcattggttgtaacaattggtccatctccaagacatcggggggaaactaccagtacaataatgtttggacaaagagcaatgaaagttgagaacatggtgaaattgaaggaagagttcgattacaagagtttatgtaggagacttgatattgagctggataaattaattgcagaaaatgaaaggcaaaggaagtattttgacgatgaagttgagagaataagagatgaagctcagtgccgcattgctgaggccgaaagggaatgcaaaatcacattagagaatgagaaaacgaagtgccatcaagaatacttagactcaatcagaatactggaggagaagtggaaagtacatcaacaatcacccaagaaacaaaatgaagaggccgagtctacatccaatgataccagagaagtgcataacttactgcagaatgagaaaatgctacgtcaatcggctgaagatgaggccagtgacctcaagaatcaagtatcacactggaaaaaactggaggctacagctacagctgaggtagtaaaactacggaaaatgctagatactgaagctagccagaaagagaaacttgaagcagaaatagatattttgagaagtcagttattgcagatgagtatggaagcagatgagacagggagtcttgataaaggaaatggaccaggaaaaatatttcctggtttagattcattggtgtctcagactcgaagctcacaattcagagagcagagcaatggaccaaagcaaccaattgccaaactctttgaacaagttgggttacaaaagatattgtcattgctcgaatctgaagaacctgatgtccgcgttcatgcagtgaaagttgttgcaaatctggcagctgaagaggcaaatcaggaaaagattgtagaagcaggtggcctcacttccctccttatgctacttaggagctctgaggatgagacaattcgtagagtagcagcaggagcaattgctaatcttgcaatgaatgaaacaaatcaagatcttatcatggcagaaggaggtgtaaccttgttgtctatgacagcatctgatgcagaggatccacaaactcttagaatggtggctggagcaatagctaacctttgtggcaatgacaaactgcaaatacggttgaggggagaaggtggaatcaaagcattgcttgggatggttaggtgtgggcaccctgatgtccttgctcaagttgcacgtggcattgcaaattttgcaaaatgtgaatctagagcagctactcaaggaaataaggtgggaaaatcactattaatcgacgatggatcgctcccttggattgtaaaaaatgccaataacgaagctgccccaattaggcggcacatagagctcgcactgtgtcatttggcacagcatggagccctatgggagcttgtacggatttcaagggactgttctcgagaagatataaggaagttggcataccggacactgacatccagccccactcttcaagcggagatgaggagactgggaataaaactgtgatgacagagcaacaaagtgcagctggggctggcactatgaagttccatttctcgtgcactttatagaggtacccgttgctctgagtgctggtaatcgacttacctggtttcggcaggcaggcatacacgggcaccacaccgactaatcacaagaggcagtggagcaactttctcctcgagagttcatttttctttgttctgaggggggcagttgaaagcctggacaacactagcaattcatttatttgtaatgatcctagcatagcagatgttgttacctacccaatgcagcgtttgtaatttttttgctgtaaaaatatcaaaggcagaaaaaagtactttcgcagtatacctgttttccgtgaacactagaaagtttttttgtttttgttttattcatatactgcagacgagtcatgtttgctagccgtgattttcttgctttcttaatgcgcgttgacgctttcgtttcttttaccatgtatgctctcagataatct

SEQ ID NO: 16041 - DNA, 1176 bp, Zea Mays
gagcggagaagtcaaacatcaaaatgagaggctgcagagttgcctcttcgcatggctgattttggagtgcttcatagaaatgagcttagtggtgctcttacaggtttgacacgtgttagaagattccagcaggatgatgctcatatcttctgcagagaagaccaaatcaaggatgaagttaaggctgttttggaattcatcaattatgtttatgagatatttggcttcaaatatgagttggagttgtctacgagaccagagaagtatctaggtgaagttgaaacttggaacaaagctgagcaacaattgacagaagctttaaatgagtttgggaagccatggaagattaatgaaggggatggtgctttctacggcccaaaaattgatattggtgtgtttgatgcccttaagaggaaatttcagtgtgcaaccctacagctggattttcagctgcccattcggttcaagctggcttattctgctgaggatgaagccaaaattgaaaggcctgtgatgatacacagggcaatcctaggttcggttgaaaggatgcttgccattcttttggagcattacaatggtaaatggcccttatggctaagccctcgccaggccattgtttgctcggtatcttctggttcagtggaatatgcgaaacaggttcttgccactctacatgaagctggttttcatgttgatattgacgcgagtgacaggacaatacaaaagaaggtacgggaagctcaactggcccaattcaactacattcttgtcgtaggtgcacaagaggccgagactggaaatatatgcgttagggtaagagacaatgctgacctggtcacaacgagtgtagatggcttcatcacacgtttgagggaggaaatcgcagccttcaaatgattttgatgctgcataatttcctactactcgtttgtgattttgacgagtttttagtgaccagcatcgagttcctcgtgttactgttcttgtttgtatgaagctaaaaggttgtctttttgttattaattacagatgcgaagttaaatactgccgctagtaaaaaaatatgcttgttgacttccagtgatttacgttactgttggacagtgtcttcagttttcgccctctcttaccacccaccatgttgaccaaaatcattttgtggttgcgatttta

SEQ ID NO: 16042 - DNA, 887 bp, Zea Mays
aacccacctgctccattttatgcttcgccctcgctcgcctcgccctcgccgcaacgctttgcgatagagtttctgtctgctaccagcaccacagcctagcaccccaccgcgtctagggttttctgctccaatggccgccgcgagggcagacggggagcgcaggatcggggtggccatcgactactcggagagcgccaagaaggcgctggactgggccatcgacaacctgctccaccacggggacaccctcgtcgtcgtccacgtcctgcaccacggcgcggaggagaccaagcacacgctctgggccaagtccggatccccgctgatcccactctccgagttccgggagcccgaggtgatgcagggctacggcgtgcgccccgacgccgaggtgctcgacgcgatcgacacggcagcgcgccagaagcagctgaaggtggtggcgaagctgtactggggcgacgccagggagaagctctgcgacgccgtcgaggatctcaggatcgattccctcgtcatgggtagtcgcggcctcggcccgatccagaggtatagtacaatcctaagactccattactactactatagtactattgaaatgttgcctcatcaggactggaatgcgctgttcagcctctgatagtaagttagtttctcgctttttctttttgttcggataagcgcgtcaattgagtgtctggaataaatggatatagtctagcgtgcatggatggctcgattgatgatagggatagcccgcatgccaagtcagtatgctggtgcagtactgaaatgttcaaacacagcacatctagttcttgttcttaatagcaatacttatctgaaaaatgctcttgttccttgtatcgttgcatccggtgattctg

SEQ ID NO: 16043 - DNA, 491 bp, Zea Mays
tgttcctgacaatacataggttcaaataatcagaccgtcgggaacaagtgctttgaaaagtgcgtgaccaagccaggatcaagcttgagtggaagcgagagcagctgcatatcacgttgtgttgaccgctacattgaggccactggtattgtcagccgcgcattgttcacttcccagcgctaagatcacatgaataaggagatggtttcgaagatcgctcgtgagagtaatgtcgccatgagttttttgacttgtcggaatacaatgacatttgatgcttggttattcaaaaaaaaagtctgcctatagactcaggtttcttgtacacctatctgctttagtaatagagaaacgtgctctatttaagtggctctgatgttaatttatgctcatcatgtggtttgtttcgcttaatgttgtatgcttcttatgcctgtttgttgcccaagccttatcgaatatcgtgaaggatgtgttgttgttattcgtcg

SEQ ID NO: 16044 - DNA, 238 bp, Zea Mays
agcagtagttcgtctttcataaatccaagaatttcacctctgactatgaaaatacgaatgccccagactgtccctattaatcattactccgatcccgaaggccaacacaataggaccggaatcctatgatgttatcccatgctaatgtatccagagcgatggcttgctttgagcactctaatttcttcaaagtaacggcgccggaggcacgacccggccagttaaggccaggagcgca

SEQ ID NO: 16045 - DNA, 953 bp, Zea Mays
tccttaatttcttcgggaactgtcaaaggctaggtcttgtggctactattaaggaccgagcaaatgaaatctacaagaaagttgaagatctcaaatctatcaggggaagaaatcaagatgccatattagctgcatgcctatatattgcttgtagacaagaagatcggcctagaactgtgaaagaaatatgttcagttgctaatggggccacaaagaaagaaattggcagagcaaaagaatttatagtgaaacaactggaagttgagatggggcaatctatggagatgggaaccattcacgctggaaattttctgagacgtttctgctcaactcttgggatgaacaatcaagctgttagggcagcccaggatgcagttaagcactcggaggagcttgatataaggaggagccctatctcaattgcagccgctgtcatttatatgataacccaactctcagaggacaagaagccacttaaagatatatccttggctactggtgtagcagaaggcaccatcagaaattcgtacaaggatctgtatccttatgcctcaaggctcatcccgaatacctacgccaaggaagaagacctgaagaatctctgcacaccttaggaggcttacttttttccccctttctgttactacataattcggaattagatttgtcaaagaggaagcacctaccacctgaagatttgtgggatacgtatactcacttcggaaagaatgtagatagcaagcagttggacaagcacaagattttaatttaaaacatgattttgttctccatcttctgaagaaaccatcacttgtccatctttattctaagtgcccttggattccaagagaattgttagttggctaaaaattgggtaaaattatgatatgtttggactggcagccccaatctagtcctattaactcctatgttgaattactaactagttttag

SEQ ID NO: 16046 - DNA, 2188 bp, Zea Mays
gttggcaacaaggcgaacctattttcttgcagcgcgtgctgggtgctgctctggtactctcttctctctccctgctgacccaagtcccacgcctgcgtctcgtgatgccgccgaaatcgaaggcgtccgccgccgcggagccggtggccgtcgaggacctcttcgcctcgctccaccgccacatcgagttctcaaggcagcgccgggagatgaggacgcggcctactgctgctacaggcaaaacaaactgcatgaggctcttgagcttttaagaggccaagaagaaacttcagctgttctccagctggaatcccagatcttttaccgactaggaagaatgaatgattgcatgagtagctatgagaagcttaaaaaatttaaaattgactcaatggatctgaagataaatatcattgctgctctagttgctgctggaagggcttctgaggtacaggcagctatgaaggcgcttaaggttgatcttaccacgagagcactcagggatactcgtagttttgagctcgcatacaattctgcttgctccttgatagaaaacaagaagtactctgaagccaaggagcaattggacttggctaaaagaattgggaaagaagagcttatggtggaagactacggcgaggcggatattgaatatgaattagctcctgtttctgctcagcttgcttatgtgcagcagctacaaggacaatctcaagaagctatgcaaacatatgttaatatgataaatgggcagtcagctgatttatcatcacttgctgtggcaacaacaaatcttatttcaataaaaggtacaaaagataccgcagatagcttgaagaagctcgatcggcttattggaacaactacagctccaaaccagttgcatcttgttgaaaaccttgactacaagttatccccatggcagaaagaagctctgtattctgcacgtgttcttttactgctccatgcaaataaaactgaacaggcacatgagttggtcagggggctgcttggtatgtttccagatagtgtattccctgttttacttcaagccgctgttcatgttaaagaaaagaagattcacaaagctgaagatgttcttagccagtacgctgagaagcgtcctgagaattctaaagggctcctccttgcacttgcccagattgctgctaatgccaaccattttcagcttgctgctgactcactatccagaatacctgacattcagcacatgcctgcaacagttgctacattagtggcccttaaagagcgcctaggtgactccaatgctgcagcttctgtacttgattctgctatcaactggtggaagaattccatgaccgaggataacaaattagatatattaacacgggaggctgctgcatttaagctcagccatggacgtgatgaagaggcttgtttgttgtatgaggaacttgtgaagagccatggaagcatagaagctttggctgggttagtaatgacttcagcgcgcactaacttggagaaggcagaacaatacgagaagaaactgaagccattgccaggcctcaaaggagttaatgttgagagcttggagaagacatctggtgcaaggcatgtggaagggccccaagacatgaaggtagatgttcccgaggaagtgaagaagcaaaaggcaaagaagaggaagcggaagcctagatacccgaaaggcttcgatccagcaaacccggggccgccaccagatcccgagagatggctgccaaggagagagcggtccagttaccgtccaaagaggaaggataagagggctcaggtcagaggtgctcaaggagctgtgtctagggaaacatcggccaccaatgtcggtgcttcctcaaaaggaagccaaaccaccaattcatcaaagacaccggcggtaaatgctgaacagccaaaaactagcaacaaatctaggaagaagaagtccaggcattagatgagaattttatgttacattaccgtacaaaagaatatgttcgtttatcttctggatgacttgcaattttggactggattgcattcaattgcagatttgctttgcttttacactaacgtttgaagcgactgagactattgattttttttttgccaagatgtgattgatgggttgctccagtaacattctattttttatgagttaatagttcttttgattccattcgag

SEQ ID NO: 16047 - DNA, 2279 bp, Zea Mays
cataagatattgccatctccacgtgacacacaggccccccgtggatgtctctagagcgggacccttcccttcgtattccagccaagcagaacgcaggaatctccttcccacggatcactctgccacgatccgcgtgctcacccgcaaaactaatccacaccgtccgtcctcctccaatccaacgcacgaaacctcatttccctcacgaagtccccgctgctgttccaaaatttcactctctctcccgcccaccacccgtcccttatttaatcaccccgcctccgcactcaatctcacaccgcaatcttcaatctccccagcaatccctagcagaagccttccatcctcactcgctcgatggcccgcacgaagcagacggcgaggaagtccaccggcggcaaggcgccgaggaagcagctggcgactaaggcggcccgcaagtctgcccctgcgaccggcggagtgaagaagccccaccgcttccgccccggcaccgtcgcgctccgggagatccgcaagtaccagaagagcacggagctgctgatccgcaagctgccgttccagcgcctggtgcgggagatcgcgcaggacttcaagaccgacctacgcttccagagctctgctgtctccgcgctgcaggaggcggctgaggcctaccttgtcgggctcttcgaggacaccaacctctgcgccatccacgccaagcgcgtcaccatcatgcccaaggacatccagcttgcccgccgcatccgcggggagagggcctaagcgtcatattttctgtcatcagtgcccgatcagaagatgtagagatatgctgggttctgtagtttgggttactgtcgaatcatcgagtgttggctgttcactgctgtaacttaattatcatgatgcatatgaaatggcaatgaactctgttatcagttctcgaattttccgtttggatcccttcttgttcctctgtgcataatcattttatatttgtggggataacgggatgaatggtgagaaggatgaatcagcgttcaggccgagcgttctttcacaagtggtcgtgtaggcgtgctgggctgtcaactgggcccactggcaggctaatcttccccttgtgaatcgtcttgtactgttctcgtgctaggcagtgggctgcgaccgaatccaacataagaggaaaggggcgtttgctttatattcgttctaacctgcgatctccgtccatccagccgagaggtcgtgtgcgcgtggatctctgcgtggaagcgatgaagattacggcgctcctggtgctgaagccgtcgacctctggagccgggagctcctcgtccggcggcgagtcgggcccggaggcggtggtgctcgcgaacgcgatagacgtcagccacttcggctacttccagcgcagcgccgcccgcgagttcatcgtcttcgttgcccgcaccgtcgctcagcgcacccagccaggccagcggcagtccgtccagcacgaagaatacaaggtccactcccacaatagaaatgggctttgtgcggttgcattcatggatgatcattatccggttcttgatgagtaccagaaggcttatggggactcctggaaatctgtgactgcagatgaaactcaacagtgggctttcctgacagacgccttgacaaaatttcaggatcctgcggaagctgacaaattaatgaaaattcagagggacttggatgaaacaaaaattatcctacataaaactattgagagtgtccttgccagaggagagagattggatagcttggttgagaaaagctctgatctgagtgctgcttctcagatgttctacaagcaggcaaagaagacaaaccaatgctgcacaatactgtaaattttggctcttcactcatggttgcaagaaacaaaaacggtcgatatcgtgctaatttatttactgtaagttaagtcgccagtgaagcgtggacacgtggttgcaaggcccgagctcagtaaaggctatactgttcttcaagacctgccagaattggactgttttcttgtgagaattccagctctccaaacaggccatggagtaccatcaacattctttagtgactatgaaacctcgtagtaccagctaacaccatttactctactactactatataaggcttgcgtcaaactgcagaaatcaccaatatggttaaattctcaaagcttgctggagcacattttgtgtccacaacacaacctatgtcacattcttactcaactctaccaagtttggcgcacgcatgtacttgtt

SEQ ID NO: 16048 - DNA, 403 bp, Zea Mays
gatttctgcccagtgctctgaatgtcaaagtgaagaaattcaaccaagcgcgggtaaacggcgggagtaactatgactctcttaaggtagccaattgcctcgtcatctaattagtgacgcgcatgaatggattaacgagattcccactgtccctgtctactatccagcgaaaccacagccaagggaacgggcttggcggaatcagcggggaaagaagaccctgttgagcttaactctagtccgactttgtgaaatgacttgagaggtgtaggataagtgggagcctccgggcgcaagtgaaataccactacttttaacgttattttacttattccgtgggtcggaagcgaggcaccgcccctccttttggctccaaggcccggcctcgccaggccgatccggg

SEQ ID NO: 16049 - DNA, 315 bp, Zea Mays
aaggcccggcccatcgtatgacgaagagccggcccggcgtgctcctcggtcctcccccgtctggttcggcagcggcagcagcgcgaagggagttcctcagcagggtagccatgcttggtcttcgtgcccgcgcagcgtcgcagctccagcgcccaaccccgtctccctcttccgcttcctcggcgtcgttctcgctcgcgaggctcgggtgcgcctccccgctcgccgccctcgcatattccgtgggttgttctttggaatgattccgaaactaactttacttctgtggggcttgttccaagagtgatttttttc

SEQ ID NO: 16050 - DNA, 3308 bp, Zea Mays
taccactcttgttactcgcgttgcccaacggaagaaaaagcacccgtggagctgtacaccgattttcatcactctcgccaagcttcaggcgagctgctgctgctgctgctgccgccgccgccgccttgtcgggtaacgagcgacctcgacgtcggacgtctcaagtggtcacatgctcgaggtcctggacatggcgccgccgccaccaccgccgccgccgccgccgcatgcgcggcaccatcagggggcagccaagggcggccacgcggagcggaggaagcaaccgctgcagagcagcgtgacgcagcccaaggcggaaccggcggcggcggcggcggcggccgtgctgccggagggaggcaagaggtgcggaggaggcggcgggaggcgccgcggcgggcgcggccgggccaaggcaccacctggtgagcctcgcgtcgcgctagcgctggcgcctccgccgcgcacggtcattggcccgcccgtgccgagcaaggggctgtcgttctgccgccgccccggattcgggaccgtgggcgcgcgctgcgtcgtcaaggccaaccacttcctcgccgagctcccggacaaggacctcatccagtatgatgtgaagatcacgccggaggtgagctcgcggaccgtgaaccgggccataatggctgagctggtccgcctctaccgctcgtccgacctggggatgcggctcccggcctacgacggccgcaagaatctctacaccgccgggaccctcccgttcgacgctcgcgagttcgtcgtgcggctcaccgatgaggacgacggcaccggcgtcccgcctcgggagagggagtacagggtcgccatcaagttcgccgcgcgcgccgacctccaccacctcaggcagttcatcgccggacggcaggcggacgcgccgcaggaagccctacaggtactcgacatcgtgctccgcgagctcgccaaccagaggtacgtgtccatagggcggtccttctactcgccggacatcaggaagccgcagcggctcggcgacggcctgcagtcatggtgtgggttctaccagagcatccggccgacccagatgggattgtcactcaacatcgacatgtcgtccacggcgtttattgaacccctgccggtgatcgagttcgtggcccagatattaggaaaggatgtcatatcaaggccattggccgatgctaaccgaatcaagatcaagaaggcattacggggcgtaaaagttgaggtcacgcaccgggggaatgtaaggcgcaagtatcgcatatctgggctcacaacacagccaactcatgaactgattttcccaattgatgaacaaatgaatatgaaatctgtcgtggagtacttcaaggaaatgtatggtttcaccattcagcatcctcatcttccttgccttcaggttggaaaccaaaagaaggcgaactatttaccaatggaggcctgcaagatcgttgaaggccagagatacacgaagaggttgaatgaaaaacagatcacatcgttgctaaaggttacatgccaaaggcctcgagaacaagagatggatattttacagacagttcatcaaaatggatatgagcaagatccatatgcgaaggaatttgggatcaacattagtgagaagctaacctatgttgaagcccgagtccttcctgcaccttggctgaagtatcatgacactggaaaagagaaagagtgcttaccacaggttggtcagtggaacatggtaaacaagaaagtgataaacggatgcaaggtgagccactgggcatgtataaacttctcaaggagtgttccagaagccacagctcggggattttgccaggaattggcacaaatgtgtcaaatttcgggcatggaatttaacagtgagcccgtgatgccaatatattcagctagaccagatcaagtagtgaaggcacttaaaagtgtgtataatattgcactgaacaaactcaagggtaaagaacttgaacttcttctggctatactccccgacaacaatggtccgttatatggtgacatcaaacgtatttgtgaaactgatttgggattgatatcacaatgttgcttaaccaagcatgtttttaagatcagcaaacagtacttggcaaatgtctcactgaaaattaatgttaagatgggaggaagaaacactgtgctcctggacgcaataagttggagcattcctttggtcagtgacatcccaactattatatttggtgcagatgtaacacaccctgaaaccggggaggactcaagtccatcaatcgctgccgttgttgcttctcaagattggccagaagttacaaagtatgctggattggtttgtgctcaggcacaccggcaagagctcattcaggacctttacaaaacatggcacgatcctcagagaggcactgtaacaggcggcatgatcagggagctgttaatatccttcaggaaggccactgggcagaagccattgagaataatattctacagggacggtgttagtgaaggccagttctatcaagttctcctttacgagttagatgccatccgtaaggcatgcgcatccctagaaccaaattaccagcctcctgtaacatttgtggtggttcaaaaacgtcatcatacgagactatttacaaacaatcacaaagacagaagtagcatggacaagagtggaaatattttgccaggaactgttgttgattctaagatatgccacccaacagagtttgatttctacctctgtagtcatgctggaatccagggaacaagtaggcccgctcactaccatgtcctctgggatgagaacaatttcacagcagacgaaatgcaaacactgacaaacaacctttgctacacttatgcccggtgcacacgctcggtttctgttgtccctcctgcatactacgcacacctggcagcattccgggcgcggttctacatggaaccagagatgtcggagaaccagacgtcgaagagctccaatggcacgaacggaggcttggtgaagcccctgcctgctgtgaaggagaaggtgaaaagggtgatgttctactgctgacgaggaacgaagaggaaacgggatgcgtatttggatcatgaacaatcaatctgttagcgatcgctgtaaaatactcggaaatgcctgtataatagttcttgttggttcagatgcatgcatccaatgttccagtgtactatgaaaagggggtgtagaagaaaccttctggtgttttctaggttgaattcaatcaattcattaacatcacgctggagtacaatctctgatgtttctg

SEQ ID NO: 16051 - DNA, 637 bp, Zea Mays
gggccgtttggagtgcttgtcttggatgctcctccaaacggaccagctggcaaagcgggtctgcaagcaaccaaacgagatccctatggccggcttatcctgggcgatataattacctctgtgaatggtacaaaggtgacaaacggaagcgacttgtataggatactggaccagtgcaaagttggagacacggtgaccgtggaggtcttgcgtggcgaccacaaagagaagatccctgtggtcctggaaccgaaggctgacgaatcctagtactagtaaacccagcttcttcttctgtaccatagcatcagtttctcgctttggtgcagaggcgcaaacacacaaggcgtcttagcattttcgccctccacggggttcattcgctgtacataattcatgcatgtagatgttgttaccatctcttgtctggtggaaaaggggtatccagactccattccaggttgccgtaatgccgtcgtgtattattaatacgatgctcatcagatgaccatccaggccggtcaagggacctgcaggccgacgattgaactcgctgatgtcacagatcaccaaacccgttttttgacgaaaaaaaaagattaattgtgtacgtaccactctgcttttacgaaattgg

SEQ ID NO: 16052 - DNA, 527 bp, Zea Mays
ctccgacactgcacagcccgcaccacgcaccaggacatcgccaccggcaccgcactacggcgtacaggaaaccggacggacagctatgcccgaccgcctcctttctggttctcctcctccctcctccctcccgcgcagatctccacaagcttccagagagcagcagcagcagcagctcgcctccacgcgacacgaggacggacatggcgaccttcaccaagctcgaggattcccccatgttccgcaaacaggtcaattctttggaacatcttactgatgaactgaaagaacggtgctcaaacctgcataaaggatgtaaaagattcatgggatcacttgatgaggcatatgcaggggatctatcatttgcagattctctgcaagcatttggtgctggtctggatgatcctattagtgttgccattggagggcccgtgatgtccaagtttactactgctttcagggagcttgggacatacaaggaactccttcgttctcaggtagttcgtgtaacacaaaaggaatga

SEQ ID NO: 16053 - DNA, 701 bp, Zea Mays
ctcggcgaggtcgtcgaccacgccgagcacacgctgacggagcagagatacgagcaggccgtcgccgctgagcccaacaatccgctcatcctcgccaacttcgcgcagttcctctacctcgtgcagaacgaccacgaccgggcggagcactacttcgagagagcagtgcgcgctgagccggcggactcggaggcgctgagccggtacgctactttcctatggaaggcgcggaacgacctcgccggcgcggaggacacctaccaggaggccatcgcggccgatcccgggaacgcccaccacgccgcggcctacgcgcacttcctctggaacaccggagtggagtgagttgtgatccaggaggacacggtggtggtggtggtggtggtgtttcttcccgcgctccgggaaccgcggcggagaaggacgggcctcggtcgtcgggaccaaccggcggccggaaggcatggacggctggctatagaaacgtggtagagcgcagagtcgtcgagggcgacgaggtggcatggatcagggatgggatgttctatggaatactctagtgtatagcgactcgcatcatgtaattatgtactagatgtggaaaaaataacacccgaataagaagtatcccggtaaagtaccgacctcggatctagcgtgtttgtacccccgatactcctcgtgaccgctgtcatcggcga

SEQ ID NO: 16054 - DNA, 1543 bp, Zea Mays
gaaagatggggcaaataataactggatggttttaaagtatgttcaaaatgttccaaaagcaataatgataatatcaaggaagaggcgaataaatgtcctggtgacaaaaaagagaatatggaaaatcatgcttccagtgcatggacagacactgagacgttactccttttagaaggagtcctaaaacatggagatgattgggatcttatcgctcagcatgtccgcacaaagaataaatcagaatgcatagcaatgcttattcaattaccttttggcgaacatatgctgggcacaataaatggtaaattcgttagcaggctccacataaaccagacagatgatggaaaaacgaaccagcacattatggagtcttcaagtcactcaaccgaaatggctgatggcatgcagattgatggaagtgaagatagtgctgataaatcagttgaagaatatcctacaaaacgcagacgattgtttttttcaatggatgctaccacttcattgatggagcagttagctatcctgaccacagcagctagcccagatgttgctgctgctgctgctgatgccgcaattaaagcatttggcaatgaaaacccgcaagcaaggaaagcctttcgcctcaacgagcaagaatataagactaaggcttttgcttctaatcatgtccaacagattgaccacaaagttagcaataaggatacggcgatgcatggccagagtggttctgataagcaggaaaagaagttcattgctagcgcatatcaattgagggcagctgttgctactgctgttggtgtagctgctgcccgtgctaaaatgcttgcagaccaggaggagcgagaaatggagctcctaatggcgtctgtaattgaaactcagctaagaaagatgcaatacaagatcaaacactttgaggagctagattcactcatggatcaagagtacaccgctatacagcaaatgaagggatccctcatgaatgaatggataaaggtccttgagcatgcattccgggctggagtgtctctaccgagagatgaattgctcaccaaactgttgctgaactagccgcccatcccatgaggacctggctgtagtcgagtagttctctgatatgcgtcacccccttgactgttgctggtagatagcttcctgcgtgggtgcgtctgtaaaggtgccgattgtgctttcgatttctcagaattttggggatcagaacaacccttcgtaactctttgccctgttgtaccaaactaggttagatggcaaaattgctgaaattttcttgtagctgttgacatgtatggtttcgttcgtatggatgtgaaaatggtacctcagttttggagtttcaaatcactggtttagaacatcaaatcgtccagagcattcaatctagattcgatggtgtttactcttatctacatttcatagataaaatagataaaggatgatgtggaaggcagagaaaatagatagagggtgatgtagaagattagaaataaaaaatggtactccctccgtttctttttatttgtcg

SEQ ID NO: 16055 - DNA, 1745 bp, Zea Mays
gttatgttcgcgtactgcacgtgccaacatcttcgtgatggccctttatctggcagaagctagcagatattttgcatgcacggatttatttcgagaaccttctaagtacgcatggtctgattactatgaagaccattttattttaccaagccagaggattgctttagtaactaataagcgggtgatgctgcttcagtgcttggatctagataaaatggacaagaaaccttctaaaatactttgggatgttccttgggaagaagtactttcattggagctagcaaaagctgggtatcagaggccttcacatgtaatcatacatctgaagaattttaggaggtcagagaactttgtaaggcttattaagtgcaacattgacaacgaacgggaacctcaggctctttcactttgctgttcaattcggaaaatgtggagatctcaccaagcagcaatgaaagttataccattgaaggttccatcaggccagcgtcatgtgtattttgtgtcagatgatgataaaaaggaatcccacagtttatctaggcctttgctaagctcgggaggaacctctactgatgttgagcaacagttcataaacaatacagttcactttcagaaaatgtggagcagtgaaccagaaattcagagccgatgcaaactagttgccaagcagattgcggatgacggaagggtgttcagcatatggaggcctctctgccctaatgggtatgtctcaattggtgatattgcgcatgttggcatccatccaccgcattttgctgctgtatacaagaatatcaatgggaactttgcactgcctcttggctatgacctggtttggagaaattgtgctgaggattacaagagccctgtatcaatatggcttccaaggccaccggggggatacgtagctcttgggtgtgttgctgtcccttcattcaaggagcccactcttgactgtgctttctgtgtggatgagagactcgcggaggatgccgcgtatgaggagcaaatcatatgggcctcatcggatgcttacccatggggatgctatatctaccaagttcagagcgcctcaatgcagttcatggcacttcgtgtcccaaaagaacaatctgagctaaggcccaagaagatattggagtcatttctgcagcaagcatcagagactcaaacgtcccgtgcatgaagaagctgcacatgatgcttgtgcgtgcaagagaactcggctgggacaaagggcaagtctcgtgcaagaaagctcgaagaatgccacttctttcggatcactccatttctccgttgtcaaagcatacacagaggacagagccttgcatgccaacactcgggttgacggaagtgttgtatactagaatagtaggttaaaggttgtaaatgtaaagttttgtaacgtttgatatagtttttgtccagctacatttgttaaggcccatgtggacgtgggccatattagttgtggctacatattctactaagaagttctcaggactaatcatactttctctaatttaaggttgttaaggcccatgtggacgtgggccatactagttgtggctatatattctactaagggcccgtttggtaaaacttcagctcctgcttctttagcttcagattctgatcctcgtgaggagctgatcctcctgattttcctagaaaatcagaatcatttttaaaaccgtttggcaagtaaactgattcttgtcttctgagggttggtggcc

SEQ ID NO: 16056 - DNA, 289 bp, Zea Mays
aaaccatgatccttcaggcagttaaagggacatgatgagcggtatgatctcgcaactgctatgcgagaggggtgtctgccccaactacgcctgttacgacaacaggcaccccaatgatttaccgtctgatcccgacttcaaaacaaaacacaaatattttcgtttttggttctaagcgttttgtaattcgttttgattctagtttgaaaactgcaaaaattttcatttttttctaaaaaaactctagtggtgtatggtttgtcacatttcatttttctaggttctaaac

SEQ ID NO: 16057 - DNA, 1210 bp, Zea Mays
ctttctacaagtggaacaattgcaagcattgatttattgacaggaatgctcaacctagattccagttcattgtcatgaaccgcaggaatacagataatctagttgaagatctcttgggagattttgaataccaactccaagctccttatattatgtaccgaaatgctgctcaagaagttataggaatttggttttacaactctcaggagtgtcaagaagttgcaaatctttttagcaggattctgaatgctttctcgaaggtgccaccaaagccgaagattccccctgttcaaagtgaatttgaagaggtggaagcagcacctgtgttggttgatggccctctagaaccgcaaacgtcaaatatcatgtcaactactactcacattcaagaggatcctttatctgcatttttcagtgcagctgcaaatgctggtggcaactctgctgtagctgttgcaaggcaaccaattcaactttttggtgctactccggtggctacacatgcagctactagtatcactacaatacaatcgccaggcttgcattatttgcttccttcacaagcctcatcggtttctgggatgcctgctgatgctcatggttctataggaaggtccacaaaccttgtaaatccatcacttttctcaccattgacgtcttcacagacaacaatggtgtgcactaattctgtagtagcaattgctccacctcaacatcctcagactgctcagcagccgcaaagtgctcccttgcttcagccttttctattacctacggcttcaccatctccaccatatgggactccattacttcaaccatttccgccacctaatccatcgccatctcttgcgtctgcaccagtcttgagcccagcactgtctagagacaaagtccgagatgcattactgagacttgtggagaacgatgaattcatagatttagtctacggcgagatcatgaacagacagtaatggattttcaaggtacagtcctctccatcaggctagcttgtgcttggactctgtcattatctgttgtctaggctatttcaagttatcctgtaaattcattgatgaaatccttcggtttgtggagcttgtgctattaatgtacttttgacatttacaaaatctgtgctgtgttcgtggtgcagaaaagttttgttctgagtattatcttgaaacttttgttcaaccaaccttttgagaag

SEQ ID NO: 16058 - DNA, 2602 bp, Zea Mays
ggctagtactgtactactaggacaacagctcagctcaggcaacgcgccggaaggcacacgaagcccatagtttggtttggtggtccgtttatcccagcccacagcatgcgaagcagactggcccgccttgcctttgcggcttggcactgtgtgcagtgtaaacaacctttcgcccttcccctccctcagggcttcgggccttctgcccttctgccttcagcttcagacccgttccgtgctatataaatccccacgatgggaggggttgcccaccccacccatcatcagtcagtcagtcagcagccgcaacctcgtacaatcacgaaagcagcacacgagtccacaacagcaccccgcctctttttcttcacgtgcgttgcgtgccctgcccccatggagaccctcctggctggcaaccccgccaacggcgtggcgaagccgacgtgcaatggcgtcggcgccctgcccgtggccaactcccacgccatcatcgccacgccgccggctgcggcgacgctggccccggctggcgccacgctcggccggcacctggcgcgccgcctcgtgcagatcggcgcctccgacgtcttcgccgtcccgggggacttcaacctcaccctgctcgactacctcatcgccgagccgggcctgaccctcgtcggctgctgcaacgagctcaacgccgggtacgccgccgacgggtacgcgcggtcgcggggcgtcggcgcctgcgccgtcacgttcaccgtcggtgggctcagcgtgctcaacgccatcgccggcgcgtacagcgagaacctccccgtcgtctgcatcgtgggcgggcccaactccaacgactacggcaccaaccgcatcctgcaccacaccatcggcctccctgacttctcccaggagctccgctgcttccagacgatcacctgctaccaggccatcatcaacaacctggacgacgcgcatgagcagatcgacacggccatcgcgacggcgctgagggagagcaagcccgtgtacatcagcgtcagctgcaacctggccggcctctcccacccgaccttcagccgggatccggtgcccatgttcatctcgccgaggctgagcaacaaggccaacctggagtacgccgtggaggcggcggccgacttcctcaacaaggcggtgaagccggtgatggtgggcgggcccaagatccgggtggccaaggccagggaggcgttcgccgccgtcgcggacgccagcgggtaccctttcgccgtcatgccggccgccaagggcctggtgccggagcaccacccgcgcttcatcggcacctactggggcgccgtcagcaccaccttctgcgccgagatcgtggagtccgccgacgcctacctcttcgccgggcccatcttcaacgactacagctccgtcggctactccctcctgctcaagcgggagaaggccgtcatcgtgcagcccgaccgcatggtggtcggcgacggcccggcgttcggctgcatcctcatgcccgagttcctccgcgcgctcgccaagcgcctcaggcgcaacaccacggcgtacgacaactaccgccgcatcttcgtccccgaccgcgagccgcccaacggcaagcccaacgagccgcttagggtcaacgtcctcttcaagcacatcaagggcatgctgtccggcgactccgcggtcgtcgccgagaccggcgactcgtggttcaactgccagaagctcaggctccccgagggctgcggctacgagttccagatgcagtacggctccatcgggtggtcggtcggcgccacgctcgggtacgcccaggcggccaaggacaagcgtgtcatcgcgtgcatcggcgacggaagcttccaggtgacggcgcaggacgtgtccacgatgctccggtgcgggcagaagagcatcatcttcctcatcaacaacggcggctacaccatcgaggtggagatccacgacggcccgtacaacgtgatcaagaactgggactacacgggcctggtcaacgccatccataactccgagggttcggacggaggagcagctcaaggaggcgatcgccacggcgacgggcgccaagaaagactgcctctgcttcatcgaggtaatcgtgcacaaggacgacacgagcaaggagctcctcgagtgggggtccagggtctccgccgccaacagcaggccgcccaatccccagtgatgagcccgtcgatcggtctcgagcgttcctgcaatggcgcctgcgcctgcgtctgtctgccctgaaattttttcgggtcgtttactcgttttcagtcagttactcagtttgtccgtcttcgtcgagcagaactacatccctgctgagggaagctgccaatctttatcctacgatgataatgtttgcaatttcacttgcttccaattgaattctgttataaatttttgcaacatttttttcccgcatcaataaaattcgttcgcgacgccggtctccttggagtcctcggttactgtgcgccgggtgtgtatccgcatgaccaatacggatttacgtctacaataggtgatttaggactagtttggcaaccttattttttcaatagatttctattttttc

SEQ ID NO: 16059 - DNA, 3513 bp, Zea Mays
ttttattaaatttgttttgaatttcgggctatgatgtgaatttcgggccctgatgtaaatttcgggcaaaaaactgaatttcgggccaaaaattgaatttcgggctctaatgtgaatttcgggcttttataatttcgggccgtccgaaatgagtctgacatgtttaagcaattacgggtcgggtcgtaggctaggtccgtgggctgggccagcccagcccgaaattcaaatgagctgagccggcccgaaattcaaacaatacgagtcttttcgggcttgggccgggccggatggtccgaatgtacacctatagccatggtttgtactggcgagcaaaaggtaaaaaaaacaagaataatccttttaggatcaaaagtatttttttgaaaagattaaattgcagaaaaaaacggtccggtaccccttgcctgtctctcccagtcgtttcccgggggcgctagattcagatccatgccgcacgcttctccattcctgtaagctcctgcgcctcctcctcgttgcttcactccaaatccaccgaggccaccgcccgggcccgggggaacccctagcgccgccgccggctcgggcgccctctcgcgcgcgcgtgcgtcgctccgacagcagctgcagccatggcgcagccgctcgtcgtgaagaaggacgacgacctcgacgaggaagagtactactcgccattcctgggcatagagaagggcgccgtgctgcaggaggcccgcgtcttccacgaccctcagcttgacgctcgtcgatgctgccaggttatcaccaagctcctgtacctgctcaaccagggtgacacctttaccaaggttgaggctacagaggtcttctttgcaaccaccaagctgttccagtctaaagatgtgggccttaggaggatggtgtacctcatgatcaaggaactctcaccttccgccgatgaggtcatcatagtaacaagctctttgatgaaggacatgaatagcaaaaccgatatgtaccgtgcaaacgctattagagttctttgtcgtattatcgactcaactcttctcacccaaatcgagaggtatttgaagcaagccattgttgacaagaatcctgttgttgccagtgcagcccttgttagtggcatctacttgcttcaaacaagtccggaagttgtaaaaagatggagcaatgaagttcaagaggctgtgcagtcaagagctgctcttgtgcagtttcatgcccttgctctccttcaccaaattagacaaaatgatcggctggctgtcagtaaacttgtcactagcttgaccaggggttcagttcgctctcctttggcccagtgcctacttattcgctacactagccaggtgattagagagtctggtgtgaaccaaggtggagatcgtcctttctttgatttccttgagtcctgtctccggaacaaagctgaaatggtcatacttgaggctgcaagagcaattactgaactgaatggtgtcacaagccgagagcttacacctgcaattactgtgctgcagttgtttttaagttcatccaaacctgttctcagatttgctgctgttcgcacgcttaacaaggttgcatcaactcatcctttggctgtcacaaattgtaacatagacatggagagcttaatctctgatcagaacaggagcattgcaacccttgcgattacaacactgttgaagacaggcaacgaatcaagtgttgatcgtttaatgaaacagatgaccaactttatgtcagacatagctgatgagtttaagattgttgttgttgaagcaataagatctctgtgcttgaagttccctctgaaatatcgctcattgatgaacttcttgagtaatattctacgggaagagggtggattcgagtataagaaagccatagttgattcaattattatactcattagagatattcctgatgcaaaggaaagcggtttatttcacttatgcgaattcatagaagattgtgaattcacctatttgtccactcagatacttcactttttgggaaatgaaggcccaaaaacatcagatcccagtaaatacatacgctatatatacaatagggtgatacttgaaaatgctacagttcgagctagtgcagtcagcacattggcaaagtttggtgccttggttgactcactcaagcctcgcatatttgtgctcctgagacgctgcctgtttgatggtgatgacgaggtgcgcgacagagcaaccctttacctcaaattgttaggtggggaagctacagttggtgagacagagaaggatgtgaatgaatttctcttcggctcacttgatgttccattagtgaacatggagacgagtctgcggaattatgaaccttcggatgtaccttttgatatttcatctgttccgaaggagacaaaatcccaaccccttgcggagaaaaagtctacaggcaagaaatcagcaggtccggcatctgctgtcagtgaccctgtttctacagttgatgcttcgtatgagaagcttctttcgtccattcccgaattcgctgattttggaaagctttttaagtcatctgcacctgtagaattgactgaagctgagactgaatactcagttaatgttgtgaagcatatttttgatggacatgttgtgctccaatacaactgtaccaatacaattcctgaacaattgcttgaacaggttattgtttttgttgatgcttctgaggctgatgaatttttagaagttgcttcgaagcctttagaatcattaccatatgattctcctgggcagacctttgtcgcttttgagaagccagaaggtgtcattgctactggcaagttctcaaatatcctgaaattcattgttaaggaggttgatccatccacgggtgaaactgaagatgatggtgttgaggatgagtaccagcttgaagatcttgaaatagtttctgctgattatatgttgaaggtgggagtatctaacttccgaaatgcctgggaaaacatggatccagagactgagcgagttgatgagtatgggcttggagtaagggagagcttggctgaggctgtaagtgctgttataagcatccttggcatgcagccttgtgaggggactgacgtggtcccaagcaattcaaggtcgcacacttgtctgctctctggtgtgtttattggcaacgtgaaagtcttggtgagactttcatttggaatcagtgcaccgaaggaggtggccatgaagctggcagttagatctgatgatccagagatcagtgacaagatccacgaaattgtcgctaatggctaaaaacaatagtagaatcgttttttttactctttttttgttttgacttgcatgctacgggaagcttgaggggattcaattaattctagtatatgtaagtctggtttccagttgaatccatcatttgtcgcaccatcattcttcctttgacagtgcatcagtttttttttgaaaagaaaccaccaattcagataataacataagcaatccctag

SEQ ID NO: 16060 - DNA, 609 bp, Zea Mays
attgtattagggagttgctatgaactaaccctaatcacacacactcctaactcccatcccatcccatcccatcccagccgccacagctgctgctcgccctctccctgtctcctctctctttccagccacggtttccccttcccccatccgcgcgctagggcacgaggcaaatctgtggccctctcctagtctcctgaagtccgactcagccgtctcccagctcccgctcgctcgaactcgggttggggaggcacggagtcactgaccccttcgcgttaggcggtgcccttaccggctcttcgtctaaggtgtagtcaagctgccggccacgcccggcacccccctatccagtacaaggccttctccgagatccagtacaaggtcgtcgtctccaagatctgaccccgacgctagtgaggagggaagagtgggtggacgaagtgggggaggatgagcgaggagaggccggtgccgcggcgggagagcccgtggggtctgcctgagggcgacacgcggcagcccaaggctcaccgctgcaacgaccgcgccgaggacgtcgtccaggatggaataaaccccatatatatgtcgaggaacacaagtagcaat

SEQ ID NO: 16061 - DNA, 119 bp, Zea Mays
atacttcacagcccgtcgccgcagaagtcttgttggatcgttgtggtcttcatccccttacagttgttgtcatgggcaagctctggcgaatgaaaccagagtgggaaaatgggagaaaa

SEQ ID NO: 16062 - DNA, 579 bp, Zea Mays
cggatgtagtcgcatatggctcgtttctgcttaggctgttggacaagtgtcggtgctcttttttattcagccgaaacaactgctatagcggcaagctttaggctacacaagacagttcctgagctaagtggaaataaatcctagctcgtattggatatctgaggaagttggcattcctaattccacggtggttgtgaataagctacatccattagatggatcaaactggacaaacatcatcttcagcattgtccctttcccagagaacgcaactatatcatcaacatggttgagcattcttagatcaaagttcatgtccttggttgtacagcagtcaacaatccacttgactaagcctctattcgataattcatcatactttgaagtaattaaattcccaggaggaataacaattatccctccacaaactgcttttcttcttcagaagcctcatgcgacatttaattttactctgaactatccgatctacaaattacaagacaggactaatgagttaaaggatcaaatggaggcagcactactactcaatccatatgagatttgttcatttgatctcca

SEQ ID NO: 16063 - DNA, 2532 bp, Zea Mays
ttccgaactgtcagatgctgggatatgcataaaactgattgttctagatactgttggaattccaatctggcaaatggcaattgagccttcagttgatgctaaaaatactgaaaataatagctcagagtttgctgtcaatggccatccaaaccaaaatgactccagcgattctgacttaagtaacattgatgatggtgataactctgaggatgaagatggttctaccaacacaatatcttcatatcatgtgaatgatttccagcgactggctcttgcgtgtgatgatggttctgtacgattgtataatgtgcctgaatcagggcggactctaagtgtggcgtggagtagtaacgccaaatttgtattttctggcagcagcgatggtttaatcagatgctgggattcaacatctttccatgaaatgtatcgtatcactgttggattgggaggggctagtaactcacctgaactttgtgtctggtcactattgtttctgaggtgtggaactattgttagtggagatagtaccgggagtgtacagttttgggatagccgccatggaacacttctgcaagctcactcttatcataaaggcgatgtgaatgcactaacaactgtgcctagtgggaacagggtattttccgcagggtctgatgggcaggtaattttgtacaaaatatcaaaagatgaattcggtgctagtaaaaatgtgatcaaagagcaagttcagaaatgggtctatgtgggatatctcagagctcacactcatgatataagggcattaaccatggctgtgcctatctgtagagaagatgcattacctgaggaaaaggtggtgaagattcgccggcgtgaaaaacatgaattcagctaccacagatgggctcatcttggggttccgatgcttatatctggtggtgatgacgccaagctgtttgcatattcagcaagagagtttactcagttctcacctcataacttctgccctgcacctcaacaccctttgataaagctggctaggaatagcacagtcaatggagattatgtaatgcttgtccagtcttcgaacttcttggatgttttacttgtgacagttcagaacaagctgacgactccaagtacatcatcatctagaggagatgctacagtccgacaacttgttcgtttgaaaagcaaggggtccagaaaaataatttctagtgctgcctgtgccaatggaacacttttggcctattcagatggtgtgagaccctgcctctttgcactaagacataagggtggaaagaagtacacccttgacaaattagagctgccaaaaggattgccctgttctcagagtatgctgtttactgtggactcgtccaatttgatacttgctgggcgtaatggaaaaatatacatcattgacattgcaacaagagaaatttcaaatgtatttcaccctacaagaagggcagatggagcaaaaatctcaagagaaccacctgtaacgaagatgttcctaagtgcagacgggcaatggctagctgcggttaactgctatggggatatttatgtatttaaccttgaggtgcaaagacaacactggttcatatcccgaatgaatggtggttctgttacatctggtggtttttgccctaagaacaacacacttatcataactacatctaaaaacgaggtgtatgtatttgatgtggaaacaaaacaactaggtgaatggtccaagcgatatacgcaccagttgcccagaagtttccaggaatttcctggagaggtcattggcctatcattttctccgcaaagctcgtcatcggttattgtatacagtaccagggctatgtgctacattgattttggattgccagtagttgaggatgttgacttgccaaatggatcagctggagctgcagagaagtcggacacaaaaaaaattaaaaaagcaaggcagaaacgtaaggcccatgatgaagagtctaaacaagagaaaaggaataacttaagtttttttgcgtttaaagaaccagtgctctttgttgggcacctactggacagttcaattttaatagtagagaagcgatggatggatgtagttgaaggttttggcgcaccggttcacagacatatatatggcacatgattctttctaacatcaaactttggcgcccgtgacaagcagaccattatttttgtttttgcattcggcctcgagtatgttaccggttgaaagggctccaagttttgcagtacaaagtggcagctgcatctaatctttagaattggggactctggcaattgtgtagtgttattttgttctcgagtaatgcagtttttcataccttgtcactgcgcaaaattgtcagatgtaaaaactgtataactatgttattgttagtttatatctgctgttcgtctcaagtagcatgttgtctgtataaaggccccattgacggccgaactgttgtgtcgcactatgtgataaattagttatttatagcgtgtttggtttgagaaatgagataatccatcttctca

SEQ ID NO: 16064 - DNA, 2867 bp, Zea Mays
ctccaagtcacgcccctcccacctcgccggcgcgcccgcctcagccgccatgagcgcgctccaggcctccctcctcctccgcccgctcccctcgccactgcccccgcgccgccggcagccgctcccctctgccttcgcctctttgccccgcggtgccaacgcgccccgccgtgccccgctccgcctccgcgcattggaccccatcgcgccgcagcccgacgcctccgagccgcccgcggctgcatcctcgtccgcggcggaggcggaggagtcggagagcacgacgatgacggagtcgacggcacagcccgccacgatgagcgggaaggaggagctggaggacctggtgggcaaggctagggcctgggccgtggcggtcgcggccgcggtggtggccgcggtcaggaggttcgtcgactgggtgctgtcgaggaactggatgagctggtggcccttctggagatccgaccaccgactgcaggggctgatcgaagaggcggacgccaaccccaacgacgctgccaagcagagcgcgctcctccacgagctcaacaagttcagccctgaagaggttattaaaaggtttgagcagcgaagccatgctgtggatagcaagggggctgcagagtacctgcgggcacttattctcactaacactatagcagattaccttccagatgaacaatctgggagatctgcaagtctgccagccctgttgcaagagttgaaacaacgtgtatctgggaatgaggataaacctttcatgaaccctgggatatcagaaaagcaacctttacatgttgtaatggtagatctacacgctttgctcaagaaattgtctcgacgatgttgtttacaattgctgtcggcgtaatgtgggtgatgggtgctgctgcacttcaaaagtatattgggagcttaggtggaattggggcatctggtgttggttctagctcatcatattctccaaaagagatgaataaggatatcatgccagagaagaatgtcaagacatttaaagatgtcaaaggttgtgatgatgcaaaaaaggaacttgaggaggtagttgagtatctcaagaacccttcaaagttcactcgccttggtggaaagctacctaagggcatacttttgactggtgctccaggaactgggaagacactactagcaaaggccattgctggagaagctggtgtaccattcttttaccgagcaggctctgaatttgaggaaatgtttgttggtgttggtgctcggagagtgaggtcattgtttcaagctgcaaagaagaaggcgccatgcattgtcttcattgatgaaatagatgctgtgggttcaactagaaaacagtgggaagggcacacaaagaagacgttgcatcaacttcttgttgagatggacgggtttgaacaaaatgagggaataattgtgatggctgcaacaaacttggcagacattcttgatcctgcactcacaagacctggtagatttgataggcatattgtcgtcccaagtccagatgtgcggggtcgccaagagattctggagctctatttgcaagataagccagtggcaaatgatgtagatatcaatgcaattgcccgtagtacacctggctttaatggggctgacctagccaaccttgtaaacattgcagcgataaaggctgcagttgaaggtgcggacaagttgaatgctgttcagttggagtttgccaaagatcgtattatcatgggaactgagaggagatcaatgttcatatcagatgaatcgagaaagcttactgcgtaccatgaaagtggacatgctattgttgcgctcaacacccagggtgctcaccccatacacaaagcaactatccttcctcgtgggtctgcccttggaatggtcacacaactcccctcacaggatgagacttctattagcaagaaacaactccttgcacgtcttgatgtttgcatgggtgggagggttgctgaagagctgatatttggggaagacaatgttacaactggggcgagaaatgaccttcacactgcaacagagcttgcccagtacatggtatcaaactgtgggatgagtgatgctatcggtcctgtgcatgtgaaagagcgaccaagtgtagagatgcaatcaaggatagatgctgaggtggtgaagctcctaagagaagcttatgggcgggtcaaacgattgcttaaaaagcatgagaagcaattacatgctttggcaaatgcgctgctggagcgtgaaacacttactgcagatgagatcaacaaagtagttcacccttaccaagaagaaccccagttttccttccaagacgaggagtttgccctcacttaaaagattcctttgttgcatccagattttacctactgtgaattgtaaatccgtgtacagtaagtggcatctagatgagccatcgaagtttgttcacatgcccccttctgcaaaatagggcgcaacacaccttcggtacatttttcaccttggcaccatttccatttgaggagcagccagtaaatcagaaaatgagaagattggtgttggaaaagccgatgcctgcttattgataattcttgggatggaagaccgccatggtggccggcaaggctctgggttgcaaaaccctccatacttttggttttagctaggatagatataggtgcaacattgcatgctctgaatgctaggtttctggctagggtaacatgtttaccatgttctttttacttctttattacatttgctgtaaggaaatcgtacatatggcggtagtttttttttcaaacaagcactgtttgttttttgtcaaacaatatacgttcaatgtatttgtattgctaacatgcacttgatgcctt

SEQ ID NO: 16065 - DNA, 1265 bp, Zea Mays
tcaccgccctcggcagttgaatagcaagtattgaatggacggctgatccagcggcgcttgatcctatcggacggtcgcgaggatcccaggagccctatatccccatcctcgccccccacctccttcgcttcactcgcgtccgcccccgccgccgcctttcgtcccagcccctaaaccattctccattcctctcctcagtttagcacaatggcactggctaataagcttggtggtctgctcaagaaagccacaagttcaaatccgtctgtctaccaagcaatcagatgcatgtcatccaagctctttgttggagggatttcttatcaaactgatgatcacagtctcagggacgagtttgccaaatatgggcaagtcattgaagctaggattatcattgaccgtgagtctgggaggtctagaggttttggctttgtaacttacacgtcttctgaggaggcttcagctgccattactgccttggatggaaagactctcgatggacggagcatacgggttaatcatgctaacgagaagaccggtggctttcgtggcggcggtggatacggtggcggccactatggtggtggtggtggcagcggtggatacggtggcggcgactatggtggcaactacagcaacaggggtggtggtggtgattatggagttgctggtggaggtggaggcaactttactgctggaggtagcgacagctttgccaacagtaactttggttctgacagtagttttggtggaaacggtgctggtggctttgatgcaaccggcggttccacaggcgatgatgggttctctggcacacctgatgataactttggtggtaacaagaatgaagaaaccatggatgatatcttcaaggacgatgagccggacagctacgccgacaagaggagctagtttgtgccttctccaaagagtgctcatcaatacgattccagaacgatatgtattggctagtgtttgctgttaacatcatagcggcctgtatgttcaaataatggagcgagtaattctgatgagtttgagttgtcgggggctgtggaactttcaaacatggcgtgcatccacgttataatgtcgttttgctagatgctatgctttcatcgtggcttggaaatcggggtcttgtcaagcttcagctcagacggatctgtaaatggtactgaaccctacattttatgttttctgtggatgctctgcgtatgtgacaaaaaagcagtaaaaatgaagtgtgagtttaatttcagtac

SEQ ID NO: 16066 - DNA, 5087 bp, Zea Mays
ccccaccctactccatcttctcgtgttgttcggcgcacgcggagacagcccgcgatcccgatcccgatccttcttcacgcgaatctcgacgatcccccccttccttccttcaagaaggagagcaccctccacctggtgctccgcctgaggggtggcaatggtaatgcagatctttgtgaagaccttgactgccatgtatgataccgtctttgaagtatttgtattgtctgtcgtgactaagtttgtttcgtggaccggttgtcttctaccctacccaaaactacagtgtggcagcaaatgatgaataaatgtgatgtttgaatttaaaaatatgtgctgaataatgttgtttttttgttatgtcagttaatgttactaaattggctagcttttaaattttgtttactagtgttcgtcgcacctacatctttgtactgaatgtttgctttaggttctgacaaactcattttgagactagttaaatacttaggacctaaaatgaatgcagtaaatatttatcatattttctatgaatttggtcagacttaatttggctgaatccaaacctaatgtttttttactaatcatattgatatacatgtttgattgtctgattatctggtttgttactattttacttggttcgggtctctatttcttggtgaatctacatagacttgtgcagaacctggttgtgatcataattctacttcctctggagataaagtggcttgcttttctgtatgtctaattttttgtttgaccattgaaaaacaaacaaccaacttacggatcaaatcagtattactgccagaagtatatttgacccttaacactatttataaattacataaagtttcacgattaaaactgacggacggatgttattggcctagaaatagctcgaaagctctaggcttaacaacccttgcactaaattattgtgattaacgttgtactttatagtgacaaaaattaattggaattatatagtttcttttgttttgtagaagcaaactaagttaggctataataatatagatagatgattaggtttatatatggtttcttttgtgaattttattaaggatcaactagtgtcatgaagttgatagacataaaatagcgacacatttcttttgccgtactataaaaagcgctggaataattaagatagtcaagagggtgaatttggtgtctctaacttttcttggacaaatttaaattttgaacacaagcttaactatctccgtgtgttcaataacgtgtctaataatatgataaaaagtttatatcctgattttctattttatactacgatggtaattttaaggatgctaattttaaaattgaattgcttaaatataaatgtataaaataagtaaaagatcaatggactcctcgatgttttgtattatagatgttgttaattgattaacttgtactgagttatttaagagcaaggtagtaagctgttgccaacaactgattcggttgtcacggattagtggccttaaataatttctagccggattacttctctaatcttaacgatttctgatctatttcttaaaaaacgaataaggtctgaatcaagatcagagctggagatgtgcatgggtgcatctcatatggcacaccgcagacaaaagattgcatagttggctccgatcctatttggcaagtgattagagatggcaatggcccaatggttacccgcgatccgatactcgatgagtatttactctattagggtatatatatggtctaaatgttctacctatggatttcttgttaggtaaaaaccttcaaccaattggtaaacgggtataagaaaattctgtccctacccatacttgttaacccgtgggtataaacttagcctaaaaacatgaacttgggctttacttatatatttcttttgacttagcctaaaaacatgaacttgggctttacttatatatctcttttgactatttaacaaccttttcggcgataataccatagaaggcttaacaactatttgatgatcatgtaatagaacatgtaatgtgttatgtgttactatcctagtgttgctactatatccaattatctatggtgttcttgaatagatgattgaatgatgttagaaattttgtaatggatatattgacatttgtataatgtagatgtttaatctttgtgagtacggatctgacgggtaactcatacctatatgggtaatataagtgacccgatgggactattttttttatcttaggtatggatatgagatagataagagatcataatgctcatgtacgccatcaatgccatttttttaaatgaacaacatttgaagccttttccatgagaaagagaaaggggaactaagatatttatagaagttccttagagcaacttcaataggaaccctaatcacataaacaaattaaaatatagagctttaataagaaaagacagctacccaagagccttattttaatgaaattcgtgtaaacttgaagggtagcatatttggatctgagatccgcagccctatatggttcgcgctcgtcccaaccacctcggatattttcgctttcttcttcgccgccaccggctcccattccaccgccaaggtcagcttcgtttccatcgccgcatcgcgttcgcgtgtgccaaccccgctcccatctcaactgtcaccgtccgaagaactgatccgttctgcacaaccgctcgtcactctccaaatttgctgcacctgccctctccaaagttcttgcactcgtccctctccaaagttcctgcagattcacttctctccaaagttcaggaggatgtgtggtgtgacagcgctacaacaaatctgtcaacggggactctcatcctcttgctcatagaaagaactgcagtgttacagatgcggttcaactagccctccgaccccctctcgagagttccgctccaccgcggcgaaggaagtggcggaggaggaggatccgcgcctgcgctgggccttcgtgcggaaggtgtacgcggccccccgctgccgtctggcccacgtacatcgccatcctcctatccctgtccccgctcggactcttcctcgctaccgccgtgtctgcggatctggccaagtagcccggtaggaagcgccgtgggaggagacaggcgaggcgttcgaccgccgccggcagcttaggacgtaccacgtctctgttctatgggttcacgagtttcggggccctacatggattctccgcctccgcctccgcctcgtccgccatcgccgccgcgacaccctcctcaccctcagggcgagcgtcacgtcggcggggagatgctgtaccaggacacagaccataggctccgcgcgctggtcgggagcgccgagggcttcggccgccacgccatcgggggcctctacggggccatccaccgcgtcacgtcgctccaagacgacgggcccgggagtctgagggaggcgtgccgggcggaggagcccctgtggatcgtcttcgaggtgtccggcaccatccacctccactcctacctccgcgtctcctcgtacaagaccatcgacgggcgcggccagcgcgtggtgctcaccggcaaggggctccggctcaagtcatgccatcacgtcatcatctgcaacctggtgttagaaggaggccgtgggcacgacgtggatggcatccaggtcaagcccgactccaccaacatctggatcgaccgctgcaccctcgccgactacgatgacggcctcatcgacatcacgcgccagagcacagacatcacagtctcaagatgccattttatgcggcacgacaagacgatgctcatcggtgccgaccccacgcacgtcggcgaccgctgcatcagggtcaccatccaccactgcttcttcgacggcacgcgacagaggcacccccgcctccgcttcggaaaggttcacctctacaacaactacacgcgcagctggggcatctacgccgtctgcgcaggcgtagaggcccagatcgtgtcccagtgcaacatctacgaggcaggtggagggcccccaaagaagacaactgtattcaagtacatgccggagaaggccggcgaccgagaggacgtggtggcagggtcgatcagctcggaaggggacgccttcctcaatggcgcgctgccctgcctgatcgataaccctgggtctgtcttcaggccagaggagtactaccagcagtggaccatggagccagcgtcgccggcgctcaaggacataatacagctctgcgcaggatggcagccggtgccccgccccccggatgatcgctgactttcatcattctgatatgctgcagctcgcttctgtaagaatattcgtttcacggaagcactgcatttgtatgcatctcatcctaggtaattcaacatttgtttcatggtagagtggcatttgtatgccactcctcttcatctgccccctctctgaaatgtagtagaaaagttgttatggttttctatttgtgtctttatttatggtacatacaattcccaatgtaaagatatttctctcgtccatagcagtacaatagcttttagttgtgaatgctactcgtatgtcttatactagaaagctgcaagacacgtcaatctgctttgtagacattcacagaggatgaggatctccattcataaggaatgcaggaattttaactgaacttgcagagcttgatggtttagctgtggcatggtggttatgacaaaggatcctccaaaagctaataaataaaaaggaggtggagacgggagcttgactgggacgcggcggcctacacgaactcggtggcgtcggaggcggcgaggtcggcgataagcaacagggggcgagagcggtgacaaggacaggcgtgtgagagtgggattctcttgcttctctggcttctagtttctcgaggtcaagttgcatgtgtactcacgggtcacggtaaaggagctatgtgccaattaatttaagttccatgtgtactctattaccggtacaagatgaatcaattgttgatttgtgataagtttaaactattggggaattgattattagggaattgctg

SEQ ID NO: 16067 - DNA, 1913 bp, Zea Mays
ccctcgtccaacttgctcccaaatccaaacgacaaaatgctcctcgctgcggtttgatcgaggccgcggccccccgaaccctcgcctcgcctccccctcccgccgccgtcatggacgacgaccgcgaccacgaccaggaccccgatgcgtcgtcgccggccgcgccgtggcggcggtccgtgaagcggaagctgggcgcggaggcgggggacgaggcgggccccgcggcgcgggtcgaggcggaggacgagcgcgcggcgctgcgggaggcggcggcggcggcccagtccacggcgtcggcgctgcgggtcgaggtcgaggaggagcgcctcgccgcggccagcgccgccagcgaggccatggccatgatgctccgcctgcagcgcgacaaggccgaggtccagatggagctccgccagttccgccgtttcgccgacgagaagatggcgctcgacgccgccgaaatcgaccagctccgcgcgctcctcgcccagcgcgcgcgccgcctgctgcgcctgcgctccaggctccgcgagtacaggctgcagtgcctccacctcggcatcccgcttcccgagggcgaggacctcgtcgcccagaacgccgccgaggaggaggaggaggacctcctcctgctcgagggcgaggagggctacatcgttggcgatggagggtactactaccctgagctccgctgcaacgacggggagtactactacgaggacgggcgggaggaagaggacgtggttgccctcgatctggagcgccggatctgccttctcgaacacgatcaggaacctcgcctgcttgagccaccgcatgagaaagaggaaggtacccacctttacacagatgaagtgttgccggacatgtctgaacatgaactgggtggcctctatgccgacgagatgttatctaaggaggatgtggaaacaatgaacaacctccacaatgatgatgaagaactgccagagtcgcctactgctggaaatgatgacggggaggaagcaagcgaggctgacggtgctgacagtgtaagtggcagtggcagtgatagggtatacaccattgacaaggtgcatcaaggtgcagcaatgcctattgcaagggtcgtggataagtaccaaggggaggcagtggagccggacattaagaagctttacatgaggctggaggcactggaggccgatagggagtcgatgaggcaggcccttgtggcaatgcgcacagagaaggcacaacttgtgcttcttcgtgagattgcgcagcagcttgccaaagatggagttccagttgggccgggagctggggcggggccaggtgtacaccatttgcctagaaaacacgcagttgggattgtagaaaggagattcacagaggacaagaaggcgatacttgtgaagacattttccatggctgccttgttcaagtggatcctcgctttattgggcaagaaaaagaagctatctcaaagcaggtatacttttggcttaacaaataataatgttggtttgctcatactcttggataagtgcccacggatccagaaaaccctcacaagaacaaagttaaaccttgccgaaagaagcagcagcagctgtacaatgtaaaatagatagctttcagttgggaagattgcatttcttttgttaatgtttggtggagcgaaagttcttttgattctttagttgatgattttccgatttcccatcttttggtgatgaggattttatgcgttggtcttgcaattgttaagtcacaaaatcgctttcgcatttttctcaccaggaagaactacaatgcatgtatagtgcgcttgtaaatacactggtttagtttgcttgctgccttgcttccagtttttttggactggtaatcagaaatttgtgtaaaattcctgatatgaatagctg

SEQ ID NO: 16068 - DNA, 689 bp, Zea Mays
gttttctaggactagttatgctgaaggagcttagacatcttagaatggagcgtgattcgattgaagacaaaatccatcatcttgaatggtctcttaagcttgatgatatctcagaaaaccagaaggagaaattgttctctgaacatgacaatctgctgaaacagagagggcatgttcgtggtcttcatcaagaagctcagaggcaacatcatcagaagtttcataaggtgtggggacagctcatgaagactgggtaccaaaattccagatttgctcatcaggttgagagatttgcttgcttgtacagcagccaggttacaaacttcggtttgtattctcctgacaaatactatcgtccgagcgaagattacatgccccacgagtttgatgtgcttgggctgtaggagcagcccctactgctggtcggagttcctcgttgtaattgatccatagcctaggaggggacatcgtagttgccgtattatataacaggaagcttcacccattgtgaaggagagaaggtttataactatagtagctacatttctacttatcagtaagtttacctgtatataaatatgtacataactgatatatgatgcgtgttatttgtgagcacgcgataagtagtactgactaagtcctgctggtgtagtcattggtttttttatgatggattagcatgtaat

SEQ ID NO: 16069 - DNA, 3478 bp, Zea Mays
gtgttgattgcacccaacctgcaatgaattgcaactgttgataactgttgagttgccaccttttccagcaaaggccatgcacccagcaatccaagcaaagggggagaatgcacgagatattcaccccaggttgttctgaagaactcgagtaaaacttgggctgatagccaaagagcaccagcaacagaactatctcaaacctcatattcatcatcaccctcttcgtcattctcatcccttgatggcaacaggtcaacacaacaagacctatcatccactgaccgaatgctatttccagagaggccgtttaagagctcgccgaagctcaagagttcttttgacagtgacaatggactcgactaccctgatgatgcgcttaccaagtccaagaacatgcccatagttcaatccagcctgccaactcttggtataagaaatcttgtgaaggattcaatctacaaggatagccatgaattgtcagtcagaattagcactgaagaagaagtaaaagatcacccatccaactgtggagatcaacctatgcaattgaatgggcctcaccatgacagtacacaaggaaaaagcaagggtctcatggacatcaacgaatcgcttcgagtgctagccaagctcagggaagcctcgtggactcctcctgaatctgttcatcatgcaagactctcatatgatgctcctcggttctcatacgatggaaaggaagcaacatcaaaattgagggaggtaccgaggttgtcattggacatcaaggaaggtcacctttggaatcgtgaaattgactctaggttggacccaagcttgagttctgcagacagaaacagcaacactgttactgggtccaatgcagctttcgagacccagcaggaacagcctgcctgcaagcggcttcctagcgttgttgcaaagctcatgggtttggaagagttgccagagcataatcaaagtacagcatcatcacatgcatgcaataccgttcaagagaacaagcaagatgccatgttgaactccttgagcatctcctaccagtacgagcatgctcctcaacaagaaaggaatcctgattcaactgtaagaaatttacccaactctaagttccctgtccaaactgcaccatggaagcaacaagaaaggattgtccttccacgaaaactgccaaagggatcaaaaggagcccacggaagagaacctgctgcaccatggaaccagctgaaggatcttgattttcagcaaccaaacaaagaccttagagcacttaaacagattttggattctgcaaaaggactattagaaaataagaaacgggaggaagcatttatgccaaagctatataatggaaaccatgatgaccaagagatggccagtgcgaacatgagactgaaccgtaacaccaacaacatgtggatgcctgaagagagcaacgctgaaagctctttcaaatcgcctattgtgataatgaaaccttcaaaatctgcaaacctttacagcaaagtggattcttctgtcttcccattaggaggttcatctgatctcccacagccacaaacaagcaatagcactgatagaaggaaagcttcaacgattaatagaaccgccaaagggcaatatgcgaaattgagtccaagggtgcctacttctcaaccccttgtttcttgtgacaggagatcatatggaaggaatgatgatagcagcaacaaccaaaaatctagttcactgctggtcactgagagctcaaccagaagacagcagctgccaaggaatagtagcgtaagtatgcaaaagaacaaaaattccactagcccaaaattactacagagaaaacttgatccagagcggagggctagaccacctattccttctgctgagtctaacaaaagcgaaaggcaatctggagataggaacaattcagaaacagtgtcaccccgaagcaaattcagaaggaaacttgtgcgcccacaaggtgatgatggcatgcccattggattgaacaacaggacaaggagcctgtatcagcatgacaatgatatgtccataaggtcagatggcagtataagtgttgcttcagagctggatattataagcaatgacagatctacaggagttaatatttctaactttgagcaaggcattggaactccatctggaaggaacccacagaaagtgaaaacctcatacgatgcaaatatggacgtgccatctgtagacccttcagctgctatttcggaacggcccagtccagtttctgtgttggactcttcatttgatcaggaggatttgttccctaccagcaggactccaaattcacttgctgttgatgatgagcgcgaaacattagaggaaccctggaaaccatctgtcgctatacagtccaagaacaataaactcgcaaatgttgcgagcttgcttgagaagctccagcagcttagcgtgaacaaggatgaggatgcacctccggttgaccatattgctttcttgtgtgagacagagagcccagaccaccgctacgtgtctgagatactgctggcctccggtcttctgatgaaagacctaggttcaggacagacaggtctccagctccactcctctggctacccgatcaaccctgacttgttccacgtgttggagcaaaggaaggctggatgggtcagtacacctgatggcatccatcagagcagaagcggcacaaaatctgatcccaggagagcgcaccggaagctgatgtttgacactgtgaatgagcttctccttcagaagtttgagaaggaaaccgccgtttatgcgctcagttccttcaccagagcgaaggatccacctgcaaagacttttagcgggcaacagctgccgaagttcatatcttcgggaattgaagaactggatatggagcgatcgtccatcagccagaaggacagcagcgtgatacctgatgcagagatcctgcggaggctgcagggatggacgagcttcagcaaggagctcccggggatggtgctggagatcgaaaggtcgatattcaaggagctggtggacgaggtggtgcatggggagtctgctgacggcccggagatgaaggctgctggcagacggagaaggcggctctttgcttgatacggtttgtttgaccatcgccatccaccatttggatgggcctgatttgtgaagctgtaactttgtttgtcttgccatgagagtgagaccctatttcatctcaagagaagagggagagagagggggtagcgcagatttggtgagagacccgaaaatgggcattcgttcgtgctatatatagatactatgtataccattgtttcttgactccttgtgatttactgtggatgatgctatttcagtaaaaaaaatggacgaatgacagttgttttttgccatgtaaaaggcaaattatatacgatgatgagtagaccactatgttgtatgatgcataatatttatctataaaaaagataac

SEQ ID NO: 16070 - DNA, 737 bp, Zea Mays
ttttcaatttggcataagaactccagcttgcgttggggaagggcgcgtccctgagagacgaaggaagagagcctaggactgactcactgacccgaacccgttcccggcgggacttcctctcgaatcgtcccagtcgagaccctagttgccccacgaaccgaggatccaagatgagtttcctgttcgggaagaggaagacgcccgccgagctgttaagagaaaacaagagaatgctagatcgatccatcagggaaattgagcgagagagacaaggattgcaggcccaggagaaaaagctcatcactgagatcaagaaaacagctaaagaaggccagatgggagctgtcaaagtaatggccaaagatcttattcgcacccggcatcagataacaaagttctaccaactcaaatctcaactccaaggagtttctctaagagttcagacactaaaatcaactcaagctatgggtgatgccatgaagggtgtcacaaaggcaatgtcccaaatgaacaggcagctaaatctaccaggattgcagaggataatgcaagagtttgagcgacagaacgagaggatggagatggtgagtgaagtgatgggagatgccatagatgatgctttggaaggagatgaggaagaagaagaaactgaggagcttgtgaatcaagtacttgatgaaattggcattgatatcaaccaagagaaatcatgcacatgaggaagttataactctagt

SEQ ID NO: 16071 - DNA, 938 bp, Zea Mays
ccgccgtcctgcaagtctgggacggaggaaggagaagagggagagagtggtggggattcggcatggacatcatcacgcagctgcaggaccagctcgacgagatggccgtgctggccgtcaacaccttcggcacgctgcagagggacgcgccgccggaccgcctctccagcagctaccctgacccgctcaaccccaaccctaagcccgaggacgactccaaaccccaggtccaggcccagcccggcgcgccgccgccgccaccggcgcaggcgcaggcgcaggcgcagccgcccgcgcctgacctcaccgagcaacccaaggctatgagccgcgccctcgtcctcgcggccaagaagtttgatgcacttgttgcagcagtgccactatcatcagaagaggatcaagtgaaaagaatccaagagctacaggcagagaatgaagtcgtgggactggagctccagaagcaacttgaagctgccgaaagggagttgaagcaggttgaggtgctgtttaatgaagcaacagacaattgcataaattttaagaagctagattaattacgttaatgtttgctgaaaagaaactgttcctgtggatggagtgtggaggatgaatgccaacatgatactggttggttctgcaaggatactccctgctcactcacacagacacaataacaaaacaaagagaaggaaaagatgcatcattcccctacagccttattcatcgtccgttgagcacagcagcagcagagcagcccgtcgtgtcaagcatatttgcaggtgccaaggcctgcaagaggatccaatgatccatcatccggtgtcagctcccccaacacggttcacgggcaatgagacactcacagcaagcaaggaagcactcactggggtcagtgatggtgattatgccggtgccgttgaagaagcagttccacg

SEQ ID NO: 16072 - DNA, 585 bp, Zea Mays
cgagtgttcatgtaggattcgagaggggaagacaaggtaagactgaagggaggccagacgcccaaggcactgaagcaatgcatgatatgacacccatctgctcctagtatcgccgtccccgctgggtggaggtggaattggaaggaaggaacctgaagatgcacggcgcggcggtcttcgtggtgcagaccggcagtgcagtgcagtgcagggggctcatccgcgcccaagttttggctcgagaagctgtgcataccgatcgccgcgtctgtccgtccactccctctgcgtctgtgaatgtgtgccagagtgaacgtgtagtgtcatcctgtacatacgtatggaacacaacattcgtgcttcggcctcctgcagccaatgcgatccaggatgagccgtgtgccaggtgcttgcgttgcctcgtcggcccggaattgtgaatatgcctgtcacgtgcgggcggaggtggcaaatgggcatctctaaatttggtgtttatcctgctttcaagtggatttggaagccttttcctcttagctaaaacataagatcgctcttttatcttctgttaagaatttaagatcg

SEQ ID NO: 16073 - DNA, 1364 bp, Zea Mays
aaccatgctacttaagtaggaagcatatttctcctacttttgcaaatagtcttctagttctttgatggtcgtttattgaagaatcacatgctggaatcaaaatctcgccacaggataacaactatgttggtttgcatgataggcttgttacaatcacagggacctttgataaccaaatgaatgcaatagatttgatactgaaaaagttatctgaggatgttcactatccacctaatttgagctccccatttccttatgcaggccttactttcccaagctaccctggtgttcctgttggttatatgattccacaggtgccatatagtaatgctgtgaactatggacctaataatggttacggaggaaggtatcaaaataacaagccaactacacctatgagatcacctgctagtaatgaagcccaagaatctttgaccattggtatagccgatgaacacattggtgctgttgtaggtcgagcaggaaggaacataacagagatcattcaggctagtggtgctcggatcaagatatcagataggggtgactatatatctgggacatctgacaggaaagtgacgattactggaacacccgaagctatccggaccgcggagtccatgatcatgcagagggtgtcagccagttcagagaggtgatgagccccttctgaaggaagggcgtaggccattgctgtgtccgagcacagcagcgtgtttgatgcaagttaggaggatgtgggaactgctttccttttattttccccccttttttcttttttcctagcaagctcgagcagaaaaaagaaacaagctgttattgtttgttgcattgcgtccaaccgatggttttatgttagtataaactgctagtcgaagataattaggtgcagcgtttgaattgatttgggtttacggttgagttatatcccgtgtatgccataacaaaggcagtcgccgctctgttgctagtggcaagcgctgcctgtcctgtgtctgtttgtacgttgacaatttgattccgttgctcaaggatagaagaatattgatacaggagacccgaggactggtttggtttttgcagtgcttttgagtcgtgtgtgtagatctgtgctactgaggtgctatcttttacgtgatcaggaagagtatcggtggaagctttcaggtgttccattcacccatctgcgtgttgcgggtctcggcggttggcgaccgagcgtgtttgcctgcagtattgggaaacctgtctgactgagacgtctggctggatcgagctgcctggccgcggctcctatcccaggtcaagacaacgactaaacagcaaaaaccattaaatggatgtactgtgcaaaaaaaaaaaac

SEQ ID NO: 16074 - DNA, 297 bp, Zea Mays
gcgtcagatttagaatggtaagccgattcaaaatttctgttagcttaattattgaagtagttcgatgaatgtgatgtgcttattttcatgattttgaagcagtcgcatcgcggtaggattaaatatatgtgaagtgcgatggagttagtaaagcgaaagatagattaatttaggtaatattcgggcaagctgatgacgaaagaaataagcttagtattcctatcagctagttaataaaattttctagtgtcgttatgtcaatttgattaattgatatagtcaatgccctgcttaatt

SEQ ID NO: 16075 - DNA, 1003 bp, Zea Mays
tgaagattggctgactgcgcaatggctgggaagcctgtaaatcgatcttgtcttttctatctgatgtcattgatcttccaaactcatctggcgggggacagtaccgtgaagttattaacacaatcatacttcagcgtggtacaacccttactagaataatgattgctgccttaacaggggcgctaccatctggtcgtctggaggaggtttcatatgttctgctgtcacttagcagagcctttggtgaggatatgctgaactgggcaagggaaagcattaatcttataccaccacaagccttaacggatgctgaacgtttgcgattcttcaacatcatatctgatgctacttccgggtctagtcttcataacataacagatagattcggagaaatctcagatatctgtagacgaaacaaaacagtgcaagacctagttcaaagtgccttgcggcctcaggatttgaccgtcacggtggttcgacaacagatgtgataactggatgtctctgcaaggcaagtttagaaagccagtgagtcagtgttgattgaagactcacgtcatcttgggaattttttcttagttcatacaggtttgagttgcggcggcatacagttcagatttgttcagagcatagataggccagttagcattgtaattctttcgtgtttcccctttgtacatgtgccacaaattgtgtatttggggagggagataagttgtgttgtattatctcaaaaaacagtgttatacttggtataactggcagatcatgaggtatggtgatctaccgtgggcctgattttgcgttggccgttcagcttctttttgtaaagtagggtggccatcgattttattatgtaagcttataccggttgttaaagaaaattctagtctgtgttcccttatggtcaccaaatgtaatggccctaaaggtaattcaagtttgatgattagaacttgtgcaattttaagctcaccttgaatcgtgggcagaagtttgc

SEQ ID NO: 16076 - DNA, 3265 bp, Zea Mays
cttagtaggtgtctactttcttggccctagaacctcggatcaattatgttaggacaattttcttgctagtttctcatgcttacttgcaggatggaagttctggtgaggtttacaatgtttctatggagcgtgaggaaagacgtctaactgagcttggtcagaagatactagagacatttgtgctatctcatatatttagtggaattgaagttgcgtaccaagaagctgttgcattgaaaaggcaagaggagcttattcgtgaggaggaggaggaggctgggcttcttgaacatcagatgaaggggaagcgtggtggtggtgtaaatgaaaaggacaagcgtgccaagaaaaagcagaccaagcaaaagaagaaccgtaaggctaaagacaaggaaagagatgagaaatgcgaggttaaaattctggaaaggcttcgtgatgaaactgccattgataatagtgatggcttaccatctcaggtggaagtgatagcaaagattgatgccttggaagaaggttcttcagatgggtcagacatgtcaaatagagggaaaaatcagcgtaacaagggcttaagcattattagctttgccgaggaaggtgatggtcttccctccacctctaatgtcactggtggtttaggccgcaatagttctggctgctgcacagctccaaaactggatcaggatactgttctacttaccttgagagatagacttcgtaagttggggcagcgtctgcatgagaaaaacattgaggggcagaaacttctcaaaaaacattttgaagctagggacgcaaaagcgaaggaagaaccttctgactcatctaattctttggataagccacctgatgttccagagatcccggtgcattcatcagaagataccgttgatcttaaagtgaatggaacaccaaagaaggatgcatctgtggtcaaccctgttctggaggattctgtttcaggcataccagtcactgcaaacaatgaacctgtgccttctcccaccacaacaaaaatggacccagtttcaaacaaagttaatggatcaagtttgaaaatgaaagtcaccatggcatctccttgctccaaatcacatccagctgatatggataaagatgcctctcttccttctaaatcaccacgaaccaatagagctgctccagttcctcctaagctgccttcagctgataaagcaacgctagttccctcaaagctaccttcggttgataaagctactccagttcctcaaaaatctccgttggtaaacaaagtagctcaggcccgtcccaaatctccagcagttgacaaagcaactccacatcgtcccaaatctccagcagttgacaaagcaactccagttcgttctcaatctccagcagttgacaaagccactctagttcgccctcaatctccagcagttgacaaagcaactccagttcgtcctcaatccgcagcagttgacaaagcaactccagttcgcccaaaatctccagccattgataaagcaactccaattgctcccaaatctccaccagttgataaagcctctccagctctgccaaaatcattatcaggtgctaaagatgcgctttttccttctaggtcgctgcagattgataagtttactccagccgccccaaggttatcacaagatgataaggctgctctgccttcttcagaacagtcacatatatctccagctactagttctgaagctcaaggggcaactactaggaaggtcacaactaccacctcactttcagaggctgctgcagcatggaggccttcaagtgctcctgtgttacccacaccaagatcaaccgggccagctgcttcacatattcaaacttccacattgctttcccgctcgatgagtgaagcagctgggagaaggccagtaaatgatccttcattttctgccccatcttatactccacagacctaccggaatgcaataattggtaagtctggtctgtctatgacctccgcaagccttgcgtatcagccgtcttctctggatcaagacactgctccttcacggcctctatcagcatatgcatcaagtacagtcatgatgcctcctgcaggaagatctgatcagtcatcagctaggcatggattcaagtctgggcctggtaagttagaagcacatgacggctggcagcagtggaaaggtgacagtaatgttgatatgcatctctggagggaccacgctccttaccaacaaatgaccaacagtcaagcatatgagcagtctcggagggacgatacttatcagcaagcatgcagcagaggaacagaaaagttcagcaggcatgcaggactgcaagctaggcagcagttccaaaccgagacacccgccagtcatgtatggcatcaaccgcaggggccagtggcagaagaatttccacaccttgacatcataaacgacttgcttgaggaggaccagatcaacggcagtataccggagtcgtttcgtcaagactacaacgtgtttggcctgccgttttcaccgagaggaaacttgtcagacatggaaatggcttctgttagaagtcccgctcggttcaattcacccaagtacgatggtggattgtcgggggcttatgacatgaatgctgtcaatgggttgagggaacggcagtttccctcgttggatatctactctaatggcctgtctgacgtgagtgcttctaagccttggctgaatggctctgccagtccatcggtgagccttggggtcaacacaaatggataccacccccaggtgggtgagtacctgggaggtggggtgaacggggtctccttgtggcgccgccatgccaacggccgctggtaatgcgaggtgcctgtatacaatcatacagtcggaataatgttttgttgtaacagatggtttcgggcctgagctgatgcgccatgtaattaaaagtttttaagttttaaaagggaaagaaagagatacaccctgtaaagtctgcgcctttattaggataatttgagtgcttttctggttgaagttgaactctgacctaactttgttaaatttcaaagctaaatttggcggtggcctgtgggagagagaagaacggtatgaaggttagcctgtccgacgagtgctgacggagcaacctacctaatcgcctacactttgtgcttctgctaaacatgttagtaccctgtccaaaaaatatgtacttactagtttgcaaaagaatgacgttttggaagatctgagtcgactgagtgaaggatcgaaat

SEQ ID NO: 16077 - DNA, 1631 bp, Zea Mays
gcccgccgatcctcctacccgcggcggcgctccgacgggtccttgagatgccgggtgcgcaccaggcgcccgcctgctacgacgcgctgagcgcacgcctcgtcgagcgcgccgagttcagggcctgcttcacgagcggtttctcaatctctgccgcacggcttggattaccagatgttggtctcatctcgtacggggaaatgatcgatcaggggcgtctgatgactgaagcagtttcaatccctgtgatcggtgatgcggataatggttacggaaactgtatgaatgttaagaggacagtgaaaggatttattaatgctggttttgctggaattattcttgaagatcaggcatgtggacacacacaaggaaggaaggttgtctcaagggaggaagcaattatgcacataaaagctgctgttgatgccaggaatgagagtggctctgatattgttattgtggcaaggacagattctcgtcaagctgtgtctcttaatgaagcattatggagagtacgggcctttgctgatgctggagcagatgttctattcattgatgccctcgcctcaagggaagaaatgaaggcattttgcgctatcgcgcctggagttccaaaaatggccaacatgttagaaggtggtggtaaaactcctatactgagccctgttgaactggaagaaataggttataaaatcatagcctatccattatctctaattggtgtatcgatgcgtgcaatggaggatgctcttattgctataaggggtggtcgcatacctcctccaagcagcttgccaacatttgaggagatcaagaatactcttggcttcaaccactattacgaagaagacaaacgatatgcggtgacaccagcccaaccattgtacgggactggctatgataattatacaagtgaaccgaacagtccgggagattccaggtccagggctaaaaaaacacaagaacctgttattgacatattgcctcagctctatgatattggttccagtgacagcagaggaccttcaactggaatgtggtctcgaactcttcgactaaagattacaggaagagatgggatccagaaaatcgatgccaggatacctgctgggttcttagaagggatgacaagaattattccaggcttggctggagctaatattatggaaaggcttcggaatgctcctgttgatacagacaacccccagaatggtcaaatactgcttgattttgaggacgccatgggagataggatccaggtgtttattgcatgagctgacggtgtctttgctagaatgctcgtgcacagcaaactctggaagcatggtcgtttcaagtagcatcagggtacatgcatcttgctattggcgcaaccctatctagtagttgaattagataatttggacatcgattatatcttggcgaactagtatttacaaataacagacttgttcctattcatcgaggctgggtgtacatcgttgggattccattaaaacacagctggggactgcgggataagtttttctccgtagcgttgtttctgtgttgaaaaaaaaccctgaagttgaatagaaataaagaagtaaactcttgttgagttatgaaatactgttgaatatatatccaga

SEQ ID NO: 16078 - DNA, 994 bp, Zea Mays
gggcagtgggctgctggagttatatccgccctcaaagggagtcaagcctcctccagcctttcctttcaaatcggatttgtttgctcaagttgcaagatggataagaggaccaaggttgcagtttgtgttgctgctgcacataacttactgtcaatgatggccgtgattattgcgtctagaaaaagaaaacgaaatgcaaggagcgcacagattacctatgcaccattgcatgatgacaaaagcgatgctgattgtttaaacaagccttttgaacactttgatgagatgcaaacaatatttggaaataccatggccacatgtaagtttgcaaaggattccagtgcaggtctaggtgaagatgatgaaactgaaaatgaagaggtgacggcacgtgctttcactaaaaggcagttcgcttgtgatgataatgtcgcaacatcttctgcaagcaagagcaacaagaaggcaaaaaaacgtgacagtgaagaggagttgattgctgcattcaaaagtgtcgcggataagctatccaatgctattgagaaggttgccacatgggacactgatgtaccagatgatctttttgacaatttgctaaaccttccaggttttgagcagacccacatatctctgtatttcaattatttggtggcgcaccctcacattgctagagccttcaacaagttgccgttcgaccacaagttaatttgggctcgcaatttcgccagtgagaagttctctagagtgtgagggtaattagtaggtagatttgggcggctcttttgcttgaaccacatcgaacaatgaattgtgggctaagtacgtgtggattttgtagaagccttgaacttgatattatgtgcaaggctaggacacattattatgtgtgctgtgtggagttaataatatgtgttttgtggacttaatattagttgtaacatatcctgagatgggggcaatggctataagctttttggttgaattccagtttttt

SEQ ID NO: 16079 - DNA, 829 bp, Zea Mays
cccttttccgcttgcggggaacactccgctcgtttggtagcgcgtgatgcgaggttgagcggtgccgtttgtttcacggtcaggctgggcgcaaggagaccgcactcgacctggcgaagttcgtcgacaagggcgtccaggtgaagctcaccggcggccgccaagtgacaggaactttaaagggatatgaccagctactcaacctagtgctagatgaagcagttgaatatgaaagagagcaagatgacccattgaagctatcagggaaaaccagacagcttggcctcattgtgtgcagaggcacggcagtcatgctggtctcaccgactgatggaactgatgagatcgccaacccttttcttgcggaaggagcataagcttgcagttggtcgattatttagaaccgtgctctcatgtcaccctcagaacgatgtgtcccagtgggaaaaagaactctattctcgtaccgaagcatatctacagagaggagtcaccaagcccattggacttccgatacgcagctttttctaatagaatgggaaacgaattgtactgtaattgtttgtgtactttactttggctcaatcgtccgaccgtatctttgtaatcagtgagaatggcaagcaaatgtccttgacatctattgttattgtaaaaacatgtgttataacgctgattctcagattacatttgattattcgagctgacaatttcttcaggttttatacagcagaatgtaatgcgcaatattattgtcggatcactcaaattacggagaactccagtgccgagatttctgagtatcaatgctaattatttcaaaaacaaa

SEQ ID NO: 16080 - DNA, 763 bp, Zea Mays
agtgatcgggttgcagttgggcgtgcacttgaccttccggtatattttggggatgctggaagcagagaggtactgcacaaagttggagctgaaagagcttgtgctgctgcaattactttggatacccctggtgcaaactatagagctgtctgggcattgaacaaatatttcccaaatgtgaagacatttgttagagcacatgatgttgatcatggtgttaatttggagaaagctggtgcaacagcgttgtgtgctacgtcaggaaattctcttggctatgggttttccagagttatgtccaaatcgaagtctatcagctccgatgatgaaagcgaaacagtggatggcgcactagcaatttgaagacgattagataaaatgggatcccttgatagtactagatcgattgcactgttagtagataagcttgttgcatgtagaaaaatggaataaaaattaatgcaagagctgtcacaaaaatcggcgtgcaattttgtatgttagagtacttatatatttcttctctcccccaaaaaaattgtttgcatacaactcttcacaaagaaaaataatacactctagcagtgcacgtgaaaatgagacccttgtaagcagggaagaaaatagatgtcagaatgctgaatacttcccatgcttgctcaaaggagcatatggtacagtcaggccagttggacggttgggacctggctttgggtatgtttagtacaatttttgggtgtgtttgggacagttttttaaagag

SEQ ID NO: 16081 - DNA, 1805 bp, Zea Mays
cttggtttcaccctcgtgcatagtgcaattgacgcgtaccctacctagggctgggaagtcacagtaattaaacaagaggaaacaactgagggtcccttggaaatgcaaatagctcttccatcgatgccttcattgtacatcatatcctttctttatcaagcatgtttggagattcataaggttggagggcacatcctggacaggattattttgcataattttgcttgggagctactgcagaaggtcatcaatatttatgaaaattttctttcatctgttgaatctgggaattctccggtttcagagaaaggaattctgcaaatactgctagacttgcgttttattggtgatgtcctatcaggaggtacaagttcttccacaaacactactgaaatgcagacaaaacaggattctttgccaagcaccatctccaagacttccttcaggagaaaacagtcacaattacatgcagactcagctgtcatagagcctataaacaagttagtcaacaggctctcgcaaatactggatcctatagactgggccacgtatgaaccttacctgtgggagaatgagaagcaatcttacaagcgtcatgttgttctttttggttttttggtccaactgaatcacatgtacactggtactatgcaaaaattaccaacaaaatcaaatacagattcaaatatcatgagatgctctcaggttccaagattcaagtacctaccaatcagtgctccagctatatcatcaagatcacacaaaccatcactacagtctctgtctagcgagtccacatctaaaaatccttggaaatcctattcaaatggagatagatctactacaccagagtttgatgataatgcaagtcttgttggtgctgctccattgcttaagtcatttgttactcaggtggggaccaaatttggggagaacacatcgagatggggttccatgctctctgatggacaggttggtaagctaagtgacatccttcctggaccagcagctgggtttttctcttctttcacatctggagctcgatatgattcatagtaatgcaacggtgaccattgatctttagcccttactacacgtgacacggaaacccacatgtgtcatcaaaggaagaaaaagaactgttggtcctttggaaatctattgctcactgaatgatgccacatcgctggtcccgtgttgcttggcatatctgccgtgcctattcacatcttattgtgcctagactttcatggggaagctgaggaaattataatggaaaagatgagatttattctatatcggttgcccaaggttgaatgagtggttaggaaaaatcagatttgggttcagtatgtttcttgcttgcatttgacttggtacataggacagaacaagtgcaacgatgccgctgatactagctcactttggggactcctgttgtggatacgcggcacttgaagttgtgaaaagagttttggggggtccattctttcttccttgtctttggctcggttagttggcttttttttttacatcggatcagtggtggaactgcgaggttgtggttttatcatgtaggcaaatttgccaaatgtgtacatcggaaatatgggaataaaagcctctatcaatcagcattcagcatcatgcagcgctcaagggcctgtttggttggcatgctgattgccaatttgccatagtctttctgtatttgtctacatgtctgtctgggttgaagttgttacaataggtacagttgctgattttatacgtggctaagagcatctccaaccgtcttttctaaa

SEQ ID NO: 16082 - DNA, 1496 bp, Zea Mays
acgagggggcccacgcctgaatgccaggcctggccgcgacgtgtcgcgcctcgccctccccgactccactccactccactccactcgcccgcgcccgccgcccgcgtgctcctccctcgcgccccgccccgccccgcccctatctatatccattcccgctcgtccccctcaacaaccctcctcaccgcgcactcgtgttcgtgtcatcccgcccgcaggccgcagtccatggccaccgccagcctcgcgctctcgctgcgcctcgcgccgtcctcgcgcccgctgagcctccgccgccggggggccgccggcgtcacctgccgcgccaccaccgccacgttccaccagctcgacgccgtcggggaggtacagcgtggtcggggcgcagccttctatggaggtcgtggccaaggctaaccatgtgacggtcatggaccatgagatgaagtcgaggagggagcacttcgtgcctgatcccatgaggatccccaggacaatcatggagcagtggaacccgcagattgctgacagcctccctgatgcattttgtggaggatgggttggattcttctcatatgatacagtgcgttatgttgaaacaaagaagcttcctttcagtaaggcaccacatgacgataggaaccttcctgacattcatttaggcctctatagtgacgtcattgtgtttgatcatgttgaaaagaaaacacatgttattcattgggtgaggacagactgctatcgttctgttgatgaagcatatgaagatggaagaaatcggcttgaagctttgttatcaagattacattgcctcaatgtcccaacactttcttctggttctataaaactcaatgttgaaaactttggcccagtaatgcaaaaatcaacgatgtcaagcgaagaatataaaaatatcgttgtccaagctaaagaacacatcttggccggtgacattttccaagttgttttaagccagcgttttgagagacggacattcgccgacccctttgaaatctatcgtgcattgcgcatcgtaaatcctagtccatatatggcctatctacaggcacgaggttgtattctcgtggcatcgagtcctgaaaattcttacccgggtacaaaagaggacaataatcaatcgtccgcttgctggaaccataagaagaggcaaaacaaaagcagaagacaaaactttagaacaattgcttttgagtgatgaaaagcagtgtgctgaacatattatgctagtagatcttggccgaaatgatgttgggaaggtgtccaaaccaggttcagtaaaggtagagaaattgatgaatatcgaacgatattctcatgtcatgcacatcagctcaacagtaactggagagctacgcgatgatcttacgtgttgggatgcgctacgagccgcattgccagttggaaccgttagtggcgctccaaaggtgagagcaatggagttgattgatcagctagaagtgagtaatgcgtgggcc

SEQ ID NO: 16083 - DNA, 2236 bp, Zea Mays
gttccaaccgttaggcccaggtttcaaccgttaggcccaggtaggcaccccctcaaccgtaaaccctaatcgtatccagccacggagccaccattccccttcaacaacaggtagccaccccctcgcccaccacatcttcaccgcaatccacgattgagtcggacgcactctgccatgacgaaacgggagaggaaggatccaggtcgcatgacaagcttgggatccctgaccaagcagccgaatctatcatgggttccgcccgggtatagaggattctgcaaagcaaagaagtgcaattggaggatccatgcatcacaattgcctgatggtaaaacttggcaggtaaagaagatgtcaaagaggcactactgcaggagcagaagcaagatggagaagaattgcatggccaatcagtattgggttagagacaaggtagtgccgatgcttagggaaaatcctaacctaggtgctggagctctggtgaaaaagctacaagagaaatatctcatccaggtttcatattgtgttgcatggaaaggaaaggagctagcacttgatgagctgatgggcaaatgggaagacagctttgaccatatctatgctttcaaggctgcaatagagaaggagtctcctggtagtgtagtggagatacaaacagagaaggttggggaaaagatcagattctgcaaaatgtttgttgcattcaaggcttgtattgatggttttttgcaagggtgcaggccctatttaggcattgactcaactgtgctcacaggtaggtggaaaggccaacttgcttctgcagttgcaatagatggccacaattggatgtttcctgtggcacttgggctgtttgaatctgaaagtaaggatagttggaaatggttcatggagaagttgcagacagctataggatcaccccatggtctagtaatatccacagatgcaggaaaaggcatagacagtgcattaaccaatgccttcaacaatggtgttgagcaccgagaatgtgtgagacatctatttaagaattttcagaaaaggtttcatggtgaagtgtttgaaagaaacctttggccagcagcaagagcatataggaggacagtccatgataagcactataatatcatgaaaatagcatcacctgcagccattaagtggttggaagacactcacaaacatttgtgggccagatgttatttttctacagcaagcaagtgtgactatgtaaccaataatattgctgaaacgtttaactgttggattaaagatgagaagtctttaccaccagtggagctaattgatagaatcaggcaaaagattttggagaagttttttgtgaggaagaaccttgcagataagttgactggcacaattttaccatctgtcatgaaacaacttcatgatgctggcagaggtttggttggttatgtggttcacaagggtcctgatcatacagctgaagtgtctggtgttcataaggatttgactccatggagacacactattgatctggtaaatagggagtgcagctgcaagaaatggcagctaactggtttgccttgcactcatgcattgagcgttataggttgtttcaggaacctgaaattggaagattatgttgactcctactactctgtggaaaaattcaagactgcttatgttgggaagatacctactttgacagataagactgagtgggagcaaccagaggtaggttacaaggtatggcctcccatactaaagagagctgctggtagccaaggacaagaaggttcattggagtagaatgagggtcggggaaaaagaggcacaaatgcaagagatgtggtcagtttggtcaccaaatgaggacatgtaatgaaccagtatatgactcagatgcaccaccaccaactgctccaaagcctaagagggtgagacagaagaaaaagaaggtggtggtggtagaagatgatcctctgtcattgcctgcaccatcaagtccagtgtagaagaaaaagaaccagaggggaaccaagagcaagtagtgttacttatgttactcattatactacgttctgtaatgtgccatgaagtggtactatgttctgttagtcatgtttcttatgtaagacatgtgcaatttgttttctgttgaacatgtgtaatgtgtcctctgttggacatgtgcaatatgtcattgaactacgttctataatatctaagtttcatggagtttcatctacttcgatca

SEQ ID NO: 16084 - DNA, 585 bp, Zea Mays
acaggagtttttgttgaggagaagtcattcacatatctgtatcaggaaggagatactgtgactcttatggagcctgaaacgtttgagcaacttgaagtttcgaaggaactgtttggcaaagctgctgcatacctaaaagatgaaatgaaagtgaatctacaatactttgatggccggccaatgtctgggacagttcctcaacgagtgacttgcactgttgttgaagcacaaccaaatacaaaagggctaactgctcaaccacagcaccaccttttattgaagcgggtgagaatattgtaatcagtacagccgatgattcttatatgacgagagcgtaaggggtatcgtggatgacgttttgttctaccaaatggggatcgattacaatgtggctaccagaataattttatttacactcagttgtggagttgccgtaaacagtgagccttggcggacaccaaccaagaacttttagttcttcgctaataacccacacattttgtactcacatgtcttttcgttttgttcctcacttcaaatatttatgcaacagaatccattcatggcaaaccgtggaatcttttt

SEQ ID NO: 16085 - DNA, 1278 bp, Zea Mays
gtcacgccgccagggaaagatggctcgtcaaagaaagttaggtatccagaccgtattaccttaatacgaggaaaccatgagagcagacagatcacacaggtttatggattctatgatgagtgccttcgcaaatatggctcagtcaatgtctggagatattgcactgatatattcgactatttaagtttgtctgcacttattgagaacaaaatatttagtgtccatggaggcctttctcctgctatcacgacactggatcagataagagtaatagaccgcaagcaagaagtacctcatgatggggctatgtgtgaccttctatggtctgatccagaggacactgtagatggttggggactaagtcctcggggtgcaggattcctctttggtggaaatgtggtctcatcatttaaccattcaaacaacatagattacatttgtcgtgcacatcaacttgtcatggaagggtataaatggatgttcaatagcaagattgtaactgtatggtctgctcctaattactgctacaggtgtggcaatattgctgcaatcctagagctggatgagaacctgaataagcagttccgcgtatttgaagctgctccacatgaatcaagaggtgttcctgctaagaggccagcaccagattactttctgtgatgctacacagcgaacgcttgagcttactgtgctttcaagcgctggacctcatgttgcaagaagagctcaggccctacagctttccagccaggaggtggttttcaggatgtgtaaattgagtgtcatcttctcccttcaggtccatgatttgtaagagagttggattttggcatccagttttttcacagaacatcacccatttgagctggagaaatacgcccttgcgaaggggtttcatgtgatgtgctaaaagtacacgttgtaagatttttttgcgattgcataccccctagaaaaaccgttcctggaatatgtggcaatcaggaaatgtgtcgatgctctggaaagtgtaggagatttttgtagtagtcatttgcgcgtgctgttagggactagggagcatgtggtcaggggacactagcactagcttgtcggcatgcaatggtgtattgtaactgtctttatgcagcatctctaattcaaatagctaactacatttgatgtcttcttctgagctgtcgtgttcatataaattcgttttattggatataaaatatatgatttaataatgacacttagatgttcacaaaatccatcgtcgtatgctcttctgtgtag

SEQ ID NO: 16086 - DNA, 1717 bp, Zea Mays
agaccttttccgttcctgctgtgcgaaaccgagcacccagatcctagcttaagagagatggctggtggttttcgagtactgcatcttgtgaggccatttctggctttcttgccagaagtacagagtgctgataggaaaataccattcagagagaaagtgatctacacggtcatttctctcttcatttttctgtgggatcaaagattattgaagttgacaacagtgtgagggaggatcgtgctctgctaaatggtgcgcagaagttgcttggtatccttattgccattggagaagccgtggcgtatgttctctctggaatgtatggcagtgtgagccaacttggaactgggaatgctatcctcattatacttcagcttttctttgctggtatcattgtcatctgtctagatgaactcctacagaaaggctatggtttgggatctggtatctctctgttcattgctacgaatatctgtgagaatatcatctggaaggcgtttagcccaacaaccatcaacagtgggcgtggtgctgaatttgaaggggcagtcattgcattgttccatctattgattactcgcacagataaagtccgtgctctacgcgaggctttctaccgtcagaatcttccaaatgtgaccaatttacttgctactgtattggtcttcctcatagttatctatttccaaggtttccgtgttgtacttccagtgaggtcaaagaatgcccgtggtcaacaaggctcatacccaatcaagttgttctatacttccaacatgcctatcattctgcactctgcactaattaccaacctctatttcatatcccagcttctctacaggaaatacagtggaaatttccttgttaaccttcttgggaaatggaaggaatctgagtactctggccattctgttccggttggtggtcttgcttactatgtgactgcgccatcaagcttggctgatgttctggcaaatccagtccatgcattgttctatgtggtctttatgctgtcagcctgtgctctcttctcaaagacatggattgaagtttctggttcatcagcgaaggacgttgctaagcagctgaaggagcaacaaatggtgatgccaggccatcgtgagtcaaacctgcaaagggaactgaacagatacatcccaactgctgcagcatttggaggagtgtgcattggcgcgctaactgtcctagctgatttcatgggcgcaattggctcaggaactggcattctgctcgctgtcactatcatataccagtactttgagacattcgagaaggaaagggcaaccgagcttggtttctttggtttctaatcttcgtcgctggggtaaaagactgaatcttcctgcaagtgacagtaaatgcttggccggctgtttatgtttgtaattggagagcttatagtcagtttaggttgcgggctaatttacactgggaaatttgtagcaggttctgcatgcgtttttggggccaggatgggcattaagttgtgctcaattataaccacggtcatcatctcttgggattttccgttctcctgtattgactatagaattttggatcaattttgccgtcttgaactgaatacttattcattactatccacgtgattggttgcccaaccaaatatgcgaggctccagacgcaccgcatgccattgaccagacgaagcatgtgattgattggctggatggtagca

SEQ ID NO: 16087 - DNA, 957 bp, Zea Mays
ttttcttctgtccgaggattgaaggaagcaaacttccaactagatagcttgattgcggagccgcagcgagaaagcatttataggaaaactgttgaagagctcttttcttcaggatattgcaaaggttaggttggagaactcccttgtccaggctattgcgttgcttcggcagaagaagagagatgatgtgctttcatctctgaatgacatgctcgcatgtgatgctgcggtccctgcatcacgacccttgtcatggcccacaccaggagagctagatgatctatttgccatctacctgaagagcattcctaagcctgagaagctatcaaggttgcagtacctgctcggcattagcaacgagaaggctaacgagatgcagtacgcagcctcggagggatcgctgccggttgcagctgaagagaaagaggagttggcgttctaggaagggagacagttttgttagggtagccaccggagttgaggtcccttgccaaggaacgaacgaacttggtgcctgtggcggacagctgctattgtagctaggcgcatacatgtttttggaaaaggaaatcgacgtgtaacactgacatatttattgcatgtctatctgtatagacaagtcaataacaccgacgctgttaggctgttgcattccaccaggccacactggaagcgttttgttttctggttcattgtttctcttttggtttaagaatgtattacagctatgactgccacccttgcttataacctggatttgttgttaacctacctggagtgcttaagggcccgttcggttctacccggattgtttgtgtaacttataagttttgatcgctggaacgttccgggatggaatccggaagaaacgaacacggctaaggggcagtttggagccttctgttgcttaccatcagcaacctctttgcaaaatgtgaaatctctctgttttactcc

SEQ ID NO: 16088 - DNA, 853 bp, Zea Mays
ccgtcctcggacgccgagatgtggtcacgctttccttgcattgaagctagaggattcatctttgggccagccattgcgctagccataggagcaaagttcataccactacgtaaacctaagaagcttccaggtgaggtattttctgaaagttatgtacttgagtatgggatggattgtttggagatgcatgttggagctattgaacccggggagcgcgtagtggttgtcgatgatttggttgcaactggtggaactctttctgctgcaataagacttctcgagcgcgcaggagctaacgtggttgagtgtgcatgcctcattgggcttcccaagtttaaggatttctataagctcaacgggaaaccggtttacatcctggtggagtcccgcaaataggacgcagtaaaatggtcagacaaaaaaagctttctagcttcccgtccaaagaagctcacagcttcactcatttgcacgcgcaagcaaggtggtatgggggcaccgagaaactccgcagtaatctgtgttgaggccacggccagatgatgctatgtactcctatcttcatggagagggtgatggactgggtgaaacgtagtcactgtacttttgtagcacgtcatgtctagtgtttcttagtagccatggctgaagagagtttgtagcttattcccggcttcctgcagccaggaacatcagtgttagccagagaagctaggaaaaaggatcttatgttgctgctcagttttctaccagaatcgtcttcctttttttcccctttgcagaatcaactctttggtaaactttactaagctcgttttgcctaaacggccgttcaatcatgaagaaagagcaa

SEQ ID NO: 16089 - DNA, 1400 bp, Zea Mays
gccggggacggacggttggtgcaactggaaagcgagaaatcgaacccacacgcaacgcgacgcctccacccgctcgcctagtccagaatccagatccagcgcccgcatctctctctctcgcgcgcgcgcgcgagcgcgatgagctgccgcgacgggcgatcgtgctagcggtaacagcgagcggtgcgcgagggcggagtgggagtgtggatccgaggggcggcaaatctggcaggcgccgcggtggggctgcgggcgcgggggagggcggggggctgggcggacggcggggagggaggggaggactgcggtaggctcaggccctggcgcaggaggctgctcgcgtccatggcgctctcgtggtcctcggccctccgcctcgccgtcgccgccgtcctgctcgtcgccgtcgtcgtcgcgctcttcactctccccatcgagaagattttgaaggactttctggtttggatcaaggagaatttgggtccatggggtcctttggtgttggccctcgcttacatccctctgacagtcttagctgttccagcatcaattcttacacttggagggggctatctatttggcttgccagtggggtttgttgctgattccattggagcagcaattggtgcgactgctgcatttctgcttggcaggacgattgggaggtcttatgttctctccaaatgcaaagattaccctaagtttcaagcagtagctattgccatccaaagatctggcttcaagatcgtgttgctactaaggcttgtacctttacttccgttcaacatgttgaactacctgttatctgtcactcctgttggtgttggagaatacatgctggcttcttggttgggaatgatgccaatcactcttgctctggtgtacgttggaacaacactaaaagatctatcagatgtgacacatgggtggagtgagatctcgactactcgacggattctgataatatctggttttgtattatctgtggtcttgattatctgcgtcacaaaaattgcaaaatcatctctggagaaggcattggctgagaatggagagctccatgtaggaacatcgcagcttccaggtgtaacctctcccttggatctgcaacaacctcttgtaatcaagattgacacatcaaatgaagaccacgagaagtaaaagtgttgtgtttacaatctcagatgtaaattctttggttgttgagtcggtagactgtatatacacccatactctggtgaggcccgtaaatgggtaaaaaagacatcatccccccttccaaaaaagggaatgaagtttagtttactgataggttatagtaatacgatatgcgctttgtttcactccacgtgctaccttatctttggtgaaaatactcgcacttaactgggttgaga

SEQ ID NO: 16090 - DNA, 1268 bp, Zea Mays
ctttaaaacgcacaactccataaaccctagcggacaaagccacttgctcacaccagaaccctctccgcaatctccccgcctcgctcccgcctccacccaatggcgtctctccctaacggtggcggcgccgccgcctctggctcatgcggcgcgcgccctgtggacaaggaggtggacttcgccaactacttctgcacgtacgcctacctttaccaccagaaggagatgctctgcgaccgcgtccgcatggacgcgtaccactccgccgtcttccgcaacgcgccccacttccagggcaaggtggtccttgacgtgggcaccgggagcggcatccttgctatctggagcgcgcaggccggggccaggaaggtgtacgccgtcgaggcgactaacatggcggagcacgcgcgcgagcttgctcgcgccaacggcgtcacggatatcgttgaggtgatacagggcaccgtggaagacgttgaccttccggagaaagttgatgtcattatatcagagtggatgggctactttcttttgagagagtccatgtttgattccgtcatttgcgcacgtgaccgctggttgaagccagatggtgtgatgtatcctagccatgctcggatgtggctagcacccataagaactggtttgggtgacaagaagagggaagattttgatattgctatggatgactggagcctgtttgttcaggacactcaaacttattatggtgtcaacatgaatgctttgacaaaggcatatcgtgcagaacatgaaaaatactatttgaagtcttcaatatggaacaatcttcatccaaaccaagttatcggtcaacctgcagctatcaaggaaattgattgcttgacagccactgtcgatgagatccgagaagtcagagcacaagtcacattgccaatcagaatggaagctagattatcagcactggctggatggtttgatgttcattttcgaggtagtgctcaaaaccctggggtggaggaagttgaattaactacagcgccagatgagcatggtggaactcattggggtcagcaggtattcttgctgactccacctctgagtgtgactaaaggagacaacgttaacgtttccttctcgatggttcgctcgaaggaaaatcatcggcttatggatatggagttcacatatgaattgcacgagttatctggcaggaagcacccagcagtcaaaaccaagatgtacttagagtagaacaaggttcgccagcataatgatctgtgacacag

SEQ ID NO: 16091 - DNA, 75 bp, Zea Mays
cggagacccagggcggggaccaagccacccgaaagccttgtgttgtgccatgggcaccatcgagcagagcagagc

SEQ ID NO: 16092 - DNA, 1365 bp, Zea Mays
cggaagcgagtgctgctggagagaatctgatatttgccatcaccacaaaacacgatttcgacgtcgaaacgagctgacaggactggtgattcggaccagatccaaccagtgcacgtagcagattttcccagagttgttcggaatgcccaagccagcctgaagaatttctctggcaagaacatgcttgctggtggcattgataaagaaacatcccttgcgtggatgatatgcggaaatgagctttttatatggaactacttagtttctgttgcaaaagactgtattgtacttgacattccatcttctctcatcggatacaatgatgtgaaacccctcctcagtattcagtggacagtttgtataatgagatggcacaatagtggtgcatcaacaaggaacagtggagagatgttacatagaaaaagttcaactggcgtgattctctgcaacaaaagaacacaagctgttgcttattggcctgatatcagtgctgaatctagtaggagcccagttcttagttcatcagaccatggtgaggtgtccacatgtggtgctgcatctgattttctgaggtttaattcgcttattgcggctgcagttccaggatgtattcacgagtgcattgcaatagcttctgagcctgcaggtgctttgtggctgttccagtgttcaccggaaggaattcgtcaaagaaaagttcatgcagatacattaggagatggtgggtctgatctttatcagaaatgtgatggtggaaggtccttggtttggttaccaagtaatgtctcatctgagggttctgaccggaagttctttttattgacaaataatgaggtgcaatgttggagcatctcactcttgcatgacatcaatgtaaaaaagttagggtctcacgaaattgttggtactgacggagatgtgggcattaagaaagatatagctggacagaaaaacatatggcttttggacatgcagatagatgagcatgggaaggaatttagcattcttgttgctacattatgcaaagatagggttagtgggtcaaactacactcaatattctcttctaacaatgatgtacaaacctaaccagaagttttcatctgaagataatgtagctaaagttgaaaggtttttggagaaaaaagctccctctcaggtgataattcctaaggctagggtagaggatgataaattcttgttctccatgaggctaaaaactggtggtaagccctctggttctgttataatcctgtcaggtgatggaacagcaacagtggccatgtattggagaggttccacccgactttatcagtttgatctgccttgggatgctgaaaaggtcctagatgcttccattaaccca

SEQ ID NO: 16093 - DNA, 1677 bp, Zea Mays
gtgaatgcgcgtcccctttctgaaccctgcaacactgacatgttatcatagcatggctctgtctacaagcttgcttttggacccaaatcgttcgttgttgtctctgaccctatcgttgctagacacatcctccgggagaacgctttctattatgataagggagttctcgctgaaattttaaaacccataatggggaagggtcttatacccgctgaccttgatacctggaagcaaaggagaaaagttataacacctgggttccatgccttattcatagaagctatggtgaggacatttacgagatgttcagagagaacaatatcaaagcttgaggagcttactgaaagtgaaggccgtgaacaaaattcgactattgtggaccttgaagctgagttctccaatttggcacttgatatcattggattgggtgtgttcaattttgattttgactcggttactaaggaatctcctgtaataaaggcagtgtatggaacacttttcgaagctgagcaccgttccaccttctacatcccctattggaatcttcctttgacaaaatggatagttccaaggcagcgcaagttccatagtgacctcaaagtgatcaacaattgccttgataaccttataaaaaatgcaaaggagacgagacaggaagctgatgtggaaaagctccagcaaagggactactcttctctgaaggatgccagcttgctgaggttccttgttgacatgaggggagctgacgctgatgatcgccagcttcgagatgatcttatgacaatgcttattgctggacatgaaacaactgctgctgttctgacatggtctgtttttttgctagcccagagccctaccaggatgagaaaagcccaggcagaggttgattctgttctcagcaatggggcaattactgtcgaatctcttaagaaactggagtacataaaactgattattcttgaagctcttcgcttgtatcctcagccaccattgttaatcaggcgttctctccggccagacaagttgccaggcgggtgcaatggagcaaaagagggatatgaaataccagctgggaccgatatatttgtttcggtatacaacctccacagatccccgtatttctgggaccggccaaatgagtttgaacccgagaggttttccgtcccgaagaaggacgagagcatagaaggctggtctggttttgaccctgaccggagtcctggcgcaatgtaccccaacgagatcatagcggacttcgctttcctccccttcggcggagggcctcgcaagtgcgtgggggaccagttcgcgctcctggagtcgacggtggctctggccctgctgctgcggaagttcgacgtggagctgagagggtcgcccgacgaagtggagatggtgacaggcgccacgatccacacgaagaacgggctgtggtgcaggctgaggagaaggacttgacgggccaacattagctttgcagtttgcactgagtgagaagtagctctcgtgcttgactcctgtgatgtgctttaggcgagctaaactgcatcgcagacagaccagtggatgggaaccgtgtacactgaaaacatatcttgtaggcttgtagcgtaacaggtgcaaccacaacaatatattatttatctatctatctaattgagcttgacattccggtgc

SEQ ID NO: 16094 - DNA, 1713 bp, Zea Mays
atcacgtgccatatggttttgtttttaccattggcatggcttgctccaacaaaatcctgacatcacaagaagtgcatgaactatggttgcaggaaaaggcggcttcagagatggattatcgtcctagtcgaatggctgttgttgcaaaacatgctgaggctttcataagagaattctttgaccagaatccattgagccatgttggcctagtgacaattaaagatggtattgcccatcgacttacagaaatcggagggagcccagagtcacagattaaggctttgatggggaagcttgagtgttctggtgattcatccctgcagaatgctctagacctcgtacatggttatttagatcaagtaccatcatatggtcacaaggaagttctgattttatactctgccctgaatacatttgatcctggtgatatcacggagacaatagcaaagtgtaagaagtcaaaaattagatgctctgttattggtcttgctgcagagatcttcatttgcaaacatctatgtgaagagactggtggatcttacacagttgcactggatgagtctcatttcaaagagttgttactggaacatgctcccccacctcctgcaatagcagaatatgctgcagctaatttgattaagatgggctttccacagaggggtgctgaggagcttatctctatttgctcttgtcacaagaagataaaatctggggctgaaggttacatatgtcctagatgcaaagttaatgtctgtgagcttccaacagaatgtcgaacttgtggtcttacgctagttagttctccacacttggcaaggtcgtatcatcatctcttcccagtaccaccgtttgatgaggtcacccctgtcccaaatagaattcaaaggggagggcagatctgtttcagctgccagcagagcctttataacccagacggccaatctaacctccatgtgcgctgcccaaaatgcaaccaacacttctgccttgattgtgatatttacatccatgagagcctgcacaattgccctggttgtgagagccaacgcagcatcgcttcatagagaccgtgttactgcgtgcattattcaggttgtaccttaagctttctcctacactgtaacagccagcaaagttgtttcatgatcagcttttttctggctagcttttctgagaatctagctgtagagagaatctggctgtgagaagaatctgtgtatcgtgggaattacgtgcggaggaagatgaagtggtccaaatagttcaggatctagaaagcgatggatttctaccatcgcgatgattcaaccgattctgtgtttatgttgattttggatggtttctaccaaaacgattcttataaaagcgggttgaaaagctggatgtttgacagtccgcagcagcttttggtggccagaagctaaaaaaaagcccaaacaaacagggtcattccggcatccttttattgatagttcctgttagattgagtacctactagctagtgttgagctattgctacccatcagaggccaatgggttgatagttttaatttgtgccgagaagagaagctgaaagtgtataacatgaccgagacttgactcttgctgtttttttttcttccctgaagcgtgacagtatatttatttgttttcatttgtttatgctaaaactttgtcataaattgagttgtggattgggtcgggggtttcatc

SEQ ID NO: 16095 - DNA, 2513 bp, Zea Mays
ccgcgctttttctctctgctgacgccgccgccgccgggagccgtaccccgggagagccccccagcccttatcaaaccctaaatcaaaaactatccaaaaaaatccgcaaaaaactagaaaaaatcccaaaaatcaccacttgattggagatggcggcgcaagggcaggcggcggctggatccgcgtccgagtctggcggctcaccggctgcctcagctgctgcagcggcggcggctgcgttcccggcgacttctctctacgtgggtgacctgcacgagagcgttcaggacgcacagctcttcgacgtcttcagccaggtcggcggcgtcgtctccgtgcgcgtctgcagagacatcaactcccgcaagtcgctcggctacgcctacgtcaactacaacaacactagcgacgctgcacgggcacttgaactgcttaacttcactcctatcaatggaaagcctatcaggatcatgtattctaaccgtgaccccagctcgcgcaaaagcggtgcaggaaatatatttattaagatcttgataagtcaatagacaacaaagctttatatgacacgttctgtgcatttgggaatatcctttcatgtaaaattgcaacagacccctcaggagaatcaaggggatatggttttgttcagtttgagatggatgaatccgctcagtctgccattgataaactcaatggtatgcttatcaatgacaagaaagtgtatgttggaccttttgttcgtaagcaggacagggaaaatgtctcgaacaatatcaaattcagtaatgtgtatgtgaagaatctgtccgatactgttactgatgatgagttgaaggagatgtttggaaaatatggaaccataacaagtgctgttgttatgcgggatagtgatggaaattctaggtgttttggatttgtcaattttgaaaatgcagatgctgctgctcaggctgttcaagagttgaatggcaagatattcaatgataaggaactgtatgttggaagagcacaaaagaagtctgaaagagagatggagttgaaggagaaatttgaaaagaatattcaagaggtagctgagaagttccaaaacactaacttgtatctgaagaacttagatgataacattgatgatgaaaagttgcgtgaaatctttgctgagtatggcaatattacttcttgcaaggttatgcgggattcttatggtgttagcagagggtctggatttgtttctttcaaatctgctgaagatgctaaccgagctcttaccgagatgaatggcaaaatggttggaagcaagcccctttatgtagctcttgcacagcgtaaagatgacagaaaggcaaagctacaggcacagttttcacaaatgcgtcctgttgcaatggcaccttcagtaggtcctcgcatgcccatgtttccacctagtgttcctggagttggtcagcagctgttttatggtcagccacctccagccttcatcaaccctcaggctggatttgctttccagcaacctatgatgcctggtatgaggcctggtggtccaatgccgaactttatgatgcctatggttcagcagggacagcaaccgcaacgtcctgctggtaggcgtgctgggtctggtggaatgcagcagcccatgccaatgggtagtcagcaacagatattccctagaggtggtcgtggctaccgctatgctactggacgtggaatgcctgatcctggcatgcataatgttggtgctgtgatgccatctccatatgagatgggagggatggcaatgagagatgctggtgtctcacaacctgttccaattggggcactagccactgcgcttgctaacgcctcaccagatcagcaaagactgatgcttggtgagaacctgtatcctcttgttgaacagctggagcgtgagcaggctgccaaggtcactggcatgcttttggagatggaccagacggaggttcttcacctgctggagtcgccagatgctctcaaggctaaggttgctgaagccatggaggttctccgctcagcccagcatctccagcagagcaatgcctccaccgagcagcagctggctaatctatcactgaatgatggcgtcctctccagctgaatgtttctgatgattcagaaattgctggcaatttttgcttgatacctatctctagaatgcaattactttgtttactttattggaattttaggtgctgctctataattagctgaactagggggtggatttaattgccttgaattggttattttggttatatgaatatgttatgtcggagctcaggtctgtcattttggtatatggttatgttagcccttgtccgtttatcacccgaattatcacagattgaattttagagcgtcattgcttttctagctgatattttgttaagcaactcgttgcctcgagatgatcgattaggctatgatttttttctagcagcgtactaatttttatcttttatttcaaaccctagtataaaatggtatataaa

SEQ ID NO: 16096 - DNA, 1327 bp, Zea Mays
gaaaatggaaaagagtgcattatgagcacggcggctctatcagagcgtgatacattcacaagctgaagagggctcggtcatccggaccggaattcgtaaaggcattagtgcattagcatcgtcaccactcgcgccgtcgtactacctcgccgactccctcgcttcgcagtgcaaggacgaagccagaatgctaccagaacggcgtgtttggccttcccagggggaagatggatgtggtggagaagatccagcgagggacgaagctgttcttgtatgattttgacctcaagctactgtatggggtgtacaaggcagatacaaggggaggattggatcttgtgcgtcacgcctttgatggcaaattccctgcacaggttaaatttagcgttttcaaggattgtcttcctattcctgagagtagtttcaagcatgccattaaggagaactacagctcaaagggcaggttcacccaagagctcaacactaaacaagttcaaagactattggcactgttcaagcctatcagcctttctaaaccagctccacaacatattgaggatattcgaaaaccaagtgattatgaagaaagaagacagttgcaacatattgaagaaagggctgcacctattaatgtccacgcacatcctcttgaagatcggtacaagatgacacggtcattacatccgccactttttgatgagcctcgacgtggtttggtgctaaatccttatcatatgcaagagcctcaacatgttcctcttaattactatcaccaagtggctactaggtctccataccatcaacctcatatggatattatgcacgaaagctgaggtaactgtaagagatcaccaagcactgccaggagagcttgctgcacggtctgaacgcgtggatgagctgtaccgttcttacaaactctctacacgcgcaatggacctcagtccgggagcatcctacctgacaacttatgagcacccgactagtgtttatggtgagggcattcagaggccagctttgacaagggttagtggcccaagtgtgcctgtgtccacccgttattcctttgctggcccaccagcatattgatcatccagatgcaagcactcaaatcggccccagccgctgtacaagttactgtaggcaatggcttcttgtacaccgttggaagccaggatagaacctgatggtagtagctttgcagtttaattattgcctttggtttcttttgcaagataaatctatgagatgtaatgtggaccttgtttgacccaagttgttttaactaaaatgcaaaacgatggatgtctttgtgttgatttgcagc

SEQ ID NO: 16097 - DNA, 3425 bp, Zea Mays
cgtttgaaatccgttgcagcgttttcatatttcgtttcagcgaaaactcgtcaaatagaaaaattggcatcaaaattttcgaaatctcacaattgggccttctccgataaggcgataaccgaaccgattccgtgaaccgcccccgaactttccatcgaccttttctcccctaaaaaaaaccgagcgattccaaatcagactgccttccggttccccatctcccctccctcagcgcagactcagccatggcttccgccgaaaccctagcccgctccccctcgcgcgagccttcctccgacccgccccgcgcaggctcttccgagccccaccacaacggcgccggtgactcgtctcgccgccgccgccgcagccgctgggagcagtctaacgacgactccgccaacaactccggcggcgagggcggggccgtgggccggaagcgcaaaacgcggtgggccgaggaggagccgcgcccagccatcgcgctgccggacttcatgaaggacttcgcggccgagatggaccccgaggtgcacgctctcaacgcgcgcctcctcgacatctcgcgcctgctgcagtcgggcctcccgctcgacgaccggcccgagggcgcgcgctctccgtcccccgagcccgtctacgacaacttcggcatccgcataaacacccgcgaataccgcgccagggagcgcctcaaccgcgagaggcaggatattatctcgcagctcatccgccgcaaccccgccttcaagcccccctccgactaccgcccacccaagctccagaagaaactctacatccccatgaaggaataccccggctacaactttatcggcctcatcattggccctcgtggcaacacgcagaagcgtatggagaaggagactggtgccaagattgtcattagggggaagggtagtgtcaaggaagggaagtttctgcagaagagggacctcaagccggatcccagtgagaacgaagatctccacgtgcttgttgaggcagagacgcaggaggcactcgatgcggctgctggtatggtggagaagctgctcaccccggtggatgaggtgctcaatgagcacaagcggcagcagctccgggagcttgccgctcttaatggaacaattagggacgacgagttttgtagaacatgtggtgaggctggtcacaggcagtatgcttgccctaacaagatgaacacgtttaagagtgatgtgcagtgcaagatctgtggggatggtgggcacccgactattgattgtccagtcaagggcacttctggtaagaagatggatgatgaataccagaacttcctggctgagcttggtggcggcagtgcacctgagtccatgaacaaatctggtggtccaatgttggctcttacaggaagtggtggtagcggtggtgcttctgctggaacggggagtaacccgccttggtcagccggtggtggtgctgctgtcattgggctcaatggtatcaagaaagactatgacgagacaaatctgtatatcggctacctgccacctacaatggatgatgatggattagtcagtctgttttcgcaatttggggatattgtcatggctaaggtgatcaaggatcgaaacaccggacagagcaaaggatatggatttgtcaagtattcagacgtgtcagaggccaatgcagcgattgctgcaatgaacggtcaccatcttgaaggtagagttattgcggttagagttgctggaaagccaccacagccggcaccagcagtgtcagcacccccatcgtatcctcctacggatcctacttcaggtggatattcctcccaatcctacatgggggtaccaccaccacctcctccagggagttacgctccagttccttggggacagccaccaccgtatgcttcatatcctccgccaccaccaggctctagcatctacaatcctgcaccccctgcacctggccatgctgccccacctccatatggggtgcagtatccaccacccccagcagctcccatccctccaccaggcactacatcaagtgatggagctcagaactacccccccggtgtaacaccaccaagttctggtacacccactcaccctgttgcaacatcagtatatgcatcatctggcgcaccaaatgcaccattgatgtaccctccaccaccttatagttattccccatactatcctcctccaccatttcagccaccacctccaccaccactggctagtgttgatccctctcagagtattgcaactgcaccttgggctacccacagtgcagtgcctccaccaccaccaccacctttgtcctccacaaccgaccagcctactgctccctatggtgccgatgcagaatatgacaagtttatggcagatatgaagtgatataagcgaagttgggtgattcttccaatgaagggcaaaaggcttgatctttcttggagcttataccaacctgatttatttcttgttggaagtttgggactcacatcttaaccttgctgtgtgctgttgtaaaccattgcagaggttgcatgcttaagaaggcatcaagtgttactggctcagctggcatcgaaatatttgcttatgtccttgaactattttaaagaaccttttactaatgcttttgttttgatatctattcttgttattatttgagattatcctgttatgtcactttaatgctctgttcttcgtgacagtgtgttaaccctcactattattcatattttgttcttcatcttgatttggtagtgctagcagtccttttgatctggaacagaaaagcttgctgcaccatgctggttggtataacaccaaaattaaaatgcatgtttggtatcttctgatgaatctgtcatgcttttctatcttatgacttcacctaagttgtttggcagttgttgtgacagcttggcacaggcaatagcacttgatgaatatcaggacatgctggcatgcagatctagtctggagtcctgtgcgcaagacacttgtcacaatgatatttgtgagatggtctgaaggtttggaggttggcttcgattatgtttttctaagtaggatatcaccataagcttattctagtcaaagaatgcgatagtcagtccacaaccagcattaggaaccttcatcatgttgcagatataccagcttcctagggttgtctcatagatttctaggtgttaactgtcctactttttgtctattttttgaagttactttcttatccagtgtgctgtgtagatgggaaaaaatatgtgatgtaatgattaagggtacaagtctttttcccttgtcatttgtttcctttctcccttgctttcttcctttctcccttaatgtaagcctagttagttttgcgatggatgttttttcatgattgtggtgtctaagtgggacgcagcctcactgttg

SEQ ID NO: 16098 - DNA, 958 bp, Zea Mays
gcttgcaggatctgtacaggagcatactgaaagatgctggaacctcatcagacaataagttcacttctattgctcttagcaacttctttgctggtgctgctgccggatgtacaaccctggtcctcatctatccgctcgacattgctcacactcgtcttgcagctgatatcgggcgtacagacacccgccagttcagaggcatccgccacttcatccagaccatctacaagaaaaacggcatcagaggcatatacaggggattaccagcatcgctccacgggatggtcgttcaccggggcctgtactttggcggcttcgacactgccaaggatgtcctggtccctttggagtcccccctgtggcagcgctgggttgcagcccaggcagtgacatccatggcagggctcatctcgtacccactggacaccgtgcgccggaggatgatgatgcagtcagggatggaggtgcagatgtacagcagcacactcgactgctggaggaagatatacaggctggaggggatccggtcattctaccgtggtgcattgtctaacatgtttaggagcactggtgcagccgccatacttgttttgtatgacgaggtcaagaagttcatggacaggggtaggttgtaacagctatagaggggtttctttcacagaattttggattcgatatgggaagtgggattaggccaaaaggtgcaaggagcagcagctcgagcattttgtaactggatgctggtttcctcctgcttactaacctgctcgatgtaaccgagcctgaaggttctgactcgcgaacaatgcagcttgttcagttcacctcatctttacctcttcgaggttccacttatgggttgtttgttgcctgcacggaggggcctgcgccatagttaaacccataatcacgtacttcattcttttttttatttgtcttgttttagtttaaaaataaa

SEQ ID NO: 16099 - DNA, 2292 bp, Zea Mays
tctcaccccgcacgtctctcttctttccctttgtctatcgcgcacgcccgcagctagctgccagctgcgcacccgccgccaccccgcgcccgccccaccgcgcgtcggctcgcgcgccgccacccagtgcggccccgccgccccaccgttaaggcaggttatgcggccgacaagggggcggcgtccgggaacccatagagtcacgtcgtgctggggaggcataggattcggatccggccgtggccgcacccggacctcgtcgaggtgatgcgggcgcaccggatcatggagtgcgtgcaggaggaacagcgccgctggtacggtgtcaaggagccgaggcaggtgctcgctgtcaccccgacctactcacgcgcgttccaggcgctccacctcatcggcctcctccactcactccgtcgaaatccttgcgcatactggcacggtagaccaactacggctcagcgaggaggacaagcagaatatgcctcttccagtccatggccctgcttgcaactcctcagggcatctgattggatggcacacgttcaactcattgcccttctctgggaagacggccacagttgttggtgaagcaacccctgttctgcctagggatttggagtgggctggttttgtgttgaactcgaggatgctgtggaaggaggctgacagcaagcctgactgggtgaaggatcttgatgctgtgggtgagaactttgaggagcgctggttaaaggcatcaaagcgcagtgccgctaagaaactgtcaaaattgtcgaggtcgcataatgagtcgttgttgtggatcaagaagatacctgatattattgctattgacgacgagatctattcaaatgatgatgatccagagagatgggacatgcagattttccgatcaattgattcgaattctgtcaagggttttccaaaagatccacgggaggccactagtaagaatcttgtttttgggaaaaatgtactgattgatatgagcgtgcatacagcatatgtgaatgtcatccgaggtgctcaacatttcatctatattgagaaccagtacttccttggctcttcatttaactgggattcacatagagatgttgagatccatggaaggaactagagatacagagattgcaatggctgcataccaaccccagcatacatgggcaaatatgctttctgctcctcgtggacagattttcgggtacaggaaaatacagtgtacgtgttgaaactgttatcctgccccaggttgggatggacggcggtacatacgtgttggtagaactgtgagaagaaaagatgggaaaatttgctttcttggctgcgatggttatctgctcaaacaagatatgcaaattgcaaaactcttaaaggatagtattagttctatttgttcatacagttctacagctagttgtttcttgctttgttcatggattgcaatactggataagatcatgatggatgtcgtgtgtgttttaatcaccatttctaaaatttattctattggtaagacgattctaagatataggtcggagttggattccttgcatatacataaacagataaagaagcaaccggtttataacaaaaatatgtcttctgttttgcctgttgcccaattctcttttagtgtagcctacttacaataattaaaagaagagttggtgtctgtttgagtagacagctaagtgcatatataagtacgtgcatgattttgattactaattgtgattttgatgatctttcttttgaagacggtctaacatataagcgcatgatttagatgaacggaattactattgtgccatttctgaagaatcttactattttctcttgccttcttagaacaacatgggaagaagtgatgatgacagtccatcgccgccaagaggtcacatgagaagaactcgcagcccaagtccttgtggtagttatggaggccatggcaagcgccccacaactaatcttatggtgacgaatcttggtccagattgtaggattccgactctcatcaagtgactcctcccctcacgatgactttgcggacagatgtctcaattatagtggtggagctacgaacaacaatccgatgtcctgatcgagagcgatggagctaatgtttgaacttgtgtgtttgaacttgtgaactaaaaatgtgaactatggatgtgaacttatgtgaatttgtgaacttatgtatttgaacttatgtgaatttgtgaacttatgtatttggacttgtgtgaatttgtgatatgaatatatatccatgtgtttgaaatc

SEQ ID NO: 16100 - DNA, 2827 bp, Zea Mays
gttcgatttgcgagcggcggagcatagtgcgaagaccgtcaacttgtactcttccggcgctcgctggcggtggaggggacgaaagtagatagcgtacggaagcatcggcattgggtcgcgcgcgtaggggatggaccgtcggagctggctgtggcggcgcaagtcgacggacaagagccccggggagaccgagacctcggcgtccgagaagattactgatgaacaggattctgccaagagctctccaaactcgactcggtcgccggagatcacgtcgaaggaactggaggacgataacgacgtgaaggtgaaggtattgagtgagaggctatcatccgtagttctggatgtccgtgcgaaggatgatctcgtgaagcagcattccaaagttgcagaggaggctgttctaggatgggagaaggccgagaaggagatctcatcgctgaaggcgcagctgagcgctgcaacggccaagaactccgcgctggaggaccggctcgtccacctggacggcgccctcaaggaatgcgtccggcagctccggcgcgccaaggacgagcaggaccagacggtgcaggacgcgctggcacggcaagcgcggcagtgggagtcccacaaggccgacctcgagctgcgcatcgttgagctcacggcgaggctggaggccaagtccgagcgctcggtggtgggcgccaccgacggcgacacccgttccagcaggctagccgccctggagaaggagaactcggcgctgaagttgcagctgctcgccaagacggaggaactggagctcaggacgatagagaaggagctcaaccggcgggcggcggagacggcgagcaagcagcagctggagggcatcaggaaggtggccaagctccaagctgagtgcaggaggctgcaggccgcggcacaacggagggcgtcctccgtgaacgtcgagctccggcgttctccgagctcggcctgcgtcgagtcgctcacggattgccagtcggactgctccgactcatgggcctcggccctcgtcacggagctcgaccagttcaagaaggacaagagcggcgcgagcaccaggacagcgagcctcgtggccgcggacatcgacgtgatggacgacttcctcgagatggagaagctcgcctccgcgaacggctcgtcgaaaggcgacgccgtcgaggacgcgagcgggcaggtggagaaggcgctgcacgaggctcagcgcgagctgaggacttgccgccgccgggtaatggtggcagaggagagatcagctgagctacagcggcagctgaaccatgccaatggcgacaaacacgccatggaggcggaggcggaagctgctgaggcgaagggaagggagcttgagggcaagctcgagctcgcccgtgccgatatcgcgggcttgctggacaaggggcgcatcctggaggaacggctcgagtctgagaaggcgctgacacttgagctcgcagccaagtaccaggacatggagacgctggaggcagagaagagggagctgaacgctcagctggagacgtcacggtccgaagccaagaagctcagcgacaagatcgccctgatggagaggaagctggaggtggagaaggccctgtcgatccgactggcgacgaaatgccatggcgttgatgctctggaagcaaagaagaagggcgtcgagctcgagctggagtcggcacgcgaggaaatcgcttccctgcgaaacaaggctagtagcttggaactgcaagtcatggaagagaaagcgtcgtccgctggactcgcaatgcggtgccaagaactggaggagcttagatcccagcttgtgtcttcaaactcacggatcgttgagctgaacgagaaggttaaaacgctcgaggatgtgatcgagaaacagaggccagtgacggcggaattggagtctcagctccagtcgagacacgacgaaatcagcagcttgaaggaggacataagcctgttgcagaagaagctggagtcccagaagaacctgtcgtcagcttacatatctgcgctgggcgcttctgaaaccgagaagaaagaactggctacccggtttgaactcggagagaaagaggccgaggaattgcgcgggaagacgagtttgctggaggaacagatccacgaagagagggcacggtcatctgagtttgcggtaaaatgtcggaagatggaggaacagttctcccgcagatctcttcttggccaccaaccagtgaaatcttcggcgatcaaagatattcagataagaaaggagacagagctggccaaggctgccgggaaactggccgactgccagaagacgatagcttcactgagcagccagctgaaatcgttggccgatttcgacgagttcctccctgaaaccgagactagtggcgccgactcagccgacgcctgggacggcgacctgaagctgctccaccctgcaagctatcccacgcagattggctgtttggcagtcacatgagtcacgatcctcgttggcaggtgggcggagaaactgtttttgttcgggttccaccgcatgattgctgtggtgagattgccatgatcttccaccacatgccatatagagttaagtttataatagtctataggtgagaaaatgttcatatgaaagctgtttatagagttggttggtgaagcttcaaaggaactcataaactttgatctcccattcttcctgtcccttggaaacggcttttaaccaccagcatgtgttccatcttgattgtcttccggctattttatattctgcaggagttcattgtgcaatgaaatgaatggaatattcagttagatctga

SEQ ID NO: 16101 - DNA, 894 bp, Zea Mays
aatgcatacattggctatgtttactggacagcttctatgcttttctcaagtcaaatgttatgttttcaatcaaaagaccttgtatgatgcatacaaaaagaggaccaaggatatagaagttgacatggaggcgtacaataaagccaaggaagctgatcctgaattctaccgtgacgcctccagtctccagtacgggaaggtgtccaatgtccctgaagaaaacattgacaagatggtcaaggaactcaaggagcgggaagagaagcggaaatcgttcagcaggaggcgcaagtttaacgaagacaaggacattgattcgatcaacgaccggaatgagcacttcaacaagaaggttgagcgcgcgttcggcaagtacacgctcgagatcaagaacaacctcgaaagaggtactgccttgccggactaaaactgtacacagcagctcggtatcaagaacagcatgggaagagaggtaaggtactggcttgccggactaaggaccttacacagcagctatcttatggcgctcaagctaaccactcgcctagaggcgtgtgtccctggtgttttccttttcgcatggttacttcttgcctgtatgctcggaactcgtggccatggttccattttgatttgtaagaaaccggggactgggttgtcatgacgttaggttgaagtaatgtacagaccaagttgtgcctgaatggaatggttgatttgtaattgtgtatatgccgcgacgaggtttatgtaatttaaaatcaattctgagacattgagaccaatctgtgtgtctctacatatataactaactgttgatgcactcttccataaacaaaccatccgtccctacaacaaacacctgagaagaggagacgagaaaaaaaaaacgaa

SEQ ID NO: 16102 - DNA, 870 bp, Zea Mays
gaattattttggtattaaaattcaatttctttaactatttatctaaataatcaattctctggattgggcgcactattattagaaagtgtaggggtctcagtataagtcttcccaagaccctgaacgactggcgccaggaccgtgagttgaatacctaaaagcatagggtctctttagtgaaatggcatggcgaagagatatgatggattctgagtcatccgatccagacccaagggcccagattagacctaggctattacgaatcggtgcataacggggccacacgattcaaatctacggtcaggatttaatgactcgcagatctaatctccgccacttattgctcatcctacgttccagatgagatccctatgaatcgatatgcaagaattcattccggtcgtcagtcacaggatcaatggacctactagtgtcttcttcctcgcgactcctaggcaccgacgtctgcgcgccatgacggtggacctgccctgcactgccgccgtataagctaaaacatcagaggggtggtaacggcgagaaaataatggaggcataccgtggctcggcctagggacgagcagcgccgcactacggcagccccactcggtcttcttcacgcggtgataatgcggtgccctcccaacaccgtaagcacagggaacacccccggcgtccagcgtgaacttgccgatctccctagcccgatgccgaggtccggtgacgcgcgtcacggacaagctccatcgtcatctctgaccgacagcgaaactctctctctctctcggttctctctttcttggatgcttggtgggggctcttggcttcgcccgaggtgaccgacgggcaccgagtggatggggtggccgc

SEQ ID NO: 16103 - DNA, 648 bp, Zea Mays
aggggcgatctagagatgaccgaggagaagccgtacaaccggaggcacaaggtgtgcgaggcgcactccaaggcccccgtcgtgctcgtcgccggcctccgccagcgcttctgccagcaatgcagccggttccacgagctgtcggagttcgacgacgtcaagcgcagctgccgcctgcgtctggccggccacaacgagcggcgccggaagagctcggccgacgcgcacgccggcggcggcaataatggattccgccaacacgccgaccagaacggccgcggcgacccggccgggaaccacttccagatcagataaagcatgctctctctcttctgtcatgcagcaggatatgctagcatcatcactaccgatagatatttatgcgtctatcgtctacccgccccgaaaaccctagttatatatatatatatatgctgattgtaacctaattagcctgcagcccagttaagcagggactgccttactctgctaggaggacgtgtgtaatcatgtggcctgcgcaaacagtaatttgtgctggctgctgtgtattcatgctgctctgataatcgtgtcgtggtaataatatatcctatttattctactactagtaatatataccgattctctattgtgcctgatagaata

SEQ ID NO: 16104 - DNA, 1850 bp, Zea Mays
gcctaacagcttaagcgcccaaacgcaagattgtgtttattggatttgagtgtctgattgtgtcagtcaaatttgagttcatcacatccagcccccgcaaccccgtccgtgggcttccccatgcgctgtgtggcactacggtagccgaccctcagcagatcttgcgcggctgtcctcaccagtcgccaacggcctcctcgcccagtcgaccttctcagacagcacccctcgacagcacccaagcaaccgaccgaagtgagcagtgactcagttagagttgggagaagactgtggattgctatagtcctggtcaagggttgatgcctgctagtttcaaagttagatctgtacctttagatggcaatagcgaagcatttgaggaggttcttgacccagattttggagagtcagctattggacgtgtagcacctgttgactctggtctttggtggataattctgttaagggcatatggaaaaattactggagactatgctctacaagaaagggttgatgtgcagacaggcatcaggctaatactgaatttgtgcttgtctgatggatttgacatgtttcctacattgcttgtaactgatggatcatgtatgattgatcggcggatgggaatccatggtcatcctctggagatccaggctctgttctattctgctttacgctgtgcccgagaaatgattggggtaaccgatggatccaagaacttgatccgtgctattaacaacaggctcagtgctctgtcatttcacatcagggagtattattgggttgatatgaagaagataaatgagatttatcgctataagactgaggagtattcccatgatgctattaacaaattcaacatctacccagagcaaattccatcttggcttgcagactggattcctgtgaaaggcggttaccttataggcaatctgcagccagctcacatggatttcaggtttttctccctagggaatctgtgggcgattgtctcatctcttgctactcaaaggcaagcagagggtattctgaaccttattgaagccaaatgggatgacatagtagccaacatgcctcttaaaatatgttaccctgcactagagtatgaggaatggcgtatcatcactggcagtgatcccaaaaacacgccctggtcgtatcataatggtggatcttggcctacattgttatggcagttcaccttggcttgtatcaagatgggtaggcgtgacttggcacggagggcagttgaggtggcagaaaagaggctctcagatgacaagtggccagagtattatgacaccaggacaggaaggttcattgggaagcaatcacggctatatcaaacttggagcattgctggatatcttagctctaagatgttattggactgtccggagatggcatccatactagtatgcgatgaagacttcgagctgctggaaggttgtgcttgcagcttgaataagaatgctcgcaccaaatgctcacgtcgtgcggccaagtcgcaggttcttgtgtagttccatgcctgttcttgacccaaaagctgcaacgctccttcaacttgttgtaattgttcgtcacagaagctggcactagttactagttacttaagcagaatgatcacaaaccacctatgccgatttttttggcgagttcgtggttgatccatttatacaggagtatatgttgttgtctgtacattttatctaatggattttatgtatcctgctggtcaactcaagttgattggtagttttttttatgtaagcagacagcatgtaaatatcaccgctcgttacaagtgtactaaaagaaaagttagagagacataatgacggaatgag

SEQ ID NO: 16105 - DNA, 720 bp, Zea Mays
ccggagccgcaagttcgagcctgctgtgcttttaatccgggcttccagtggttcctgattcgattcgagcggcaaggacgttgacctcagcgtctacagggggaaggttcttctcatcgttaacgtcgcatcccaatgtggcttaaccaactccaactacactcagcaggcccagctctatgagaagtacaagaaccaaggctttgaaatcctcgctttcccgtgcaaccagtttggtgggcaggagcctggtaccaacgaggagattgcccagtttgcctgcacacgcttcaaggctgactaccccatctttgacaaggttgatgtcaatggtaacaatgctgcgcccatctacaagtttctgaaatctagcaagggtggccttttcggcgacagcatcaagtggaacttttccaagttcttggttgacaaggaggggcgtgttgtggatcgctatgctccaaccacttcacctctgagcattgagaaggatatcaagaagctgcttgggagctcttaaacgatatctggctgcaaaactgtagaaaaaactgtatgaacattgctctgagagctgaagtatataacaatcttgtcttaataaagtagttttagtatttgagaggttgcagtacctgctttatttcccttgcatgcactctgtacttgtacttgcgacacgatccgatagaaatgatattccttttccttgcatcaaac

SEQ ID NO: 16106 - DNA, 306 bp, Zea Mays
aacctctaaaccttatctcttctctcacctttctcaaccccatctctctcgcctctgtttgttccttggagccgcccccgccgcccacgccaccggtcgcccctgccccgaccccttccgccgcggtcgcgaccgcccccgaccccagccctgcccgacgcttccgtttccttggataaccacaacgctcgcccgcccgccggcaagcgaaagcaaagcgagccaacctagccatggagaaggcgatctatcggtagcgggtcctcctggcgcaccttctcccctcctcctctaccatctccttgt

SEQ ID NO: 16107 - DNA, 1669 bp, Zea Mays
gcaaaggagaaaatttcgtagcaataaataaataaataaaattaataaaagaaaggtggcgtagaggataggaggagaaccaaggttgcgtctcgaaggttcttgcctcgttgggaagggatggcgtcggaggtggaggacgaggcggcgacgccgctgctcgccaacggtgcagccgacgtccgccggaggagggaccaggcgaaggcaattctgtccacgcaggccgtcaggatcgccaccaaggccgagcagcatgagcgcttcatctttaaggaccacaggatgtgccatatgtgtactgcctgttctatgtcatatttgttccgctccgctggatttactaccgctacaagaaatggcattactaccttctggacttctgctactatgccaacacctttctccttgtaatgattctcttctacccagaggatgaaaaactttttatggtttgcttctcgtttgcagagggtccgcttgcttgggcattaattgtgtggcgttgcagcttggttttcagttcatttgacaaacttgttagtgtcctgatacatctcttacctgggattgttctattcactatccggtggtggaatccacaaacatttgctgccatgcacccagaaggaagagatgctagagtcacatggccatatgtggaggacaaatcatatctgtggacatggcttttttttgttccgctagctgcttacaccctgtggcaacttatgtatttcctcatagttaatgtcctgcgtcgacagaggttgttaagggaccctgaagtcatgacatcctacagggagctctcgaagaaagcacagaaagcgaacaacatctggtggaggctgagcggactgctgggtgaccggaaccggcaggtcatgtacatactgctccaggcgctgttcacagtggcaacaatggcactgaccgtacctatattcctgtcctaccggatgcacgtggtgttcctgatactcaaggtgtgcgcgtcgacatggaacggtggcagcttcatcttggaggtgatgcctcggcaagtagtgcagaagcagctgaagaaactggacatgaagcccatggaacaggggagctcgacacaaggtgcgccaggtggtgatggtggcacattgggtaaccaccaccagcacacatccgaggagcatatccaggagtgaggaaattgaagctggatgtaagattagattttgatgttcactgacacaacctttgttgtcatcgagtgcgctttgtgttggagtttttctttagttcttcccagtttgtgagttgtgacatctagtcatctataggtttataggctggacgatatggggtgagagattgtgcgtgcccatcttttgtcgggcttgggcaaagatatgtcgagatgtttactttctctgtagaatttcgtgaagctgttgcattgttcgtttgaagatggcgacgatgttcagatgatgcttcatgttgaaggacatatctttatttgcttcattgtacccagattttatttgcttcatgttgaaggacagactatgatgatgcgtgctgaggtgatttgcttattttatttgctgcgtgcaagaaaaggttcctgggagatgccctgtaaatgcagtgggtgaccacctgtgttgactgggaccaagtcagaagg

SEQ ID NO: 16108 - DNA, 2875 bp, Zea Mays
aatatattaagaaaaggccgtctatagcaaccaactatcacttggcatgcggtttagaatgatgtttgaaactgaagaatctgcaacaagaaggtacatgggaacaataactggtataagtgatatggatcctttaaggtggaaaaactcccaatggcgcaatattcaggttgcatgggatgaagcagcaccaagtgagagacgcaccagggtttccctttgggaggttgaacctgttatcgctccattcttcatttatccctcgccattgttcactgcaaaacgtccgaggcaacctggggtaacagatgatgatagctcagaaatggacaatctttttaagcggaccatgccatggtttggtgaggaggttggcaagagagatctgagtactcaaaacggtttagttcctggattaagtttggttcagtggatgaatatgcaacacaacccctctcttgccaacacggttatgcaaccggaattgctaaattcgttagctggaaaacctgtacaaactctggctgcggctgatctatctaggcaaattagcttccagccccagttcctgcaacaaaataacatccagttcaacacttcgctgctacctccccaaaaccagcagaccgaacagttagcaaatgtaatagctacaccaaaccaattgggaagtgttatagtaccacaaaaggcagttcaaaattccagttctgaacagaaacagaatctggttacacaaccactgcaagtcagccaaccaatggttagtgtggcacagcctcaacttgtccatactcaactccagcaacctcaagtagttctccaggctcagcctcagcaacctcaagtcattgtccaagctcaactacaacaacagcaacctctggttcaaaatcacaccaccatacaaagtggccttcaacaaatccagcttctgcagcaacagcaagttcagcagtcagtgcaggaacaacagcaaataaagatacagccttttcaggtacctaatgatgccaacatggtaacacagttatctgatcagatgaaaatacaactattgaaggctctacagccacagcagcctctggtcatggaacagcagaaaatgatatttgatttgcagcaacaagcagtaaattctcagtcaactgctcagcagtgctcacaggtagctacccaagtggttggtttgcatagcagtagcactaatcagtacccgacgcagcaaaagactcaacctctcaaaacatttcaagattttcctgggaatgctgtttctattgtaaaaccagaaattgtcacctccgtgggtgctcgctctttgcatgtgcctggtggagtgcagtcaatgaagatggatgaagttccctcttcttcaacatcgccatccacaaacaacaatcctgttattttgcgatcaactccaagtagctccaagaaccaatgtttacctactgcagcaaaggctcctcagtcatctgttgtattgggttctacacttgaacagggtatgaagccttgtgacagtacacaacacccaatggtgattcccaagctggctgaagaaaggccagctactggacaagactacatgaacagcactcagctggattatttggatacgtcatcttcagcgacttcagtttgcctttcacaggctgacggatcgctgcaacaaagttttccaccttcatccttcaatcagcatcaaccgttgagggaagcagttccagatagcgagtttgaggttacagatgcaggaaataactttctatttggggcaaatattgatggccatatggagcctcttaacgaagacgatttgcttggaactgccttcgaagctgacaagtacatggaacagatgccaggaaacggcatctctaactacatttcatcaaaggattctcagcaagagttatcatcttcaatgatctcacatccatttggcgttgctgatatcgcgttcaattccatagattcgtcgatcaatgatatccaattcttaaacagaaattcccgggctccaggtcctgttcaacaacgtatgcgaacatacaccaaggtgcacaagcgtggcgctgttggaagatctatcgacatcaacagatattctggttacgatgaactgaagcatgacgttgcccgtatgtttggaattgaggggcagctcagcgaccaaaacagagttggctggaaactggtttacgaagatcacgagaaggatgtcctattagttggtgatgacccatgggaggacttcgtgaactgcgtgcggtgcatcaggattctttcgccgcaggaagagaggcaaatgaggctggccagcgactacggagacagctttcttggcaaccaagcgtgtagcagctcggacgggggtcgtccgtggagggtcaccggcgactagaaatagcaggctatgcctgagcacaaatgtttgatataatccgtcccacgatagcaagaaaatgatacgcgatttctgagcacaaacttttgcactcagatgatcgtgcaaacagttagcattttaagaaaaatgttgcagttcaatgtaactgcaggaatgtctctgatgtagcctcttcgatgtggcagccttaacaatcgatgtgctacagttactctgcctatgtatttactatactaccttggccttgtatatccttttgatgtaggcgcagctggatgctgaaccccccggaggctgttagggacaattacaaccgttcataatttgccacagatacaaatctgagtggacaaatggattcagtttacgtatgcttcattgtttgtgagcctaccttgatggccttttattttgttcagttccactaaaaaacgccaggtggacgtatgcagatttggg

SEQ ID NO: 16109 - DNA, 5569 bp, Zea Mays
cggagggctaggccacgccagatctccaagtctccgtgtcaggtcaccgcaatccaagccacacagctttcgcctccggcgctagggtttcgcctccctccttgttcggtccgcgagtgtaccaggaccaggtgatttcttcccctttgatctgctgtgacgtgggagatgccgccgaagtctaagaggggtggcgctgccgccgcgaggaaggcgccggtgacgaggggccggatggggagggcgcaggctgcggcggaagcggcgccggttgtggaggagatggaggcgcctgctgaggaggtgaaggccgccgaggaggtcccgaaggtggtggaggcaccgaaggtggtggaggactcgaaggtggtggaggagccgaaaccctcgcctctgctgccgcaacagccggtggtggtggtggagaaagactccgatatcgcagccaacggtgccaaccagggtgaagatgacagagctgcaaaagaaatatatgaagaagaggacaaaggtgaacggctggagtttgaggatgaaccagaatatgaagaggaggctgctgtagactatgatgagaaagatttggagcagtatgaagagcaatatgaggatggtgatgaagaggtggagtatactgaagacgtggttgaagtggagacagatatggtggatgaggaacttgatgaaggtggtgatgatgtggagggggagggatacgaaaatgctgacgaagaccatcatgtggatggagatgatgaggagcataatgaaatggttaaagagcaccgtaagcggaaggagtttgaaatttttgttggtggactagataaagatgcaacagaaaatgaccttatgaaggtttttggtgaagttggtgagatcactgaagttcgtctgatgatgaaccctgtcacaaagaagaataaaggctttgccttcctgcgatatgcaactgtagagcaagcaaggcgtgctgtttcagagctaaagaatccactggtgcggggtaaacaatgtggcgttgctccaagtcatgacaatgatacactctttgttggcaatatctgtaaaacatggacaaaagaacatttgaaggataaactgaagagttatggtgtcgaaagttttgacgacttactacttgctgaggacactaacaatcctgggatgaatcgtggctatgccttgcttgagttttctactcgacctgaggcaatggatgctttcaggacattacaaaagagggatgtagtatttggagttgatcgtagcgcaaaggtttcctttgctgattcctaccctcaagtcgatgatgaaataatggcacaggtcagaactgtatttcttgatggccttcctccctcatgggatgaagaccgtgttaagaaatatctcaaaaagtatggagctattgagaaagtcgaacttgcacgaaacatgccagctgccaagagaaaggattttgggtttgttacatttgatacacatgataatgctgttgcatgtactgaagggatgagtaactctgagatcggtgaaggtgaacacaaggcaaaagtaagggctagactgtcgagaccattgcagagaccacctagaatgaaacatggattgagaggaaattttagagttgggcatggtgccccgcgaggtggccgtttaccatattctcgtgctcctccacctcgcaggcctccgccacgtcttattcggcctgctgttagccgcttaccatccatcaggagtcatccgttgaagcggcccatagatattagagataggcgtcctgctatgtcaatgccagatagagctaggcgtttccctccagagagatcttatgacaggaggcccccagctccagtttacctgaagagaagtccaaggagagaatacgggaggcgtgatgaacttcctcctccaaggagcagagctacaactgattacattaccagagttccggttgatagacgtccctctttgagggatgattattcaccccggggatcaggttattcagacctcggtcctcgtagtgctccccgtctttctgataggcgagcttatgctgatgatagttatggggagaagtttgaccggcctttagtggcctatagggagggtcgcggccgtgattatgacaccatttctggatcaaagcgtccgtatgcagatatggatgatgtgcctcggtaccaagaaatcggtgtccgtcagtctaaggcacgtttagactacgacattggtggcagcagtgctcggtatggagatacatatagtgagaggtctggacgaccacatgcgggatatagtagcagccgatctatccctgttcatgattcagcatatggcagcagccgtcatggaatgagttatggaggttctgctagcagtgctgatgctggtggtatgtacccaccgagttacagtggtagctatgggtctcgtggatctgatgttggtgggagttcatattcttcactttactcgggtcgcaatttgggtaccagcagtggtggctactatggaggtagcggttccagttcatattactaagaaccataagttactttaagtacacagatttggcatcacctcgtctttgtggaacagatttggcatcataggactttggtgtaggccctgcattttatggagctcctcgatttaagccacacagatctgtaaaagaagtgccaagcacccaagtgaggcaatgttttccaataagacatttcaacgaagccagaccatcgatttggttcgagcagtagttctgaggacgttctggcttgtttatgtaatgtaaggatttgctttatctggtcaagagttctgaacataacaaccagatatggtgttttaagtgtttcgacatgtttacttccagtgtttctataacattattgagacagatatggagtgtactttgaggtagtttctgcaattcaagttatttggggattacatcttgtgatgtgccggcaaaggccaggcttacaaaagaagttttggaatgagtgcttcttgtaaggctgttagtttctgaaaccctcccttcccttctgtcttctagaggatcaataatcaccaagacagaatgttgattggtcagacttaaattctggacttctatgttgcattccgggtacaaatggtttaatgggttgccaaattttgagagaaactgcttgtgtcaaaaaatttcccaagcagttactttggtttctccaaagtttaagataacagaacttgaagcaaaaggacatttgaaacattgagtatagccttgcaatactatgactatatagagcacaaggcatcatgtaaatctaacaagcagtgccagtattttacagaagggtaggcctagtgcagtggtgagaggctgagagctgactcactgagttaccaggttgcgggtttgaaacagcctctccgcatttgcaggggaaggcttgccttggctcatcctttttctagaccccattcaagttcggtttatcctttccccaggccccactcatgtgcgagccttcgacactgggtctggcctttagtgctagtattgaacaccaccctggtttgatactttgatcacccactatttacgatttttttggagtgttttgtggagtatggattactaacaattttgagcttaatgggcattggatgattgcaagctttcaagaatcttgctggaggtgtaacacactaactgatcaagctacagaaaaaagtatgatttgtctgacaccattaacttctaaccataatttcacaacatagtttgggaccaaacctttagctcaatattgtcacacttagccacttaggctttaaagccaccatatgtgtgatatatcttatcagtctagtatatgataccatgcttgtttgtgtggataatttttactaaatgataacttggccaagaatttacctttatataaaaaaaaactcggccggggagggaaaagaccaccctcccggtattccatataagaagagaccgaaacaatggtcccggccgagaaaatccccgaaccctggcccctcatcactaacgggccgacgtcaactgtccactctgcaacggcccaaccggagggtggcgcacaagacatcgtatcccgagagcggatggggcacagcgaggggttttttttttaaccaagcctgaaaattcgctcccgataggaatcgagcccaggacttggagttgctactcggaagtcctcaacctctaggctagaggccctttcgcaatttacctttatataagttgaagaaacagggtgtgctgtgttgctgtggtttgacagtgactaattctgtatggtgacctgcaaagtagctgaaagatgactagtaatatcaatgcccagctatgcaggccgcagagagcttaaatgcaagcttaacttataactgctggtgtcatcttttgagttttagcaaggaaaactcatgcactaactttggatttacttgagctagggataataacactattggatcctgagttcagactgagagacagttttgtccttgaaattgttttttggagataacctagtgatgccactgagtaggatgaaggatcaatatgtagtttcatgaagagaggctgctctgagatgtcttgcagtatgcagaaacacattttgtgtgcttattaatgtacttgagggccattatttgttacttatgtgttataataattattggagtaggacttcatgagggaaattgatgatggtattagatctagtagaactgttgattgccaattgtgcacagaagtaatgctatatgcaatgacaccaatgagtttggttactgggagccagtatatgtgggaatcagcacctggtggtgcccatttgaaaaaacaagttgaaggggattatttttcttttgcgtggcaacgatgatagatctgaaagcagaaataatttcttgaaaaacagtagccatagaattaagtacaagaatgctctattcaaattctgagttgaaggctgttgaatttttctccccagttgctggagcaaactcaaggatctagcacatttaagtttaactatctagtcaagtattcaacataaagatacttcagaatcacaaattgtagccaccagcatgcctctccaaagacgtgcatggagattcaaaccggtatcttgcttgctgtcaaaagcaaccagatttgtgaactcgtcatgtgtgaattgtgatgttgtattgctctctagtttaccaatttgagcttgtaaagaacactgtagggatgaaaggaaccaaatgtacaaaaacagagtatgctgacgtttgtcacgcgcgtctgaatctgttccccgtttgagcttgtaaagcacactgcaggcgtggaagtgcttatatggaatatcatatggagacgttagtcacgtgcatatgaatatggtagttttagggccggtttgatttcccgtctaaggagccacaacttatctaataccctgcttgaatttggagcatggaattggtaattggaataaacttttctgaattctgttgtttggtt

SEQ ID NO: 16110 - DNA, 2792 bp, Zea Mays
ctcgggcagtctgggctggcggtcccgtggcggtgggcccacgccacacgcagacgagtcgacccacctcaccggctccggctcatatatcggccgctccccttgagagccagctcatcagccgagtggttgtgccgtggaagctttcgtttaccgttcccatcccccgtcgtctctcctctccttcccactctcccacccgtcctccattgctcccttcctctctctcgcggagtcgctgcgatctagccaccgagcacgagcgtcctactcgccgcggaccttgctcatggccgcggggtcgatccgggtcaccatggaggtgggcgccgacggcgtcgcgctcatcaccatcgccaacccgcccgtcaacgcgctccaccccatcatcatcgcggggctcaaggacaagtacgcggaggccttgcgccgtgacgacgttaaggcaatcgtgctcactggtgctggaggcaagttctgtggaggatttgatatcaacgttttcacaaaggttcatcagactggggatgtatcacttatgccggacgtatccgtcgagcttgtgtcaaacatgatggaagagggaaaaaaaccttctgttgcagccattcaaggtcttgcattgggtggtggcctagagttgactatgggttgtcatgctcggatatctactcctgaagctcaacttggattgccagagctaacccttggcatcatccctggatttggaggtacccagcgtttgccgaggcttgtaggtctacccaaagcaattgaaatgatgctgcaaagtaagttcattacggcaaaggaagggaaggaacgtggtttgattgatgccctttgctctcctgatgaattgataaagacatcacgtctttgggctctggaaattgctaattgccgtaaaccttggatgaggtctcttggcagaacagataggcttggaccactctctgaagctcgtgctgtgttaaatgcagcaagacagcaagcaatgaagatcgcaccaaacatgccacaaaaccaggcctgcctggatgtgatggaggaaggcatattatgtggaggccaagctggtgttttgaaggaggccatggttttcaaggagctggtgatagcaccaacatcaaaggctcttgtctatgttttctttgctaacgttccacgacaaaggtgccaggtgtaactgatgttcaactgaaaccaaggccaattagaaaagttgctgttattggtggtggtctgatgggatctggaattgccacatcacttcttgttagcaacatttctgttgtgctcaaggaagtaaaccctcagtttctgcaaaggggagagaaaacaatagcaggtaatcttgagggcctggtcaaaagaggttcactaacaaaggataggatgcacaaggccatggcccttctcaagggtgctttggattattcagatttcaaggatgttgatatggttattgaggctgttatcgagaagattcctttgaagcaatcaatatttgctgacattgagaaaatctgtccaaaacattgcatacttgcaacaaacacatccaccattgatttgaatgttgttggcaagaagacaaattctcaagatagaattataggggctcactttttcagccctgctcatattatgcccttgcttgaaattgttcggacggagaagacatcaccacaagctatccttgatctcatcaccattgggaagataataaagaaagtccctattgtggtcggcaactgcacaggatttgcagtcaaccttacattttttccttacacacagggttctcatcttctagttagtcttggtattgatgttttcagaattgatcgagtaataagcacctttggcatgccaatgggaccttttcaactccaagatgtggctgggtatggagttgccttggcagtaaaggatatctacgctgatgcctttggagaaagaaatttggactctgaccttgtggatttgatggtaaaggatggacgacaaggaaaggtgaacggcaaaggttactacatttatgagaagggtgggaagccaaagccagatcctagtgttaagcatgttatcgaggagtaccgaaagcacgcaaacacaatgcctggtggaaagcctgttactttaacggatcaagatattttggagatgattttcttcccagttgtgaatgaggcatgcagggttatggatgaaaatgttgtaattcgagcttctgatcttgatattgcttctgttcttggaatgggctttcctaaatacaggggtggtcttgtcttctgggctgacactgttggagcaccttacatacattctaagctaagcaagtgggctgaaatttatggccccttcttcaaaccatcatcatatttggaacagcgagctaagagtggtgtaccattgagcgcaccaggagcttcgcagcaaggttcggcgaggtcacgcatgtgaggtgctgtccagcattgagcagaataatgcagaatacttgcgggatgagccattgacggctgcttcgctgatcaaaacacctccgtgaacacaaacatgaggcacagaagaaatgatgaaaaataaagggattgtaacagttttggtgcctttgactgtaactggcagagtttctggggacagagtggcatggattaattgcacctgatcactctgtatgtcgctgtcatgtgtgcaatgttcaatacgtacgtaataaagaatggaaatatatgccgcaatcagtgcgtcgtcttctcgagttaatcgcttgcgccaac

SEQ ID NO: 16111 - DNA, 121 bp, Zea Mays
gatccctccttactggctacagcctacatgtgtcggggaacacagcaagagacatggaggacactactgtggcgtattctctctctcccctcatatgttcttacccttcaccatgtctcga

SEQ ID NO: 16112 - DNA, 642 bp, Zea Mays
gatcctgccagtagtcatatgcttgtctcaaagattaagccatgcatgtgcaagtatgaactaattcgaactgtgaaactgcgaatggctcattaaatcagttatagtttgtttgatggtacgtgctactcggataaccgtagtaattctagagctaatacgtgcaacaaaccccgacttccgggaggggcgcatttattagataaaaggctgacgcgagctctgcccgccgatccgatgattcatgataacttgacggatcgcacggccttcgtgccggcgacgcatcattcaaatttctgccctatcaactttcgatggtaggataggggcctaccatggtggggacgggtgacggagaattagggttcgattccggagagggagcctgagaaacggctaccacatccaaggaaggcagcaggcgcgcaaattacccaatcctgacacggggaggtagtgacaataaataacaataccgggcgcgttagtgtctggtaattggaatgagtacaatctaaatcccttaacgaggatccattggagggcaagtctggtgccagcagccgcggtaattccagctccagtagcgtatatttaagttgttgcagttaaaaagctcgtagttggaccttgggccgg

SEQ ID NO: 16113 - DNA, 2188 bp, Zea Mays
cgagattaggaatgagaaagagaagtagtggtggctgcccagagaaacaagccagcggcgactggtcccactcgaagttttgggaatgagatggcgtattcgcttacgaaaagcactgtcagtgtcttcacaagtcaccctaaaggccaatgatgctgtggagaacacaaaggtcatggatgatgatgtacttctacaggaaatggaagaattgaccagtgttattgatagaaagaaaaaaagagagaaaaagcgtttgtcaaagcgtcgagcaaaggataaagcacgcaaggccacaggaatgcagattgatgctacaggagatgattatggtgatcctgacttgttttctattagtgtaatcaagggtggaaaagaacttgaagctgttgaatcagcagaggttgatgtgcaaaatgaaattggagacagtgagaatgaggatactcaagctcgtgaacactctgatgaggaaatggattctgatgaggaacagcagaggtatgatgcccagcttgaggagatgcttgatgaagcttatgagcgctttgtaactagaaagggtggtgaaattaaacaagaacgcaagcgtgcgaaacgaatcaatcctgacgctgatgcagacttgttagagggaggtgaagatgatggtgttgctgaaatggatcaagattttgatgaagaccaagatcttgatgaacatcaagatcaggagaccaatccccttctgttagctctagatgaacagaggccaactaaagagcagattgtaaagcaaatggtatagtcaggacgtgttcacagaagcagcaactggcattactgagcagagtgacactgaagatgaaagggagagtttgcaaaggaatatgaagaagatggttactggcaaaacggaaaaagtggctaaagcacagcgtttgcaacgagatgatattgagattgtaccagcagaacctgtccgagatgaagaggatacgtcttcatcttctggtgaatcagatgtttcggaggatgaactcgatgattacagaaaggctgaagtactagcctatgctaagaagatgctgaggaagaaacagagagagcagatacttgatgatgcttacaacaagtacatgtttgatgatgaagggttacccaactggtttgttgaggatgaaaaaaggcataggcagcccatgaagcctgttacacgtgaggaagtagctgcaatgagggctcagtttaaggagatcgatgcccgcccatccaagaaggttgcagaggccaaggcccggaagaagcgtgttgccatgaagaaactggacaaggctcgccaaaaggcagatgctatagctgaccagaatgacataaacgagctatcgaagaggaagatgattgaccggatttacaggaaggcgatgccaacgaagcctcagaaggagtatgtcgttgcaaagaagggggttcagttgaggactggcaaagggaaggtgttggtggatccacgtatgaagaaggacaagcgggccagcggaacttgtaagaaagggaagaagggcggcaaaggcggcaaggggaagggtggtcagaaaggcatgagagggaaaactgggaagaaggccgggaaagccccgagttaaggaagatgaggagctaagcacggctgggatgctggatgccttcctcccagctaattttttgtctcgtcctactacagctactctcagtaggcagatgctttgaagtcgtgtgatgataaaatttatgtgttaagttttgtagcgtgagttatcatggctacaatttgttctgaaactagtggtcactaatcttaatttacacagttcagtcaattatcaaaactttttaacccctttggcgacaccagagtataagaaatacagatgcctgcatttctactaatatttgtgtggcgcacccttgtggagacttcttttttacaggtgaggaatccgcttgcatttccttatcagatgaaatgaaggcagcactttgagggcgtgttcggctggctacaagccgacactgttgcagctgtttggactgctgcagctgcaatccatagagagaaaaatactgtagaagccgcagccgcagccggattgcagccgcagcaagccgcagcgaacaagctggaatccgaaacattgagatgcagagaccgtcatggattcgcatttcc

SEQ ID NO: 16114 - DNA, 1415 bp, Zea Mays
gtgaaatgaaacaatctgcacccaacaacttgcatagcctataaagaaccagaaagggaaaacaccatagctatcaacactaaggcctgttgcatcgagtatctgatattggaaggtgacaatttatcaaaattattccctaatgcgcacctgagcgttgggagcttgacaatgaactcccatgtacttttcacaatcttgactaccatcatagtcatgccgaccacttggcttcgtgaccttagctgcctgagctacctttcagctggaggtgtttttgcatcaatccttggagtcatctgcctattctgggtaggagttgttgataatgttggctttgagaacaaaggaactgctctgaacctccctggaatccctattgcaattggattgtatggttattgctactcagggcatggggtgtttccaaacatctactcttctctgaagaagcgcaatcagttcccttcaatcctttttacttgcattgggctgtctaccattttatttgctggtgcagcggtgatgggatacaaaatgtttggtgaagccacacagtctcagtttacactgaacttaccagagaatttagtggtttcaaagattgcagtttggaccacggtggcaaatccaataaccaaatatgcattaaccataaccccactgactatgagtttggaagagttgcttccaccaaatcaacagaagtactcaaacatagtcatgcttagatcagccctggtggtgtcaaccctcctcattgctctatctgtacccttttttggacttgtgatggccttagttggttctttacttacgatgcttgtgacctatattctaccttgcgcgtgctttttagcaattcttaggagaaaagtgagctggcaccaggtagcagtatgctcgttcatcatcgtggttggggtttgctgcgcttgtgtgggaacatactcgtctctgtcaaagataatccagaactacacatgatacagttgttcctgcaatccaaatttatgtccaaactcaatgagccaaactgcccagcaaattagtcaagtcgatgtatcataaatttgtgagatgtccatgtttgcatgttaatggatcaacacaaataatacgtttgtggcaaggatttgagacaatatttctgaacaaaagatgaggttgattttgtgttgtggatgtctcgtgtcaagattctttgcgagcaaatggagaagaaaattaaattaagagaaggaacctgcattgttgttgttgggcagaagaattgcagcgaagaatgtgagggggtttgcttcctgcttttagggatcagtttttgaatccatgtttattcgtttaaaatctacgtgggatatgcctaacagtcacagctttgtttggaaccttaaaattggcaaacaccctcc

SEQ ID NO: 16115 - DNA, 2669 bp, Zea Mays
cctcaaccgtttgtctcttgcacgcttgatggaagcttgtgaaactgctctgcaggagcatcactttctaactggtacacttgaggaagactccaacaggtcagacaacgagtattcagagcaaattaaactactatcagaggtcttcagccaagcgacagtcgccgatacaccaacagatgtgcccgattacctttgctgtcagataacattcgagatcttccgagacccagtgatcacaccgagtggtgtaacatatgagagggctgtacttgttgaacatctccacaaggttggcaatttcgacccggtgacgcgagaacctctgaaggagcatcagctggttccgaatctggccatcaaggaagcagtgcaggcctacctgaaagagcacagctgggcccacaagttgaactaattggatgccgtgtgctttgctgactgcagatgctgataaatcggggatggcctgttattagagttagattttatgttgtgttggaatgagattgattggatagctcgattcatcgttcttagtattgattgggtaacttgacctgtaactgcaattctgcaaacactcattggatggatgtaatgaagcaagtgtacatgaaacattggttggttcagctcactgcatgtatatggttgcagcattatatatggttggtcgtagacccagtgggcctcaaacaagttaggcctagtttggatactctagtaatgagtgggattgaagtggattaagatgtattgagagagtatttgatgtattggggatttacaccctctccaatcccttcaaaacactccaatcctaaagtatccaaactaggccttaggtgggccggcctctatccaaggcccagccttttacttggcgctgacaagacaaaagagaggagacgagaaagaaaacaaaccctagcccgctacccctgccccttctctcttcgtcgcgcctccgcctccgccgtcgtagcatcctcctccgccacctcggccatggcgacatccccagcgctcctcttcccttctccctcctcggcatcctctgcgccttcgtcggcgcgggtggaggcagtggtgcttttcaacgtctgcgacagctacgtgcggcgcccggaccaggcggaccgcgtcatcggcaccctcctcggttccctcctctccgacggcaccgtccacgtccgcaactcctatgtcgtcccccacagcgagtcagccgaccaggtcgccatcgacatcgactaccaccataacatgtacgcctcgcaccagaaggtgaaccccaaggaggtcatcgtcggatggttctcgactggatttggtgtttctggggggagtacgctcatccacgagttctattcaagggaagtacaaaaccccatccatcttacagtcgacactggcttcactaggggggaggcttccatcaaagcctacatctcatccaatctgtccctcagagatagtcaactcgctgcacaatttcaggaaatccctctggatctgaagatgattgaggcggaaaaggctggatgtatgttaccggtgaatagcagatatataccttctatctgggggagatctcattttgcacctgtattagttggtccttctgttactgtgttgaacttctcaggaatagtcacatcagtagttggatttagtaataatgtctctgtttctatttctgtttctgtattaatttctcgtagacaactgatgtttgtaagaaccatattttgctctgctacatcctcagttttagtagcagaacattttgaagcttccatcactcttactaccttctgttacagttgagatcctgaaatctactatggtagagaagctccccaatgatctggaaggaatggagtcatcgatggggaagctttacattcttatcgatgagatctacaaatacgtcgatgatgttgtggaaggacgcgtggcacccgacaacagaattggaaggttcatctctgattcttttgcttcggtgccgaaattgtccccggctgctttcgataagcttttcaatgacaagattcaggataaccttgcgctggtatacctgtcaagcatcacaaggacacaaatcagcatcgccgagaagttgaacactgctgctcaagtgctgtaggtttggcggtgtggcatctggtttggacgtggatggcttgatgctatctgtgatgcttggcgtaagtgtgattggtgacagaaatgcatttttgtactcattattattattgctaaatgagagacctgatggaaagggttagccaacgatgagatcccataatgttgccagaatgccagtagagtggtggatggcgagatgtttctgtttggatagtattctgtgctccaggttgaatatttgtaatgctcgttggttttgtgtagcgacacatcggcaatgtggagcaatgaagagatttgctccacattttacgtcgtcatttagaggtgtggtggcatgcaatgtgatgctgttgttgcaggaaaatcggttttgctgtcctgttatagcaagctttcctcctgcggccctgcttttcatttccctcttgattcttgcctctgcccttcgaaaccggtctaggccgggaacaatcacgtcatcccatgttatgtgtctagcctgaacgaac

SEQ ID NO: 16116 - DNA, 1066 bp, Zea Mays
ccacctgtaagccgccgcacacatatatatgccgtgaccaaaccgtcgcttccatttttcgaccgccgccgcccccagtccccgatccgaagctgtgcctcgtaccatttcgatccaatggcgccgacgtcgaagctgtcgacgggcatcaagcgcgcttcgcggtcgcacacgtaccatcgccgtgggctgtgggccatcaaggccaagaacggcggcgccttccccaaggccgacaaggccgccgccgccgtggaacccaagttctaccctgccgacgacgtcaagccccgcgttcccagcacccgcaagcctaagcctaccaagctcaggtcgagcatcacgcctgggacggtgctgatcctcctcgcagggcgcttcatggggaagagagtggtgtttctcaagcagctcaagtctggcctgctccttatctctgggagaagaagcagaaggtgaagaagaccgagggcgagctttttgagacagaaaaggaggcatccaagtcactgcctgacttcaagaaggatgaccagaaggctgtggattctgctctgatcaaggctatcgaggctgtcctggagctgaaaacctatcttggcgcccggttctctctcagggatggtgacaagccccatgagatggtattctaagtttctagttttggagttcgtaggaagctgttttgtctgtgttcttgtacttctgagttttgtaccagtagcgaacgtttcattgtgattgaagtcttcctgccaaatattataagatctaagaaagttctatccgtgttggtggttcagcagtgcattatctgcatttggttccttaggtagtccatggtatcttgaggtcccattttgtttgaattgctgactgtcaggtgtttttgctgttggtttggaataaacttggcatgtagcttgccgaaactggaataaacttgacatgcatcgtacaaatgagtcaatagcatggaacggctagttcctgaactagctgaggggccgtgcaatgaatatgccttgtgcaggaggtaaatgtgcatgcaatagttaaaagagaa

SEQ ID NO: 16117 - DNA, 132 bp, Zea Mays
ggtagaggagggtatgcgcgagagaaaggttacgagttcgaatctcaccattcacaaaacatgtaaatttgattcaaaataatagtgaaaaatgatagggtgatgggtatggtaatatgtagtggttggaga

SEQ ID NO: 16118 - DNA, 3795 bp, Zea Mays
cagcgactacttttttaacagttgttcatcgcattgaggaagggaggccggctggtgctactgcttttctagtacctgcccacctgcacttgcatctcctgcttccctgagcggcctcccggctgcgaatccaccagcatttcccgaggcccagcgccgcgtgtgcctgtggggcggagtcaggaaatgctcggagctccattccacggctgaaacttctgggaaggtttaagccaaaccttgttgcagtttagggagaccggcagcactaaagaaactagcctgagcctctctttcagcctctcacccactatcgtgagggcattttgtaccttccaagaaagagagtaaggagaacttgacctcagcgctagagaagaatatggcagccactgaagctgccacggacacaggcagttcaaggaggtcacaagatgacactacaacattagtcccacacagtgggaatttgggagaaccaatccagaagggcgtgaagaccaccagattcaaagatgatgacgaggttgtggaaatcaccattgtacagcgcgattcagtggcaatcgaagatgtcagggtagtcgatgatggtggctcagggcatagtaatgggtttgatggcctgtcacttgtgtcaccttcctcatcaaggagcggcaagctatcatcaaagattaggcaagtgaaaaatggactaaagatgaagaactcaagcactaaggcgccacagacacagttgggaaagaacatgaggaagagattggacagaagcaagagcggggctgctgtagcgctcaagggcttgcagtttgtgactgcaaaagttggtcatgatggctgggctgtagtggagaaacggttcaacgagctacaggttgatggtgtgctgctacgttcaagatttgggaaatgcattgggatggatggatctgatgagtttgcagtgcaattgtttgattcattagcaagaaagagagggataacaaagcaggtgctgactaaagatgagctcaaagatttctgggagcaactcagtgatcagggttttgacaaccgtttacagatattctttgacatggttgataagaatgccgatggaagaatcacagaagaggaggttaaggagattattaccctcagtgcatcagcaaacaaactttccaagctcaaggaacgagctgatgagtacacggcactcataatggaagaacttgaccgtgacagccttggatacattgagcttgaggatctgaaggcacttttgctgcaatcaccttctcaagttgttgcaagatcaacaacgcatagctcgaaacttagcaaagctcttagcatgaagcttgcatcaaacaaggacacaggtccattttaccactactggcaagagttcatgtacttccttgaggagaactggaagcgcatttgggttatgactctctggctctcaatctgcattggcctctttatttggaagttcatccaataccgtaatcgagcagtatttcacatcatgggttattgtgtgaccactgcaaaaggtgctgcagagaccctcaaattcaatatggccctggttctttttcctgtttgccgaaatacaatcacatggattcgatcaaagacaaagatcggtgctgttgtgcccttcaatgacaacataaacttccataaggtaatagcagcaggtgttgcagttggtgttgttttgcatgcaggtgctcacctgacatgtgattttcctctgctgctgcatgcaagtgatgctgcctatgaaccaatgaagcctttctttggagacaaaaggccaccaaattactggtggtttgtaaagggaactgaagggtggacaggtgtggtcatggttgtacttatgactatagctttcgtattggcccagccatggtttcggcgtaataagctcaaggattctaatcccctcaagaaaatgactggcttcaatgccttttggtttactcaccacttatttgttattgtgtatgcactgctcattgtccatgggacctgtttatatctaagcaggaaatggtacaagaaaacgacatggatgtaccttgctgtccctgtgctcttgtatgtaagtgagcgcattcttcggctatttaggagccatgatgctgttaggattcagaaggttgcagtatatccagggaatgttttggctctctatatgtccaagccacctggattcaggtatcggagtgggcagtatatcttcataaaatgcagtgatgtctctccatacgaatggcacccattttcgattacatcagcaccaggagatgattatcttagtgtccacattcgcacaaggggtgattggacttcacgtcttaggactgtcttctctgaggcatgccgccctccatctgatggagaaagtggactccttagagctgacccttccaaggggatcaccgagaccaacgcgaggttcccgaaactcttgattgatggaccatacggtgctccagcgcaagactatcaggaatatgatgtgctcctgctcattggactgggcattggagccacaccattgattagcattgtgaaggatgtacttaaccacatccagcttggaggatctgttgcaggcacggagcctgagggcagtggcaaggccaagaagaggccattcatgacaaagagggcctacttctactgggtgaccagggaagaggggtcctttgaatggttccgaggggtcatgaatgaggtggctgagaaggacaaggatggagtcattgaactccacaaccactgctcgagtgtgcaccaggaaggggatgtacgttctgccctcattgtcatgctccaggagctccagcacgcgaagaagggagtcgacatcttgtctggaactagtgtcaagacgcattttgcacggccgaattggcgaagcgtcttcaaacatgttgcagtgaaccacgagaaccaacgcatcggagttttctactgtggtgagcccgtccttgtgccacagctacggcagctgtcagcggacttcacccacaagacaaatactaagttcgagttccacaaggagaacttctaatggaggaactggagaaaagctctaggcgtggccctctaatggtttcagaatatgtgaattacgatggttgtaacatatatacgagtagaagaataagacgatgggagttgttttgttgtacatgtcaagagtagatgaattgtctttgcaagcatacaaccttaaaagttgtaacacatgtcagctggttttgacaggtctgtttgttttgtctgctcctgttggagtgttgggcatacactgcttctgtcttttaaagcaccaccactacattgaaagccctgaggaaggtattttacggcacaaatgagtcaggttcacttgtgaattgtgatcctcaactcctgatgctgagtaactggttgtgccttccgtaagtttgctcaaaatgtatgttaaattttatgttgcttgatctcttggcacttccaaaaagtttgtgtgataaatgataagaaatgagatttcccctttttttgcagaatgggtaggtgttctgctgtttcattaagttgaaagcatgtgcaatgtgtgcaaggatctgactgcaatactactcggctaaaatgaagaagaaaacgaaaccacaacaccctaccaaaacaaagatgaaagaaaagaaagaaaaggactgaatatagccactgtgactcacatccagcctctacatgctgcatactctgtcgatcactcgaattcttcacaggcaaagcctcaaa

SEQ ID NO: 16119 - DNA, 515 bp, Zea Mays
atgtttcttttatatcgttcttgattatttccaggttattagtcttgttggagcacaaaaggcaactttgcatcctgatgatattttattacttgcgaatttcattctgtcctctggatcttttagaacttcagagtcttttgtacccatatgtttgccaagatacaatcctatggcctacttgcatgcttatgttcatttttttgacgaacatacatatgtgactttgcttactacacgatcagatgctttttatgatctcaaagattccagggcccacattcaaaatgctcttttaaagtcaaatgtcctcatcgaagtccaaagatctttacatgagaatgcattgcgtgttgaggatctcccaaccaacccgtcttctcaatctgcatcacaccctccagagtcctctcaagacattagttcacaatctttgtcttctgaaatggcaattggaggaccaggtggactatggcattttatatataaaagcatttaccttgaccaggtggacg

SEQ ID NO: 16120 - DNA, 3624 bp, Zea Mays
aataaactcatttttgaattgaccattccatttgaattaaaaaaaattatgtcacagttgccaccacactgtttccttattgtctactcaccccattatgagccaccttccttttttttcatttgctataataattccagcgcctcttattatatttttttaactcgctatttctgctcacctcctcctctccttttcttcctccctcagcctggcctcaactcccctcccatcccgtcccccgatctcatctcgccggcggcggcgatggcgggcaacgataattggatcaacagctacctcgacgccatcctagacgccggaaaggctgccatcggcggcgaccggccttccctcctcctccgcgagcgcggccatttctcccccgcgcgctacttcgtcgaggaggtcatcaccgggcgaacgccatgcggagcccgcaggagaggaacacgcggctcgagaacatgacgtggaggatctggaaccttgcaaggaagaagaaggagttcgagaaagaagaagcttgtcgtatgtcaaaacgccagccagaaactgagaaaacacgagctgatgctactgcagatatgtctgaagatctctttgaaggagaaaaaggagaagatgctggtgatccatctgtcgcatacggggacagcaccacggggagctcacctaaaacaagttcaattgacaagctatacatagtattgatcagtctacatggtctggtccgtggtgagaatatggagcttggccgagattcagatacgggtggccagatcaaatatgtggttgaacttgctaaagcattaagttcatccccaggagtttaccgggttgacctgctaacaagacaaatcttagcaccaaattttgatcgtagttatggtgaacctaaagaattattggtttcaacaagtggtaaaaattataaacaagaaaagggagaaaatagtggtgcatatataattcggataccgtttggtccaaaagacaagtatctagctaaagaacatctatggcctttcattcaagaatttgttgatggtgcactcagccatattgtgaggatgtcaaaagccataggtgaagaaactggccgtgggcatccagtatggcctgctgtgattcatggacattatgccagtgcaggaattgctgctgcgttactttctggagcacttaatcttcctatggcgttcacaggacattttcttgggaaagataaattggaagggcttctcaaacaagggagacaaactagggaacagataaatatgacatacaaaataatgtgccgaattgaggccgaggagctatctcttgacgcatctgagattgtcattgcaagcactaggcaagaaatagaagagcagtggaacttgtatgatggttttgaggttatacttgcaagaaagctccgagcaagagttaaacgtggtgctaattgttatggccgttttatgcctcgtatggttataattcctcctggagttgaatttggtcacattattcatgattttgatatggatggcgaagaagagaatccatgcccagcatctgaggatccacctatttggtctcagataatgcgcttctttacaaatcctaggaagcctatgattctagctgttgcccgcccttatcctgagaagaatattactacacttgtaaaggcatttggtgaatgcaggccattaagggagcttgccaatcttacactgataatgggaaaccgtgaagctatatctaagatgcacaatatgagtgctgctgtcttgacatcagtgcttacattgattgacgaatatgacctgtatggtcaagtggcataccccaagcatcataaacactcagaagttcctgacatttatcgtttagctgcaagaacaaagggggcttttgtaaatgtagcttacttcgaacaatttggagttactctgatagaggctgctatgaatggtttgcctataattgcgacaaaaaatggagcccctgttgaaattaatcaggtcctgaacaatggtctccttgttgatccgcacgatcagaatgccattgcggatgcactatataaacttctttctgataaacatctttggtcaaggtgcagagagaatggactgacaaatattcaccaattctcgtggcctgaacattgcaagaattacctgtcaaggatactaactcttggcccaaggtctcctgctattggtaacagagaggagcggagtaatacacctatttcaggaaggaagaatatcattgttatttctgtagactctgttaacaaggaaggtctagtcaggataatcagaaatgctattgaggtcatacataaagaaaacatgtcgggttcaactggttttgtgctgtcaacttccttaacgatatcagaaatacattcactgctactatctggaggcatgcttcccactgattttgatgctttcatctgcaatagtgggagtaacatttactatccttcacattccggagaaacgtcaaacaactccaagattacatttgcattagatcaaaatcaccagtcacatattgagtatcgttggggaggagaaggcctaaggaaatatcttgtgaagtgggccacttcagtggtagaaagaaagggaagaacagagagacaaattatttttgaagatccagagcactcttcggcgtattgtcttgcatttagagtggttaatcccaatcatcttcctcctttaaaggagttgaggaagttgatgagaatccaatctctccgttgcaatgcattatataaccacagcgctaccagattatctgtagtccctatccacgcatcacgctctcaggccctaaggtacctgtgtatacgattggggatagaagtgccaaatgttgcagtcctcgtgggtgaaagcggcgattcagattacgaggaactgctggggggtctccataggaccgttatcctaaagggcgagttcaacatcgccgcaaacaggatccacacggtgaggagataccccctgcaggatgtcgtcgccctcgatagctcaaacatcatcggtgtcgacggctacaccacggatgatctgaggtctgccctgcagcagatgggtatactggcacggtaacaccttccggagcttccgtttccactaccaggtcaacgaagagaaacgagaaaacagacagaatggtgacgaaacaagtgcgaccgtttccatgctcgatgggaatgccgattttgcattgtaggctgtagcggttgtgttcgtgtgtgtgtgcccgcgcgcggtggtggcctattcttgtgctgtgaataactgcccctcctttgtttgtgatatgccaaaattttgaagtgagtacagtacaaccaaacatgttgatgatggaaaaacgaatggagaaaggggaaaaacaaacaaaaatggtttgggacggcagtgttccatggtatggtacgctgttgttgaatgcctgggaaatgggtgattccgctgttcgtcactcgtcccatctggctagtttgttctatgccttctgaaacatgtatcatctggctagttacctggggacatcagatgttctccctgttttgacttgcgattgttgtttcgtaggaagcac

SEQ ID NO: 16121 - DNA, 2576 bp, Zea Mays
ctttcgtgaagatgcattcatctggaagctagagctctccttgggagactggaatatcagagaggcaatgtggaagctgctctgcgagtatttgatggaattgaccttcaagctgctattcagcgcttccaaccttctctttctgataaaccactctcgaagcgaagtaacaaattacgggcagattcatcaaattcaggatcacagcatgctgctagccttgttcttgaagccatttacttgaaatcaatgtctcttcaaaagttgggcaaggcaatggaggctgctaaacagtgtaaaagtgtccttgatgctgttgaaagtatcttccaatgtggcatacctggtgttatggttgaacaaaaactgcaggaaactgtcagtaaatctgttgagcttctcccagaactttggaagcaagctggggcctatcaagaagcacttgcttcataccgccgtgctcttctaagtcaatggaatcttgatgatgaatgctgcacaaggattcagaagaggtttgctgttttcttgttgtacggtggtgtagaggcggcccctccaagcttggcttcacaaactgaaggttcatttgttcctaggaataacttagaagaggcaatcctactgctcatgatactattgaagaagtggttccttgggaagacacactgggatccatctgttatggagcatttaacctttgcattgtcactgtgtggccagacatctattattgccaagcacctcgaagaggttttacctggaatataccctcgaaccgagagatggtatagtctagcgttgtgctattttgcagtttctcataatgaagctgcattaaacttgttgaggaaatctttgaataagaatgagagtccaaatgacataatggccctcctgttagctgctaagatatgtagttccaataatcttctttcttctgagggtgtagagtatgcaaagagagcagtcagagatgccgaatcatcagatgggcatttaaagagtgtggccctccatgttctggggagttgcctgtccaggaagtctaaggttgcttcatctgatcaccaaaggtctgtcttgcaggctgaggctttgaagtcactcaatgaggcaatttctcttgaccgtcacaacccagaattattatttgaattggggatagagtatgctgagcagcggaatatgcatgctgccttgaaatgtgcaaaggagttcattgatgtcactggtggatctgtctctaaaggctggaggttgctattgttggttctttctgcacaacaaaggtattcagaagctgaagttgtaactgatgctgcattagatgagaccgcgaagtgggaacaagggccattgcttagaataagggctaaactgaaggttgctcaagcattgcctatggaagcagttgaagcatatcgcacccttcttgctcttgttcaggcacaacggaaggcttatggatctgtcaaaaatggcacagaggataatgaggataaagtgagggaagttgaagtttggcatggtcttgccaacctgtactctagtctttcctattggagagatgcagaaatttgcttacagaaggctaaagccctcaaaacatactctgcgacaacccttcatgtagaaggaaacaaacacgaactgcatgagaagatacaggacgcggtagctgcatacttcaatgccatctctatggaggttgagcacgtcccatccaaggtctctatcggtgctctcctctctaaacaagggcccaagttcctaccagtggcgaggtgtttcctctccgatgccctgaggcttgaacccacgaaccgcatggcctggttctaccttggggaggttcacaagcaggacggcaggctagctgatgccgccgactgcttccaggcggcctcaatgctcgaggactcggatcctgtagaaagtttcagatcactctgatgggtcatctgcaacagcgtgaggttccctttttttgtcggccggttttctcttcgtcttcccccattttcgaggcacagctgggcagagaccaggtgcccagctatctgtaacttgttgtatctacagttgtcagtgtgtaccaacagatgctgtaattggttgttgagtggcctacatgattcttcaaccgatagctccatcaggatcagagtggcactggaacagctatgcaatcatatgagccattattattacgtgtattacacagtatgaatatatgattataatgagtcatcagctaacttaaaactaccgttgctgatattgtaatgttttgtaatttttattcctgttttgtttatcaattaccagacgtgctgaacagtgagcacaccacgggtaaatgaaatggatgttatacaccgccagaaagagttctttcttcactaattaaggaaatgtctggcttctagggctaatttttaatctctacattttattacattttagtcaataagggctagtttggaaactacattttcttaaggaatttctatttttctaaagtaaaatcaactggtttttcttaaaaaatggaaaccccttatgaaaataga

SEQ ID NO: 16122 - DNA, 1952 bp, Zea Mays
gccaaagtgacgggagatggcgttatggcactaacagcgctgaatctagcacatttgctgctggtatcgcactagaagcattggcgggcgttgtttcactggcagatgcagaggttgatccatccatgatggtagtggttagaaatgacatcgttaagctgtttgacaccatcaagagttacgatgatgggaccttctactttgatgaaaagcatgttgatgctaccgaatacaagggtcctataatgacttctgcttcggtggtacgtggtgtcacctcttttgcagctgttgcttctggaaaattggatatccctggtgacaagatacttggcttggcaaaattcttccttggtattgggctcccaggtagctcaaaggattgctttaatcagattgactctttgtcagtcctggaggacaatagggtcttcgttcctttgatactctcacttcctaccaaagtattctcattgtctttgaaagatcagcttaaggttgaagttaccacagtgtttggatctgcagcacctttactcaaagtgaatcttgtgcaagtgttgggaactgactctaaagtcatcaccaatgggaacagggagcttcaatatgaccttgacaaaaatgtccattacttggacattgctccattggaaatagatgttgggaaatactcggtagtttttgagatttcacttcaggaacaagagcgtgagactgtttatgctactggagggaggaacactgaaagtgtatttgtcacaggactgatcaaagttgataaggcagaaataggaatatccgacaatgatgctgggaccgtggagtctgtccaaaagttagatcttctgaaagatacaaaggtgtctctttctgcaaaccacctacagaagctgcgtttatcttttcaattaactactccgcttgggctcacatttaaacctcaccaggtgttcttgaagttgaagcatgagagtaaggttgaacacttatttgtggtacctggctctgcaaggcaattcaaaattgttctcgacttcctagggttggtggagaaattttactacctctctggaagatatgaccttgagcttgccgttggtgatgctgcaatggaaaattcatttctacgacctcttggccatttggagttggacctaccagaggccccagaaaaagccccacgtcctcctgcacaagctgttgacccattctcaaaatttgggccgaaggcagagatattgcatatattccgtgccccagagaagaggccacccaaggaactctcgctcgcattcacgggtctcacgcttctgccttttatcggattcttgattgggctcgtgcgtcttggagtgaacgtgaagaacttcccgtccttgccgggaccggccgcatttgcctcagttttccatgctggaataggagcagtcttgctgctctacgttctcttctggctcaagttggaccttttcacaactctgaagtaccttggcttcctcggcatcttcctcgtgtttgtgggccataggaccctgtcctacctttcctcggcgtcagcaaaacagaagacggcatgagtggacagtgcaagcagagctttcccgatcatcaattcgttttttgaggtggccattccaggccactgggtgtctttgcttggtactctgaccgcaccctagtttttctttagctaacatgcattttgagggaggactcggtttatttcagttgtctttgacgaatactgatactaggacaagtaacaggacctcacatcacagtttctgaatagaatggatgtttaatcatagcatttatatgatcattcgatatacatcatccttaatcgaactgaaacgttatatgtacacagaaatgatgcaaagttaaagaatttttgagcgtgtttggatgcacgccacagccggccggcacaaaaaataatggag

SEQ ID NO: 16123 - DNA, 2486 bp, Zea Mays
agatttggaagcgccaccactcaccgtgccggccccaaccccaagcggagcccccaacgcatccattcctctctcgtcttccctttcccctccggcgagccccttgttctcgccctccgttctacaaggttcgctcgttcatgttctaggtgctggacaccttttgcttcgcatggctcgggcgctgcacagtccctgtttcgtggctccgctgctgtggctgacgttgttactggttgccgtgtcaccggggggtgcgttctacttgcctggcagctacatgcacacatactcccaaggcgaggtgatacacgccaaggtgaactctctcacgtccatcgagacggagatgcctttcaactactacagcctaccatactgccgcccccagggcggcatcaagaagagtgccgagaatctgggtgagcttctgatgggtgaccagattgacaactccccctaccggttccatgtgaatgttaacgagtctgtcttcctctgcaccacaaaagggctcaatgagaatgacgccaagctccttaagcagcgcacccgtgatctttaccaggtcaacatgatgctagacaatctgcctgtcatgcgtttcactaagcagaacgatgtcacggtacagtggactggttttcctgttggttactctccacccggtgcctcggatgattatatcatcaaccacttgaagtttaaggtcttggtccatgagtatgagggtagaaatgtggaaatcattggcaccggagaagaaggatctgctgtcatctcagagacggacaagaatgggatgtctgggtatcagattgttggatttcaggttgtgccttgcagcgtgaagcgtaacgccgatgatttttctaagcttaatatgtacgacaacattgatccggtggactgccccgtggagcttaagaagtctcaagtgatcaggcaacaggagaggatcacgttcacttatgatgttgagtttgtcaagagcgacatcaggtggccatctaggtgggatgtctatctgaagatggaggctggcgccaaggtccactggttctctataatgaactccctcttggtgatcttgttcttggctggaattgtctttgttatattcctcagaactgttaggagggacctgactaggtatgaagagcttgacaaggaagcgcaagctcagatgaatgaggaactatctggttggaagctcgtcgtcggtgatgtattcagagagccatcttgctccaagctgttatgcataatgattggtgatggggttcagattttgggcatggcagtcgtaacaatcgtttttgccacacttgggttcatgtctccagcctcaagaggaatgctccttactgggatgattgttctatatcttttccttggtattgcaagtgggtatgtcagtgttcggttctggaggactattaagggcacatccgaaggatggagatcagtgtcctggttgactgcttgctttttccctggtgtcatgtttacggtccttactgtcctaaactttgtgttgtggaaaagtgagagcactggggctttacctatctcactatttttcaccctcctggctctatggttctgcatttctgtgccattgacgcttgttggtggttttcttggtacaagagcggagaaaatagaattcccggttcggaccaatcagatccccagagagatcccagcaaggaagtatccatcgtggcttcttgtccttggtgcaggaacactgccatttggtaccctgtttattgagctcttcttcattctatcgagcatatggcttggaaggttctactatgtgtttggtttcctgctgattgtcctgctgctgcttgttgctgtctgtgccgaggtgtccgttgtactaacatacatgaacctctgtgtggaggactggaggtggtggtggaaggctttcttcgcctctggttctgtcgctgtctacgtgtttctctactccatcaactacttggtctttgacctcagaagcctgagcgggcctgtctctgcaatgctttatgtttgctactcattcctcatggcatttgcaatcatgctgacaaccggaaccattggctttttgacatcattcgcctttgtgcactacctcttctcatccgtaaagattgattgatgtattccacagtctgcagacagattcgttcacagctgtgcgtacctgtgatgggcgtagtttacgagatgaggtggttttgggtaaactagtgacgtgtttagttccaagtaggagtgcagtatctgtttccagttccaattggtcagagttgtaagtgctccatctgatctagatactacagcctggctttgttagagtttaggagcaatggtactactgtgtttgttcggcaaattgtattggagtggaaatggcgtgcttattacaggctttgaatcatctctcagttgtatgttaccagctctgtgcacaaaatacggct

SEQ ID NO: 16124 - DNA, 1062 bp, Zea Mays
gttgggggaacatatgatctatccttgtgcttttacaatagagaggaacttaattttttgcatgtcgatgctcttgaggttctactccagggactctctggtgtcccgaaagagcgttttagggtgcatgagctctgccttaaaagtgggcccaatctaggtgttgtcccatcggaggttcgtttgttgtgtgacttagctcagcccacaccatcctggtaaccgagacaagctgctgaaagtctaccttttgttatgtttatcattaattgtgacaagattgtaggaccataagacatgttggtggtgccatgagaggtgctggtgcggagcaaatctcagttctggttcgtacagttgtggagagcaaagctagcaagaacgtcttgcactacttctacaccctagggtacaagctagaccatgaactcttgaagagcggttttgcatttcgtttccaccgaggtgcccaaatcactgtcactgttacatctgctaacaagatgtcaaggctccatgcaaccgatgaagctacgccagtcactcctgccatacagctagtggaaatcacagctcctgctgctgctgataattacaatgatgttgtttcagctgtcactgcgttctgtgaatatcttgccccgctgctgcatctgtcaaaaccaggacactcgacaggaatcgttccaacagcagccgctgctgctgcctcactcatgtcaagtggcggtggcaaaaccttgtaatgctgctaggacagccaaagtccgttcttgctgctaggacagccaaagtccgttctttgagatgagtgggcgtggctaatgaggtggccttcttcgtgccgagcatttgagcagtcagttttgcctgctagtgttgtccatgtctgacacatcgttgtgccaaccttgctcttggtttgactggttgcatgattgctgatgggtaatgccctgccttgtagttgcagggtgtaacaatctagtattaccaatattaaaatttctcaaaaatccaaaccataatttcttttctcaaaaagaagtttatctcatgtgt

SEQ ID NO: 16125 - DNA, 2551 bp, Zea Mays
gccgccgtggtccgctgtcgcacacgccctcctgcccctctgctcccctcccagatcccgtgatccgctgccgtgatccgatgccgcacccgccatcaacgccctcctccccctctgctcccctcccagatctcgtgatccgctgcgaggccgccatcaacgccctcctccccctccgctcagctcccctcccaggatctcggcgcgctttcatcgccgccttgatggtccacggctgcacccacatacgacatcgcctgtccgcacgcaagcttctgcctgcgcccacctgtgtgcatagatgtgtgcccccgcccacctcttctgcgcccaatctttacccgtcgtccgcgccgctgttccatcctcgcacccacgcccgagatccacatgtgccgcaccccagccgtgctccggatgctgcaccgcccttccatcctccgcatgcagcaccatgttggccgccgccctgaaacctcgctaccacggagctgcaagcccccgcttccaaaccagcaccatgcagacttccaatttgttttttgtttggagcactgttgattttttctcgtttttttgagaacattacattgcccgtctttcactgttcaacttttcttaattaaccatttacatttaccaaaaacttattcaacttttcactgttcaagttcaatttgttttgtgcagtattgatctgttgtgcagtgtatactttgaggttcggttggccgatcttgcgatcgaataccaaaaacttgtgcggtactctgttgctgaataaaacttggatcaggttaccccaaccccaatggcatttaccgagccgatggaggcgaacctgctacgccaagtgctggactatccccccagtgctctgtccatgtccatccctccttcagcttcattgatggttgcactgctctactatactataagtgaattgagttaaagcattttttgttcgactactgtttggtgcatgcaacttaatatggctgatttttagtctttctattttagtttataaattgtcaatcacagggattaaaagagactaaaagtaaggtttcaggttctatttctatccatctttaattaagggctgaaacgatactgtcttgattcctaattcacctaatattcctagaccaagaacgactcgggttaatggtcagggatgccaaattgtttcagtaaaactaagcaagctcgtatgatgattatgtacctacttgagaacaaattgtctaaaacatatctgctactacacttcagtaaaacaattgatcacacacaagaagttcagatcagaaagcaggctgtcgctactcccgtcaggttctcggatggttcccgtcaagggctgaccatggagaagagcacagtggtggtcagtgtccctgttgttgtcatggccgagactgctgagaccgactacagctcgagcttctcgcacctttgcaggatgcagagtcccagaaagatgttgggaagggtgataaatcaagggataagggaactgctgagaagtttgcaatatatcagaagcatcgttcttcgttggcagacactgttcaattcaggaggccagctgctccaacttccagtgtgaatgctgatattgtgggaacatccactctgcagtctgcatctctaccgaaacaagaaccctcaacagctacatccaagagctatactttcagagaaggtgatagggtgcgttatatgggtccagctcagttatcctcattgtcacaaaggctcctctccttttgctggcttcgctgttggaagcgagacatcatgtggtgtggataacgtccttgcagagcacgtgaactcaaatttcactctaatgccagctagctgctacatagtgcacttctgtatattatgagaagagagtggctcttcactcccatcggattgacaaaaacacactcggacaaccagtgctggtattaatcgagatgtcgcatcaacaaacgctcatgcagagccagattctactcctacagtcctacgtctacacgagacgacacaagtgcatctataattgatcttttcttttcatctactattctcaacagacacagcagaactgcatgccagcagaggaatgcatatctagtggagataaactgtaatcggccgcctggatgacacgataggaccacgcgtaagaacaaactgggaccaaataataaaagacgaacggagaaaacgtgtcgttgcagatgcccaggttgtcgcactggctccgtcactgtctgatcgagtatctgcaaagtagggattaggtttgtcaccgttgactttacatgcgcctgcacattattctcaagtagtagtacttgtaatcacccctaggccctagtcaatgtgcacgagggaggccaacgtggcttcgcccttgctttaaaatctgactgttttttttcttcactttctcataagaacgtacttttcctgtatcagtcgcctagatagttattttaaacttttacaagaattacagcgggaggtggtgataacgattacagttaaa

SEQ ID NO: 16126 - DNA, 2323 bp, Zea Mays
aatagccaatatgttcagatgtctattcccgttcagcttgtagcagcttcctagtcctagggttagatttccaagcaccacgccacccgtacacggtttccagcagagcattccggaaggagggggcgcgatgtggcacgaggcgcggcggtcggagcggaaggtccacgacctcatggacgcggcccgccgccgggcgcagcgccgagccgtctacctcgcccgccgccgcggcgacccgcagcaggcgctccaggtctccggcacgcggtgccgcgttcaccgcgacgacgccctgtaccaggccaccgaggaccagcagggattgatacaatggaatggaaagcaagatgttttgattgacagatttgatggccgtgcattgcttgattttatccgagactcgagctctcgcccttttcgagtccaagggaaatctgaagaagaggaagagttagaggaatttgttaattttgaacgttaccgggatttgattaagcatcgtcgcagaggattttctgatgaggccggtttgcagcatgttgtgcaagagttggaggcaaaagctcttcttccttttagctttgacaaaccacaatcctcacagcctcctgctagcaaaggcgcatattcacaggttggatactcatacaagggagacggaaatgaggaatctgaagacctagacagtgatgacgacgacgaagaggaagaagttgatgatgatgacaaggacttcagtagtgatgatagcagtgatgaacgaatggaaagtatagcgaaagaatttgggataaaaagatataactggcttgtttacatggataaaaaaaacaaagaacaggagaagaggcagaaagaaattgttaaaggcgacccatctataaaaaaaatgagccgtagagaaagaaggaaggcttctcagattgagcgggaaaaggagcgggaggcagcacgttctgttggaagggtatcttatcgtgatccttatagggaacaaaggagaagcccatcatatgaagcatattcaaggggcagaagatcaagatcgagatcaagatctcgttcaccatcccattctaggcgtcatggccgtgggatacatgctgaaagcaattattggagcaagcaaaaggctcctagggttgaatatattactgaatttggaggttccgatgataccagtgaaccaaaagtttcagggatctctccgccttcgtctccaatacgaattgacatacctaaccggtcgggaaactcgacttttaatatttgcaaatatacattgggcgaacttttctctgatggagcttattacctcaatcctggtgttctgaagatgactatgtcaggaataggatagatcaagacatggtcatgatggtatctatggtgtaaaaaatagttgttttgtagataggcatgcattttatggttcgttttatttttgctaagcaggaagaagatttaacacacatatatctacagtcagctgtggagtttatgacctgtgcatctttgccatgtaaattattatggctataataccccatattttgcaggttgtctggtggtcaaattcttgaggcacttcacagtgatcctgcctcttctttgtctgtggaacaggaaagaactgcaaaacttttgaaaccttcccccagtacatcatcagcattagctaaactaagcaaggttgcttctgggggaactggtaaaactccccagactgaaaagaaagaaacaccacaagaaagacttaagaggataatgagcaaacagcttaacaagcaaattaaaaaggacacggctgctgagattgccaagaaacgagaacaggaacgacaaaggcaggaaaaacttgctgaagttggtcgatacaagcgtcgtagccgcagtagaagtcttagccgttccccaccaagaaggcggcgatatagcagaagccgtagtaggagcagaagcccaagaaggtaccgatcccgctcgctctccagttcccggtcgccctctcgctctccaaggtaccgaagcaggtcaagacactgaaaatatccaggcagccactaacaaagtgccttgccatgttgtagttaatttattttatagactttttcattcctgcagcgatgtgtactcatgagaagcctccgtttttgttttcttagtcctattatcgacagtgtgtgttccttgtgtttcagaaggtttattctctgttcctcatggcttgcccctttcaagcaagcgtaattttagggcatgtttggccagaccagcttccaggccgaatttagtagtattgccaagcagttcttttatt

SEQ ID NO: 16127 - DNA, 2394 bp, Zea Mays
gtcaggaaattgcagcattttttcacaatgttcatggtgatagggtgaggtacattggtcctattcaatcatcagggtttatgtttgagggacagagagctcctgattatggttcacagggtgaagtgaggcttacttttgcggaaaatggatcctcaaaagttggagtcagatttgataaacagatccccgggggcattgatcttggaggcagttgtgagcttgatcatggcctattctgttcagttgattctctatgcctcgatggtccaggatgggaagatagagccaaacattcatttgatgttgtgtttgagtttgcctctgaagaaagtcaacaggtgcctgtaatcctatttctgaaggatgttgagaaaatatgtggaaataattacacctaccatggtctaaagaataagcttgaaagtttcccagctggagtttttattgttgggtcccagattcagacagatgctcggaaagataagtcaaacaatgggtctccttggctcaagttctcatatagccaagcagcaatacttgaccttgcatttcaggatagctttggtcgggcgggtgaaaaaaataaagaagcactcaagatgtcaaagcatataactaaacttttcccaaataaagtgacaattgaatcacctgaggatgaaacggaactctcccagtggaaacagctattgggtcgtgacattgaaattcttaaggcaaaggctaattttttgaaaatacaatcttttctaacccgccatggtatggaatgtactgatttagaatcagtggtttgtgttaaagatcgtaatctgacaagcgaatgtgtcgataaaatagttggttatgctttgagttatcaactcaaggatcaccctattcaaactcctggaaaggatgcgagagttgtcctttccggtgtaagccttaagtatggaattgatttgttggaaagtatccaaagtggccctaagaagaagagcacaaagaagtcactcaaggatgttgtcacagagaatgaatttgaaaaacgtcttcttccagatgtcatccctccagatgagattggtgttacctttgaggatattggagcattagaaaatgtcaaggaaactttgcaggagttagttatgcttcctttgcaaaggcctgagttgttctccaaaggacaacttatgaagccatgtaaagggatattgctttttggtccacctggcaccggtaagaccatgcttgccaaagctgttgcaacagaggctggtgctaattttatcaacatatcaatgtcaagcattgcttcaaagtggtttggagagggagaaaaatatgtgaaagctgttttttcacttgcaagcaaaatttctcctagtgttattttcgtggatgaggttgatggcatgctgggtagacgtgagaatccaggggaacatgaggccatgcgcaagatgaaaaatgagtttatggtgaactgggatggtcttaggacaaaagacaaagaacgtgttctggtacttgctgccactaataggccatttgatcttgacgaggctgttgtcaggaggctccccaggaggttgatggttaacttgccagatgcacccaacagaaagaagattcttagcgtgatactagcaaaagaagatttggcagatgatgtagatctggaggcgttagcaaacctgacagatgggtattcaggcagtgatctgaaggtaggtattctattaagatatttctttcttatcctatttcctcgcttctttgtgttgttggcgacacctatttttgcagaacctgtgtataactgcagcacatcgtcccataagggaaattcttgaaagagagaagaaggagagaaccttagctgaagcagaaaataggccagccccacctcagtgctgtagcggcgacgttcgctccctaaagtttagtgatttcaagcacgcacatgagcaggtttgtgcgagtatatcatcggattcaaaaaatatgaatgagctcgttcaatggaacgacctctacggagaaggcgggtcgaggcacaagacaccgttgagctactttatgtagcctaacgtttttttagatgatttgtacatacagaagcagcctttgtatagtccgttggatcttgcgtcctggtatagtctgtgaaaggtctcgacggagattcatttggatttatttaatagtctggatgatatggtaatgtttgtgtgggtgtgtgcgtgacagagaaggttttacccttccctctgcactaggtatggcaaagaggaaattctccacaggtcctacgaacgcttgtggtggccatttcttttccatcttcgttattcgtggggataaatcctatcggaattccaattataattagatagtacttgattt

SEQ ID NO: 16128 - DNA, 1849 bp, Zea Mays
gtactaggtaggtctttctccttgcaatctttccgtttcttcgtttgattccctcccgccgccgccgctggagacgcccaaccacgacagcgccccagggttcgtcctcccgctggaatagtaagtgaccggagaaaagcagcacaagagagatgtggtatctatgcgtcttctaccacaggctcctggactaccggcgaccggaggtggagtccctcgccgagctctttgccggcccaggcgcccgtgaatccgtcgagtggcgcatgccggagaaccaccacgtagactcccccttccacctcgttcgcctccctggagacgagcgcctcgccgctcaggtcgccaaccgcagcttgttggtgaagggggtctacgagctctggggctatggcactacctacgaggagctggagaagtcggtcagggagtaccccgacgagaggaagcttccgttcctggtcccggaaagcagcttcaagatcgttatcgacagcttcggcaaggtgatcagctcccaagagcagaacgagatcatacagagcctcacttacataccattcaagggacgtgttaatttgaagaagcctgatcacagattctttgtcatggagaccgatgactatgggtcgaacaatggtctcccaccggttgtcaagaggtcgatattctttggccgggaggttggagcagctgataggcatctcctgccaacataccagctcaagagtaggaagtacattggccccactgcaatggatgctgaaatggctttcctcatggccaatcagggtctggcctcgcctgggaagcttgtctatgacccttttgttgggaccgggagcattttggttgcagctgcacattttggagctatgacgatgggtgcagatattgatataagggttgtacgggatggtcgtggccccaattgcaatgtttggagcaactttgagcagtataagttaccagagcctttgtgtttgctaagggcagacaacaatctcccaccctggcgtcctggattgaaggagatgttcgatgcaataatttgtgacccaccatatggagtccgggccggtggccggaagtctggtggtcggaagctcataaaaggcgtcaaaggcccttacacagtgcctgatgagaaacgggacaatcacatcccatcaaccgccccatatagcctcgcagagtgcgtccatgacctcctccaccttgccgcaaggatggtagtcatgggtggcaggctcgtcttcttctaccctgtactgcgagatcctgagctttcggtacagccgggttctgctgaccatggtgaaggttgcaccttacaccgaggagatcgagaagttggccgcagagcggcaccgggagttcagggagaaccaccagaagtggatggaggagggcaacctccattccgccgtgttcgagccagcccaggatgggaagcctgatagagactccaagcccaaatacagaggcaagtatgtgtagcagcgcagatactaacttgttgaatttagtggaaacacatttttggtggtttcctgttctgcatcctgtaccaaattttatgagctagtgtgttggcaggcgctgcgagatgtaccactgttccagagtaccattcaaatcttgtcagtccatttgatggatgaggaagtgtaattgcagcttaattgactgaacttatttttttggttaacctgcctttgacacggctgttgaaattggcgctgcttctgttactgaattatatgaaaagaaataattcagtaacagaagcagcaccaatttagtactaagggaaaaaacaagtaaaatacatcagtggtgtttgaat

SEQ ID NO: 16129 - DNA, 4964 bp, Zea Mays
tgggcttcaagagaaaatttcagcatcagtgatcagttctagtagtggcatcacacctaccattgttactgacaactttgatatttctgaggataaaaatggctgttcaataggtgtttcttctgttgattctcctgctttactagctgagaaggatttgaatatgtccacagtgaatactgaggagccattcaaggaaggggttaagtccgctttaggagatcaacacaatggtatttcttctggctctggacaaggaggggaaatgccagctgtcccaatggactcaaagattgccgtgtatagtggtactgtttctgctacagaaagggagaaattcaaggagcagcctaattctttgggttgtttgaccacaggagaaactcaggataaatcagatagtatggatccaaccacagcatctacattgggtggaaaggtggctgtgaagattgtaaaaactccactgaatgcaagtgatgatttgaatgcacatatgcaagatatagtgttaaatcaaggtacagattgtagttctggtactgtgccatctcaaggaaacgaaggctcaagcttattggaacctggtaatggtgatggaatctgcactggggttacatgtgggtccccttcagtgattagttgtgctgaatcctgtccccaagaaggtggacatggcagcactgctttacttcatcacacactatgtgggcaatctgaggatcctgaagatcatggggcctcagttgatggtatccagagctcaaaacaatgcaataccagaaatatagaatctgcacctggttctcaggagactagtgcagcaggaggtgatagaagcttctcatttgaggtgggagctccaccaaatgttgctgagaaagcccatagccctgtttggagccctttccctaaatacattacttctcagagtagcaagaaaatactcaagctggaggttctttgaaggatactagtgatgatagtaagaaaatatctactgtggagtctggtaaagaacagctatcagaaaggaaagtaactgaaagttctgggggtggcctctcagacaactgcaatatagacgacatcattaagggtagaagttcaccgccgcggcagcatccaatccctgagtgttctgtttcttctgcagatttagtgaattttccattcacagatccacagcatttgcagctacgtgcacagatatttgtttatggagctcttattcaaggaacaccaccaggagaggcttacatggtggcggcttttggagaacctgtaggtggtggcaaacctacatgggaggctgcttggcgagctgcttttgaaagatttcagtataaaaaatcacctcatgtcagtttagagactcccacaagttcacttataggtagttctgtgcctgagaaagctagcaaaggtacagcaattacaactgtgccagctagcaaaaaagttggtaaaactgtggcgccagcacatcctgctgtaaccctacactctccaacttctgattttccttttggtagttctacatttaatctgcaacgaggcactcatctggattttagccaggcagtatcaccatttgcgtataattcacacatgagacatccgtctcctggtgttgccccctggtatacgcagagccctggtccacgccctgcagcctggttaattccaccacaaaacttaatatttgattcatcaatgcaaccggttattcctacaaatgaaactgcgaagggtgcatcatccaaaaacatatccgtttcacatactgtttcatctggtgttcttcccagcctggcaccttctattgtttcttctccaatagcagttgtgagtgatggaaaacagaaggctgcttctagctctaagcgtggcacaacatcacaaaagtcaagaaaaaaaaagaaagcttcagcaagttcagaacagcaacctgtaattgcttctcctcatctcaaaatgaacatgccatcttttactcctgccattaagcacacagcaggattgaccttatgcggtagcaagcctgttcctaacatgggccagattgcctctgaacataactaccagatcactggtggtatggatagtgatcaaagaatcatcttttcagaacagatccgtggtgcagtagaacaatcagctgcacaagctaaaagtgcaagcattgactcagtggaggcagttaagcacaaggagggcatatggagccatctatctacaatctcaaggaataagttacctccaaaagttgaagagaaacttacctcagttgcagctgctgctgaagcagcagtttctgttgcaaaggcagctgcagaagctgccaagatggcgtcagaggctgcattgcaggcaaaaatgatggcagatgaagctcttagctcttctatatctgtaatgtccatgcatcacgaagctgatcaatataatgtcattagcagtccgcctatcttgtcaagttcaacgccagcatcatctctgaaaaccaagaacaagagtcatgccccaggttccatcatttctgtggcacgggaggctgctagaaagagggttgaagaggcatctgcagctgcaaaacgtgctgaaaacttggatgccatattgaaagctgcagagcttgctgcggaagctgtgttcagggcaggaaccattattggaatgggagaaccactaccttttaccctaagagagcttttggaagctgggccgaatggctactggaagtctgcgagtgcgagaaataaatctggaagttgtaatgataatccagtaacagaaacattggaggtagatgcacctgctaactttaacaaatctggcagaaagcgcggtcggaaacctaaatatgatcaagcactaccaaattcggagccatcttcaagctgcaaagaattacagtcatatggaatacactcaggagtaggacatggagttgttgaagatgttcccattactgtgtcacctaatggtaacaatgttacatcaccaataaacattatctggaatggcattgaaaagggatctgcagttgaggttttatctgacaaaggtgggtttggagtagcttggttttctgctaaggttattgatataaatggaaataatgtttttgtcaactatgacaaccacaatggatctggtcctcatgaagaatgggtgccattgcgacaagagggggataagccgcctcagatacgtcttgcgcaccctgctaccctctcaaaattcaaaactaggaaacgactcagggaaacagcaggaagttgtttatgggttatcggagatcatgtagacgcttgggtcaacaatagctgttggcgagagggagttatttctcagaattatgagactgatgagacgaaatatgatgtacatttttcagttggaggtggtggtgagtccttagtagttgatgcttggagccttcgtccatcgcgtgtttggaaagatggtcaatgggtagagtggtcccatgcaagagaaaggaaatccaaatctaataagggcgattcacctcctgagaaacgccaaagaatcgacttgcttcaaactggtggcaatctatctgttcttggcgaagtggggggttcttcgaaggacaataatataaacaatgcaaaaaacccggaggaattaaagccattgtctttgtctcagggggaaattgttttcaacattgggaaaagtgtagttgagaataaatctgattctcttgcattcagacgtcctggactacaaaaagaaggatcaaaggtcgtctatggtgttccaaaacatggaaagaagaagaagtttatggaagtaagcaaacattatgatgcaggccaatctgacaagatttctgagggcaattcatctaacagattcgtgaaacatctgatgccacaattgccaaggccacgtgaaaatgcttccaaagttgaccctattagaggaaggagagtaggtgaaacaaggtctagattacctaaacctacgaagtcccacaatgttggagctagcagtgttcctggaaaggattccttgcctatgcaaatgcatgttccaaattctggtgtttctgaaaggagttctagttttgcaggaagttcgacaagcacttccaacaatgagaagcccacttcagaaaataataatccggtgcttggtgtgggccttagaactgaagtttcttctggtcctgaactgcaaactgcatctactgttcctagttccaagccaaatgtatccactactaatcgagctaaaaggaaatatgttcccactgtcagtaacacaaacagaggtatactaaaaacctctgaaaagtcgagttctgattctgctgagccccgaaggactacttctgattctgctgaacctagacgatctaacaggcgaattcaaccaacttcaaggttactagagggcttgcaaagttccctcgtaatctcgaaagttcctggcgagaaggttcataggagcaattacaaaagtgcatcctcaagagggagaactcaagctcatgggtgagtgaaggcaccacatagctcatagctgcttttggtgggatagctctcgtgtacatagctgtagccgtccagtatggaaggaggatagggttggagtaggaagtctttattggagcgcaaggattcagatgtattataaactagcttaagtgcattgtgttaaccttttcttttacttgctcgaattatacttttccgtgttgtagaatacctggaaatatccttttagtatgtgtggatacaccgggaaagaaattgggtgccgtttaaattcatccgataatttaacgtgagtctgaacgtcaatttgactcgctactatcgtttgatcatatcattccttttctaagtcgtctacctgcagttgcagaagctggatggtgctctgcttctgtgccgttgtgtagtgaatgcttgttgtttgatcgtttt

SEQ ID NO: 16130 - DNA, 2470 bp, Zea Mays
cagggggaagatggtgccctcataattggttagctcatttgtctgctgaccttgtaaggttccagttggtcatctggtattcatggttcatggcattggacagaggctggagaaagctaatcttgttgatgatgttgttgatttccgccgagtaactgctaacctagctgaaagatacttaacttcttatcaaagaagtacccagagggttctatttattccctgtcagtggaggaagggcttgaaactcagtggtgaaagtacggttgagaaactcactttggatggagttaaaggtcttcgagtcgcattaggtgccacagttcatgatgtcctatattatatgagtcctatctactgtcagcatattattgactcggtctctaaccagttgaacaagctgtacatgaaatttctgaagagaaatcctggttacagtggaaaggtttgcggttcaatagttctatgacccgttcacaatgttctttataatttgctgttatgctgataattagacaagaaatcttttgccttattctattttacaggtttcattgtatggccactcattaggaagtgttctgtcgtatgatatactttgtcatcaagaatcccttttggccccatttccaacagagtatctgaacatggaaacatctgatcgaagtcaaggagcaaagtcagccaatgaagttgctctgcatgattcaggtgcaaaggatcatgatacttatactctagggcattcttgtactggtaatgaaaacagtgccgttgatgaaggtagcaccagaactgacatgtcacatatggacagcattgtcccatcatgtgtgctcgaggattcattaaataacccagaaactggtgtgccacgtggggcagttgttgctgagcaaaatgaaaaagaaaataggattgagaatcatcagacggtgtatactgaggaaggaacaacttcaggtgtaagcacaaaagatgctgaagcatcacacatttcaagatctgctgaggatgtccatgaagaggtccttgacaaagaaaaaatgatcatttcactagaagaagaggtgaaacgtcttaaagctaaactagatcagcttgaacagcataagcatctagtgactgagagcaccagtggtgttgagtatcatggaggcaaaaatggcaatcatgccttgaactttggcgaacttttcactgcacaaggaagtataaaccagccctactcaccacaaatcaaatacacaaaactaaactttaaggttgacacattctttgctgttggatctcccctgggtgtcttcctttccctgcgtaatgtccgtattggtattggcaaagggcgagattattggaaagataagaacataattgaagagatgccatgctgccggcagatgttcaatatttttcatccttttgatcctgtagcatacagagttgaaccacttgtatgtgaagattatcaaaagaagcgtcctgtaattgttccctaccatagaggcggaaagaggatacatgttggagtgcaggagttcacagaagatatttctgcacgttctcaagccattgcctgtcaattgaagtcactgaaggtcaaagcagtagctgctttgctagcattgagcagaaatgacacagaagaggatggtgagagtgctaatgaggaaggaagatcgtatggttccattatgatggaaaggttgaccggctcaccagatggtcgaattgatcatgtgcttcaggagaaaacatttcagcattcatacctatctgctctgggagctcataccaactattggcgagatcatgacactgctctcttcattctcaaacatttgtatcgtgatatacctgaggatcctccaagcgatgtcgttgaaaggatgcatattaaactgttttatgagagagatccggttgaggaagaaacgcccgtgacattttcggaccatgcagcaattaaggagttctgcagaaaggtgagagcctactcaacaaaaatggaggatgatgccaactgctaagcctcttgatggtgtcatttcctgatggaaaccatgttacatccccacgttcctcgccaagaaggaagatgcaggcatgggaagggagaacgattccacaaaatcgtgatcccaggataagaatcctaagaaatgtagttccacgcttgacaccagaatcaggacacttgagaaacgttgtacagagtcggttccccatgttgcttcacttgttcccgtcgtcaatgcagtgctgtacagagaacgtcctgctgtacctttctgtatatgtaatcttgcgtgctgtgcatacagaatatgatggatttagtttcaaacgacagcttacagcgacaccaggctgaaacgaagggactcgtgagagaaaatccataataatttagagacattaataacacagaacacctagctttcaaatgttgtgatgtcacaaagcttcg

SEQ ID NO: 16131 - DNA, 792 bp, Zea Mays
gctgcatgtcattatatattataacttacaagaaggcaagagaaaacagaacagctgggagaaatctggcaaagcataaacacacaccttgagaagttcctctttctggagcatgttagatgggcagctccccattgattttgagttcttgtactggataaatatgtggaaattttgctccagttaagaaagtggcatgtaattttacaggtacgcctggaaaccctagccttgacaccttgatgagcatgctcagtgggcttggttcgggaggtggcataggtgttccaaatacttccaatgtgccaccggaggagctctatgccacacagcttactcagctccaagaaatgggtttcattgacactgcggagaacattcaagcactgctcgctaccgctgggaatgtacatgctgcggtggagcgtcttctcgggaaccttgggcagtagctaaaacgagcgagccacacaccgccagtaaatcttaaaatgtcgcgcatctgcaggagtgttcggcttaacgttcttcaagcccttgaatttgaagggggtggcgtccataatcccgaaaacaaaataatcaaaaagtcaggcagccattaacttttctcatacatggtggtcatgtctttgttttacagtgttgtatttgcaatttggattggtgtacatacatatcggtcggatattacctcatagaatgtatgtagttttgtgttttgaactgttgattcttgattcccaatcaatcaaatcaaactatctaatccaactgttggctttctcattc

SEQ ID NO: 16132 - DNA, 1133 bp, Zea Mays
cagccccgcatcgcaccctccctggccgccttctcttctccagcgtccgatctctcccactcgccttcctcaccgcagctctcccggctcggtcgcttcgccacctccgtcctccccccgcgctcggtcgctcgccacctgctctcccctccctccacgttgctcgcgcccgcgcttatataaggaggagctcatggcggacgctccggcgagccctgggggcggaggcgggagccacgagagcgggagccccaggggcggcggaggtggaggcggtggcagcgtcagggagcaggacaggttcctgcccatcgccaacatcagtcgcatcatgaagaaggccatcccggctaacgggaagatcgccaaggacgctaaggagaccgtgcaggagtgcgtctcggagttcatctccttcatcactagcgaggcgagtgacaagtgccagagggagaagcggaagaccatcaatggcgacgacctgctgtgggccatggccacgctggggtttgaggactatattgaacccctcaaggtgtacctgcagaagtacagagaggtgcagggtgatagtaagttaacttcaaaatccagcgatggctccattaaaaaggatgcccttggtcatgtgggagcaagtagctcagctgtacaagggatgggtcagcaaggaacatacaaccaaggaatgggttatatgcaacctcagtaccataacggagatatctcgaactaatgaagacatggaccttttctgcaacagctgctcttccccgaggcgggtttttggtcgcagttatttactaagtaagacaccttgcggtgaccattaaagagtaaccaatcaccctgggtaggtcaatttttatctgcaagaactgatgaggccgcttggtaggagtaaatcgcttttcctgggaacgattgttggttagcgccgctactgtatgtatattgagataccttaacgattggtcttttggctgccatttggttacatgtatttgtatttggaggcataagtatcgtgtaatttgtgttatgactagtgtattgactattgaattatgagaagagctgctttagttgtaagatcacatgacacatccaagaattcccaaaaaaatgttcgt

SEQ ID NO: 16133 - DNA, 928 bp, Zea Mays
gacacaaattactttatgattaactggtagactcatacaccaccgagaaagccctaaagaaagtaaaacgtttgccaacctcggttcctcagaaaattaatgtcactaatgtaactatggacggcaaaggtgatggtgaattggaaaagcaatctgtgcagatgcatagtgatgttcagcagataagcaaagggacccatattctaaaggagttacattaagatccctcaaaatttctgatttgccggatccaccaactatggtcaaggccagcagccgtgaggatgcccaaccaatgactgaatcatctaatgctgaggtgaacacatcaagtgctgtggctgctggagagtctgagtcccatgaaattggatcgccgaagagtctaaaagatgctatcaaaccaaaacataaaagaaagaagaagaaaagtgacaggagttagtttagttgcaagcctgtaattttgtatgccccagataaatcaacgacagtctacaacacctcaaactcctgattgattaggtttcatccggggtgccatacatgggttttttgtgtgttttcaatcgtgactggtgctagtagtgacaggcaaattttgtacaagctgtagaattgtattttaggaatggttcagttaagctttcagtcaactttgcagctagttctgtgatgcgtgatgtcccagcactcttacatttcattgtactgctcaccgttaatcttccattgtccaaacggtcgtaaggattgccatatttgttccaacagtcttcagttgtggtctactggtcttagcttgaaaacaacattaaatcttgtctttgctacttctttcagtctgttttcgtgaggagagtaaattaaaactgtgcataagtgtaagtttgaaccataatcgttggcttcaaacatatattcagac

SEQ ID NO: 16134 - DNA, 1653 bp, Zea Mays
cgcctgctcgcggctgctgctcgctgggcgcgcggctggccggctgctccccttccctggcgcccctcactggtgatcaacttgctattgggaaagaaactgcacgtcgtttgggaatgggtactaatatgtacccttcctctgctttactcagacagaataaggatgagtcaattgcttccttgccaattgatgaattgatcgagaaggctgatggctttgctggtgtctttccagaacacaagtatgagatcgtgaaaggcttgcaagcaagaaaacatatatgtggcatgactggggatggtgtaaatgatgccccagctttgaagaaggctgatattggtattgcagtagcagactctactgatgcaactcgtagtgcttctgacattgtcctaactgaacctggccttagtgtgattattagtgctgtgctgacgagtcgggcaattttccaaaggatgaagaattacacgatctatgctgtatcgattaccatccgtattgtgcttggttttatgcttcttgcgctgatatggaagtttgacttcccaccatttatggtcctgatcattgccatcctcaatgacggtaccattatgactatctcgaaggacagagtaaaaccatctccacaaccagacagttggaagttagctgagatttttgcaactggagtagttcttggtggttatttggccatgatgactgtcattttcttctgggctgcatacaagactgactttttcccgcggctgttccacgtcgaaagcctcgagaagaccgcccaggatgactttcagaagttcgcctctgccgtgtaccttcaagtcagcacggtcagtcaggcccttatcttcgtgacacggtcgcgcagctggtcgtttgtggagcgtcctgggttcttgctggtcttcgctttcttggtggctaagctgattgccactctgatcgctgtatatgccaactgggcgttcactgcgatcaagggcattggatggggctgggccggtgtcatctggctctataacatcgtcttctacttcccgctggacatcatcaagttcctcatccgctatgcgctgagtgggagggcatggaacctcgtccttgagcagaggattgcgttcacgagcaagaagaatttcggcacggaagaaagggagcgcaagtgggcgcatgcgcagaggactctccatgggctccagccgccagaagcatccatcttcgagaacaagacgacattcaatgagctgaaccagctcgcggaagaggcccgcaggagagccgagatggcgaggttgcgagaagtgagcaccctgaaggggaggatggagtcagtggtgaagcagaagggtctggacatctagaccatccagcagtcctacactgtgtgactgactgactgacgacgacggggtttatagaggtttcttcttatactatacaatctgtactaggtagcaataaggatcaaggaaggaacccctatatattggctgcggttcgcaggaaatgaatgatggtaatatttatgatgtcggtgtggtgcttctgtcgccaactctcgaccatactaccctcaactcacccccggcaccaccggcaggcattgatattcagagatgagatgatgacgacgacgaattcttt

SEQ ID NO: 16135 - DNA, 1120 bp, Zea Mays
tttataactgcctgatgaagtagaatccagaatacaaccaggaatttcagaagaagaaaagtgcagattattgcactgtgttgttgttggaggtggtccaacaggggtggaatttagtggtgaacttagtgattttattatacgagatgtcaaacaacgttattcacatgtgaaggattatattcatgtgaccctgattgaggcaaatgagatattgtcatcattcgatgttcggctcaggcaatatgctacaaagcaactaattaagtcaggtgttaggcttgtgcaaggaattgttaaggatgtgcagcccaacaaaataattcttgacaatggagaggaagttccttatggtttactggtatggtccaccggagttggtgcttcaccattcgttaagtcattgccatttcctaagtcacctggtggaaggatcggtgtcaatgagtggttacgtgtcccttctgttcatgatgtttatgccattggtgactgcagtggatttctcgagagcaccggcaaggaagttctccctgctttagctcaggttgctgaacgacaaggcaagtacctggcaagcctgctcaaccatgtcatgaaagctggaggagggcatgcaaactctgagactgaagcagatctgggtcgtccaccctttgtgtacaagcatctaggcagcatggcaactgttggaagatacaaagctctagtcgatctgaggcaaagcaaggagtcaagagggatatctcttgcaggatttgtgagctggttcatctggcgctcggcatatttaactcgtgttgttagctggaggaataggttctatgtggctatcaattggctgaccactctcttatttggccgggacataagcagaatctagagtgtctttgtatacgtacgaacaagcatataagtcgatgtagagttacacgccacggtcacttgcttgccacacacccctccgggggtccactcctaccactgtccctattagctgtgaatgtaattcacaggtgaattatgaataaatctgaggatactgcagttacttacatgtggtgtgaatgtataatactctgtcacttgtaccactgtccctaatagctgtgaatgtaat

SEQ ID NO: 16136 - DNA, 150 bp, Zea Mays
cgcaatggcaatgactatctaccaatggacatcgtggagctatctttcgatcatttgatagagaataaacctttgctgctaaaggatgtcaagttccaaaacgtacacgggcttaccagtgcttattgacctttgtttgttcaggacact

SEQ ID NO: 16137 - DNA, 2332 bp, Zea Mays
gctccctaccgcttgtccgtttcttcctctcccgaagtagcaacgtgggaggcaacctgagctgaaatattgcacatcatcacaaagcaagtctgtgttactaggagcaggatttggtcgacatgttactaggagcaatccttatctgctccaaaattccagtagcactacaatggcaagactgcaaaagtctgggcagtttcagcaacttgtcttggacccttcaagaaactatttgactaagacattctacaatgcaaacatgaagaggagagttctgtcgagggttgagtgttttgtgtcttcagatccaataaacaatggttggttgaaaccaaggaggtctgagaatttcactagcttggagagcgcatgtgtccagcgagaatacaaactaccagtcagaacacgtgctgactgtaaagcagagcagtatgaaataacaggatcacctttgagcccttctgatgctgatgctgttatgattggagacacaaatgagatttctccctggtggcaggagttcccaaagcgctggatgattgttctcttgtgcttctttgcgttccttctttgcaatatggaccgtgtcaatatgagcattgcaatccttccaatgtcgtcagagttcagctggagcccagcaaccgtcggtctaatccaatcatctttcttttggggttaccttcttacacagatacttggaggtatttgggctgataggtttggtggtaagctagtactagggtttggggttatatggtggtcaattgcgacagttcttacgccccttgcagccaagattggacttccatgcttactcaccatgcgtgccttcatggggataggcgagggcgttgccatgcctgctatgaacaacatcctttccaaatggatcccagtttcagagagaagcagatctcttgccttggtgtacagtggaatgtaccttgggtcagtcaccggcctggctttgtcacctctgttgattagcagatttggctggccttctgtcttttatgcatttggatcccttggaagcgtttggtttgcactgtggcaaagcaaagcacacagctctccagatgatgatccagagctaagtaaagctgaaaagaggcatatactgggtggcagccccttaaaagagcctgtcacttccataccatggaggttgattctatcaaaggctccagtgtgggctctcataatatcacatttttgccataactggggaacatttattctgttaacatggatgcccacatactacaatcaggttctgaagttcaatctaaccgagtccgggcttctctgtgtcttgccatggctgacaatggctgtcttcgcgaatattggtggatggattgctgatactcttgttcaaagagggatctcagttacaaacgttcgtaagatcatgcaatcaattggtttccttggaccagccttgttcttaacactgctgagcaaagttcgtactccagccatggctgtattatgtatggcatgcagtcagggtagcgatgctttttcacagtctggcctgtattcaaatcaccaagacattggaccacgttatgcgggggtacttctcggattgtcaaacactgctggcgtgcttgcaggagtttttggtactgcagccactggctacattcttcagaaaggttcttgggatagtgtgtttaaggtgtctgttgtgctgtacatagtaggaacggtggtgtggaatgtctttgcaactggagagaaagttctcgaataagctgtggacattcctatatgccaatatacgaaaattgtatgattttggtatacaaaggtaaatttaagaagagatacagctggaagaaaactccattttgtgcaagagatataccttcatctaatgtttgggctatcggaagaatgaaatcaaattagagtatcgtgtgaggtcaagaaggtactcatggaactggagaaacttcttgtacagaaagcaactgcaccaatggcacgtcagattttgcagctgtttcttgagaagtacaggcttctaccaagatcatcaatccacatatttttgttttgtttttaaaatacatggtagttaaatcgtgtttcaacttgcccttgattaaggcgctacagctactgccaactaaatgtagtattatgtgagctctttttcatcgagaattcctaattgtacctgcttcagataccttaaacgtctctgttccttgcgtcgttgctattatcgttttgtgtatgctgcataatgatattgcatggtgatggtgtcatttttttggcatcccggtgcctgaagaagagtagatttaat

SEQ ID NO: 16138 - DNA, 853 bp, Zea Mays
tgcgcagtgcaccgtggagatacttagttgaaaagatgaggctgatgctatcatgtccagattgaacattgatgattatcagaaagaaggcagtcaaccaacactcctgatcacatctgacatagtggtcgtccatgaagggattattagagaaaaaccaaccaccaaggaagaagcacggcaattcctgaaaggctattccggaggtcacgtgtcaactgttgggtctgttgttgtaactaatcttacaactgggaagagacttggaagtttggacaaagctgaggtttatttccacgatataccagatgaggtcatcaagagcttgatcgatgagggagtagtatttagggtcgcaggtggtttgctgcttgaacatccattgacgctgccgtttgtcgaagcagtggttggttctagtgacagtgtcatggggctgtcaaaggaggttgcaaacaagttaattcacgacgcactgtctacttagcgtagcaatttcagcactactgtttctgatcaaattcttactgcactcacctggagatgtgatcaagcagagagcatatctggggatacccatagtgattcatgtatttttaaacgttaaaccaagacaggcgcacctggcattgcaaattgtgatcaggttgtacttgccttctgtttcacttgaaggatacgttgatgcttcttttagtgggtcagttggtatgatttgtaatatactgatatacataatctcgtctctgatatgtgactgttcgttgcaattgttaaagaacacaacaaatgcatggatgaaaatggatccgatatgaacagctacgcggaataaaaagttggagatcatata

SEQ ID NO: 16139 - DNA, 289 bp, Zea Mays
ttggtctacacatccagggtctcatgaagatatgtcagtgctccttttggacagtattgttgacaaacatgcaatagatattgaaaatggttatctcaaaatggtcaaggagatgataactgccagcgctaagcctaccagcacaaaaagtgcaaacgagaagcattttctttatgacattgttgctaatggtcgtaatggtatagatgttgacaagtttgactacgttggccgtgactgcagagcatgtggtcttggctgtaatttccagtattggagccctgcttga

SEQ ID NO: 16140 - DNA, 299 bp, Zea Mays
tcggtgcccctggattcaaatcgaccggtcggctacaaaaccaagcggcgttgactggaatttgacctcctggtaggagattaccctaccaaattgggcccgcagagttccccgcgattcggcagaggaggaaccctaggaatggacgaggaggtagagaagatggattcgcgctcgcagcgtgggcgttggcggcggggggaggggcgcgtgagcgtgacagcgtgatccccagccgtggagcgtgtggtgtgaaactgggaagatccgccggcgcccggctgctgtgcgcgaaaatt

SEQ ID NO: 16141 - DNA, 1895 bp, Zea Mays
tgctgattccttctggctctgtagctgtcgctcatgttgtacagaaagccaaagagaggctgctttgttgctagggcaatttgcttcagccgactcagattgcaaggtccatattgtgcaaaggggtgcagtccgtccactaattgaaatgctacagtcggctgatgtccaactccgggagatgtctgcttttgcactcggcaggcttgcccaggacacacataaccaagcaggtattgcatataatggtggcttggtgcctttgtttaaactccttgactcaaaaaatggatctctgcaacataatgctgcatttgccctttatggagttgcagataatgaggactatgtatctgacttcattaaagtaggaggtgtccaaaagttgcaagatggggaatttattgtgcaggcaacaaaggactgtgtggcaaaaacattgaaaaggttagaggagaagataaatggacgagtgttgaaacacttgctttatttgatgcgagtaggagagcaatctgtgcaaaggcgtgttgctctggctctcgcacacctttgtgctcctgaagatcaaagggcaatttttattgataataatggtctcgacttgcttcttgatcttctgatttccatgagcccaaaacatcaacaagatggctcagcagcattatacaaattggccaacaaagctgcagcactttctcccatggatgctgcccctccatctccaacacctcaggtttatcttggtgagcaatacgtgaatagttcaacactttcagatgttactttcttggtagaaggaaagcgcttttatgcacacagaattgctttgcttgcttcttcggatgcatttcgtgcaatgtttgatggcgggtatagggaaaaggatgcaagagacattgaaattccaaatatcagatgggaggtctttgaactcatgatgagatttatctatacagggtcagtgcagattaacagtgaaatttcacaggatcttcttagagctgctgatcagtatctcttagaaggactcaaacgcttatgtgaatatactattgcgaaggatgtgaatctagataatgtatctgacatgtatgacttgtccgaagcctttcatgccgtgtcactgagacatacatgcatcttgtacattctggaacattttaacaagatctgcaccagagccggagatccgcaattttctaaccaaggcactgaattcatcaagaagtccaagtccaagcgacaggaactcgcagacttgatgagtcccaattcattggcaccgacgccgtcatctgaccaaagttgctggagatcctgtacagtaaaatttctggcgctgagcgttcaatggtatctattttgggtacatggtggcgcggtccttgaaattaacatcagcaatgtaacaaaattttctaagatctagttgaggataaggataaggagaacatatctcgtactcatgcatcgaccagcttacactgggataggctatagttggatggtcctggccgtaattcgtcggtctcagctttgattgagtttagtgttgtttccactttccagttcacagttcagtgtatgcccgcatctgtttatttaaagtattaagcgtgaacaagttagacattaggacatgtacaatgatatcttgaggtgtctaaagggtttgcaaaaaaaattatggagccgtctctccgtgaagagacgccttctctgactcgtaacctaagtagcaatagatgcctcatttcttattgtacgaattcgtcgtatgttttttcattcggcgctgtataagtgtatttacttttgtatttattaatagactatatttataaacactattatataatagagtcttttagttgtctcttgtgttgtttaaa

SEQ ID NO: 16142 - DNA, 1429 bp, Zea Mays
tatctcccaacgtgtccaagctggggttcgggtgcatggggctgacgggcgcgtacaactccccgctggacgacgaggccggcatcgccgtcatcgcgcacgctttcagccgcggagtcaccttgttcgacacctccgacgtatacgggcccctcaccaacgaaatcctcctcggcaaggcgctgaagcagctgccgcgggagcaggtgcaggtggccaccaagttcgggatacggcatgacgagagcggcacgcggaccgtgtgcggccggccggagtacgttcgcgcctgctgcgaggccagcctgcgccgcctcggcatcgactgcatcgacctctactaccagcaccgcattgacaccacaactcccatcgaggagacgattggcgagctcaagaagctggtggaggagggtaaggtcaagtacatcggattgtcagaggcgagcccggacaccatcaggcgtgcacatgctgtgcacccgatcaccgcggtgcagatggagtggtctctctggtctcgcgacattgagcccgaaattgtgccgctctgcagagaattgggcattggaattgtaccatacagtcctcttggccgtgggttttttggtggaagaggagtgaaagaacaagtgtctgctgaatctaatctgcatgggatcccaaggtttgctccagaaaatttggagaagaacaagcaaatttatttgcgaatggaagaactggccaataagcaccagtgcagccctgctcagctagctttagcatgggttctgcatcaaggagatgatgtggttcctataccagggacaaccaaaatcaagaatctagattccaacattgactccttgaaggtgaaactgacagacgaagatctgaaagaaatgggcagccagatacgggaagaagatgtggctggtggaagacaattcacttcatttgcacataccacctggaagtacgctgatacgccaaagaagcagagctaaaaaatacttgaaagcaacaatgatgatgcgattggtatggccctctccctgcagatgccctcaggaacattgccgatgcccctttgtgaacagcctcttctagtaaataataatgtatggagaagaacaatgaagggcccagtcttgttggaagtacgaataatgtacagttacaggaatgtgtgctaccatatatttcgtcgcatcagtttgagttgtggttgtgtgaacctaccatatatttcctcgcaaaagaataatgtatagttacaataatatgtgctatctcaatcagtatgcaggcaggaaaaacatgcaccatctgtagtacagtacatgaattctcgcttgtaatccacatttagacctgaaaatgcgaaaaagaaaaaccaaaacacaacgcgctgagaccgtgttgaggaatgtcaagtatgctgctg

SEQ ID NO: 16143 - DNA, 1772 bp, Zea Mays
ggccagctgaaatcaagcatggcagtgttgttcttgcagcaatatgtagctccacaaacacatcaaatcccagcgtcatgattggtgctggccttgtggcaaagaaagcctgcgaattaggccttgaggtgaagccatgggtaaagacaagccttacccctggatctgtggttgctaccgagtacttgaaacatagtggccttcaagattatctgaaccagcaagggttccatgtcgctgcgcatggttgcgccacttgtgtgggcaactccggtgacctggatggatctgtatcagctgctatcacagaaaatgatatggttgctgctgcggtgctgtcggccaaccgaaacttcgaggggcgtgtgaaccctctcactcgggctaactaccttgcctcgccgcctctggttgttgcctatgctcttgccggcactgttgacattgactttgagaaagagcccattggagttggaaagggtggtaaggaagttttcttgagggacatatggccttcaaaccaagagatcgatgaggttgtggagtccagcgtgcagactcacctggagggcatgtccatgacgccgcctgcagccccgcccacggtgacggaggcctactgcctgctcaaccttggggacagcatcaccacggaccacatctcctactcggggaagatccccgagggcacacctgcggccaagtatctgctcgagtatggcgtggagcccaagaacttcagctcctatggtggccgccgcgggaacaacgaggtggtgatgaggggagcgtttgccaatatgaggatcgtgaataagcttcttgatggcaaggctggtccctggacgatccatgttcctaccggggagaagctctatgtttacgacgcggcaatgaagtacaagtcggaaggtcatgacatggtcatcattgctggctccgagtacggcagtggcagctctcgtgactctgctgccaagggaccaatgctactgggtgtcaagtcggtgattgcaaagagcttcgagcggatccaccggagcaacttggtggggatggggatcattcctctctgctttaaagcaggagaggatgccgattcactcggcctcaccggacgtgagcgctacaccatccacctccctaccagcaccgccgagctcagtccaggccaggacgtgaccgtcacaacccacgacggcagatccttcacttgcactcttcgcttggacacacagcttgaggtcacatacttcaaccatggaggcatccttccctacatggtccgcaacctggcagcacagatgaaataagttaaaaagcaagctagcttattggcgcggtgggaataaattaaaaaggtactcagtgccccacgtatttgacgtatgtctgtaaataagtggcacattcgagcgctcttcgctctgccattgaggtggatcgaagctgccacatattttctccgcaggacatcggcacgaattttgtcttagcaaaccagttaattttgtactctttagattctttaattggttccatgctctctttggtacttttcatgtcagtttgctttgcaaacattatcagcgtgcccttgtagatttcgtaatggttatatgtatatgccctattgaaattgtcattttgctttgcaaaaaaatatcagcgtgccgttgtagattttcaaatgtatatgtctgccgtcaaactctctcgtgaatatgtttggttacaataatggaacaggacggaatgaaacgattccaagt

SEQ ID NO: 16144 - DNA, 2722 bp, Zea Mays
gcggaagcggaagctgaccggtggggccccaggaccctgcacgccccccgggagccgagccgagccgaatagtagggcggcagcagcggcacgcacgcacagggatgcgcacaggcgcagcggccgcaccgcactgcagcatcgacgacgccccggcgggcccgtccctatcaacccaccccgcgccatagaagcaggcgaaagcgagccccgggaactcactcccttccctttcagagctcacagttcggagtgggaggaggagaggagacccacacactgtacccggccacagaagcagctactacagcaggagagggagaggaggccggcccccaagatctccgtccgagaagaagcgagcggcgacggcgagacgaggcagagagtttggtgactgcagaaggattcggtgaggaatctcgtcatgcagacttcaaaaccaaggagtgggtcttcagatgccccgcagaggacttctccaaggacaccgcgggcatctcgtgtggccaaaaccggagggaatgaaaccgattctacaggagttaccccgacaagaacgcctacggagaggagccctaaggttactgagaggcggtctccacggagcccaattactgagaagaagcgcccaagcaggctatcggaactggagtccaaggtcagccagctgcaagatgaactgaagaaggccaaggagcaacttagctcgtcagaggcacggaggcgccatgcgcagcaggaagccgaggaagcaaagacgcaagagcaggctgcagccgcctcgaagctggaggagttgcagcgccagcttgacgagttctcagctgcggaggaatcccgtctccaggaactgcgcaagatctcgcaggaacgtgaccgtgcctgggagtcggaactcgaggcagtgcagaggcagaaatcagcggacgcagccgcgctcggctcggccatgtccgagatccagcggctgaagcagcagctggaagcttcagcagagtctgacgcggcccgcgcgaagcagtgcgagtacgtggaagctgagatcgagggcttgaagcaggagatggagatccgcctagcgaccattgagggcctgaaggtgaatgtcagcgagagtgacagggctgcggctgaggcaaatgccacggtaaatgagaccaagcagcagctggagacagcgaaggccaccattgactcacttgtagctgagggcgtccgcatgcaggaatgcctgaggtcgaaggacatggagctcaatgagtccaaggctctcgtggcatcgctccaggaagatatgaagaagtcacatgacacggacaatgccaaggccaaggccaatactgatgtccgctctgagactgaggctctgcagaaggtgctggtgaccacaagtgccgccgacgccaatgggagctgtggaagctatgacccagagatcgaacagttgcggactgctcttgaggtcgctgagatcaggtaccaggagcagcaaactcggatgactatcgagactggaggcttgtacgagacattggagagtgtgagggccgagtgcgcccgcgaactgtgcgagctcaggctggagctgaagaacaagaacgatgcactcatggaggcaatggcaggagccgccgcagatcctcacaggccagacgcgatgcagcagccggagctggaggcgaagctgatgaggtccatcaccgacgcggcggagctgaaggcatgcctgatggacaaggagaacgcgctgcagagcctggcggaggagaacgaggcgctgaaggcgggggcgggcagggcggaggcggagctgcggcgcaagtacgaggcggcggtggcggagctggagctggccaaggccgcggagcaggacgtgcggatgcggctggggctggtgacggacgaggcggacaggagcagccggcgcgctgcgcgggcgtcggagcagctggacgcggcccaggcggccggcgcggagatggaggcggagctgcggcgcctgcgcgtgcagtccgaccagtggcgcaaggccgcggaggcggctgcagccgcgctcggtgggggtggggggaaggacggcaacggcggcacggtggagaggaccgggtcgctggggcccgagtacggcagctccatcggcgggaagctgatgagctcgccattctcggacgacgtggacgaggagtcacccaagcggcgcaacggcggcggcggcggcggcggcggcgtgctgcgcaggatgagcgggctctggaagaagagccccaagtgagtgagactgagatggggtggacggggtccgggatagccgtaggtgcgaggtgatgcaatagcagcagtatgagtaggagggatactggtgaatgctgcagggaagacgacgacgctctttctggacaagacacggagacacagctctagtctaggtggtaggaagcatgatcgtctctgtctgataacatttggctggtacttgagtgaacctcgtgtcgaggagcagctgcttttggctgcctgttctgtaccttactatgcttcattcagtcaaaaaaattcccacatgtgacatgttcttggttcttttttctttttgaagcgtttttatttcattttcccttcagaagctatgctgtacatctaatacgttacttgcctggctgatgatttggatgtatgtatctgggcagtatcactgcgcgttctctcagcgcgatttcac

SEQ ID NO: 16145 - DNA, 75 bp, Zea Mays
gtcgttgcagtcgaccgttacgctggatagccgttactccgctggtgcaccggacagtccggtggcacaccggac

SEQ ID NO: 16146 - DNA, 1796 bp, Zea Mays
cccgtcgcattctgcagcgccagctcgctcctcgccccgcccccttctctcagcggcgacgcctcgggcgttcctaccctgccccctctccggacccccacgccgtcggcgaagcagccgggcaagagcccgatccagaccccgcgagaggctagcagctggtgagtggtttacagctcgtgtatcatcctgtggtcttttccacatagcctatccaagtgcattggaccaattgaaaacagaattaaggactatctatggtcagttatgtcaggatgacatgcctatggtcagaagagctgctgcatcaaatcttggaaagtttgcagccacagttgaacagaatcatttgaagacagaaataatgtcaatatttgatgacttaacccaagatgatcaagattcagtgcgtttgttggctgttgaaggttgtgctgctcttggtaaattgttggagccacaagattgtgtagctcacattcttccagtcattgtcaatttctcccaggataaatcatggcgtgttcgttatatggtcgccaatcagttatatgagctctgtgaggctgttggccctgagcccacaagagctgatttggtgcctgcatatgttcgtctccttcgcgataatgaggctgaagtgcgaatagcggctgctggaaaagtaactaagttctgccgcatattaaatccacagctttcaatccaacatattcttccgtgcgttaaggaattgtcatcagattcatcccagcatgttcgttcagctttagcctcagtcattatgggaatggctcctgtactgggaaaggatgctaccatggaacagcttcttccaatttttctctctttgctgaaggatgaatttccagatgttcggcttaacataatcagcaagcttgatcaggttaatcaggttattggcattgactttttatcccaaacactgctaccagccattgtagaacttgcagaggataggcactggagagtccggcttgcaataattgagtacatcccattgctggcgagtcagttaggtgttgggttttttgatgacaagctgggggcactctgcatgcaatggttggaagataaggtcttctcaatcagagatgctgccgccaacaacttgaagcgccttgcggaagagttcggtccagagtgggcaatgcagcatataattcctcaggtgctggagaagatcaacaatccgcactatttgtaccgcatgacgattctgcaggctatctccttgctagctcccgtcatgggtgcagagatcacttgtcaaaagctgcttccagtcgtcattaattcttcaaaggacagggttcctaacatcaagttcaacgttgcaaaagtactaaagtcacttgtaccgatcctcgatcaatctaccgtgaaaccatgccttgttgagctcagcgaggaccctgacgtcgatgtgaggtactacgcgaaccaggcgctgcaggcgtgcgatcaaatgatggtgtcgagctaactagccgtgtgcccgagtacttagagttcgatgcctcatagtccaattttggattacctgtaatttgttgggccttttagattgaagagttttccgtctagcctcggtggacagatcgacgctgcccatgctgataaatggacggtcctgatccattgttcgttgtgttattaatgttgtataattgagcaggacacaacacgtacgttactctctgtgtctgtgtgtgtttgcatggcattgtctcgcaggtagttgagcaaccacgtaataattctttccagcgcat

SEQ ID NO: 16147 - DNA, 1936 bp, Zea Mays
gattgttccacgatggttagaggcacctggtttgttttttgctgaagctggtggtacatgtgaatagcagggcctgtcttctgcctctgcttttgcttcgaagcaatggcgaatgcaagcaagcacttgcaaccttcaagtcaagcaggcaatgacaagaagtatcagggcacgctggttgcttcaccagcaaaggccatttcacctaagtgtgtgaaccgcattgtgccatcgaagcaactgatcttgggtgggggttcaataggccatgtggcatcatttctgatcaaggtcgttgctcttgaggcagtgagaagagtttctaaaacaagatgccctttcatatggaattctgttcaagcattgcagatccttgtgtatcctccatttagctggatccaaagatgggcaccgctcggatttctcgtgcagggaattcagaaactatccatgccactgttgtttctgtcagtcacaacaacagtaagtgagctgtcttccaagcatgatgatgaaccagataacaatacagaacattctgagacaccttccgaaacaaatgaattggcgtcaacttctggcacaagcgatgctgctgatggcacaaaggaaatcgtgcaagagaactggcttgtgttacttttcagggagcttgagaagcaaggcatcactttgcctgagaggtttactgaagatgagttacgcagattttatgttgctgcaaatggcgactttcaaagtttactctcttcggttaagaagacaattcattggagggaaacatttcacatacttacattgcaagaacttgatagatggtctcacttagtcttttggcatgggtttgacacgatgcttcggccttgtttagtagttcgtcttggacttgcatgctctagcatacctcctcatgatagaccccgtttcgggcaagcagtagtttctcaaattgaccatggcgttgtaaatttgatcaatgaagaagattcaaggattaccgttttactggattgccatgggatttcgccattcagatttccaatgcaaatgatgaggtcgttcatcactgtggttcaagaaaactacccgaatcgtcttggggtattgtttgtcatccgtcttcctccagttgtcagagttattgcacagacatttcttcaagtcttgaaaccagctacaaagcagaagttgcgttttgagggagattcgtacaagaaggcattggcggagttcctgcaggctgtgccagcgtttctgggcggtaaatgcagctgcccgcgatgtgagagtcctcgtgatgattcagtgatacaggcaggggaagggagcaagaagcagccccgcttggtcagcgttgatgacgggttacctgtcacagacttggacttcgacttggatgaagagatcccatcaccttatagctgcgagaacgccatcagggctgcgataatcggcctgctgatggtgtgcatcttcgtcgcgtttctggctgggatgatcgaccctgcatccgttccagccagtgcctgagagcttgtggaatagagcatgcacgtacatgtgttgctaattaggatgcagggtgctgtatttcttggcaggcttcttgtatgttgtcgtcagaccgccatagagcgctttctcccagtgtgagcgagcgcatgaataatatatatcctctgtgtcaaatgttggttagcagttcaattcgggcctactagatttcactattttcttttttatcttgatcgggcctactgaatttttgctcctctttctcatcatgatcactttgaacttgaacaaatagagcttatatgagctacgctctggccacggcctgggtggaccgcgtcatagatccgcccctgcctgccagttctgcttcacagtgaatccattaacagtgcgtttggatgttggaatttagactcgg

SEQ ID NO: 16148 - DNA, 1016 bp, Zea Mays
ttcaggtgttctgaggtcactgctttcgtgttgaattcatatacatcaatacatgagcgtggcactaataaagtccgacaaagacaaccgctatggattggattctgttgtgactcatgacggtacaaagatggcgtgctgggccttgtcagaactgtcaagttttcatgacaaattaggaattgaggcctataataaggtagatgttataggtatcgatgaggcccaattcttcgacgatctttatgatttctgctgcaaagctgcagatcgtgatggaaaaattgtagttgttgctggcctagatggtgactacaaacggagaaagttcggttcaattcttgatattgttcctctggctgactcggtcaccaagctaacagcacgctgtgagctatgtggtcgccgggcgttctttacactgaggaagacgcaggaaaccaagactgaactaattggaggagcagatgtgtatatgcctgtgtgcaggcagcactacatggatgggcagattgttattgaggccacaaggattgtgttggaccttgacagatccaccgtgacggcgaaagccttgaaataggccaatacctgacttctgcatgcagatttgcagtgtgtaacgatttatttatgatgacattggttgctgtcgagtgttgaagacgcacaccagttggtgaaaagctgttggccttgagatgctgccaccagcgagggaagccaaatgagttgatcccacaaagtactgttgagaagtttgtaaatatctaacagtgtttgggtttaaaatgcggacatgtatcgcttttcttatgcaattggcattgtcatttttattaagcaatcagatgcttggaatcagctgtacgaatttgtaccacaaaggaattgcattcaagtttgaaagtaaactaaggctatctccatcatgtaaatggatgtgtaaagtactgtttttcactgtagatcgtactgattgtagagtgtgtaatttgaaatggagattgagacat

SEQ ID NO: 16149 - DNA, 1473 bp, Zea Mays
tgcctactaggaataacttcgaattatcgcaaacattgctggacttggagcaagcctctcaacatgtcgtgggccgcaatcgagaatgatcctggtgtttttacggaactgttgcagcagatgcaactgaagggtcttcaagttgatgaactctactcacttgacctggatgctctcaatgatcttcagccaatatatgggctaatattgctatacaaatggcgacctccagaaaaggatgagggtcctgtcatcaaggatgcaatcccaaaccttttctttgccaaccagataattaacaaagcctgcgcaacccaagctatcgtttcggttctcttgaactctcctggcattacccttagtgatgagcttaaaaagctcaaggaatttgcaaaggatttgccacctgagctcaaaggactggctatagtaaactgcgcaagcattcgtatgttaaacaattcgtttgcaaggtcagaggcctctgaggagcagaaaccacctagcggggatgatgatgtataccatttcataaactacgttccagtggatggtgtcctgtacgagcttgatgggctaaaggaaggaccaataagtctagggaaatgcccaggtggtgttggtgatgcagggtggtggcttaggctagcgcagcctgtgatcaaagagcacatcgacctgttctctcagaacgagataagattcagcgtgatggcgatcttgaagaaccggaaggagatgttcacggtggagatcaaagaactccagaggaagagggagggcctcttgcagcagatgggcgatcccaacgcaagcaggcatgttgagcagtcactcgcggaggtggcagctcagatcgagtctgtgacggagaagatcataatggaggaggagaaggtgaagaagtggaaagcggagaacctgaggaggaagcataactacgtgcccttcctattcaatttcctcaagattctcgaggagaagcagcagctgaagcccctgatagagaaggcgaaggcgaagcagaagtcccacggccccagctaggtgaaaagccgcaatgcacctacgtactgtctcttttagttggggttccttgtaagattggagttcgcgtatatgctttctgtttttagtttaggacaattgcaccaatagggtgcaactgcagatttatccctgttttttagactttgcgtgtgtgcctttagattttttgaaatgaaactgctgtatgtctctattccgttaaaccgttgtatgtctctacttcggttagtcgtatttagtatttaacggtgtcaagtcttgataatacgacaagggataattatgttagtgtccctgttttagggtagaactgtatatctatccttgttttttagactttgcgtgtttgcctgtacaattattatgcttaacatgatgaggatgttatgctcttattatgttaaaaacatagttaaattgttg

SEQ ID NO: 16150 - DNA, 1826 bp, Zea Mays
attaaaaacgaagcctgtagcagagagcggcatgcaatccacgggattaataaactgatcctgacaatggcctaaaagatcacagccgtacagtgagctccaatcagaaccggcgcattattgccacggcttcgaataaatccaaacaatcaccaaaagcgcccgacccgaatgctcgctcacccctccaaccagcggccagccccgtctctatcggatccgcgccccaccccctgcgaacccgtcagtggccgccgtcgccgggggaggacgaggagggcggcgcgatggacgacggcggaatccaggaggagccgccgtcgacgcggttcctgacgccgacgcgctcggggggcacacgctgggtggacggcagcgaggtcgactcgtccgagtccacgccgtcgtggtcgctcgaggacgaacgctcggcggggggcgtctcctccaacgggggcgccgcggcggcgtctcgggtgtcctccggcgcattccggcggcggttcgggaagcggccccgccgcgtcgactcgctcgacgtcgagtccatgaacgtgcgcggcgcgcatggccacagctccaaggaaatatcgatgttgagcaccctcgcaatggccttccaaacccttggtgtggtgtacggcgacatggggacaagccctctctatgtcttcagtgacgtgtttagtaaagtccccataaagtcagaggtcgagatacttggagcactttcgctggtcatgtacactatcgcattaatcccattcgctaaatacgtcttcatagtcctcaaagctaatgacaatggcgaagggggcacttttgcgctgtattcattgatttgcagatacgcaaaagttagcctgcttccgaatcagcagcgtgtggatgaagatatttctagttttaggcttaagttgcctactcctgaacttgagcgtgctatctctgtcaaagactgcctagaaaagaagccactcttcaagaacattctcctgtttttagttctgatgggtacctccatggtgattggcgatggcattctcactccgtcaatgtcagtcatgtctgctgttagtggtctccagggccaggttccaggatttgacacaaatgctgttgtaattgtctccattgttgttcttctgctattgttcagtgtgcagaggtttggaacaggcaaagttggattcatgtttgcccctattttggcattatggtttattaatttgggatccatcggaatatataatcttgttaagtatgacatttctgttgtgagagcattcaatccagtgtatatatatttgtttttcgagacaaacggcattaaggcgtggtcagctcttggtggttgtgtcttgtgcatcacaggagctgaagcaatgtttgctgatttgggccatttctctgtcaaatcaatacaggtagcatttaccgccgtcgtattcccctgcctgctaattgcttacatggggcaagctgcttttttgatgaaaaacccacttgttgtagaaagaatattctatgattctgtaccaggggttttattttggccagtatttgtgattgctacacttgcagctatgattgccagccaagctatgatatctgcaacattctcttgcataaagcaggccatggctcttggctgcttccctaggattaagataatccatacttccaagaaagtgatgggccagatttacatacctgtgatgaattggtttctaatggtcatgtgcatcatcatcgtggcaacttttaggagtaccaatgatattgccaatgcatacgattatggttaggcaggccagtaatttcag

SEQ ID NO: 16151 - DNA, 2744 bp, Zea Mays
cgtttcagaccagacaacggcgaagaaggcagaagaaagaagacgactcgaccgtcggcggaaacagaaaaggagccacgccggcgcggcgcgcatccagaaagcgctcgggattcgcacacacacatgcccacgcgcggcgcggcgcggtatattccaccagaaccagatcaccaccttcccggggcaatccggtaactgtatacagttgcaagatgcacgatgggaaagaaggaaaaaaatccgacgcttgtcacaggataggatctagacggcggtttgactttccgaccggggaatcggcgctgcgtttgatttgaggaggcgacacgagacgggacgggagggatctcttcgctggagcgttgcccgattcgtcgcggttctcggacaagggagggagggcacacctcgggctccgatcgaagagctttgttaacattagagattaaaaggtagcgccgtagcaaaatgaaggcaccatcactactggttcagtgtttccctggcttgcttcccagcaaggccactagttgcgtgccaattgtatctgagaaggatctgcagctaccatcaccagctgttgaaataatcccctcaaagagtgttcatccatacaaatatgctggagagaaggttgatgtgcaaggtcttaatattttcaagggtaaagtcagtgtagcagatatgatagttatctcgccttctgaagtagcatcatcaaaatatgatggaactctgaaatactgggagagttccattacccttgtcgacattcttaaaaatgagatccgtgatgggcagttgagcttcaggggcaagcgggttctagagcttggatgtggatatggcctctctgggatttttgcctgcttgaagggtgcatccacagttcactttcaggacataaatgcagaaacgatacggtgcagaacaatacccaatgttcttgcaaatcttgagcaggctcaggaccgacagaacagaccatcagagagccctgttacaccatctaggcagctcttggctcctaatgtacatttctatgctggagagtgggatgaactcccaacaattctctcagttgtgcagccacctgcagcaccaacaaacctcagcttctctgaggatgattttatggatggctgcagtagccatgatggaagcagtgtagttggtcatgactactgccccaggagatctaggaagctttctggtagccgtgcatgggagagagctagtgagaccgaccaggcagatagtggctatgatgtgatcttgatttctgatgtcccctacgcagctaactctctgaagaagctctatgcgcttatttcaaagtgcctacgtcctccttatggagtcctgtacgtggcttccaagaagaacttggttggttccaatggtggcgccaggcagcttcgagctctcatggaagaggaaggtgtccttggtggccacttcttgactgaggtgtgtgacagggagatatggaagttctttttcaagtgagcaaatataggaagtgggaagagaaggaaatgagttctgacgttgaaacccagtttttatggtttctatctgcagcgatgtacataccgcgaggcatagttccattaattctttggtagtaggttgaaacttcaagaaatatctgcagttgagcttgcacaagtgttggagtcctttaccgctttgtagatctgctatgtgctaatgtcgctctattaagtacagaaagcaaattgtggtaacgttttatatatcgaatatatggtgatggcacttaagccggtgcatggtatgagataattcaactcttttacacgcctatatgcagccttgtagatgtacgctgtgttggagtggctatatgtggctctataaaaaaacgcagatttgacttagtcggtggcaagacatggaattttttttaaaaaaaaacatttgggcactatttttactatcatgaattccaaacgatctccgatccaaatcctcaaggcccttttggatcttttgaattaaatttcattctaataattataaattagtcatatctctactatataagaagctaacgatgtcgtccacagttacaccactcccctgttcggacatcgtgcaagccctcgctgctcgcccctcctcgcccacgtcgtgcccccgtcgatccatcgtttgtgtccccccttcctccctgcgcctccctctcaccctctatcgcctaaaaaccctagtccgtgcccagccactaccgtcgactgcgcgtggtcgctggccgcgtgcgtcgacccaactgatggcacgacctccctcacctccgccgctaacctgatccatggaaggcgaaggatcccctgattacccctctcctcccaccttcctcggctccaccctccctcgactggccgctctactgcaccgccgccaccgccacaaccaccatgcggaggcggatccacgtcgtctaggtcgacgtcccgttgctggagacttggcgcaggcccatcaactaacacgccaccgtcctcgcaccgcatgaggtgctcacgatgcgggagctcgacgttgccaaaatcgtagctacgggggatgactggacacgatgccccccacacccaacaccatgccaacgtcgccctcggcccggtcggcgcagcgtggcgggccgccttcgcacttgaggaccccgcggaggcggaggaatagcgtggacgtgccgcggtggctgttgtcgtgtg

SEQ ID NO: 16152 - DNA, 2486 bp, Zea Mays
ttatacttagggcctgcttgactgtggatactgagacgtttaaagaatcgaaaaccaaaattaatagataaaatagaattacaggaattctcacttggttcttgtccacctaccttgggagatcagggcatgcgttggattacttctggtgaccagcaagtcatgtgcttgggatttgattggaatagccacgagatgagtgtaatgtttttggcgaaattagcgaagccactgattgggacttgtcgaattgttataaacagcattcacatcaagggagatcttctactatcacccatacttgatggggaagctatactctattcttttgaatcaaccccagaagtcaggattggggtagcatttggaagtggtggaagtcaagcaattcctggtatggagttaccaggtgtctcgacatggctggtgaagcttttgactgaaaccttagggaaaacaatggttgaacctcgccggctatgtttttctttgccatcagtagatctaaggaaacgagcagttggaggtgttctctcagttactgttgtatcagctagtaacctctgtaagagcacagctaatgatatagggaactgccaaagctcaaatggaggggccacgtatggaattgctgataacaaggtatcacagacatttgttgaggtagaagttggcaatttgatgagaaaaacaagtaccagtaagggtctaaatcctacatggaacagtacatttaacatggtacttcatggagagacaggcattgtcaagtttcttctgtatgaattggattctggcggtgtcaaattcaattacttgacaagctgtgagataaaggtaaagtatgttcatgatggttcaacaatattttgggctataggacataactctggtgttgttgcaaagcatactgagcattgtggacaagaagttggaatggttgttccatttgaggatataaatggcgagttaactgtaagccttgtgctaaaagaatggcagttctctgatggatcggttacattgagtaattctctgggcaatggacttcaaagctcatttgatggatcgacaaagcttcagtccacaacaggaaggaaagttagggtcagagttgttgagggcagggcacttacagctaatagtaaatctggaaaatgtgacccttatgtgaaactccagtatggaaaggctctataccgaacaaaaacactgacacatacggtccgaccagtttggaatcacaagtttgagtttgatgagatctctggtggtgaatatctgaagatcaaatgctataatgcagatatgtttggtgatgaaagcattggtagtgcgagagttaatttggagggacttttagagggtgctacccgtgatgtttgggtcccacttgaaaaagtagattcaggagagataaggcttgaaatagaggcaataaagaatgatcacaacaatagcttgcagagctcaagcagtaaagctggatctggttggattgagctagtcataatcgaagccagagatcttgttgctgcggatctgagaggcactagtgatccttatgtcagggtgcactatgggagcaagaagaaacgaaccaaggtcatttacaaaacactgtctccacagtggaaccagacattcgagttcctggaaaccggagaacccctgattttgcatgtgaaggaccacaacgccgtccttccaaccgccagtatcggccattgcaccgtcgagtacagcatgctgtctccaaaccaatccgctgagaaatggataccgctccaaggcgtaaaaagcggagagatccatgtaagggtggcactgaaggtatcagtaccaggttcggagaagaagaacatgctcggggcaggtccgttcggcaaggggcacaagatgtcgacacagatgagagacagcctgaagagattcacgggcttgatcgacgacggcggtgacccggaggcactggcactagccgtggcggagatggaaggcatccagggcgagcaggaagagtacgtcgaaaccctggagcgggagaaggcgatgctgttgcacaagataaatgagcttggttccgaaatcattaggacagcatctggtcctccaaggacgccgtactagttagatctgcaaatgcacacccccccactactgaatgaacacgcatttatttatcggcaggcgaagacctggttgtacgtagaactctatagtgtgcatgtacaagtgagcagtacagctcgtgtaagtaggccaggcgtgtaggaagcacaggtgtatcttgtagtgattgataaaaactgctcaagcatcaaccggctggaagcttacagaagttggtcgactttgtacacagttagggcatgtttgggaacaatgtttttttaaaaccacattttataataccacagtttactgaatgttagaacaagactatggtatatattttacatcacctgttttggaggaagtatttt

SEQ ID NO: 16153 - DNA, 2440 bp, Zea Mays
caggctccgtggcttttgcctgtcctgtggcagcgaatcggagagcggaggggaggggaaagcgcagcaacgccggcgagcgagcgggccgttcgaggatcgcaatgtgagcacgagcagggacacacaagatgcttcatcctagctgggtcggtgtctcggcacacgtctcggagtattggtctgtgataatcgccactgttgttttcgcatttgttggcgcggtgacaatttactatacagtcaatcagttgaacaagaacatcagcttgagcctgataagggctatcaaggccagggccaagaggtacaagaaatcgaaggacaaggtgcccgctgcatcccacatctggaggaaagaagttgtctcccgcagcaaaggcctgaaatgctgcgtgtgcttgaagtccgtttcacctcctcagtactctggggggaccatccatcagtgcgatatctgcggggccgctgcgcatccgagctgctcggggaatgcacacaaggattgcaagtgtgtatctatggctggtttgggccatgtgcttcaccagtgggctgtacaatggattgacagcgcggatcactctgaagaagactctttctgttgccactgtgatgaatcttgcaatggagctttccttgcaggctcaccagtttggtactgtatgtggtgtcagcgactggtgcatgttgattgtcacagcagcttggccaaggaaactggtgatatctgtgacttgggaccattgaaacgattgatattatcacctctttgtgttaaggagcttcattggacaggtgctgggattttgagttctatcacaaatggggctaatgaattggcttccagtgtccgagagacaattcggattcgtagtaaaaggtacaaaaggggtagcgcttctgctgattcagatagctctggggctattgagctaccatctgatgctgaaggagattcacaagaagtaaacagcaaagcaaaggtgagggatgatcatgccaattgcaaactcaatgaggtacaccaaagctctgaatcagagaaagataagcaacttgtaccagataacgcagcaacaaccaatatgtcagatgtacaacgtgaaaattctcatgtacagaacaatcagaagtacgaaattatcaatgtgccttctgattctaggccacttctagttttcattaacaagagaagtggggcacagagtggtgattcactgagacagcgtctgcaaattcttcttaatcctgtgcaggttttcgagttgagcaaacagcaaggtccagatgttggtttagctttatttcggaaggtaacccatttcagagttcttgtatgtggtggagatggcactgctggttgggttttggatgccattgagaaacagaagtttgaaaccccgcctcctgtagccatccttccagctggtactggtaatgatcttgcgagggttttatgttggggtggtggccttggtgttattgagaagcggggaggtctattctcagttttgcaagatgtagagcatgctgcagtcactgttcttgacagatggaagatcacaataaaggacaaccaagggaaacttatgagaccaccaaaatttatgaacaactactttggggttggctgtgatgcaaaggttgccttagatatacacaacctgagggaagagaaccctgaacggttttatagccagtttatgaacaaggtgctgtatgcaagagagggagcaaagaacataatggataacacatttgattgttttccttgggatgtcaagcttgagatagatggatccaaaattgatattcctcaggactccgaaggtatccttgttgccaatatcaggagttacatgggaggggttgacctttggaagaacgaggatgatgtctctgacacttacctccctcagtccatgcatgacaagaagctggaagttgttagcttcacaggaatgctgcatctcgggaaactgcaggttgggctttctcgtgcaaaaagattagcccaaggccatcatataaaggttgaagtcagtactacaatgccgatccaagttgatggagagccatggtcccaggagccgggaaccatagaggtttctcatcatagccaggccttcatgcttaagagagtctccgaagaaccgctgggtcatgccgcttcggtaatggccgacatcttggaaaacgctgagagcagtggcattatctcagccttgcagaagaggactttgctccaggagatagcgtctaggcttttgtaggacacagttctaacgccagtagttgtgtgtagctcaccctatagctctctcacgtcttcagcagccagaggcttgcttctgggctactagagaattgcgcctggtcgttgtacatacaccatcatggtattttaccctgattcggattgtgttgtgaaaataaa

SEQ ID NO: 16154 - DNA, 860 bp, Zea Mays
tgcaatctctctgcaaaaggcaggatgaatgtgtatgtcccaaaagacagagttacaaacttacaccagggatatggatttgtagaattcaggagcgaggaagatgcagattatgctattaagactttgaacatgatcaaactatatgggaagcccataagagtaaacaaggcttcccaggataagaagagcttggacgttggagcaaatctgtttattggcaatcttgatccggatgttgatgagaagctcctctatgataccttcagtgcatttggagtgattgtaactaatcctaagataatgcgagatcctgaaacaggaaattctagaggctttggctttgtgagctatgagtcctttgaatcatctgaccaagcaatagaggccatgaacaaccaacatttgtgcaaccgcccaatcactgtctcttatgcttacaagaaagacacgaaaggagaacgccatggcacaccagcagagagactgctggcagcaaacaatccaggatctcaaaagaataggccacacacaatgtttgcaagtggtccgccgacccaaggtcatccaaatggtggtccgcctgtgccacggccttatggcaatggcacaattcctggacagattcaacacattcggcaaccacctccaccacctgttggacaattcccccctccaatgcagatgcacgggcaaccaacttggcccgctcaacattctatgccgcctcccatgccatcgcaactccagtacaggctcccaatgaggccaccaccaccaaatatgatgcctcctccggttggcatgaattataatgtctcggatatcacagagagaccattgatcaggggtagttaagt

SEQ ID NO: 16155 - DNA, 100 bp, Zea Mays
ctcccggttcgctcgccgttactaggggaatccttgtaagtttcttctcctccgcttatttatattcttaaactcagcgggtagtcccgactgacctggg

SEQ ID NO: 16156 - DNA, 869 bp, Zea Mays
gtccattccggaaaaccgcgccagcaggcccagctccaaccaccgctcgtctcgtctccttcctcctctgcttcctcccgtctcgtctccgacgacctcgtctttcccccccagccagcctcgcctcaccgactccccgatccggtccctcccttcgccagctatgcatccctcctccggcgcgggggactacgccccttactacccaccttatccctccccggccgcgccgcctcccgccgcctacccgtcggtgtccgccccggcttctgcgcccccgtactcgtcgtaccccgcggacttcgcccccgcgccttcgtaccccgcgtacccgcccgccgacctcccccactacgcgccgccgccggctgcgcccgcgcccccgcagccgtactacccctacgagccggcgccggcgccgccgctgccgccgtccccgcacaacccggtgccctctccgtacccgtcgctggatcgggcggggagctacggctacggatctggccctggctccgggtacggccaggagctgtacccgcccaagccggcgggcgggtggtccgacgacggagcgtacgcttacaacgggggcgacgcgccggagccgtacgggtccaggggcaccgcaccgaggccgggctcgggatccgcgctgtttgatgactacgggaggtccattggctcagctgccgataggggtggccgtgggggtagcgcggccagccccaaggtggtgagggccgtgcccaaggcagagacgtcagaggacgtcaggggtggggtgcagaagttcagggtcaagctgctgccggagggcgctgggagccccatggatgtgctctgtcagacagatccatcgcacccacacg

SEQ ID NO: 16157 - DNA, 546 bp, Zea Mays
tcgtcggtagccgtcggttcacttctccaggaaagggttcgtactcatggcgccgccgcagccaaagtcgggccttttcgttggcatcaacaagggtcatgtcgtcaccaagcgcgagctgcctccccgcccgtgccaccgcaaggggaaatcaacgaagagggtgtctatggtcaggggagcttctgaaggttggcaaggacaagcgtgccctgaagcttgctaagagaaagcttggaactcacaagagggcaaagaagaagagagaggagatggcgggcgtcctcaggaagatgaggtcggctggtacgcacactgacaaaaagaaatagagagcatttcaagttcatggagctggctgccagagattatgttccagtgtctgattttccatacatgtagaacctaatagacatgtcaaagtattatgtatcgaaccagctcatgggattttgctccttccaatgcatccagggtttatgtatcgaaccaatttatgggatcttgctcttattctaatgcatccatggtttgtgaatcttttgc

SEQ ID NO: 16158 - DNA, 2126 bp, Zea Mays
atgagggttgtggggaagggataaaacgaggtatcgcatacagagcgaccggaaagtccctatctgcagtgtgcatccaatggaacaagcaactattcagtgcctcggttgtctcaagtcaaaaatacctgttgctaagagctaccactgttcagccaaatgcttctctgatgcatggcagcaccacaaagttttgcatgaacgagctagtagtgctctaaatgaaaatggggctgaagaagaggagttatttggcagatttggcagtggtggttctggggttctaagtactgctggatctggttctttgtcaaattttggacaaagccctggtgttaataatggacctgtgcctttctatccctcaggtaccgataaaaattctggagaaacttggtttgaagttggacgctcacgaacatatacaccaactgctgatgatattggacatgcactaaagtttgagtgcgtagctgtggattcagaaaaaaagtctccaattggaccctcaacctcaatcatgacatcacgtgtaattcccgcgccaactcctacccctcgccgccttatccaagtgaatggggatgttttaggtcacttggatttagacagccaaatttcgtccttagggacattcactgtgttatcctacaatattcttgctgatgcatatgctacaactgatgcatatagctactgcccaacatgggcacttacctggaattatagaagacaaaatttgctgcgtgaaattattggttatcatgctgatatcatctgtctacaggaggtacaagtaaaccatttcgaagattttttttcacctgagcttgacaaacatggatatcaggcgctttacaagaaaaggacaacagaggtgtattctggaaatcctatggccatagatggatgtgctactttttttcgtagagacaagttttcacatgttaaaaaatacgaggttgagttcaataaggctgcacagtctttaacagatgctattattcctgctgcccagaaaagagtggctttaagtcgattgattaaagacaacattgcactaattgcggttttagaagccaaatttggtaatcatggagctgaaaatcctggtaaaagacagctcctttgtgtggcaaatacacatataaatgtccatcaagacctaaaagatgtgaagctatgggaggttcataccctcctaaaaggattggagaagatagctgtcagtgcagacattcctatgttggtctgtggagatttcaactcaacccctgggagttctccacatgcgcttctggcaatgggcaaagttgatcagcatcatccagatctggcaatagacccccttggaattttacgccctccaagcaagttgaatcaccagcttcctttggtcagtgcatactctgcatttgcaagaatggtaggtgttggctatgatttggagcatcagcggaggacagaccctgcaacaaatgaaccactcttcacaaattgcacaagagattttactggaactattgattacatattttacacagcggactcattgacagtggattcattattggaacttttggatgaagaaagcttaagaaaagacacagctctcccatcccctgaatggtcatcagatcacatagcactcttagctgagttccggtgcaagccaagaatcagacgttgacacattaggtcttgtagaaaaggtcattgtcatcatccttggtggtggaacaccgttccatgtgggaacttgaggcagggcgggaacgcgggctctcggggaagcaaacaaccaagcagcctcaggaaggggaagaggcttgtaacatttgatttttaccctcctacatttgagctcatgatacttaagatgcccctgtgtaccattactttctatagaagaaaaatacttgagagaaatatttgaagggttataaggcccgtttttcttttttgttcactgcggtcgcgttcgattccttttggctgtgtccatgctcgctgcctacaatacgcagccacgcaggagtcctcgacttctgtaaattctgtaccaatgtaataccagttccagtttttgttttccacaatgttgctggcgctggctcaggcactca

SEQ ID NO: 16159 - DNA, 267 bp, Zea Mays
aaataatcaccaagtatgctaggatcaagtctcacacatatgatgactcgtggtacataaacgaatgtcacatcattaatatataatgggttctgtacaaaatagttaaataattacatcatgcgaagacaacgatctagcaacacaaagttgaatgggagacgacaacctagaccactcacgaactcatcacagcatccttcgtgcgcctcatcctgcggtacctgttcttgacctggggggatgtgtgtacagcaagggtgagct

SEQ ID NO: 16160 - DNA, 198 bp, Zea Mays
atgttccggacgggctctggcgcctgtgcgctgcggttcaacggtgcaagctcgacggcgggtcgacgagtggctccaagtcacacaggtggcgccacactccaatccaaggttctccagagcaggccagtgacaagcgggcgggcagcgggaacgggatggcgatatggcagcggcagcgaagtgcttcgtccttta

SEQ ID NO: 16161 - DNA, 1142 bp, Zea Mays
ttgcaggttaaggtccagccgaagaaggttattcaaccgaagaaaagtacacaacctgctaaacaggagtccagtgatgacagcagctctgagagctcctcagacgatgaaccttccaaaaaaccagttgccggttcaaaaaagcctcctgccagtagtagcagcagtgatgatagcagtgacagtgatgatagcagctctgatgaggaaccagcaaagaagcccacggtcctttcaaagaagcccactgtcctttcaaagaagcccactgtcctttcaaaaaaacctgtcacagcagtcagtaatggttcaaaacaggttaaacctgatagcagcagctctgacagtagctcagatgaggatgaaaagcctccggttccctctgtgcaaaagaagacccaagaatctgacagctctgacagtgattctgatgaggatgaatcagatgatattcctgctaaagctcaagtagtagccaagaaaaaggaagaatctggtagcagttctgattctgatagtgaatttgagtctgacgatgaggatagcaatgcgaaaacagtacaacctgccaaggctgctgctattaaaaagaaggaagattctagtgagagctcagaaactgactcacagtcagattcagaagattcagaacctgaaaaacctactgtccctgcgaaaaggcctctagcaacaaataaaaagaatgaacaatccagcgagaaatctgatgacagctctgatgagagttctgatgaaagtgatgaggaacctccacaaaagaaaactaagaattctgcaccttctggtgctgcaaaggctgccactaatgtttcaaagaaaaaaagcagcagtgatgaagatgatgaaagttcagaagaaagctctgatgatgaggatacagaacaagttgaaactaaggaaacttctgtagtcactacccagaagccggcacataatgaacctaaaactcctgccaaaagccaaagtcaggctactggttcaaagactatttttgttgggaatttagcctacagtatagagcgtgaacaagttaaggaattttttgaggaggctggtgaagttgttgatgttcgtttggctacttttgatgatgggagtttcaagggttttggacatgttcc

SEQ ID NO: 16162 - DNA, 1729 bp, Zea Mays
ctaggagtggagcaccgcgccgcaggggatgatttggacgggaaggcagaggttcttttggatccaaatactctaagcaaggatgggacggttgctctttcaacatattctatcagcgaggatggaaactacattgcttatgggctaagtgaaagtggtagtgattgggtctctattcatgtgatgagcattactaacaagcagcctatgcctgataaattatcctgggtaaagttctcatctatcagctggacgcatgacgggaaaggttttttctatggtcggtatccagcacctagaggaggggaagtggatgctggaactgagacaaacatcaatcttaatcatcagatatattaccatgttttgggatctgatcagtcagaggatatattgtgctggaaagatcccgaacacccaaagtattcctttggtgcctcagtcactgaagatggaaaggcattattttcaggtgtaacttagcatctacaatccctgaaatgaagatgtttcgagaaatttcagttcctggatttgatcgcacaagttttcaagttaagcaggtttttgttcctagcaaggatggaaccaaaattcccatgttcataatgtcgaagaaagatatcgatcttaatggatcgcatccaactttgctatatggttatggaggattcaacataagcataacaccttcatttagtgttggtcgcgttgtgctatgcaagaacatgggctttgttgtctgtgtagcaaacattcggggtggtggagagtacggggaggagtggcacaaagctggagcacttgcaatgaaacaaaattgttttgatgactttgctgcctgtgctgaattcctcatttctaatggttacaccagttccagacgtttatgtattgaaggcggaagcaatggtggtcttctggttgctgcttccattaatcagaggcctgatctctttggatgtgctctcgctcatgttggcgtcatggacatgctccgttttcacaagtttacaattggtcatgcatggactacagactatggttgttcagataaggaagaagagttccagtggctcattaaatattctccccttcataatgtacggagaccttgggagcaaagctctggtaataactgccagtatccagcaaccatgttgttgacagctgatcatgacgatcgtgttgtgccattgcattcactgaagttattagcaactttgcagcatgtcctgtgtaccagcactgaggacagtccgcagacgaatccaataattggtcgcattgatcggaagtcagggcatggagctggcaggccaactcaaaaaatgattgacgaagctgcagacagatatagctttatggcaaaaatgttaggggcttcgtggactgaatagtgaattttgtccagcttagtgtggagatggtgagcaagattactctatgcagtcaaagtaaagtggctgtaaaagttatattgcttatgttttgctcttgcttggatgatcatccaccaaatagtatagtgtttatgcttcggtttgagataagggttcagggagcattgtcatgcttggcgttggtgcaccatttctttcatatatatcttttgattgttaaattttatacgttactacttcattgattctaaattataagatgttttggttttttcagatatattgtttttgttatgctatattgctatgtatactatatgtctaaa

SEQ ID NO: 16163 - DNA, 418 bp, Zea Mays
catttcacatgttccttgtgtctttaactgttatcatttctcacttcgtggtaccacttctctacggatttatggaactactggggagaatatcttgcgtggttcatgttaatccacacaaccaaactatagtacatcaggactgctaccccgagtgaaatgcttacggcgtggaaggatgtgtgctatcttgcctcgcgaatgaatcgtttggttcgtttctaagcttcgcttggagccgttgtaaaagtaagaaacaactaaactctactggataatgtgcctattgtaaagccgttaacacgtcatgttaatatcaatcagtttccctacaatgagaaaattgatatttcgcattggtgttacgtacggtgatgtttgagttcactgcagagtctgcgatatttgtcacacggag

SEQ ID NO: 16164 - DNA, 1115 bp, Zea Mays
tttttcaatcttgtgagcagatggttgattttgtcagggaaggttttcttgggagtactcatgaattccgaaacaggttccagaaccccattgaaaatgggcaacacacgaattcaacatcagatgatgtgaagatcatgaaccaacgatcacacatcttgtttgaacaactgaaaggttttgtccagcgaaagagcatgaacgttgtgaagaatgatctaccaccaaagaaggtttttgttattactgtaaagctctcacagctgcagaggaagctatacaaaaggttcttggatgttcatggtttctcaagtagtggttattcagaaaaatctcacaggtccttctttgccaagtaccagacattatcccaggtatggaatcatccggggctcctccagatggctaaagaacaaagaggaaatttgcgtcgtgaagacgcggttgagaattttatgatggatgagagttcaagcgatgataatgttgaaaattacttgcctaatggagagaagcaaaaggataaagctgatcagcagtccaagaaaagcaacatcattatgaatgaggaaagtaactggtgggaggaacttttagatgagaatacttatatgaaagcagattacagtggcaaaatgaccttgctccttgatatcctgtcaaaaagttctgaattaggcgacaaagtattagtgtttagccagagtttgaccactctggatttagtagagttttatctggcaaaattgcaaatcaatggaaaagaaggcaaacattggaagcgggggaaggattggtacaggcttgatgggagcactccatcttctgatcgtcagaatcttgtggagatgtttaatgaccttgaaaacacaagagtgaaatgcacattgatatcaactcgtgctggatccctgggtatcaaccttcatgctgcaaatcgcgtggttcttcttgatggatcatggaatccaacacatgatctgcaagccatttatcgagtttggaggtatggccagaccaaacctgtatatgcctaccgcctaatggcacatcaaacaatggaagagaaaatatataagcgccagggagctgtgtgtcatttcattaagtaaaag

SEQ ID NO: 16165 - DNA, 223 bp, Zea Mays
  misc_feature (1)..(2): n is a, c, g, or t
nncgctggcgatcggaataatcggaggcctagttgggtgcgagatggaaccgtagtgatcgatagatctgtgcgctgatggggagggagaggagaggttggaagagctggggatttgcgttgatagggtgtttatctgcaggaggattaaggatcggtagctgtgctctctgggtttgggttaatacgtcgctgttagtgtcctcatgatggatagaggtaag

SEQ ID NO: 16166 - DNA, 2136 bp, Zea Mays
ctctctaacaatactaatactactgcatcaatgtttgtatgtatagagagagcgcaccttatattataggtatagaataaaaagtggttacgccttatattatgggacagagggagtatctagctagctagttagttattgtgtgtgttgctcacctcagtacttctgcctgttcctttgccgccttgctctgcagggagatacccaaggaggtttacaacaacttggacactggcagccaggatgagaaatggtgggagggagtggacctccaaaagctcattctggctcacaataatcttgaggtgttaagagaagaccttaggaacttgtcttcgcttgttgttctaaatataagtcacaacaagatatcttcccttccagcagctatcggagatctcccgttgctaaaatcactggacatgtctttcaatcaaataaacactctgcccgaagagattgggcctggctactgctttagtcaaggttgacttctcaaacaattgccttactgagcttccacctaacctcgccacatgcccggacttgtccgaactcaaggcatcaaacaacaacatatccagagtaccagatgtacttgctggctgttccaagttaagtaaattggatctagagggtaacaagcttgtggcactttctgaaaacatgtttgtgtcatggacaatgctcacagaattgaatctcgcaaagaatctacttacagccatcccaggtagcattggagcacttccaaaactaatccgcttggacatgcatcagaataaaataacatcgattcccccttccataaaaggttgctcttcgctagccgagttgtatatgggaaataacttattgtcttcaataccagctgatattggcacgttatcaaagttaggcatacttgatctccattctaatcagctaaaggagtatccagttggagcctgcaacctcaaattatctttccttgatctatcaaataactcattatctggtctaccagctgaactaggtaaaatgactaccctaagaaagcttctgcttactggaaatcctatgaggacacttaggagttcattggtttctggaccaacaacaacattgctgaagtatctgcgcagccggctttcatccgatgaggaagcatcaggatccagaagcaccccaactaaagatgaccaaattgctgcagcaaggcgcttgtccttatcttcaaaggaactggacttgagtggccttggagtgaccagtgtaccagctgccgcgtgggagacaagtgatgtggtgaaactggatctttctaaaaattcaatagaagatctaccaaatgagttgtcattatgctcatcacttcaatccttagttttgtctaataacaagataaaaaggtggcctcacacagtggtttcctcccttccctgtctgtcttccttaaagctggacaataaccccttggtagagatatcatccactgatcttgtgcctctgtccaaacttgaagtacttgatctaagtggcaatgcttcagcacttcctgaaccttctgcagtttctgcattaccacagctgcaagagctttacctaagacgaatgaaactccatgaatttcctaatggtttgctgggcctaaaactgcttaggattcttgacctgagtcagaatcaccttacaactgtgccggagggcatcaagaatttcactgcactcattgagcttgatctgtctgacaacaatataacagcactcccagcggagctgggattgcttgaagctaacctgcaagtgctgaaactggatggaaatccgctaagaagcataagacgaactctgttggagcgaggaacgaaagcagttctcaagtacctcaaagaaaaattgccgtctgaataatatttatagaacaaactattgttggagtaatggaataaaatgtttttttgccactgtatctcagttttctggactgaattttgtgcaaaagtatctggaccttgtgtgagaagagagctttgtgagtgtgttgttggatatactggttatagtccacatgttttattggaacaaaaatattttctctgttcaatctttacatggacacaacctggaaagatgttatccaccgttgtatcgttc

SEQ ID NO: 16167 - DNA, 1856 bp, Zea Mays
tctcgtacgcgtgatggagctggtcggagttttggtcaaatttttgcaacggagctggacgtgtccacgctgatgccagcgaggtgcagccgtctttgattcccctcctgtagctgcatcctcatgccgaccatcacgcactacgtgctggatcccttcctcgagacagggtcgcctgcgcaggccgagaaagccacgcccaagccgccgccctcgcctccagacaaggccacacctgtaccggtggctcctattagggcacagacgtcgccggcatcactctatgccacgcctgagagcaccaccttgcccgactcaccttcctcgttccccgggacctggtcgccgtacattatcaaccataagaggcggggggcctcccttgccaagaccgttcctcagggtgacgttggaagtgagggcagccagccaaagctcccagtgatactgcctgctctgcctaaagggggtgaacccactgcagtggaggagcctgagtttgcgtttcagcaatcagggaatgatcaagctgaaggtgacagtggtgtggacgaggcccccatcaatgggaaaaatgaaatgctgctgaagggcaagggacctgtgacagccaaaaatgagcacgagcagcctgagtttgagtttcaccgtggaaatcttgaagcactagtgaggcctgttaatgttggaaggcctttgattggcggagcacccaaaaatgatgagagtgacaccttccttgaacttcaggattccatgagtgtggctagcaatactgaaactgatgatgctggcacccaagagtggtggtggaaaccgagttcccctcttgggatctctgttggcacaccctgtgctgaattctatgatgcatttgaagaaatatcaagtgatggtggaactcgatcttcacgggccatggatgatgacctccgtgaaatgaggttaagcctgttgaccgaaattgagaggaggaagcaagcagaagaaacacttgagatatggcagaaggaatggaagaagctgagtcaccacctatcacatgttgccttatcacttccatctccaagtatagctgaggatactgatgattcaagcgtcgatcctggtgctgagttgtgccagcaaataactgtttcacaacttgtagctgctgctatttcccaggattttgctcgtgctgaagttgcttcagagatggaagccgtgattgccacaaagaacttcgagattgcaaggctgtcggatagggtccagtactatgaagctgcaaacagggaaatgtcccaaagaaaccaagaagctatcgagacgtcaaggcaacaacgcaaggagcgtaagaagcgacagaagtggttctggggttcagttgggcttgcagtcacccttggtgccacggccattgcctggtcttatctaccttcatcgcagccccgagctagtgcagattcaaatagtaccgtcagtgactagagctaggatgaagatactccctccgtttctttttatttgtcgctggatagtgtaaaattgcactatccagcgacaaataaaaagaaacggagggagtatctcatttcagaagcctaacaaacctctaactatactcctagaggagaaaaaaaaaacgttgtataagttctcttttggtgatcgtccatgatcgctacaatcttcatttgctgctttgtatgtaaaaatgttgggtgggccatctccgtcaggattggctccattccaatcaccgtaaatctctgcatagatgattcatggttgagcaaataatacaaagggatgtggatatggttagtaatccatgcccaccgaccccactcgaggagttgattttgccaacc

SEQ ID NO: 16168 - DNA, 2650 bp, Zea Mays
cctccgcgacctctacgcgctcggcaggaagctcgggcaggggcagttcggcaccaccttcctctgcaccgagctcgccacgggggtcgactacgcctgcaagtccatctccaagcgcaagctcatcaccagggaggacgtcgacgacgtgcgccgcgagatccagatcatgcaccacctctccggccacaccaacgtcgtcgccatcaagggcgcctacgaggaccagctctacgtccacatcgtcatggagctctgcgccgggggcgagctcttcgaccggatcatacagcgcggccactacagcgagcgcaaggccgccgagctcaccaggatcatcgtcggcgtcgtcgaggcctgccactcgctcggggtcatgcaccgcgacctcaagcccgagaacttcctgctcgtcaacaaggacgacgacctctcgctcaaggccatcgatttcggactctctgtcttcttcaagcctggtcaagttttcaccgatgttgttggtagcccatattatgtagctccagaagttttgttgaaaaattatggaccagcagctgatgtatggacagctggcgtcattctttacattctactaagtggcgtgcctccgttttgggcagaaacacaacaaggaatatttgatgctgtattgaaaggtgtcattgattttgattctgatccgtggcctgtcatatctgatagtgcaaaagatcttataagacggatgctgaatcctcgctctgccaagcgcttaacagcacatgaagttctatgccatccatggattcgtgatcatggagtagctcctgaccgtccactggatccagctgtcttatctcgcattaagcaattctctgcaatgaataagttgaagaaaatggctttgcgagtaatagctgagagcctatcagaagaggaaattgcggggttgaaggaaatgttccagaccatggacactgacaacagtggcgcaattacctacgatgaactaaaagaaggattgagaaaatatggttccacactgaaggacactgagattcgtgatcttatggatgcagctgatatcgacaacaatggaacaattgactacattgaattcatcgctgcaactttgcatctcaataagctggagcgcgaagaacatctcgtggcggccttttcatatttcgacaaagatggtagtggctatatcacagtggatgaactacagcaagcttgcaaagagcataacatgccggatgcttttcttgatgatgtcatcaacgaagctgatcaggataacgatggccgcattgactatggagagtttgttgccatgatgaccaagggcaatatgggagtcggtcgacggacaatgagaaacagcttgaatatcagcatgagggacgcacctggtgcattctgaaacttaacacgatgtacagcttgtggcctagtcacttcggccctgtttgtttcggcttctggcagcttctggccaccaaaagctgctgcggactgccaaacgctcagcttttcagccagcttctataaaattcgttgcggcaaaaaccatccaaaatcaacataaacacataatcggttgagtcgttgtaatagtaggaatccgtcactttctagatcctgagccctataaacaactttatcttcctccacacgtaatcgtaatgatactcagattcttcccacagccagattttcagaaaagctggtcagaaaaaagccgaaacaaacagggccaactgtcttgtcttgctgccctaccaaaccttctgcaaaattttttttcaagatgtttgtcaggtgtatgtgtggatgtgttttttctgattcaactcttgtgattgattccatgaaatgcataacaagatgtccatgccatgcgtgaaagtgaagccgattgtaaatgacggcgctgcccctgcttgactctcagaaacacaaacacccatgttctgaactagctcgccatgtatgcctccagtctcccttgattcatggcatccattcttcatgatgtggatcaagatactctattatgctctcctcaaggcctcaaccaatgccaacaaaaagaactacgcacgaatccatggtcaccactcaccagtaatccctgcaagagcaggaaccaccactgtagtggtggaatcgcacagcatctcgaatcgcgaactcccgaccagtcaccgtgaagatcagcttgatcacagtgtggattcttcatgatgtggatcggcatccagagggcaagctcatgagcccaaacgctgcagctagcttctagctgtggtgaataactgttgatgaagtcatgtatgggagagttgcaccgaaagggaaatttgaggttctctggtggacgtcgcacttgccgccgtattacagctgcatagccaactgtgagattcttgattcaaagtgtgtgcagggggaaaggcgctctaagaagaggaaagaagcgaggtggcgagttctacacagactaatatgtcatagtgggaatctgtttcttacatatatataaacaatgcatatcttgatttttttcaaataattatagtgcttaataatgctacacatgtagaatgaagcgaaattgtagactcgatatttcttatccaacacattttttagataatgggac

SEQ ID NO: 16169 - DNA, 970 bp, Zea Mays
atggtttttttgaaacaaggcccatatggccactatgttcagattggagaggacaaaaagggactgtttccgaaaagggcttccctttccaaggtcaaagatatagactctgttactctagaagatgcaatcgagcttttgcaatatcccaaaattttgggaaaacatcctgaagatgattatcctgtacttataacacattctaaagttggatacaacatcaagcataggagatctctagctctagtgccaaagagtgttgacccaaagaagatgacacttgagcgtgcgctcaagctactaagcggtaaaagtgtcagacgaattggtcgaccgaaggggaaggttgaaaacaaggaacccatggaatggcattagctgcctgcactcgttacaagatcctaaacgtgtgtggtttgatagtcagtcagccttatatccatgcaaaaaattcagagagaagtcaatattcatagcatccgaggttcagcctttggtgtgcttaactgcttatgatgagagcggagaaggcaatgtgtgacaaagaatctggtcaacaagaacaaggactgtcctccgctaactgataacttatactccctcagtgccaagtgttgttctcgctttcggagtagtcaaatatatacaacgacaacatagtcttttgtcccactgcaagaaaaaggatagaaaaaaacgctgaaaaggtaaatgaaagacggtagagttaatggtaaccctgcctatgagttgtcaggttattctcattctttaacagccatgcggttagagatcactttctcctttctcctactgcttggaaactcagcatggcttcgtgttctattttactgccattggggtccacatttgggactcatgtttgtccggtgaattgagtttctatttttttacacttataaatctcactctatcttgttttttgatactatctaaaataatcgatgaa

SEQ ID NO: 16170 - DNA, 1660 bp, Zea Mays
ggagcgtacagcgcagcaggagcccgccgcacgccgccgtcctactccgagatcgagaagcaagagcaagatcttggaggctgatggcaagggaagtcggcgcaacggccatgcccggtggctttcggcagatatgacgagcaacggccatgcccggtggctttcggcagatatgacgagcaacggcagcggaatggaggttggtaaattctcccaagacgatgtttcaagatgtcctgagaaaacagtgaacctacaggatcttcagaacagcttgattgcatctaaggagcttgtaaaagtacttgcccacatatggggacctggagaactgaatccgtctagtgtatcactcatctctgctctacgttcagagcttgatgttgcccgttctcatgttagaaagctaataaaagaaaagaagtctaatccctatgaaattgaggacttaaagaagcaacttgcagaagaaatggaatcgtggaaggtcaaacaaaaggagaaggttgcaaatgctctccaatttatagtttcagagctagacactgagaagaagtcaaggaaaagagcagagaagacaaataagaagttgagtgttgccttagccaacactgaagcctcactgcaggcagtgacgaaagaacttgaaagggagaggaaatctaaaggaagagttgagaagatctgcaacgagctcatcaaaggcattgacgaggacaaagctgaggtggaggcactgaagagagaaaccgagaaggcacaagaagagctccagaaagagcgtgaaatgcttcaacttgcagacgagtggcgtgaacaaagggttcagatgaagctgctagaagcacggcttcagtttgaggagaaaaatgcagctgttaatcagctgcgcgatgaactccaagcttatctggatactaggaaagagcaggaaccaatgaacgatccaatgcaactgtcccatgcgtctgaaaatggcgccaccgcagctgatgatgtagtccctgacagaaatggtggaaacttcagcgaagacgacgcatcggaaggcagtgacatacactcgattgagctgaacgtcgatggcgtcaacaggacctacacctggagctacactccttcctcgaaaggcaggcagaggagcgcatcgaggcatgaatcgttttcggatagagggatggacggcgtgaactcgtggcgtttagagcaaagctttcggggcatggatgaggagctggagggagactgggcagaagggtgtagcaacggaatactgaccatggatcacgacgaggagaggtatctggcaatcaagaatctcagagagcagatgctggccgggtcagggttcatcctatcacaaggtagagaaaatgctgaaagagagtgttgtggcttgtaagataaactgcatatgaagagaattttaaagtaatgtgtcatatgggtcgctgtttgatgctaagatccagctgttcgagaattttaaagttatgttccatgattctgaggttttgtatgtgtgttgttgtccatttaagtggccggaaatagtttataaaaaaagcgaccggaaatataaaaacaaaaggaaaacgttcatctaatgtcctttaaccattgtgtgagtccaccaacttaacctgtctgatttagcttc

SEQ ID NO: 16171 - DNA, 2070 bp, Zea Mays
gtacaacacgtacaccaaacaccggatgccttcccccttcactaataaaccttacccacgagctagccacggcgggccagtgacagtgtggccttcgcgctagcgccattgcataggctgctgggtgctgggtgggtggatagcggcgcccaggcatacgattccctgcgtcatctggctggccgacgggctgcgtgttttaacggctccactcctaacactggctgagctcagcccacacttggcctggcctcgttctgctgaagctcgacccgttccccctaatcttctccaatccctttcttctgggctctgacagggtgacgaatcccatgggcgccgcggcgaggaagcccgccgccgctggggtgttgccaatctggctctgcctcgtctgcgcgtcgagagcgcagccgtacatcggcgtcaactacggcgaggtggcggacaacctgccgtcggcggacgagacggcgaggctgctcaggtcgacgtccatctccaaggtgcggctgtacggcgtggacgcggggctgatccgcgcgctggcggggtccggcatctccgtggtggtgggcgtggcgaacggcgacatcccgtcgctggccgcggacccggcggccgcgtcccggtggctggccgccaacgtgctgcccttcgtcccggcgaccaccatctccgccgtggccgtcggcaacgaggtgctggagtccggggacgccaccctgggcgccgcgctgctcccggccatgcagaacctccgcgccgccgccgcggcggcggggggcggcgccgcggggatcaggttctccaccgtgaacaccatgggcgtgatggcgcagtcggacccgccgtcgacgggcgcgttccacccggacgtggctccgcagctgcagcagatcctggggttcctcagcaggaccggcgcgccgttcatgatcaacccgtacccgtggttcgcgtaccagtcggacccgcggccggacacgctggccttctgcctgttccagcccaacgcggggcgcgtggacggcgggtccaagatcaggtacaccaacatgttcgacgcgcagctggacgccgtgaagtcggcgctggtgcgcgccgggtacggggacgtggacgtcgtggtggcggagacggggtggccgaccaggggcgacgccggggagcccggcgccacggcggagaacgccagggcgtacgtgtccaacctggtggcgcacctgcggtccggcgccggcacgccgctgatgcctgggaaggcggtggagacgtacctgttcgcgctgtacgacgaggacctcaagcccgggcccacgtcggagcgctcgttcgggctgtaccacacggacctcagcatggcctacgacgccgggctggcctcctccgcggcggcggggggtcggggcgggggcgggggcggcgcggcgcagcccaggggcggcgggtggtgcgtggcgcgggccggcgcctcggacgcggagctgcaggcggacctggactacgcgtgctcgcaggtgggcgtcgactgcagcgccatccagcccggcggcgcctgcttcgagcccaacacggtgcgcgcgcacgccgcgtacgccgtgaaccagctgtaccaggcggccgggcggcacccgtggaactgcgacttccgggcgtccgccacgctcacctccgacgacccaagctacggggcatgcgtgtacaccgggggaggccaataatgcacggcgcactggaagaaatttcccgttccttttcagctgcaggctacggggcatgcagtgcagatcctcttgtttgtttcgtcgtaccggaagaaatttcccgttccttttcagctgccctgactgcctgcctgccttgggacaggctgggatgtgtcatgtgtgagtgtgacttcgtgtaaaagaactattggacgctgtcagtgtcgccgtgagctctgtggacggtagtagtacatgtgtctaatgtacaagtagagtgagattgtatctatatatgtattttttccctaaaaataaaacttcattcggctctcatcggaatgcgagattatattgcgag

SEQ ID NO: 16172 - DNA, 246 bp, Zea Mays
tgaaggcggaccggccggcccggcccaaggtccaactacgagctttttaactgcaacaacttaaatatacgctattggagctggaattaccgcggctggctggcaccagacttgccctccaatggatcctcgttaagggatttagattgtactcattccaattaaccagacactaacgcgccccggtattgttatttattgtcactacctcccccgtgtcaggattgggtaatttgcgcggcctgc

SEQ ID NO: 16173 - DNA, 826 bp, Zea Mays
ctgaagtcgaatcccctcacactataaagctcctccattgcgccgccgccactctcctttcggaggaggcggaccaggtaagcagcagcaggaaccctagcaccgccgcatccgcagccatgggtatcgacctcgttgccggtgggaggaacaagaagaccaagcgcacagcgccgaagtccgacgatgtttatctcaagctccttgtcaagctctaccgtttcttggtcaggaggaccaagagcaacttcaatgctgtcattctcaagaggctcttcatgagcaaaaccaatcgcccaccaatctccatgcgccgccttgtcaagttcatggaaggaaaggagatgacaagaggatccaagaggttccagcaatgaaggttactgccctgaggttcaccaagccatatgtgcgctccaagggaaggaagttcgagaaggctcgtggcaggaggaacagccgtgggttcaaggtttaagaaagttgtgggccatcagcatagtaatcacttcctaccgagtagtagcacattttgttgccttggcttggattttgaaagatatttaaggattttcgtgccttgtctactggttactggttgagcaagaagacaatgttcttttgcacctctttttattggtcggcatattttgcgctgtgattggaactgtgttgtgttatctgctggatgtacttactgcatcacctagaaaggtggcttgggccatttggaatcataaaacgaaagttgctcgcttcaagctagaatacacgattcctcgaacccttgttttgagttacaaagtgaaaccacttttgttttgag

SEQ ID NO: 16174 - DNA, 941 bp, Zea Mays
ctcaaatctcgtacaaaaaaaatgctcaaaaagaagtttcgagtcgatggcagtgggtataccaccggagcacgacacggccagcagaccctgccccggttcaactgccgtggccgtctcgtccccgtccagtccacctttccctcttcatctccgactccgccggcggcggaaccccaaccggcgaggatggggaacatcttcgtgaagaagcccaagatcaccgaagtggacagggccatcctcaccctcaagacgcagcgccgcaagctcgcccagttccagcagcagcttgagaaggtaattgaagcagaaaaggaagctgcacggcagttggttcaacagaagaagagagacagagctttgattgcactgaagaagaagaaagctcaggaagagctgttgaaacaagttgacacatggcaaatgaatgttgaacaacagctctcagatattgaactagcaagtaaacaaaaggctgtatttgaaagcctgaaggctggaaacgctgcccttaagtctatacagaatgagataaacattgatgatgtccaaaagctgatggatgacacagccgaggctaaggcttatcaagatgaaataaatgctgttctgggtgagcagctctcggctgaggatgaagaagctgttatggctgagtttgaaaacctagaagctcagcttgccgtcgagtctttgccagacactcctgttactgaagtaagacctgaagagaaaatgaaagctccggctgacacagaagctgtgcctgaggacatagatgaggctattgagctccctgatgtgcctatgaaagcgccagagaggcctgaagctccagaaaaaaccaaaggtaccatatgctatggattatcttctagctgacttcaacatctgcatggtgtaatgcacaatcacggaatagggaacagactgaaacg

SEQ ID NO: 16175 - DNA, 913 bp, Zea Mays
aacatagtgccatagtggacacgatattcacccatttcagccggcagctaggtatttcttttttcaacaagccagaccgccaggcgccagtagccattgagtccttgacccgaagtcccacagccgccgccaaaagggttcctcaccatcttgaacgctcgccggaccaatcccaagcagtcctcgcagcagatggcagttcccggcggccgcaacggactcagggacgaggacgacgacatggcccagcacgccgaggccttcggcggcgtctctgacgacgaggacgtgcccccccaccttcgcgccctcgccaacgccgcccagtccggcgacgtcaccgcccttgtggctgccctcgataatcatgatggcagtattgatgttccagttgaagatggtgatactttgctccatctggcatgcttatatggtcatcttccttgtgtgcagctattgctggaacgtggagctagcttggaatgccaagacgaagaaggtgctattcctcttcacgatgcttgtgctggaggcttcactgagctggtccaatatattctcaactttgctgccaacaaggatggttgcgtagtgagaatgctcaacactattgattctgaaggcgatacgccgctccatcatgctgctagaggagaacatttggatgttgtcaagcttcttctccaggctggggcgtcccccaagaaggagaacacttacgggcagacacccgctgatatggctgaccaagacaccgaagttcgaaccctgttgactgccaagcaaattgaggcaagcacacacatgagtgatgattaagcggcattggaatccttagttgcaactgggatgggagagaaggggtccacagctacgagacgatggttcgagaggagttgacggcgatggcggc

SEQ ID NO: 16176 - DNA, 1019 bp, Zea Mays
ctgatgtggtgtttcttgatttaaacatatgattatgatggatgcagcgtaatagaggtcagtttacatcttcaaaaccaaagcctgatgaaatagcagcatcagaaatggcagctgcagatggctctctgaattgggcactagttgaaggccgacctccatctgctgctgaatgtcatcactgtggtattaatgcaacagctacaccaatgatgcgtcggggacctgatggaccaagaacactatgcaacgcttgtggcctcatgtgggcaaataagggtctcctgagggacctatccaaatctcctgtacctcttcactctatacaacaatcagctccaattctaaatggtggtaacggaagtgccatgtctgcgcttggctctgagctagagaatgctgcagcagccatgggcaatggccacgagccataaggtagtggtgtttagccatgtgctaaagccacgagcatcatcgcgcaatgatctctgcagtaggcggtcagttggagcctgcttagatatatggaatcctgcgcctgtaggttttaagagctgcgacagtgttttgtcccgtgtagtcatgtttgcagccgtcgcagctatagcaagtttgtttcttgtcttgagtcgtgactgttaagaactgatgaagttcattacttacgtgcgtgtagttatacttagatatgagatgttctagccatgcagcaacgttttctatcaatgtcagtaattagggagcgagcgtttgtctcatggattgggcctcgaaacaaagaatcgacgcccaggagctaaactacagaaacatttcagctagagtaggtctggaatgatggaagagaagacaacaatgcaaatgaaattgataaaataacttaatataatatgggacaactatggttcaaatgaaaaagtatggttgacttagatttatgagacatgagatcttacatatataatggtcttgtttagaaagcttgctatacaaacagtgttaatggttttttactatgc

SEQ ID NO: 16177 - DNA, 2867 bp, Zea Mays
tactctccccttccccatccccatccccatccccatcccacccttcccatatcccaccaccacctcctctctcactacctatctgccatcccgagtgattgtctgtgcgaccaagacatggcttctgacggcggcggcagctcccctcctccccacacgccgctccggcggtcgccgtcgccgtggttccgctagtccttatgcttcgtccccttctctcggggggttcgagacgccgccgcaccctggccgccgcacgccgtccggagctggggctggcgcccctcggcagccgcgtcagaactcgactggccggttcccgccgacgccctccactccaatgtccaccgatgacgtccctccatcctccgaagctggggacgacgagaccgacggcggcggcggcgtcgacgccaccccggtcttcgtctggggcaccaacataagcgtgcaggacgtcaacgccgccattctccggttcttgcgccacttccgggacccgcgcgacgctggccgcgtcgacccggtcatggacgagggcaagtacatgcgcgccatccaccgcatcctcgagctcgagggcggggagtcgctcgacgtcgatgcgcacgacgtgtttgaccacgacccagacctctacagcaagatggttcgctatccgctcgaggtgctcgccatcttcgacatcgtgctcatggacctcgtcgcgcgcatcgagccgctcttcgagaagcacatccagaccaggatctacaacctcaagtcgtccatttgcttgaggaatctcaacccatctgatattgagaagatggtatccatcaagggtatgataattagatgcagctcggtcataccggagctcaaggaggctgtgttccgctgcctggtttgtggtttctactcagagcccgtcatggttgatagaggaagagtaactgaaccacacatttgtcagaaagaacaatgtaaagccacaaattctatgaccctagtgcacaacagatgcagattttcagacaagcagatcataaagttgcaggaaacaccagacgagataccagaaggtggcactccacatacagttagtgtcttgatgcatgataagcttgttgatgctggaaagcctggagatagggttgagataactggaatatacagagctatgagtattcgaattggaccaactcaaaggacagtgaagtctatattcaagacatatattgattgccttcacataaagaagacagacaagtctaggcttcatgtggaggacaccatggatattgataattctaacgctagcaaatctactgaagaggattttcttagtgataaggttgagaaactaaaagagctttcgaagttgcctgatatctatgaaagattgactagatcattagctccaaacatatgggagttggatgatgtcaaaagaggtctcctttgccagcttttcggcggcaatcccttgaagcttccttctggagctagtttccggggtgacatcaatattttacttgtgggggaccctggaacaagtaaatcccagcttctccagtacatgcataaactgtctcctcgtggtatctatacgagtggtagaggaagttctgctgttggtcttactgcttatgttaccaaagaccctgagactggcgaaactgttctagaaagtggagcacttgttttgagtgacaaaggtgtttgttgcatagatgagtttgataagatgtctgataatgcccgaagcatgttacacgaggtgatggaacagcagacagtatccattgcgaaggctggaataattgcatctttaaacgctaggacatctgtcctggcatgtgccaatcctactgaatcacgttacaatccaaggctctctgtaattgacaacatccacttagcgccaacgctactttcaagattcgacctgatttatcttatcttggacaaggcggatgagcaaactgataggcgcctggcaaagcatattgtttcgttgcattttgagaatccaaatttagaggagctcgaggtcttggacttgcagacactagtttcctacataagctatgcaaggaagtatattcagccacagttatctgatgaagctgcagaagagttaactcgtggctatgtcgagatgagaaaaagagggaatagccctgggagcagaaagaaggtcataacagcaaccgctagacaaatagagagtttgatccgtctcagcgaagcattagcccgaatgcggttctctgaagtggtcgaggtgcgggatgttgtggaggcattcaggcttcttgaagtcgccatgcagcagtctgcgacggatcatgcaactggtacgattgatatggatctgatcatgacggggatatccgcaagcgaaaggcagaggcgggagaacctcgttgccgcaacccgtaacctgattgcggagaaaatgcagcttggaggcccctcgatgcgcatgattgagttgctggaggaactgaggaagcagagctcaatggaaattcatatgcacgaactccgcggtgctcttggcaccctgatgactgaaggcgcggtggttatccatggagacaacgtgaggagagtttgatgtcttgacggccatctgcggtgatgcttctataaggctccaacccgccacttccttgaacagacaaggttccgaagataactgtagcacttagccgtaacttgtggtccgaggtctaaactggtccagatttgtagcagtattgctagttgtagatttttttttaaaaaattgttatcagaattttgttctcttgctattgtccgagtttactgcaacaaggcaactatcatctcgttctctgatcagtatcatgctgggt

SEQ ID NO: 16178 - DNA, 121 bp, Zea Mays
atttgggctgcattcccaaacaacccgactcgttaacggcgcctcgtggtgcgacagggtccgggccggacggggctctcaccctcctaggcgtccctttccagagaacttgggcccggtc

SEQ ID NO: 16179 - DNA, 1789 bp, Zea Mays
aggattaagcgaagagggttgaagaggcccagcccagctgacaacaccggcctccgagaagcagcgcaggcgcagggcattccagaacgttcggcggcggcgaggcgacacgcccaccaccagtcagccgccccgccacagccatgcgcctccacgccggcgcacgcctcgcgctcctgctcgcccgccgctccctctcctcctccccccgtatcccgcgggtgcacacagggatacggagcgaggcgccctcccggagctctcccttctatccgccgagcagcgcccgcaggtccttccacgggaccaggccggtggcggcaagggactactacgatgtgctcggcgtcagcaagagcgccagccaggcggagatcaaaaaggcctattatgggcttgcaaagaagctccatccagacacaaataaaggtgatgcggatgcagaacgcaagtttcaagaggttcaacgagcttatgagactctaaaggatgaacaaaaaagatcattatatgatcaggttggccctgatcagtatgagaaaactgcttctggcggaggcggaactggcttcgagggtggttttggaaatccatttgaggatatttttggtggtggcggtggcggtggtggaatgaatgatttctttaggaacatttttggggatagggactttagaggacgagatgttaaggttgcactcgaactatcatttatggaagcagttcaagggtgcagcaaaacggtcaccttccaaacgtctgtaacatgtgaaatctgtggtggagccggtgtgcctcctggaaccacacctgaaacatgtctatcttgcaggggttcaggatttatattcatgcaaaccgggcccttcaggatgcaatcaacctgcacaaaatgtggtggttctgggaaaactgtgaaggaattctgcaaggcatgcagaggaaacaaagttgtgcctggaaggaaatcagtccgccttgacatactgcctggtttggataatgaggataccataaaggtggttcgatcaggtggagaagacccagatggccgtccaggtgatctttatgtgaccctcgaggttcgtgaggatcctgttttccgaagagagaaaggtgatattcatgttgatgctgtcctgaatgtgactcaggcaattttgggagggacagttcaagtcccaactctcagtggagacgttgttctaaaggtcaagcccggtactcaacctggtcagaaggtagttctgagaggaaaagggatcaagacaagaaactcaccgcactacggagatcaatatgtccatttcaatgtcaacatccccgagtaagcaagcctagccgcctctcaaaatggagtagtcttatgctatctatcgtgcatccaactgctgcaagtgagactcacgtatgatgtcctgcagaaatttgacgtctagacagcgggagctgatcgaggaattcgcgaaggaggagcaaggcgaagacgagaaggacgccaaggcagcagctggagcatcggggggatagccggttttaggagccacagtagtgccttttagctggtatttataccgtgaccatagacctgtctcaaattcgcagcgaaaaaaatatatagataggtctttgtttcggattttgtagctggaataaatggataatacgtctagaactgattttctgtcttctttttcgtgagtctgctaagcatgatcccttcctcgcacggtgcacctctccctcctcttctcgcttcctgcaggccaacccgacaggtcatcgatag

SEQ ID NO: 16180 - DNA, 3722 bp, Zea Mays
atttgactgtgctgagcgacagcgacggaggaagccaagccggcagacgtctgcttctcttttgttcgtttttaccctcgcttcgcgtcgcgtcttccttctccctcctccgcatccggctgctgcccctgagcctgcccccaccccctcggcgcccccgccggagcgccgcctctacccttcgatcccggttccacgatgcagccgccgatggggagcgagaggaggacgccgcccggccgccctgtttcagccttcgtgccgggcgccgctgtcccgcctccaccgtttgccgccggtggcccgttcgctccgccgccgcggcagggagtgccgcctcctcagtctggtgctgcggcgcctgctttcggggctgcaccacccgccgcaatggggggtgggttcaggggtccaccgccgtcgcagggcccctacggtgcgggcacactgccccacggcccttttgcttccgcgccaccgcctcagggctctttcacctccgcgccaccgtctcagggctcctttgcctccgctccaccgtcccagagtccctttacttcccctccaccgtctcagggccccttcgctgctggaccaccgcctacgggcccttttgctgctacaccagcaccttttcgccctccaccgtcatcccttgcgcagccacaatctcccacgggaggcgctttgcctgcaccaccaacatatgcgaggccgccaccgccactacagtcacaagggtattaccctggtgcaccacctgcgaaccctcaatactcaatgtcaaggccagcatttcaacaaccaatgcagaatatgccacctcctccaatgggaccagctaccacatttggtaatcaggcagcttatccaagtgccgggcctccagtcggaggcacacttcagagcttagtggaggacttccagtcactgtcactgagctctacgcctgggtcacttgaccctggtgttgatgtaaaagggctgccaaggccattggatggtgacgaggaaccagttaagcttatggaggcatacccattgaattgccacccgaggtacttccgtctgacaacccatgcgattccggcatctcagtcattggtctccaggtggcatttgcctcttggagctgtggtgcacccacttgcagaatcacctgatggggatgaagtcccagttatcaactttgggtctgccggtgtcattcgctgtcgaagatgcaggacgtatataaatccttatgcgacatttgcagatgctggaaggaaatggcgctgcaatctttgcgcgttgctcaatgacgttcctggagagtacttttgtggtcttgatgctagtggcagaaggtacgatactgatcaaagacctgaactctctaagggaactgtagagtttgttgctccaacagaatatatggtgcggccaccgatgccgccttcctatttctttattattgatgtgtctgtatccgcagtacagagtggattgcttgaggttgttgcaaagaccatcaaatcatgccttgatgaacttccaggctttccacgaacacagattggattcttaacctttgacagcaccttgcattttcataacttcaagtcttctttgtcacagcctcaaatgatggtggttactgatttggatgatgtttttctgccattgcctgatgacctcttggttaatttggtcgactcaagacatgttgtggaatcatttcttgatagcttgccaaatatgtttcatgacaatgtaaatgtggagtctgctcttggtccagcacttaaagcagctttcatggttatgagtcaaattggggggaagttgcttgtcttccagagtactttgccatctcttggtattggtcgtttgaggttacgaggagacgatgtccgtgcatatggaacggataaggagcatactctgagggtaccagaagattccttctacaaacagatggctgctgaattcacaaaatatcagattgcagtggacatattttctttcagcgataagtactcagatatagcgtctttaggatctttggcgaagtatactggtggtcaggtgtaccactatgcatcattccagacacctacacatggtgacaaacttaaacttgagcttagtagggaccttacacgagagactgcatgggaatctgttatgcgtatcagatgtggaaaaggagtacggttcacaacctatcatggtcatttcatgctacggtccacagacctgttagcccttccagctgttgactctgataaagcttttgcaatgcaactgtcgctagaggagacattaatgaccacccagactgtatacttccaagtggcgttgctatatacatcatcctctggtgaaaggcgtatcagggtccacacagcagctgcacctgtggtcacagatcttagtgaaatgtatcgtcaagcagatactggtgccattgtgtcattgttgggtagaattgcgattgaaaattcactgtctgataagctggacagtgtccggcagcagttacagttgaagctcgttaaaagtttgaaggaataccgcaatttatatgttgtacaacaccggataggcgggagactgatttttcccgaatctctaaggtttttgccattgtacatcctggctatctgcaaatctcttgctcttcgtggaggttatgcagatgtttctcttgacgaacgatgcgctgctggtttctgcatgatgatattgcctgtaaaaaggctgctcaattttatctatccttctctgtacagagttgatgaagtactcacaatggaaccaaacaaggttgatgatgtttcattgaagcgattgccattaacgtttcagtgtttagatactggaggtttgtacctccttgatgatggcttcactttcctagtgtggttaggtaggatgctcccgcctgaacttgtgaacaacattcttggagtgagcttggcaaacttccctgacctatcaaagattgtattgagagagtgtgacaatgaattgtcaagaaatttcatgaaaatactaagatccctgcgggagaaggatccttcctatcaccagctatgccgtgtggtgcgacagggtgaacagccaagagaaggctatctgcttctatctaaccttgttgaggaccagatggctggaacaagtagttacgttgattggatacagcaaattcaccgtcaaacgcaaagctaatgacgaagaaccaacaggaagtgatgcttggaatttttgccttagtgtaaactgctgcaggatgtagattcagctgctgccggttccaaatcaatctcgcaaccccgtggcagatcttgttcagaagccagcggcccaacatgccggcttgtaagcagcatttgtctggcaaaaaaaatgctgttaatatctgtccatgtgattattctatttttgcacagtgagaatacagctgttgtatcggaataagtaggcaacaataccgtgggtattatacaactgggttcgtgtagtggcctgtgcgtttattaatcgcgttctttcctcatctggattcagttacttgccatttgggttataaatagttcatcgtgtaaactaactttttggctactttagtctgtttgtaatgggatatctcatttaatttaactgacattccattattcggacgttcctttatccgtggtttatttgtataaccactaaaacttgtagctttagag

SEQ ID NO: 16181 - DNA, 1670 bp, Zea Mays
tccccgcctgctgaaacaactcgtcctcgagctgaaagtcggggttactgtacttactgtctatgtgtttttatatgggaggctttatctggttatgagtggtctggaaaagtctattatgctggatccacgaaatcagcagaatgtcaaggctctcgaaaatgcactggcttcacagtctattttccagctaggtctgctgcttgtcctccctatggtcatggaagttggcttagagaaagggttccgcacagcattaggagagtttgtaatcatgcagcttcagttggcatctgtgttcttcacattccagcttggcaccaaaacccactactatgggagaacaatactccatggtggtgcaaaatacagaccaacaggtcgtggattcgttgtgtaccatgcaaagtttgctgaaaattaccgtatgtactcccgtagccactttgttaaaggactggaactcttgatacttttggttgtatatctagtctatggaagttcctatcgcagctcaaacatatacctatttgtcacctgctccatatggttccttgttgcttcatggctcttcgcgccatttatcttcaatccatcatgctttgaatggcagaagactgttgaggactggacagattggaggaagtggatggataacagagggggaattggcatgtctgtggaacaaagctgggaagcctggtgggtaactgagcaagatcacctcaggaagactagcatccgagcttttgtgttggaaatcatcctttcacttcgatttttgatctaccagtatggcattgtctaccatctgaacatagcagatcaccacaaaagcattatggtatatggagtatcatgggtggttatgctccttgttcttgtagtgctgaagatggtttcaatagggcggcagaaatttggaacagacctacagcttatgttccgcattctcaagggccttctcttccttggttttgtctctgtgatggcagtcctatttgtcgtcttacaccttactatttctgatgtcttcgctagtatccttggatacttgcctactggatggtgtcttcttctgattggacaagcatgctcaccattgattaggaggaccctgctgtgggactccatcatggagctcggaaggtcatacgagaatataatgggtctcgtcctcttcctgccaattggtttcctgtcgtggttccccttcgtctctgaattccagacacggctgctgtttaaccaggcatttagccggggcctccagatctcaaggatccttgctggtcagaaggatgttagcgagttcgagttcaagtgaccaatttcatccctcttgcaagcaaaccaaactcactttcatgtatttgtttacgatgatcgattttgggtgtctgtactctagtatattttcatcacgtttactactataatactgtctgtacttgagaatgttttgcctctgtaaactgacatgtagaatttctgtaatatatttatggaatttgataacttccatccatgcactgaacgctttgaatggaccattattactaaaggggtaacaaatttatcattgtaaggtcaaacatgtttgggctggaagttttgctattcaatactccaaacatgtttgtaagtgttagatactcatttaaggtttg

SEQ ID NO: 16182 - DNA, 1455 bp, Zea Mays
ctagggtttaaggattttcttctccgctcccccggcccccattcgcacccagcacagctacagacggtctctatggccaagaaaggggcgaagagaaagcagcagccgccgccggcggctcccaccgcgaagaaggggagcaaggctgtgcccccaccgaaggctgcgaagagagcgcccaagaagcaggagcttctcgagtcctccgacgattctgatacggagcagcagctcctggaggaggcctcccacctcgacgtcccctctgattccgacgccgaagagctctctgggtcggacgctgaggctgacgagctctcgggctcggatgccgattccgacggaagctcgagcagcggcgacgacgtggaggatgaggaggaggaggaggaaggtgatggaagtgatgatgaccccctggcggacgacttcctcgctggtagcgacgaaggaagcgagggtggtgactctggactggagtcagacgagtctgatgacctcgaggcaaaatcacgagcaattgatgagcagaaaatcaaggcggaagaagatgcagaggaggaacttcaaaccaacataagatcagaatctgatgagttcagattacccacggcagaggagctggaggaagaggcacacagaccacctaacctaccaaatctcaaaaggaggatttcagaaattgttcgagtgctctcaaacttcagcaagctgaggcagaaagatgttccacgaaaagattatatcgaacaactgaaaactgatatcatttcatactatggatataatgattttctagttgaagcattaattgagatgttcccagctgttgagcttgttgagttactggaagcctttgagaaaaggccgcccgagtgcttgcggacgaatacactaaagacccggaggagggatcttgctgctgctcttataccaagaggatttaatttggacccgataggaaaatggtcaaaggtaggattagttgtctatgactccaccatttcagctggtgctactactgaatatatggctggtcattacatgaaacaaggtgcaagttcgtttttaccagtgatggcacttgctccacaggagaaggaacgaattgttgatatggcggctgctccaggtggtaagactacttacattggcgctcttatgaagaataccggaatcatctatgcaaatgagttcaatgagaaaaggttgcatggacttttgggaaatatccatcgcatgggtgtgacaaataccatagtttgtaactatgatggtaaagagctacccaaagttcttgggatgaattcggttgacagagtattgcttgatgctccctgcacaggaactgggaccatttggaaggatctacaaattaaaacatcaaaggacattgaagacatcaggagctgcgcctttgtccaaaagcccgttcacgcgcacggagaggtccgg

SEQ ID NO: 16183 - DNA, 1854 bp, Zea Mays
gtttttactgaatcctcatgctccatgccaaggccgccccagatttaggatgtgtacagaggggctgtattcttgtgtataggttctctttctatcggtcaactgttgctgattcggacggaatgttggaggatcaatcttgcctgatatcaaggtcgctgccgggttcctgtgagcaggaatccagactagcttacatgacttaccacctacttgagatcacgaggagtaagcgcccgcctgggaccctgtcgattgagcacgacgtcgtggcagcattgactaaaaggacaaagtcctctgagcaccaaaacagcgaggcgctggattgtcaaggaagtaatggtcagggcgactcagattcaagcaccctgataagttccattggccgggacaactcgatcaactgtcttgctcgttgttctcgttctgactatggttctatcgcatcactgaaccggagcttccgatcgcttgtgcgcagtggcgaactgtacaaggagcgtcggcagcaggggatttcagaacactgggtctacttctcttgcaacgtgcaggagtgggaggcgtatgacccctaccgttcacggtggatgacgctcccaaggatgccccgcaacgaatgtttcatgcactctgacaaggagtcgcttgccgtgggcaccgagcttctggtgtttggaaaggagatcctctcgcatattatcctgagctatagcatcctgacacattcatggtcgcggggcgttgaaatgaacgcccctagatgtttgtttggatcagctagttttggagagaaagcaattatagccggaggcatggatgctgatggaagggtgcttcgctccgtcgagctgtataactcggaaaccaagaggtggacaacacttccaagcatgaataaggctaggcggaagtgctctggtgtcttcatggatggcaagttctatgtgatcggtggaatggccagtaacacagaagtgcttacttgtggagaagagtacgacctagatagaggtacctggcgggtgatagagaacatgtccgaggggctcaatggtgcaagcggcgctcctccactcgtcgccgttgtcgaaaacgagctatatgcagcgcagtacgccggaaagctagtgaggaagtacaataaaagggacaactcgtggacgacgctgggggagttaccggagcggccagaagccgtggatggctggggcattgcgttccggggctgcggagagcggctgttggtcatcggtggaccgagagtgctgggcggcgggatgatcgagctccattcctggattccaagcgaggggccactgcagtggaacatgatcggaagcaagccctcgggtaactttgtctataactgtgctgtcatggggtgctgatacgtgcgcccctcaaaacataccgtcgacgacacacgaaagattgtgatattgggtttttttttattatcaaatggcataaagcactgattaattccgcctgacgggtaatctctgcattcttttttttgacatttcagattttactcaaggttcgtccaatagagctagtcggttccgtgtactcgttaatagctagctacccattggttcctgtgctcagcacattctatttgcagtccatctgtacctttggtccatatgatatactctgttgaaatgagtttttttctgagatggacgcgtacaggtgataaattgtaattggggggtgggtaaccgtgcatctatatgatttgtttgtatcatgttctgaaccgtgtctcaacgctgtaattctattgtgcaaatgtctcttttccaagaactgcatgaaaaaaaaaagaaaagaaagtgccca

SEQ ID NO: 16184 - DNA, 2730 bp, Zea Mays
atgggcacagggggagacggggacaaggcggggccggcgctgccgctggaggcgcttttggcgctcgggctcgaccagcgcaccgccgagaacgcgctcgtcaacgccaaggtcaccgccaacctcgccgccgtcatagctgaggctggtataaaggaatgtgacaagtcaattggtaatcttctatatgcagttgccaccaagtacccaactaatgcacttgttcatcgccctgtccttattagctatgtcttgtcaacaaagataaagagccctgcacagctagatgctgccctctcatttcttactaatactggtcctgattctctagatgtggacaagtttgaagaagcatgtggtgtaggcgtggttgtttctattgaggaaattaaatctactgttactgacattcttgaggagaatatggaagctataaaggagcagcggtatcacataaaatggtttggtttccgattcaacttgaatgataaattgcaaacacttttacgaaccaaaatcttcatgcttgcaatttttatcctatagttcagtaatttcctgaggaatgatagttggacctaatccttaatcctgtcctttttggcttttcttcagttggtatgctatgtggacaggttaggaagagacacccctggggtgatgctaaggcagtaaaggaggaaattgacaagaggcttgcagaaatcctaggtccaaagacagaagctgacagtataaaaccagtgaaaaagaagaaggaaaaaacagcaaaagttgaggagaaaaaagttgcagttgccactactgccccaccatctgaggaggaattgaacccgtatactatatttccccaaccagaggaaaactttaaggttcatacagaaatatttttcagtgatgggaacatatggagagcacataacacaaaggaaattttggaaaaacatctcaaggcaactggaggaaaagtgatgacccgttttccaccagaacctaatggatatcttcatattggtcatgccaaggctatgtttatcgattttggtctggctaaggagcgaaatggccattgctaccttaggtttgacgacacaaatccggaagctgaaaagaaagaatacatagatcacattcaagaaattgtccattggatgggatgggaaccctacaaagtaacatacacgagtgattatttccaacctttgtatgagcatgctgttgagttaattcggaaagggctagcctatgtggatcatcagactgcagaagaaattaaggagtacagggaaaagaagatgaatagtccatggagggataggccaattgaagagtcattgaatttatttgaagacatgaggcgtgggttgattgcggagggtgcagcaactctccgaatgaagcaggatatgcaaaatgagaacaaaaatatgtctgacttaatagcatatagaataaaattcacccctcatccacatgctggtgataattggtgtatctatccgagctatgactatgctcattgcatggtggattctcttgaaaacatcacgcattcgctgtgcacacttgagtttgacatacgccgcccttcatactactggctacttgttgccttgggtctttatcaaccatatgtgtgggaatattcgaggctaaacatatcaaatactgtgatgtctaaaagaaagttgaatcgacttgtgacagagaactgggtagatgggtgggatgatccccgcttgttgacactggctggactccggcggcggggagtatcatcaaccgcaataaattcctttatccgtggaatcgggataacaagaagtgacaacagcttaattcgtgttgatcgtctagaataccacatcagggaagagcttaacaaaacagcccctcgaaccatggttgttttgcgtcctctaaaggtggtaataactaacttggaagaaggaaaagtactagaccttgatgggaaaatgtggccagatgcttctgatactgatgcttcctctcactataagcttccgttctcaagaactgtctacattgagaaaactgattttcgccttaaggactcaaaagactactatgggctggcccctggtaaatctgtcatgctaaggtatgcgttccccataaaatgcacagacgttatctatggtgatactcctgatgatattgttgaaattcgagcagaatatgatcctttgaagacttctaaacttaagggtgttctgcactgggttgctgagccagcacctggtgtcgaaccattgaaggtggaagtaagactattcgagaaattgttcatgtcagagaatcctgctgaattggaggattggcttggtgatcttaacccgcactcgaaagaggtgataaaggacgcttatgctgtaccatcgcttgccactgcagttctgggcgacaagttccagtttgagcggcttggttacttcgccgtggacacggactccactcctgagaagctcgtgttcaacagaactgtcaccctccgtgattcattcggtaaagctggaccaaagtgacttccagtgtaatgtaggtagggcgtgggtgctcggttgcataggcgcacctgagctatacttttttttgaagaagaaaatgatcttgtaatacagaacagcctaaaggcctcaatctttgtaaaatttacatgtgactgcagtgcagcttgtttgcttcgaaggaatcagattttgtatggta

SEQ ID NO: 16185 - DNA, 1839 bp, Zea Mays
ttttgacaaggtcattagtcctgtatccgttgcacatttctcacagtacaagttagttgatttgctactcaagaagcttgaaggtattggtttccagacatgctttcccagtgagattggtaactcaacacaagatttggtactggaaagcaagatattgatgggacacaagtgcacatcccttgatcagactgatgagggcattctggttggagcatcagttaacaatggagggatgataatagagagaaagctacactgtggtcttcttatagggacagatggcgcaagaagtacagtgcgtgaattggcaggtatatctatggaaggtgaaagggatttgcagaaactggtcagtgtgcattttcttagcagagatctaggcaggtatttgtccagtcagaggccagggatgctgttcttcatttttaatccaggtgcaattggtgtactagttgcacatgacctagagaatggggaatttgtattgcaggttccattttatcctcctcagcagatgtttgaagattttagtgctaaggtatgcgagcaaattattttcaaattagtcggatgggagccagcagatgttcatgttttagacataaaaccatgggcaatgcatgctgaagttgcagagaagtacatctgctgcaataatcgagtaatcctctctggtgatgccgcacaccggtttcctcctgctggtggttttggaatgaacaccggtgtccaggatgtacataatttggcttggaaattgggcttactgctgaatggtgtcgcctcaccatcaatattacaaacttatgagtcagagcgccggcctgttgcaattttcaataccgaacttagcgtggagaatttcaaggcagctatgtctattcctacaacccttggccttgatccaactgttgcaaactcagtgcatcaagttataaatagaagcctcggatcaatcattccaagaaatgtgcagaaggcagttctagaaggattgttttctcttggtagggcacaagtctcagactatatcctgaatgagaaaaatcccattgggtcgttgagactagcaagattgagaagtattctcgatgaaggcaaaagtcttcagctgcagttccctgcagaggatcttggcttccactatgcagaaggtgctctagttgttgaagctagttgtgagaagactcatgaaggagaaaaactacagcattctaagagggcatcaagagagtacatcccatctgctaaggttggttcgcggcttccccacatgctagtaagagaagtgcctgcttcgagtgagggcgcgttctcaacactggacctagtgagtggggataaactcgagtttgttctcatcattgcaccagtgaaagagtcatatgagattgcccgtgccaccctcaagatagcagatgagcttacgctatcagccagagtatgtgtaatgtggccacgaggttcgactgatgctgaagtggaagagagcagatccgagttgacaccctggacaaactacatcgatgtcgaggaagtgcctagggtgtcgggtggttcatggtgggagatgtgtcgtattagtaggaagagtgtccttttggttaggcctgatgagcacatagcatggctaacagaactggacagggtgagggatgctgagtcagaaattaggagggtcttctctcatgttctgtgcctaaatagccaccgggtgtaagaatttataaatttccttccatttaggctttgtttagatactttggtattcactttaatccacatgtatggaagcggattaggttataaattaaattaatttacatcctaatccac

SEQ ID NO: 16186 - DNA, 1400 bp, Zea Mays
ttccacacatcaacatgaccgggcatgcaagcaaatgtctactggcaaggagggcactacgagcactgcgaggccttgttcgattgaagtcattggttgagggtaattcagtaaagcgtcaatctgcaagcactctgcgctgcatgcaaactctatcacgggtgcagtcacagatatcttccaggagagcaaagatgtccgaggagaaccaggctctccaacgccagctcctacttaaacaggaactggagaatttcagaatgggtgagaactgggatgacagcacccaatccaaggagcaaatcgaggcaagcctgataagcaggcaagaggcggcgataagaagagaaagagcgcttgcatatgcattttcacaccagtggaagagtacatcgagatctgtcaacccaatgtttgtagacccaaacaacctgcagtggggctggagctggctggagcgctggatggcagcaaaaccatgggaaggccgcaatggggctgacaaggagagcaacattgaccggggatccgttaagagcatgagcttgaaccttggagagggtgagatcacaaaagctttcaaccgccgggactcaaagctagaaaagccatcgccgccaactccaagaccggcccgtccaacttccaggcattcccctttgacgccctctgctagagtggcaccgatacctgcgaggagaaaatttgtcacgcccaagaacgggctttcacaggtggacgatgacgcgaggagcgtgctcagtgtgcagtctgagcggccaagaaggcacagtatagccacctcgactgtgcgggacgacgagagcctcacgagctccccgtcgctcccaagctacatggttcccacagaatctgcaagggccaaatctcgcctccagggttcagcaacggccaatggcgcagagacacctgagaaaggaggctcgactggaccagccaagaagaggttatccttccagggtggaactgtgtctgcctcgccaatgcgacgacattctggtcctcccaaggtggagatcgcgccaccacaaccagaggccttggtagtcaatggtggaagcaagtgacacatatgtgatgagtaccaggatgagaaacggattatgaagatattagtttcattttcatccatgaatagaagttaaaagtggtatcatatctatgaatggtttcaattgtttttctgttacaaccacattatttgctatatacgattcacagtacctgccagttgattccattggttgtttctgtaaaacaaatatcaatttgtcactagaatctgtgatgtttgtatgtaaacaggtcctctatttatgtgagacatatatttcttttctttcagaagatccccttgaagtgtgttacccttgcaagct

SEQ ID NO: 16187 - DNA, 3611 bp, Zea Mays
cactatattgtataaataggtatatccccggaaaaggttaagatctgggatgatcgtaaacaagtgccattatccatttttaagccccatgatggtcaagctgtttattcagttgcttttcttacagcacctgaacgaccaaatcatataaatctaattacagcgggtcttctgaatcgagaagttaaaatttgggcttctactaatgaggatggctggttgttgccaagtgattctgagacttggaagtgtactcagacgttggaacttgttagttctctggaacctagagtcgaagaggcatttttcaaccaggttgcggtgctgccccaagcgagcctgattttgcttgcaaatgctaaaaagaacgctatttatgccgtgcatgttgagtatggcccagatcctgcttctactcgcttagactacatagcagatttcacagttgcaatgcctatattaagccttacaggaacacatgatagccaacctgatagtgaacaagttgttcaagtctattgtgttcaaactatggccattcagcaatatggtctagagctaccactctgtttgcctcctacagctgatagtactgggtttggaagagatcctgctatttctcgtgtttacgaggcacctctggaaatggcaggaacagagtcatctacaggaactagtttcacagattcttactctgtcagttctttgagtaaaccatcaactgttgaccagtctgcagagcttgatctgaaaccatcagctccaccgcttgcatactcagaaggtgatggttccgtgcctcttccatctgcacctcctgcaccgaagatggaggctcctggatcaggaccagcacctggaggtcgtggtatagatcaatcagcttttgactatacaacaaacagaaatgtggagcgtgatgttttgaaaagacaagatacacccatgcccattagaaaggatatcttaggtaaagatgagccaagagatggtcacagtgatgttccaatgcttcccaatccccgtttgatgtttcaggttggagggaatgctacgcatttggttactccatctgaaattatatcgggcactctctcgtcttctgaaaacaatgatgcttccaaatctgatggaggaaaaagtcaagatgtttccagcagaagctctcaggttccagaagtggaaccaaagcatattgatgagagtaaacaagatcaaaatttgggactcgaagctgtcaaagaaactcagattgtctgtgagaatatggagaaaactcggagttccttggaccaaactgttgaaatgatcagtgagcgctcagttacaactgataagtacagcgtggaagaatcacagtcatcatctgatcgaccgacatcagaccagactggtatcagtgaaaatgttctgaagaagtttgtggaaatgcctgagaaaattgattattcctctgcttctagggagcaatcatcttcatttacgaaagaggagaaagttttgcatcctcaaacatctggtcaaccgtcacctcctgtgagtgctttcaattcaactgagtcacatgagcctttgagctccacatacctaccaatcacagtcagctcctacccagaagttggtgccacacaagggatgctgcaacagctcatggggaggcaggaggacatggaaaagcagctgagtactgtggttcctgcatccatcgcaaaggagggcaaaagacttgagacatcattagggcgcactgtagagaaatcgatcaaagctaatattgatgcattttgggctcgtctccaggaggaaaacactaagcgtgaaaaggctgatagagatcgaatgcagcaatttgttactctcattacaagctcaataaataaggacttaccttctaatctggagaagtcacttaagaaagaaatttcttcacttgggcctgttgttgctcgtgcaattacgcctattattgagaagtgtctaacctctgctgtttctgattcagttcagaaagggttgggtgacaagttgttcaatcagctggaaaagtctattactggaaaacttgaagctacacttgccaggcaaatccaaatccagttccatacatctggaaaacaggctcttcaggatgctttacgtactagctttgaatcattgcttgttccagcgtttgagcaagcatgcaagacaatgtttgagcaaatagatggtgcatttcaaaagggaatgtctgagcactccaccgctattcagcatcaagtcgagtcttcacatagtccgttagcgctaactctaaaagaaatcatcaattctgcatcatccatcacccagagtttttcatcggagttacttgatggcaatcgcaagctactggcacttgttacttctgggaatgccatggcacataataccagtgctttgcagcccattaatggtcctatgggtggatcccaggaggtggttgttgaggctccgttagatcctatgaaagagctgggcagactgatatctgaacgcaagtttgacgaagcatttacaatggctcttcaaaggagtgatgtttccatagtatcgtggctatgctcccaggttgatttgcgggcattatgtgcaatggtcccagtacctcttaaccagggggtcctcctggccttattgcagcagctagcaattgacattcacaatgagacatcacgaaaggttcaatggatgacagatgttgccatggcaatcaacccagcagaccagatgatcgcggttcatgtgcggcctatctttgagcaagtctacaaccaactggcccaccagcggacactccctaccatgaccgcagcagatggcaccagcatccgtgtgatcatgcatgtaattaactcagttctgcttagctacaagtgattgtagctacgcaactgtgggaagtatggcctattctatcttgtatagagaaattttgaatggccacaacccacaacccaggagacattgtggccgagaatacttgcaagagggcggaggttactccttggtgtaaatttggcttctgtcgctcgtgaattcggactattgtagtaattgggcatcatcgaattcttcatttgacatgatcaccgggtcttgtatttccgtcataccttaatggaaatgggtcgaatatatcagttggactttgtagcacggacagtttggaaccaatagcagctgcttggtggtggttgttccacaaaattttgaagtccaatgtagacattgtcgggtcgcaactgcaaaattggaagtaatctgtttggctactcgacgacgatggatttgacatgttcttgtgccgatggagtcatgtgacgatgtggaattagcgtgcttttgagggatttgaggcaacaactcggctttcgatcaggattattcaggagttgccaagtgcccactgggtcaagctgctaaaatgcggatcggtatattgtattttttctcgaatttttgggcggacatctcaattgcggtagctcaacgttcttctaggccttgttgcaactttttattactaattactccccatcctaaattagtatttttttagctcttaattttatactcatatttaaatgatg

SEQ ID NO: 16188 - DNA, 2448 bp, Zea Mays
ccgcaacaataatcttggtcttggaggagtatctttcattgaagtgataccaacaatctagggttctgttcttgcatgaattttgcacacttagcaagagtctaccagttgttcagcaactgcgactgtttcgggatctttcaggtgaaggcgttttcgaaataatttctgatgtgttgcagagtcaagatagaaaaatcgtttcagctgggacagatatgctgatactttttcttaatcaggaccctaacctattgaggtcatatattgttcagcaagaaggaaattctcttctaggacttctggttaaaggcatggtaactgacttcggtgaggaaatgcactgccagtttctagaaatcttgcgcatattgatggattctttcactatgtctggagcacatagagacgtaattattgagattttctacgaaaggcatcttgactatttggttgatgtaatagcatcctcttgtcccccgaggagcttgtctcgaccaagatctaactctgtacgtgttggtggaaacgctgaaggacatcatatcaagcctgagattttgttaaatgtttgtgaactactgtgcttttgtgtagttcatcatccctacagaattaagtgcaattttcttatgaataatgctatcgagaaaatccttacattgactcaacggagggagaagtttttggttgtagcagctgttaggtttatgcgtactattatatccagaaatgatgagcatctcattcgccatgttgtgaagttcaacttgttgaaaccaataattgatatctttgttgacaatggggagaggtacaacatgctacattcaggagtacttgaattgttggaatacatacgaaaggaaaatataaaagctctcactatctatgttattgagtctttctggtatgaacttgtcaagtttgaacacttcgggagtattcaggccttcaaactcaagtatcaacagtacgtggagagtgctgaaccaatgttaaatgcgagtgtgcctaacatgagaaagaaggcagaacaaagaggtctagagaaggaagaggaagactacttcaataaggatagtgatgaagaagattcaggctccggccggcgggataaacatgcacagaaccagcatagcaagcctaagcccaaggtccctaatggaagtgaagctgatgacactgatggcgcctctagacctaaatctgctggacttgtggactatgacgatgatgacgatgaagacttcaatccaccaccaatggagccttctacgcctgcagaggatgatgtgcccttaaacatatccccggtgaagcggaagccagtggatgtgaaacatgcagatggggagggtcgcaggaggcaaaaaatagaaaccagaattagttgtgctaaaattgctgctgttactagtaccattattaagcacacagatctacaaaacaagcatgcttgctacttgcctacatcagccgcgccaagtactgaacccaatggtgtttttagggagcgtggcactaactctgaggagcatcaacattctgtagagaacacagaaacttcacgacaagctggtggtgattgtataaaagacgggggcagtatgtctcccgagaaggctgtaaatacgacaacgacaagtgattcggagccttattcagtaagatgactgactactacacagctggtttgtccctgtacccaacctgttctcttgccaacaggaaggaatcggaatgtgtttggctccaaaaattcattgatatcaagctggaagcatgattggaggtgacatagattgcagctacctttacatctcaagtaaaattccagttacccctttttgagcctgtaaagttaattttccacaaggaaagatctgacgaacatcagaattgggatggctgtagattggaacattgaatgggccttgctcctgctgctatgctcgctattgtatctcttttatgagctaatggagtagcagtgaatgtgtgccttcaacttcactgttttctctccagtcattgactctgatgttactgctgtaaaacaagtaggactaaggcatagtttcagttgaatagcgtttttgccggattctgctgactcacttatacgactgtaatttgatggttcatagttttggctggacatgctgtcttggataattattcaagccttgtggtagaatagttctttaggccaaagatgtgctaggtagaatttcgaaagtgaataatgttggatgtattgggttaaggatggcaggtgtacatgatatcctactccagaacaggttcgctaaatactgtggtacaatcaaaaaacattcttgctcttgttaggattgtaatatctttcactaaattacacatgtctgcaaaacagattcatgagatgtgaaaacaatacacaggtcatggctactcaatctacga

SEQ ID NO: 16189 - DNA, 1192 bp, Zea Mays
gaagatgcagcaccgccggacagaaaatggtcaggtgctctctgaatgaagaaacgcagctgaacaaacatggactagtatccaagcagttaatttcatgccttgctgcttcgcttgtgttcgtctctccacctagtcaggctattcctgcagaaacctttgcccgtccaggcttgtgccagattgcaacagtggcagccattgacagtgcttcagttcctctgaagtttgacaacccttcagatgatgtcagcacagggatgatgatgaggggtatgaccgccaaaaacttcgatccagttcgctactctggtagatggtttgaggtagcctcgttgaaacgtggatttgctggtcagggacaagaagactgtcactgtactcaggtggatacattctgtgtccacggtggacctgatggatacatcaccggcattcggggcagggtgcaatgcctatctgaagaggacattgcaagtgctgagacagatcttgagaggcaggagatggtccgtgggaaatgctttctccggttccccacactgccattcatacccaaggaaccctatgatgtccttgcaacagactatgacaattatgcaattgtgtctggagctaaggatacaagctttattcagatatactcaagaacacccaaccccgggccagaattcattgacaagtacaagtcttatgttgccaacttcggctatgacccaagcaagatcaaggacactcctcaagactgcgagtacatgtcctcagaccagattgcgctgatgatgtcgatgcccgggatgaatgaggccttgacgaatcagttcccagacctcaagctaaaggcaccggtcgcacttaacccattcacaagcgtgtttgataccctgaagaagttgcttgaactgtacttcaagtaaaaaacagtgtagcattgtccagtagccaatagccaattgcccaacttctcgacttggatcttcaatggaatgaagttcagtttattctgacgtttgctagtcagttagttctttttaagtacattgtttttttgtctattatataagagtgggatatgtaagattaagatctgttcagctgttctcggttactgtttgtacaattgttctttttcctgatgtttttatacaccattgcgattgtctgtccctggtatgccatcgcaaaatcactt

SEQ ID NO: 16190 - DNA, 3830 bp, Zea Mays
ccaggccgcttccgccctttcaggccgcgtggggaagttgtgatatgcaccatggttgggagaactattcaggtccaaggttttgctctaactgacagtgccgaatctgtcaaattgtttttggagcgaattgctggtgctggaaccatctgtgctctcaagctcaggcatccaaggaacatctctgccaactcaagggcatttgctatagttcagttccagtcacaggaaagtgcttcattggtagagaatgcggctcaaagacaggttctcaagattggacggttttatctgagaaccagacctgcagaccgggacattgttccaagaccaaggattccaatgttttctctagaggacattgtgctgcatttgggatgcttggttaaggaaaatatcctatctgctctttttagagcaagtaatgtttcggttcaatttggatttgatatgaaaaagatctacttctacctctcctacaattttactaaatttaaacttgaactttcttacgaaagtatatgggagatgcagcttcaccgtccacctgcttataggtcacggacacagttccttttgattcaggttcaggcagctcctaaaatttataaactgctcccaggccgtccaggtcttatgtttgaggatcctttcttcaactggtttagggatgacacagatgaacaatggaccaggacaattgattttactccatcagctagcatcgggcaatcatctattttatgtctggaggtgccacaacagtgtgagcttccaagaattggcgactactttgtttactataaagagcagaatcttgactttgaatgtcggaatgggtattcatattcctgtggtagcaaccttgtaccaattgtgaaatctcctgattacatagaggtcccttatgagatactcttcaaaatcaaccatttggttcagaatgggacactcagtgggccaacagttgatcatagtttcttccgtcatgttagcccaaaatttgaacctattgatcatataaaacgagcacttttaaagatgacatatttgaaaagcacctgcttgaacccaacagattggttatctgtgcaatactccagaatacggaaatcacgccatgcatcacaaaagttatctaatatatctctggatgatggcttggtctatgtccacagggtgcaagttacccctgctaaagtgtatttttatggacctgagataaatgtctccaatcgcgttgtgcggcatttctctgcagacatagataacttccttcggatttcatttgttgatgaagactgtgagaagctccgttcagctgatttgtcacctcgatctacttctggaaatgatgcaaggagaactgctctgtataatagagttttgtcagtcctttcaaatggcatcaatattggtgacaagcactttgagtttcttgccttttcttcaagtcagcttcgagataactctgcatggatgtttgcttctcggcagggattgactgcgagcgacataaggaagtggatgggggactttcgagatatcagaaatgtggcaaagtatgctgcaagacttgggcaatctttcagttcctcaacagaaactttaaaagtacacaaatctgaggtggaacgaattcctgatattacaaatggcacaaagtacatattctctgatggagttggaaagatctcagctaattttgcagtggaggtggctatgaagtgcaaattgaaacgctttgctccttctgtttttcagataaggtatggcggttacaaaggtgttgtcgctgtagatacaagatcaaatcataagctttctttgagaaaaagcatgtcaaagttccagtcagaaaatatcactcttgatgtccttgcatacagcaagtaccaaccatgcttcctgaatcggcagttgattactcttctctcaacacttggggttagcgataatgtctttgagctaaagcagaaggaagccttaaggcagttgaacagaatggtaactgaaccacaggctgctcgtgaagcagttgaacttatgcccatgggagaagtaaccaatgtagttaaagaattgttgtcatgtggctaccagcctgatcatgagccatatctttccatgctgctacaaacttttagagcatccaagcttctagagttgaaaacaaagtcaaggatattcatcacacaggggcgagcaatgatgggttgcctggatgaaacctgcacacttaagtacggccaggtattcgtccaagcttcttacagtgcagatgaccatcgcaaggtcgttgtaactggaaaagtagttgtcgccaaaaatccttgtctccaccctggtgacatacgggttctccaggctgttgatgttcctgctctgcaccacttgtttgactgtgttgtctttccacagcagggaccaaggccgcaccctaacgagtgttcagggagtgatcttgatggggacatatattttgtttcttgggatccacatcttattccgagtcgtttggtggatcctatggactatactccagcttcagcagaaacattagaccatgatgtcactattgaggagatacaggagtacttcacaaactacatagttaatgagagtcttgggattatcgccaatgcgcatgtggtctttgcagatcaggaacgtatgaaggctgagagtccaccgtgcgttcaactggccaagctcttctctatagctgtcgatttcccaaagactggagtgccggctctgattccacatgagctacatgtcaaggagtatcctgacttcatggagaaactcgacaaagtcacctatgaatcaaagggtgtgatcgggaagctctatagggaaataaagaagcacacaccacacataaagcacttcacgagggaagtggcaaggcggtcttatgacaccgatttgattgttgatggctatgaagattacattactgaggctatagagttcaaggaagagtacgatttcaggctgggtaatcttatggaccactatggcataaaaagtgaagctgagataataagtggatgtattctaaagatggcaaagaatttcaccaagagtagtgatgctgatgcaattagaatggcggtgagatctttgaggaaagaagctaggtcgtggttcaatgagatgagcacaggagaggatggccaagatgccatggaggccaaggcctctgcttggtaccatgttacttatcatcagcagtactggggcagctacaatgaagggtatgatcggccgcatcttattagcttcccatggtgcgtatatgacaagcttgtggccatcaagcaggggaggaatctcctcacgcggatggatcgaaacttgaggttccgttgagcattgccagcaggtttgctcctgtacatatccctgatcgtttgcactcagcactgccagcaagtgtgcatgaacgatctgatgaattaagacgggcaaactgccgcaagctgacgctctggcctacgtgcgtcttgaaactttcggatgctgccgtctaactaaatgcatgttccttgatttccactgggaccttgagtttgaagtgtgtaaatatgctgcttatgatgtttttagtattggacctctatcaactgccgttctagttagtaacaatggttgccagtcatggattaccaggtttcgccgagctcctgtatggacgaccacgaaggtctatttcttccattaccaagtgcgaagtgtcacatctaacttgcgtagttgcattcaccttttttctcaaaaaaaaaatgcattcgccctgcaccatcatcaattgcgtagttctg

SEQ ID NO: 16191 - DNA, 1541 bp, Zea Mays
tagattcgagtttcatttattaatgaacatggtgaggaagaggttggaattgatggtggtggaattttcaaggatttcatggaaaatattactcgagcggcttttgatgtgcagtacggtctcttcaaggagactgctgatcatcttttgtacccaaacccaggatcaggattggttcatgaactacatctgcaatatttccattttcttggaagtctacttgggaaggcaatgtatgaaggcatacttgttgacttgccgtttgcaacgttcttcttgagcaagttgaaacaaaagtacaattttttaaatgatcttccttcattggatccagaattgtatcggcatcttctatttttaaagcattataatggtgatatctcagagttggaactatattttgttattgtaaataatgaatatggtgaacaatgtgaagaagaacttctccctggtgggaggcacatgcgtgtaacaaatgataatgttattacttttatccatcttgtcgccaatcatcggttaaactaccagatccgtgcacaaagtacacacttcttgagaggttttcagcagcttataccaaaagattggattgatatgttcaatgaacatgaaattcaggttcttatatctggatctttagaaagcttggatattgatgacctgcggtcgaacaccaactattctgcaggatatcatccggaccatgagcttattgagatgttttgggaggtcttgaagagcttaagttcggacaaccagaaaaagtttctcaagtttgttactggatgttctcgtggccccctccttggatttcagtatctcgaaccaaaattctgcattcagagagctggtgttccagggctggaggagcatgcagaccgcttgcctacatcagctacctgcatgaaccttctgaagcttccaccctataaaagcaaggagcagatgcaaaccaaactattgtatgcgataaactcagaagctggttttgatctaagttgatcatgttcgggattcagtatttgtgcagtgtagatagttgttagagaacagcttaaaggcacccagagccaaaccaccaaccctcggcctcattcgaagccccatgaggccacgaaggaaaaaagaaaagaaagaaaaggaagaagaaaagacacttgtttctcaaaatagttggatgtgtggagggagtctgcaatatactccctccgctttttttatttgtcatggtttagtttaaaaatgaactgccagtaaagaaaactagggcttcccaacataaataggtggacgctgtttaatcaatcatggacatagaaactgatgccctcattgggccatggcccatggctgcgtagataattctccgctataagatcttctcagcacgataaaaaagataaaaaaatcgagaagtgagtttatgcagattaaggcggtgtttgttttctccctaaattatataataagttgagagttaaacgaacatttaggtaggttatgtaacttatataccttcatttcataagcacgcg

SEQ ID NO: 16192 - DNA, 2426 bp, Zea Mays
tcaaattcccaggatcacaataagataagcttccaagagttcaagaacaagttactagaacctggtttagttgatcgcattgttgtttcaaataaatcagtagcgaaggtctacatcaggagttcacctcatccaaagagccaaggccaagatagtgatatccatattactaccactgatgctccaggcaagcctgctcccagcagatgcaagtattacttcaatattggtagtgttgatttgtttgaagagaagttagaggaagcccaggaagctttgggaatagatccacatgattttgtcccagtaacttatgttgctgaagtaaattggttccaagaagttatgaggtttgccccaacagcattgattgttggtctattatatttcacgggaaaaaggatgcagagtggtttcaatattggaggtggtgctggcaaaggaagaggaggtattttcaacattggaaaagctacagtgatgaagatggacaagaactccaaaaataaggtgttttttaaggatgtagccggttgtgacgaagcaaaacaagaaataatggagtttgtgcatttccttaaaaaccctaagaagtatgaagatttgggagctaaaatacccaaaggtgctctacttgtaggccctcctgggacagggaagactttgctcgccaaagctacagcaggagagtctggtgtgccatttttgtctatttctggttcagatttcatggaaatgtttgttggtgttggaccgtccagggtacggaacttgttccaagaagctaggcagtgtgctcctagtattgtattcattgacgaaatcgatgctattggtcgtgcaagaggacgtggaggtttttcaggttcaaatgatgaacgtgagagtactttgaaccagctgcttgtagagatggatggatttggaacaacttctggtgttgttgttcttgctgggacaaatagacctgacatcctggataaggcattattaaggccaggaagatttgatcgccagatagcaattgacaaaccagatataaagggccgtgatcaaatattccgcatatatcttaaaaagcttaagttggacaacaaaccatcattttattctcaaaggctagctgccttgacacctgggttcgcaggagctgacattgccaatgtttgtaatgaagctgctttaattgctgcgagaagtgaggaaactcagattaccatgcagcattttgagtccgcaattgataggattatcggtggtttggagaagaaaaatagggtcattagcaaactggagcgccgtactgttgcttaccatgaatctggacatgcagttgctggatggttcttggaacatgctgagcctcttctaaaagttacaattgttcctcgtggaacagctgctttaggctttgcacaatacgtcccaaatgaaaatcttttgatgacaaaagagcagctttttgatatgacatgcatgacattaggtggccgtgctgcagaggaggttttgattggcaaaatctcaactggtgctcagaatgacctggagaaagttaccaaaatgacatatgcacaggtcgccgtgtatggttttagtgaaaaggttgggcttctgtccttcccccagaaagatggtggtttcgaaatgagcaagccttacagtaatcagacagcatccatcatcgacgatgaggtccgggaatgggttggcaaggcctacaagaaaacagttgaattgataacagagcacaaggagcaagttgcacagatcgcagaattgctgctcgagaaggaagtcctacaccaggacgatctaaccagggtactaggagaacgtccattcaaggcactggagccaaccaactacgacctctttaagaaaggtttcgaggatggtggtgacaacagccaagcaccagcagagaacgccgagctgcctgatgattcatctcccccagttggtgacgttgtacccacgtagtgtttctctcctcaacgtcagagctgtacattgagcgctcattctcgatagattcttgtttgttggttgcatcataaaaaagatctgtataaattcgcgcccaagctgattatgccactgtggaaatgcatttggatttccgtagtgtcagtccggtcgatagggtgccttgggttcttcatggcacgagcaaatgttctgattcttgtattcgaatgttttgaaatattctgtctgacgggactgcggagttggcgcgagaagtgtgcttgttcagttctatctgaaggcttagctgtctgtagctgtagctggtaacaacagtggctaaaatggtacctctgaaatctttgtgacagtaacaagccattttcctttgaatttttatcaggtagtcggcgcgattactttgtttgacaagcacaaactaaatgtcttggttt

SEQ ID NO: 16193 - DNA, 2846 bp, Zea Mays
cacgcgccccgagctcagggaagagagctgcagagagcgtgacgcgtctcccacacggccgccgccctcgccttcgtgcgttccccgcgtagagtttagggttttgtcgccgccatggcgatcctctcggcgctcgccaccgaggtgttcatccccgtcgccgccgtcatcggcatcgccttcgccgtcgtgcagtgggtgctcgtgtcgcgggtgaagctctccccggctgcagccgcgtccggcggcagcaagaacggctacggcgactacctcatcgaggaggaggaggggctcaacgaccacaacgtcgtcgtcaagtgcgccgagatccagaccgctatctccgaaggagcaacatcgtttcttttcactgagtaccaatatgttggtatcttcatgtccatctttgctgttgtgatcttcctcttccttggttcggttgagggattcagcacgaagagccagccctgcacctatagcaaggacaagtactgcaagcctgcactgttcactgcactctttagcactgtgtccttcttgcttggagccatcacctctctggtctccggtttccttggcatgaagattgccacatatgcgaatgccagaactaccctggaagctaggaagggtgttggcaaggcttttatcaccgcttttcgctctggtgctgttatgggcttcctgcttgcatcaagtgggcttgtggttctgtacatcaccattaatgtatttaagttgtattacggtgatgactgggagggtctttttgagtctatcactggctatggccttggtgggtcgtccatggctctctttggaagagttggtggaggcatctacacaaaggctgctgacgttggtgctgatcttgttggaaaggtcgagaggaacattcctgaggatgatcctaggaacccagctgtgattgctgataatgtcggtgacaatgttggtgacattgctggaatgggatctgatctctttgggtcatatgcagagtcttcctgtgctgcccttgttgttgcgtctatttcatctttcggaatcaaccatgatttcactgggatgtgctacccactccttgttagctctgttggtatcattgtctgcttgatcaccaccctttttttgctactgattttctttgaagtcaaggctgtgaaagaaattgagcctgcacttaagaagcagctcatcatctccactgtcctgatgactgttggtattgctgtaatcagctggttggcccttccagctaagtttaccatcttcaactttggtactcagaaggatgtctccaactggggcttgttcttctgtgttgcaattggtctgtgggctggtctgattattggttttgtcacagaatactacactagcaatgcatacagtcctgtgcaagacgttgcagattcttgcagaactggtgctgccactaatgtcatttttggtcttgctcttggatacaagtcagttatcatcccgattttcgctatcgctgttagcatctatgtcagtttctccattgctgcaatgtacggcatcgcagttgccgctcttggtatgctgagcacaattgcaactggtcttgctattgatgcttatggtcccatcagtgacaatgctggtggtattgctgagatggctggaatgagtcacagaatccgtgagagaactgatgctcttgatgctgctggcaacaccactgccgctattggaaagggatttgccattggttcagctgctcttgtgtctctggcgctttttggtgccttcgtcagcagagctggagtgaaggttgtcgatgtcctctcccccaaggttttcattggtttgattgttggagccatgcttccctattggttctctgccatgaccatgaagagtgttggaagtgccgccctaaagatggtggaggaggtccgcagacagttcaacaccattcctgggttgatggagggaactgccaagcctgactatgcaacctgtgtgaagatctccactgatgcttccatcaaggagatgattcctcctggtgctctggtcatgctcactcccctcattgttggaaccctcttcggtgttgagactctctctggtgttcttgccggtgccctggtttctggagtgcagattgccatctctgcttccaacaccggtggtgcatgggacaatgctaagaagtacattgagcgagcatgccaggaccctcggccccaagggatctgactgccacaaggctgctgtgataggtgacaccattggtgaccccctgaagggacacctcgggcccgtccctcaacatcctgatcaagctcatggcggtggagtcccttgtgtttgcccccttcttcgccacccacggtggcctgctgttcaagtacctgtaagggccacaccaatcatcacagcagaaatatacgaccgaccgaccgtggacatctcgaataactcctgccaaatcgccagttcatgtgtattgtgcgctagccgcctagctgcactgctgtttttttggtctcattgttcgtattttctccttggcccctccccctagaggcgttactgttagccttactcttactccctgtagctgcacgtagaagagaactgttgtcctgcaggtctggcaaattttcccagtctcttgatgatggcgatgatgttgaaatctttgaacaatgatacatgattgttgcattttactggtggtatggtatctcgtacatcgtattggactgcagatgcctcattcgtatcatctaatgttaatacgtaatgatgtgtctgctgccgacacgttctatagttgagtaaaatatattttaggtacttaaacc

SEQ ID NO: 16194 - DNA, 129 bp, Zea Mays
cccaaactgcaacagctcaaactccatggaaaactcccatgtgttgcattgtccttgcgcacaagcgctctcggtgcagagccgtgggaccgtcgctgcatgccctcttccccaatgttgtcgaataca

SEQ ID NO: 16195 - DNA, 491 bp, Zea Mays
ccttcctagagcgctcggcccatgtttaggagtgccgggcgtgcgcgcagcgtgcctcttcctaatccatcgcagagcgccgccggcgggtagcgctactgctagaggagaggaagcggaaagggcggcggcggcgcttgtggtcagtcaaagatccaacctccggactcgcgatggggcggcggatcctcaacgatgctctgcgcacgatggtcaacgcagaccggcgggggaacgcgtcggcgcttctccgacccatctccggcgtcatggtctccttcctcaacatcatgaagtaccgagggtatatcaaaaaatttgaggtcattgatgagaatagagttgggaaaattagagtggagcttgatggacgtcttaaagattgcaaagctctcacctacaggcaagacctcaaagctaaggagatagaacgatacagagttaggatgctcccaacacgccagtgtgctatccagtatgctaggtttgca

SEQ ID NO: 16196 - DNA, 1976 bp, Zea Mays
atggcgcccaagcgccggggaaatgaaatgggggttaaagagttggatagccttatgactttgattgctgagaagaagcggcaaatggaacaacaagaatcagagacaaatatgcaaatattgctagtcttcttacactgccttagaaagcaaaagctagaagagttgaatgagattcaaactgatctacaatacatcaaagaggatataagttctgtggagagacatagggcagaattatatcgcacaaaagaaaggtactccatgaagctgcgcatgcttttagatgagcctactgcgcaaaaaatgtggccctctcctatagacaaagctagctgtcgctttcttcccaactctcggacaccacttagtggatcatgtccaggaactttacagaataagaagcttgatttgaaagctcaagtaagccatcaaggatttcaaaggagagatgctctaacttcttctgatcctcctaactcccctatacaatcgggtaatgttattgctaggaagaggcgagttcaagcacagttcaatgagcttcaagaatactacctgcaaagacgtcgtactggagcacaggcacgcagacaagaagaaagagatatagttgcaatgaatagagaaggctatcatgcaggtcttcaggatttccagtctgtgctaacaacgttcactcgatacagtcgtctacgtgtcattgcggaactaagacatggagacttgtttcactctgccaatattgtatccagtattgaatttgatcgtgatgatgaactatttgctaccgctggagtctcgaaacgtattaaagtcttcgaattttccactgttgttaatgaaccatcagatgtgcattgcccagttgttgaaatggctaccagatctaaacttagctgcctaagctggaacaagtactcaaaaaatattattgcaagcagtgactatgagggtatagtaactgtgtgggatgttcagacccgtcagagtgtgatggaatatgaagagcatgagaagagagcatggagtgttgatttttctcgcacagactcttcaatgctagtatctgggagtgatgattgcaaggtgaaagtgtggtgcacaaatcaagaagcaagtgtgatcaatattgatatgaaagcaaatatttgctcggttaaatataatcctggatcaagcttctacgttgcagtcggatctgctgatcaccatattcattactttgatttacgtaatccaagttcgcctgtccatatttttggggggcacaagaaagcagtatcatatgtgaaattcttatctaacaatgagcttgcgtctgcatcaacagatagcacattacgcttatgggatgtcaaggataactgcccggtacggacattcagaggacacaaaaatgaaaagaactttgttggcttgtctgtgaacaatgaatatattgcttgtggaagtgagacaaatgaggtttttgtttatcacaaggctatctcgaaaccggcagcaagccatagatttgtatcttctgacctggatgatgccgatgatgatcctggttcttatttcattagtgctgtctgctggaagagtgatagccctacgatgttaactgctaacagtcaggggaccataaaagttcttgtacttgctccttgatgttatggagggcgttcaagaggttcacagtactgtccagttgtttcctttcgtgtcattatattcccccaaaattgggaacgggggcataattgatctccggttagggaatgaagttttgcagatggtcagctgacgtagggttttgaggtatcagaatgtgcatagtcatgtttatgttgtataggtgtaattgtgtaaagcagccaagttattggttacaagtgtaacacgagaaatacacattaataaaaaaaaaacctccagctcgtttgtacagagattgtgcttgaacccagaaccttatgtggtaattgcga

SEQ ID NO: 16197 - DNA, 1988 bp, Zea Mays
atggacagaaagccagccggtaaaaatagcttcaggcaacaggagaagcagaaaaaaaatgagaggttggactggaatgacctggtcctggctgggccttttgtccttcattcacattcccaaactgctccatcactttataccgccgtctcatctcgtgctcgtggtgttccgcctcctgttcgacgcggtgctgtccgcggcgccggcgtgcccggtcgggggtgacgacggcgagtttaggcgcgagatgatgaaccgcgccgtgcacgccgcggcgaggggaggcagccttgccgtgctcagggacctcctgcgcggctgctccgacgccgcggcatacagggacgcgcagggatcaacgatcttgcacgccgcggctgcaaagggccaagttgaggttgtgaaggatctgattgcatctttcgatatagcgaactgtgtagatgaccaagggaacacggcgctgcatatagcagccttccgaggccatgtccaagtggtcgaggctctcatcaccgcatctccgtctcttatatcagcaacaaacgaagccggcgacacgttccttcacatggcactgactggcttcgggactcccgagttccaaaggcttgatcgccagacggagctcattaggcaattagcgagtggagcaatcgtggatatcagcagcagcactattatcaacgcgcagaatgacgacgggaagacagctcttcacttggccgtggtttgcaacctgcattcggacgtcgttaagctcctgatgagcgtgccttgtattgacctcaacatctgcgacaaggacggcatgactcctctggatctactcaggaagcagccacggacgacggcgtcagagatactgatcaaacaactgatcctggccggtgggttcacaagctcaagggaccacgagactaggtcggctatcgcttctcagctgaagatgcactccattgtaggaagcccggggacatcgttcaagataccagacggcgagatcttctttctccacgctgctggagtcgacgtgtcgggcggcatcggcgaaggaggagcagcagtaccgttttcctccgttattgctagggctgacgtcctgcatggacccaaactgaagaggctcaactctttccaagacgcggcgaagcatatcaaggtcctattcagatggcctcgccgcggatggaacaagtcaggcagcggcggccgaaagggtctggacgacgacgatgcctcgtctgtggactctgccaagacctggagccacgaggagaccccgacaccgctgaggcagaggtattccaggatcggctcgctgttcaacaagcggacctacgcagcaggcagggcttcacctagcgaagcagtgaagaagggtggagtggtacagccagctggttctactctactttcgacatctctgtcgtcgtcgtcggcgtccttggttgacaggttcgaatctgttcatcaggacaacgatcagtctccttatgtcagtaggttgatcaggcacacacctaagaaatctggatctctcaacagtagacttatgaaccagtccttgcgcctcagggcctaagataggcagcaacatcgacaaggcttcttgcttccctcactagctagctggttacattttacagcttcactggtagcagacacagataattctaaatatctagccgccctgccacagcagcaggtttgtatctctgtggttgccggagagtgggtttgagcttacttagggcttgttcggttagctctcaatccatgtggattgagcgggattggatgggtttgaatcccaaacagctcaaacttcttcacaattttttccaatcccatccaattcatgtgtattgagaataaccaaacaagcccttagtgtttgtgttatctcaaaatgcgagtaatgcgatcttgcaatgcgatcttgggatattcatgtacatgatatctcaaaatgctagcaatgc

SEQ ID NO: 16198 - DNA, 967 bp, Zea Mays
gcctacggcactagaatgatggcatcagtgatgaattcagtacttcttcaagcatcgctagaaaagataggtgtggagacacgagtccaaaccgcattgatgatgcaagaagttgcagaaccttacattaggcgtcgagccatacgccatcttgaaaaagggagagtggtcatctttggtgggattggtgtgggcattgggaatccattgttcacaacagatacagctgctgccttaagagcttcagagatcaacgcagatgttgtccttaaaggtattgttggtgatgatgagtatggctgtcctcctaggagcaacagtaatgcttcatttgagcacatctcctttagggagttagcagcaagaggaatcaccaaaatggacatgacagcagtaacatgttgtgaggagaacaacattcctgtcgtcatctttaacatgttggagcctggtaacatctcaagagcaatttgtggagatcaaataggcaccttagttgaccagtcaggaaggatcacataaaactaggaggatgaatggtagcagagctccaggacatgccgatactctgggtgggacatcactctggggggacatcctgaattctttgctcgtggatcttttccgtatagaaggaaaacatgttcatcagatggaagcgttcaccttgatttgcctgggatgcctattgtgtattatgcgttgtggtcgcaattgcccacattgagaaaagtattaccttgtaatgtctatttgtaatttgtctgtagattagtggaagggctcatgtaaagtgtttcacggtgcccagatcagaatgtagtgttgtaagttgtaatgctattatttgagtcgtagtgtttgaggtgtcacgttttgcacgattaatttgcctgtggctttccagcaatcaatctttttttttgttcaatgatcatacacgaatatatgctactgactaatgtag

SEQ ID NO: 16199 - DNA, 1785 bp, Zea Mays
tgcatgtcatgtctggtcatcgtcatctgtcccctcatttcaaggtactagctggtggcgctagctggtctcacactctcactagatctctctcacatgcatatgcatgcattagcttttccccaccagcatgcactagctgactagcatctgtgtaatcggtgaccgctcttgacttgttagctccccgctcccacggtagctaaagctagctaggtgggtggtagcaccaccatggcctcgcccaagcattcccatcgccatcatcgtgcggcggcgacgaagcatcgtcggccgctggcgctgcggcgtgcgatgctgcattcgtgcgtgtgcttcctggtgggtctcgtgaccggcctggccccttccgactggacggacgccgcctcgcgcgcggccgtgcacgcgaacggcgcggccacggcgcaggtgttccgcgcgctgcacgccatgaaccagacggcggcggcgggggcactgggccagctgctggcgctgcagcactaccagcagcagccagtggtggagaaggagaaggagaaggagaagaagcctctggatctggtggtggtggtgacgactacgacgacgtcgacggggttgtcggagcgcgagcggcggtcggcgggtctgacgcgcacggcgcacgcgctgcgtctggtgtcccctcccctggtgtggctggtggtggaggcggcccgggaggctggtcccacggcacggctgctgcggcgcacgggggtggtgtaccggcacctgacctacgcggagaacttcacatcggaggcctgggaggaggagcggcaccaccagaggaaccaggcgctagcgcacatcgagcggcaccgcctgcgcggcgtcgtcctcttcgcggggctcgccgacgtgtacgacggccgcctcctggagcagctcaggcggcacatcaggacaaggagtgtgggcgcgtgggcagtggcgacagtatgggagcaggagaagagggtggccgtggaagggcccgtcgtcgtctgcaacaccaccaccaccaccaccagcgcagcatccacagcatgtgcatggttctccgcctccgactccacattattggcggcagcggcagcagcagcgcccccagtgacggccgacgactccgtccacggctttgccttcgccagcgacctcctctgggacccttccaggtgggaccgcttccccacatccgagcccgaccagtcgcaggattcgatcaagttcgtgcaaaggttggtgatggcggagtacaacaaaacgagggccatcatccctgcagacgacgattactcctccaaccgttctcaaatcatggtgtggcgtgtcgacacaacgctgctctagctagccctcttgccacgctaagagcgatagataaagatgcatgcatgcttaaaataaacattccatgacttattacatagtaatgccatacacgtacgtatgtatatgtaaacttttgctgcattagaattatatatatagggaaaagaatggcaagcagcagtctgcatcagtcgttgtcgtcgaaatgctcaaggcaacgcatcgcatcgcatcatcctcttgcttgcctgcgtgcaatccttttcttgtccgccctgcattgcatgtccctttttctttttcttcttgtttgccttgtgcggctatctgtcttgcaacccggcctgaagaaaaggaattcgatttcaaaaaaaagatctctataaaaatttagtattagttttaggggcaattccctttatgatatcggaaaatatacttatt

SEQ ID NO: 16200 - DNA, 3820 bp, Zea Mays
gaaaatcaaccaacaattttccttccccattttctccacccacgaactcgtcgtctctcatccccggccgccaccgcctcccctccgttctcgcaccccaccaaaaccctagccgccgtaccccagcgcgctcgcggtcccctctccccgccgccacgtctgtctagatccgcgcgcgccctagggcttcaagggccccgcgtcgccagcttccgcatctgggctggtagtttttcagttagggttggcccgccatgcctcggagctcgcgtcacaggtcgcaccggtcccacaggcgaggagggtccgctgaccggtcggagtcagatggcgaggagtcggctccggtcgccggcgcgcgcgaggaggccgcggcggctagggtttccagagatcccgagcctgagaggcgccgctcgtcctcgggacaggaggccgtgagatcagggaacgggtacgctgagcacgggaagaagaggaaggagagggttgaggaggccgtggttgatgtggtcagcgaccggtggaacagtggcgtctgtgacgatcacctggtcgacaagaggtccaagagcgagacctttgggcatgctgaagtggagaagctggccgacaggtccaggggatcaggggatgagtccaagaggtcaagcagacgagcagtggctgtggatgacagggctgaggaggttctgtctaagagtgactctgggaaacggaggtcagagaaacagaaggatgtggggaggaaggagagtaccgggcattataaggataacagagatagggagaacgaaagggaaaggggggaagaatgggagcggcagaaggagcgagataggggaaggagtagggatagagagcgtgagaaggaaagagcacgagagaaggagagggagagagaacgggagcgtgagaaagatagggaccgagagcgggacagggagcatgagagggagcgtgataggcagaaggagcgggagtgggacaagaaagatcatgattccaagcacgagaggtatgaggatggcgggagcaggaagagtggcttgaagatgagtaggacggaacaggaggcctactcatataggagagatacagatgtcaatgaaatttcagcgaaagagaagtacaataatcctgatatgcaagctgaaaaacacagccgaagaaaagatgattctgaagatacagataagtggtccactgacaatagagacagtgatgacagaaagaccctgtccagatatgaacatggtaaatctaggagctctaaggaacaaaggtttgatgacgacaagtataaggaaaagtacaaggatgattacgtaagggataagaggcaacatgacgacaagttttctaatgagcgagtggcccgtagtcatgaaagtgatagagctgaatataagagtgctaaagatggacgcagaagctcagagagccattacagaaaggatgcagttcaagatgttgatcattatgaggattacaacaataggtacaaggaaagtagagggaaaaaacgacctcctgaggaaaatgatgaccaatatgatttaaagcctccaagcacacgtgatcaacgtgtgcatttggaaaaatcttcaggcagtgggcgtctggattctctgactgagagagcaagacctgatcgtagttctagtccaagtaaaatccactcaagaagttcacctagcccaagttcttatcatgacaaagatcagagccggcatgggtctaaagtggtggatcatggaaagagagaaattccatatgatgagagaaataatcgtccaagagcatcttctggtagagaaaggacacctgcttctagacttcgtgacagggatgcagaaaattggtcgtctgaaaggcttaaacagaaggatgattaccaacctcgtgatgtaacattggaaatttctacatcacactatgaccgcacacctagcaaagataagcatacttcaccaaaacaactgtctgaaaaatctccatcttcaggtgaccataggttttcaggtaggcttagtggtgggcgtagtcttgataataaaggagaaagaaagagccttacgaaatacagagatagagatggtgacatagctcaagagcgatcacatcatcaagatcgaatgccagctaaggttccattcagggagccaacaccgtcaaattcatccataagtagaggtggtcattttttgggcagttcaccaaataatcctttgccacctgcacggaacggtgacccttccttccagggtccacatgatgatgaccgtaggcctcaaaatggagataggaggttccatggtcatcaaaaaaggaatgacatgaattctgttcgtggacatggacatggctggaacagccagccaaactggccttctccagtttctaatggtttcgtccccatccaacatggtggtgctcctggttttcatccacctgtccatcagtttccaggcccacctatgtttaaccttagacctcaaatgaaattaaaccaacctggagtttcatatcctatgcatgatgctgttgataggttttcgacccacatgcgcccatttgggtggcctaatcatctggatgaatcatgcccacctcatatgcaagtttggaatggaggtagtggtgtatttcctggtgaaccctatatctatggtagacaagagtgggatcagaatagacctcatgctggtagcagaggttgggagctgactggtgatgtatccaagggaccaaatgatgtgccggatgctgaacttctggtagctaagaaggatcctgactctgcaataactgctgtttctgattctggtggacaacacaatcttcaacctgaggctgaccaaaaggaaattggacgcttgactgctgaaaactttgaagcgaagaatcatactaaaagttcaaaaagtttggaagctcctcaaggagcacaacttgtgacttctatgctgtcaaagaatagcgtggtcttttgtaaaaactatctatccagaatcagtgtttcacatgatcttgttgagcctgagttgtacaaaaggtgtatatccttgctgggagatttggacgtaacaaaaacctctcatttggttaggaatgaaattcagcaggataatggaaatattggaaaaatgtcaacaaaatatggaaacctcaaccctttcagttcacgttacctcaaaagtgacaatactatctttgagagagctttggcccttcataagaaccagactcaaaagggtttaactactgcctctgcatctgtaaaaatggaagagaagatggctgtaccagaagatgaccatgacatggaattgcttgaaccagtggtgagcaatcctgctccacaacgtcacactgatgtcatggaggaaggatcagtatcaaaacatgaacttggtgatggcatagggagaactattgctgcaactataggatctggggttctggatgcacctccagaaatttcacttccccaacctgaggtggtggtggcaacaacagtaatcacacagccgaacaagcacatggaggatgtgttgcctccagcaattgaggatggtgcactacaagcaaccctcgaacatgctgttggcataccggaagttacacccgctgatgtcttgctggatgttgcaccttctgctgttggagaatcaggtgatgacatggagatcataccctctgctatggcagaacctcaactaggcaaggagcctgctcctgttgctagtcctgacagtcaagagaagcccttcatgcttgattctgagacagatgggctttgaaggacgtttggcag

SEQ ID NO: 16201 - DNA, 1008 bp, Zea Mays
taaagagattgtagaagtcacctttgatcattgggctgggacgatccatatgtaactcgtactcatgaaggtctcctgaagtggaaataccctgagatgaattctgtggactttctgttcgagcttacgaatgataatcgtcaactggttttcctttatgagagaggaaaaaagaaactcatggatggtgcccggatagcatttactgacgatgtagatccatcctctatcgccgggaggattgttgaatgctcctggaataaggaagaacagtgttggtcctgtatgcgtattagatctgataaatctactccaaacgacatcaacacataccggaaggtgatgaggagtatcacagataacattaccgaggaaaagcttctcgaagagattgatgagataagtcttctcccgatgtatgctgataggatgcagcaggctcatacaaagatggcacaacaacagcggcggagattgccaccacagtgctagccagtgctggggcgctctcctaccgccctagccagctgctggcttccgtagctgtgtaattagtagaggtttcagtagccccatatgatgatggctggctgggtctggcctgccaactaattctttgcacctcatttgtgtcttctccctgccctcccacccacctgtataggcgtcgccgcagagtagtttccctgtaaattgtgtactctatgttctcccatattctcccctatggttttatttttcatgggtgtagaatagcgtttaacaagagggtggtgttctaggtacattagtgtacgcgttactatctctcggtgttgcggttgccttgtgctagaataaatatggttaccatctgttgctgatgggtcatgtggttcccccggcggatatcatgtggttgcgtggtatgggttattttcgtcttctgttttgttcgcacctgatccgatccgatcttttgttcaatgaagaagaaaaaaattattggtaaaacctacgtgtttatgg

SEQ ID NO: 16202 - DNA, 1080 bp, Zea Mays
atcctctgcatattcaataattggctctgctgcaagcctgcaaatcactaggtcactgagaacatgttgggtggcaagaaagttacagttgtatttgtcctaggtggtcctggaagtggaaaaggcacacagtgtgccaacatcgtggagcactttggattcacccatcttagtgctggagatcttctgcgtgcagagattaaatctggctctgagaacggaaccatgattgagaacatgataaaggagggaaagattgttccatcggaggtgactataaagcttttgcaggaggcaatgataaaaagtgaaaatgacaaattcctgatcgatggatttccaaggaatgaggagaatcgtgcagcctttgagaatgttaccaaaatttctcctgcatttgtgctattctttgactgttctgaagaagatatggagaaacgactcctggggcgcaatcagggaagggttgatgataacattgaaactatcaaaaaaaggttcaaaacctttgttgactcaactctgcctgtcattgagcattacaactcaaaggacaaggttaaaaagattgatgctgcaaaaccaatccccgaggtgtttgaagacgtcaaagccatttttgccccatattctctaaaggctgaatagagcaatctaagggacatgataaaggcaccacataaacatatctgtgattatgatggaccctttaatatagaacaaaagttttggctcatttgagctaccagcgtaccagtaggcaattcgatttgttaccagcaacaagtgatctgattcccagtggtcctgctagagtaacattttttaccactgtctgttgtctatgtatcctttgatattgtgttgtaccaatgtgcaatttactctatggactgatggaacattgtgccatcccatccaccagatttattgtggcgttatggaaagcatagaaccgctgccatattctttaatttgtacgctgaaatatactcgttggcaccgaacttttggttgatgacttcgtgatataataaccctaccggcagtaaatatctacgctcaacaatgttctcaaaa

SEQ ID NO: 16203 - DNA, 2743 bp, Zea Mays
acacaatcattcggagatttcaaggaaattcttttgaaggcccaatcccaaaaagtctgtccaatctaaccaaattgacaaccttacggatcggtgatgttgtgaatgggagctcttcattgtcctttatcagtaacttgacatctttggatgtcctgatattaagaaattgcaggatatctgatactcttgcaacagtaaatttttctaatctagctggattgaccttattggacttgagctttaacaatctcacaggccaaattccacagtccatactgaacttggacaaccttggattcttgtttctcggaaataacagcctttctggaagcctgcctgatattaaaagcccttcactaaacaatttagatttttcttacaaccagctctctggtagctttccttcttgggctacccagaataatttgcaattgaacttggtggccaacaacttcattcttggtagcagcaacaacagcattctgccttcaggcctaaactgtctccaacaagatattccttgtttccgtggctctccggaatattcctccattgccgtagactgtggaagtaacaaatcatttaggggcttagataatactttttatgaaatggatcctacaaatattggagctgcatcatattatgttactggtcaaacaagatggggtgttagcaatgttggaaaatttaatgaggccccaaatggaagttatacaatagatagttccgagcagtttcagaatgcactggattcacaactgttccaaacagcaaggatgtcaccatcatcgctacggtactatggcattggacttgagaatggaaattatactgttgagcttcagtttgcagagtttgcttatccagaatcacccacctggcaaagcactggaaggagagtttttgacatatacatccagggtggtctgaaagaaaagaatttcgacataaggaagacggctggtggaaaatcatatgttgcagtatataagaaatacaatgcaactgtgtccaaaaacttccttgagatccatctcttctgggcaggcaagggcacttgttgcattccaactcaagggtattatggacccatgatctcagcattgagtgtgacaccaaattttactcctactgtgcgaaatggtgttcccaaaaagaaaagcaaagcaggggcaattgttggaatagtaattggtgcttctgtcttaggactagccgccttagctggaatctttatgctggtacagaagagaagaagagcagcacagcagcaagaagagctttacaacatggtgggaaggccaaacatcttcagtaatgctgaactaaagttagctacagataatttcagttctcaaaatattcttggagaaggcggatatggaccagtttataagggtaagctacctgatgagagggtaatagctgtgaagcaactttcccaaacatcacatcaggggaaaagccagtttgtgacagaagtggccacaatttctgctgtgcagcaccgcaatctagtgaagctatatggttgctgcattgacagtagcacccccctgctggtctacgagtaccatgagaacggaagccttgatcgagcactctttggtgacagtggtacgatccttgactggccaactcgcttcgagatcattttaggtattgcaagaggcctaacctatcttcatgaggagtccagcgtgcgcatcgtgcatagggacatcaaggccagcaatgttctacttgacaccgacctcacgcccaagatttccgatttcgggcttgccaagctctttgatgagaagaagactcatgtcagcactaaaatcgcaggcacgtttggctacctggcgcctgagtatgcaatgagaggccatctgactgaaaaggccgacgtcttcgccttcggggtattggcaatggagactgtcgcaggtcgaccaaacactgacaattccttggaggaacacaggatctatctctttgagtgggcctgggagctgtacgagagggaccaagcacttggcatcctggacgcaaggatcgaagaatccgacggtgaagaggcagtcatcagagtcatcaatgttgcgctcctctgcacgcagggttcgcctcaccagcggccaccgatgtcgcgtgtagtgaagatgctcaccggagacatcgaggtgcctgaggtggtgaccaagccaagctacatcactgagtggcagcgcaggggtgggaacagcagctatgttaccagcggctactctggcgacacgaccggggagttcagcgtgcagagggagacgactgcgcctctcaccccgtcgccggcgatgactggagtcatcgacgacgggcggtgatttgatcgcaggctgatgcatgctgggtttggtttgatctcaagggaaaatctttgaaccatagttgataaagcgcggtgcgcggagaataagagtcagctttacatgctacttggctgggttaatgatagatatcatataacataacgtaatgtaatgtaatatgctacttagctaggttagtgatagatacgatatgatatgccatcacagccttggcgttcaccgcctctccacagtggcggatctaggttttttatacaggatgtaccgtaataaattttttatatgcaactgtatatacagttttatagtagatttgataaaaagtttgataaatagatataatgtttagcaatcaacagttaagtacgaaagttgca

SEQ ID NO: 16204 - DNA, 729 bp, Zea Mays
gtcagaacggcaatttgtaggttagctcaaagtgttctctagtcgagaaatggaaaagcagaaaatgagttttacaggaatagatgacccttatgaagcaccactgaattgtgagattgagatcaaggaaatagatggtgtatgcccttcgccttctgacatggcggggcaagtggttacttaccttgaggagaaaggcttcctgcacgagtaggctgacgctgaatcgaagctacatccggggaaggtttcaatcagacaagcgcagaataagtcaaaagcgctgccagttaccgtatggttacatagattgatctggatgcctagtatttttctttccgcgcttgctctaccacaagttccattcagtttcattcagatgagcctagatggttcctaatttctttgacctctggaatagattacctgtaatgcaattctgataacagcttggggcagtatcgatttgtcacgggaaggtacgcctaatgttgagagaaactgtattcttgtgctccactttctgcagtgccgacgtgtaccctttccgttttactaaattataattagcttcccttcatttataagtttatttattttttatacactattcttgttacatatctaagtatgtctggatatatagcaaaaaaaaaaaaaactaaaacggattaaattttgaaacttcgaaccgagatagtacagtttagacacgctggaacatgcggg

SEQ ID NO: 16205 - DNA, 1367 bp, Zea Mays
gtccgattgtgcgctgtcgcagcctctgccctctcccagcccgctcctccatctccggtgagacgcgaattgaatcgcatcgaatccatgggcagctcctcgaataccaacacgagcggcggggccagcgacaaggaggagaagaagaaggaggacaagatcaaaggcaaggactcgtcggggccatccttcaaggagaacgaaagggtcctcgcctaccacggccccctcctctacgaggccaaggttcaaaggatcgaaaaccatgaagatgaatggcgctactttgtccattatctcggttggaataagaactgggatgaatgggttgcaaatgaccgcttgttggaattgacggaggaaaacgtgcgcaaacaacaagagcttgataagaatcaggtagttgacaaaacaatgaagtctggacggtcaacacagcataaaccaaaagtctccaatgcggatgcaaaagctgataaagatgacactaagagtctcatttcagtgaaggggaagaaacgtaaaagtcagcttgggactgagattcaggacaaggaaaaaagatcatcacatagtctactagtgttgcagtttcctttgccactgaagaagcaacttgtggatgattgggagtttgttacgcagatggcttgtgaagctaccacgatcacctactgttgatgatattctaaagaagtacttggaacaccgggcaaagaaggatggcaagataaatgactcctatgctgagattctgaaaggattacgctgctactttgataaagcattgcctgcaatgcttttatataagaaagagcgagatcagtatgctgaagaagttaaaggtgatgtctcaccatcaactgtatatggagctgagcatctattgcgcctttttgtaaaattgccagagctacttgcttctgtcaatatggaggaagatgcgttgaacaagctacagctgaaactgctggacgttctcaagtttcttcagaagaatcagatcaccttctttacctctgcgtacgatggttcttgtaaaggtgcagatgaggataaaaccaaatgattgcatgtgaacgttttatatcatgtaacatctttcgatggacttgtctggcactattgttgatatgaatgtcgcttaggacaacaatcggtttatgtaggatagatgctgcagattcctgaaagacggtacttgaactgcccggagcatgttgtattttcttaagatgctggaactaagacggcttagttgaattttcactatcaagtgagtctcggtcttgccccaaaaagaatgttttgtacctcctctgtcccaatttatacgacaatttataattcgtatgacttttttggac

SEQ ID NO: 16206 - DNA, 1111 bp, Zea Mays
caagaatattcattgattcaatatcattatcgtatcagaaagatgtatgaggcattcccaagggtaactgttccacatttccttggagatgactatgatgatgaggggcatcaattatctgaagctatttctgctgccaaagtgcgggcagagagttgctcatcattcatgaaagctgcaatcaggtggtctgctgagtttggaacatcaagaaatggttcttctgagcttcacgttatgttagcagaatacatatattcggaatctccagagacggacatgactaaagtctcaagtcattttgttcgtggaaatgatccaaaaaagttcgcttctatgctggtgaactttatgggcaagtgttaccctggtgaagatgatactgcaattgcacgtggggtcctaatgtacctatctcaagggaacttgagagatgcaaatttacttatggatgagatgaacgaacaactaaaatctgctaactcggaatttccgaaaacagatttgattcagttcatcaagtatcttttaccaacacttgagagagatgcttaccctctttttagaacacttcgacagaagtataagacaagtacagatcgtgatgctgtgtttcaggagttactggatgaaatagctgcaaaattttacaatatacaacgccagaaccctttagaaggccttttcagcgaaatgttcaagatataatgcacgagaaaagaattttatgtcgatgctttcatctaaaccattggctggaataatacaattggtcaacaaaggtgtttgctcaactatgaatctccaaggccatacatttagcatcatgctgcatgaagatatatacttagctctgcagcaaaatcgtcgattagtgtcagattgttactgagcatgtgtaactgaattttgttttctattacttgtttctctttgttgacttgcccttgattgttattgaccatgcataactgaattttgttttcttttacttgtttctccttgtcctgttcacttttggagatgtattttgtgtacccacagatcaaaactataacctatttaaattcattgattttaatatatggtgttatcagtaaagttcattgaa

SEQ ID NO: 16207 - DNA, 627 bp, Zea Mays
tgattatcaatcgtcaatcccaagagaaacattcattcacacatttatgctccaaattgctgttttatccaatcatctgaatgggagggatactcatgtccgacagatcaagatctacgggccaagaccgaatcctgttccccaccagccgtttcattttacttccagggagttcatcacatactctactattagatgacagtggatgagcaatcaagataggatcggcagctcatggctctggatgatcgcgccatattagtatatttgcctgcttgtgtgctgtctatcgggtcttggacgtgtatgtgtaatgaagttgttaagttagctcagcagcatccacatctcatattttaaaccccactacataaagagtgcagtgcaaaatagtgatttgcagggcacatgtacctgctggccatagccttaggtagcaataacatacttttgaatttgtttcgcggcctctgttggcttgcagtgtttgcttggttcattggttggtcccaatcattttgtgcccttgatgttcagtgccttaggttagcctatacagtttatggacggtcgtactgttaaacctttgaaactttgtagtttcatttaaaaaaaaacatttttatg

SEQ ID NO: 16208 - DNA, 1941 bp, Zea Mays
tgatgaaccaatcaacccactccacagagttactagcactgcaaaacttgtgacattgtgctctctgttttcgaaacaagagggtgaaactctttgaaaaggatcctgcaaggcaagtagcgacatatgttgaggccgtgaaaactgtagacccgatgaaggcagtcgggaagccccatactctgtgggtggcatttgcaaagatgtacgagaaacacaatcgtctagatagtgctgaagatatcttcaaacgggctactcaagtgaattataaggcagttgaccacttagccagtatctggtgtgagtgggcagagatggagctacgccacaacaattttgacaaggctattgagctgatgaggcaagcaacagcagagccctctgttgaagttaagcggcgggctgctgctgagggggatgagcctgtccaaatgaaagtgcacaaatctttgaaactgtggagcttttatgttgatctggaggagagccttggaaccttagactctacacgtgtagtttatgagagaatactggatttacgaattgccactccacagataattctcaattatgcatatcttcttgaggagcacaagtatttcgaagatgcatttaaagtgtatgaaaggggcgtgaaaatattcaagtatccccatgttaaggccatttgggtaacctaccttacaaagtttgtacatagatacaagagaagcaagttagaacgagcaagagaacttttccatgaagctgtccaacaggctcctccagaggaaaagaagcccctatatttacaatgggcaaaactggaagaggactatggtcttgcaaaacgtgctatgaatgtatatgatgaatctgtaagagctgttcctggcagtgaaaaaatggccatgtatgaaatctatatagcacgtgctgccgaactctttggtgttccaaggacaagacaaatatacgagcaagcaattgaatctggcctcccagacaaagatgttctgacaatgtgcatgaagttcgctgaactagagagaagccttggtgaaattgatcgtttcgcgtgccatctatgtgcatgcatccaactatgctgatccaaataatcctgacttttggaagaagtggaatgactttgagattcagcacggtaacgaagacacattcagggagatgcttcgtatcaaacggacagtggctgctagccgtagtcagacacatttcatactaccggagtacttgatgcagaaggatcataggttaaacctggacgaagccgttgacactctgaaacgtgctggcgtccctgaggacgagatggcagccttggaaaggcaactggctcctggaccatccactgcaccagcagcaacaccaactgccccagcctctgctaacaggacgatgaattttgtcagtgctggagtagaggcgcaggcagacagcagcaggcaacaggctggtaacaacgaggacattgagctgcccgacgagagtgacgacgaggaacccgatgtccaaattgcggagaagagtgttcctgctgcggtatttggtgagctcggcaagagagctgccgagaagaacgaggaaagctcaggtgcccaaggaaatgagcagctgggcgccctcgagaggataaagagacgacgccaatagtaagccgttgctaagattgtgcagccgtggtatcagcacgagctttatttaacgatgttgtacttgttacgtgtaaacaatttctttgtacaaacattgaagggagttgatcggcgtggccatttctgtgtagtcttgggtttgtttcttctccctcgaaagaacatgacaccaaaacatcatttctttggttcgtttctagattttattcgtccaaagcattagacgtgaagaaagccatcaatatcatgaaaggacaggcaacgtccgaaatcatgaaaggac

SEQ ID NO: 16209 - DNA, 1022 bp, Zea Mays
tttagatgttctctttacataggtcatttttcctatcagcaggagttcaagctactcttctatgccttctgctccacgactcaaactaatctcaacaccagatttgaggtcacttctctcagttgaggatgtgaaactccctccatggtcaaatgggatgtgtttggcggagtatcttcctgctttagaagacagtcttaacggtctgcttgtagatgcgtcggcttcaattggttccagaagacgctttattgaggcactagctcccatctttgggagaccattagaggctgatccggagggctacagttctttccatttctggaatgttcacatttctggttcactttgccatcccccttcaattcccaaagcaacaacctgtcgtcacactgcagagttctcagcactgtaatgccgatgggatgcctatcacgtcgcctccgataaatgactatccctggagtcctagatgggaccaggcagagatggttgaacggatctacgacttcctgaccgacgagtgccaaaatttcaagaagttctgcagcgatgctatcactcagcagaagtagctgacatcgttctgcagcagaaagccgtggtgctgattttctcagcaacaggctttcttattcccagcaagcggcacacgtgtctacttgtgcgcccgccccaagcctgcaaccgttgatgctgttctctttcttgtcatgtgagaggacgcaacctcaggcgttggttaggatcggcataaaccaagcaggacaacacaagacctgttggttgtttacgatgtcgtacccctgtataagctgccgacatggtgactgtttgggatatggtatagatggatacaatccagttcttttgtaaatatgatatgaaggatggtggcactcctacccccgttgcattctcctctccaaagcaccacatgctgtcgatgccgttgggaagtttgcaaaaatcttactcttattgttatgcaatcaaattgtgtgtttccacgcgatatttcc

SEQ ID NO: 16210 - DNA, 1705 bp, Zea Mays
gcttcccttataaaacctagctcctcaagctccagacgcagtcgaccgccgcagaccgggagtagtcgacgcgccgtcactgaatcctcagatcacggctagccgtaatcacgccactctgctgactcccggcgagcagtgtaacattttccttcagccatgggcaaggagaagactcacatcaacattgtggtcattggacatgtcgactctggcaagtcgaccaccactggccacctgatctacaagctcggcggtattgacaagcgtgtgattgagaggttcgagaaagaggccgcggagatgaacaagcggtcattcaagtatgcctgggtgcttgacaagctcaaggccgagcgtgagagaggtatcacaattgatattgctttgtggaagttcgagaccaccaagtactactgcactgtcattgatgcccctggacaccgtgacttcatcaagaatatgattactggcacttcccaagctgactgcgctgttcttatcattgactccactactggtggttttgaggctggtatctccaaggatggacagacccgcgagcatgctctccttgctttcacgcttggagtgaagcagatgatttgctgttgcaacaagatggatgccaccacacccaagtactccaaggcccgttatgatgagattgtgaaggaagtctcttcctacctgaagaaggttggatacaaccctgacaagatccactttgttcccatctctggtttcgaaggtgacaacatgattgagaggtccaccaaccttgactggtacaagggcccaaccctacttgaggctttggacttgatcaatgagccgaagaggccttcagacaagcccctgcgtctccccctacaggatgtgtacaagattggtggtattggaactgttcctgttgggcgtgttgagactggtatcatcaagcctggtatggttgttacctttggtcctagtggccttactactgaggtgaagtctgttgaaatgcaccatgaggctctccaggaggcccttcctggtgacaatgttggcttcaatgttaagaatgttgctgtgaaggatctgaagcgtgggtatgtggcctccaactccaaggatgaccctgccaaggaggctgctagcttcacgtcccaggtcatcatcatgaaccaccctgggcagattggcaacggctatgccccagtgctggactgccacacctcgcacattgctgtcaagtttgcggagctcattaccaagattgataggcggtctggcaaagagcttgagaaggagcccaaattcctcaagaatggtgatgctggtatggtgaagatggttcccactaagcccatggtagtggagaccttttctgaatatcctcctcttggtcgctttgctgtccgtgacatgaggcaaacggtggctgtcggagtcatcaagagtgtggagaagaaggatccaactggagccaaggtgaccaaggctgccgcaaagaagaaatgatgtgtctggctggttctgtgtttgcttgagggatacctagtggaaacgtaaaatatctcgtcttgttcacgtcattgtctgaactatgctcgcaacgtttgcctggtcgatttagaactgttattttcgttaaaaccagagtgttatttaagacttatccgaacatctggtgagccatatatggttactagttttgttaaaa

SEQ ID NO: 16211 - DNA, 954 bp, Zea Mays
gtggccatgtggccccgttcgcgcggatacatgccaccccatagggcctacatgcgtagaactgcgatggtatagccgcgtagtcggatgagcgattcaagcgagaaatcaaaccgttcgtgattcgtgaaggcctcaactctcctttcctctcgtgggcgatcgactctctcctgcggcggcggcggcgatcaacgtcgacgactacggcccacgattctccttcgaagcgcgaatcatgatacattttgtgctccttatcagcaggcaggggaaggtgaggctgacgaaatggtacactccatacccacagaagcagagatccaagatcatcaaagagattagtacgctcgtcctgacaagaggccccaagctgtgcaattttgtcgactggcaaggttacagagttgtgtacaagaggtatgctagcctttacttctgcatgtgcattgaccccgctgacaatgaactggaaacccttcagatcatccatcactatgttgagatattggaccgctactttggcaatgtctgtgagcttgatctgatattcaattttcataaggcgtactttatattggacgaaattttgattgctggtgagcttcaagaatcaaacaagaaatcggtgctacgtctagtaactacacaggacgctttggtggaagccgcaaaggaggaggcaggctcgttgaggaacataattgcacaggctaccaagtagagcactcgtgtcttctacaatgattactcacacccccacggcatgatagtagcttaatcactaccttacggggcagcagcttttacccctgatttttcctcaatagtttatcccctcttccatctctgcattttgttcagaggtctgttctgttctgtcactctctctctctctatctctcttgttttcccactgtaccacctgtttcgagggaatgtgttgtttctgct

SEQ ID NO: 16212 - DNA, 2445 bp, Zea Mays
atcaggaaggattttaaggttaaccggccaccggcggtgaccgacgccccaccccactctccttctcctattctatctatatatcacccgcctcttttttctccctcactccgccacaccttccctcttcttcctcagctccgtcgcccaccgccggagctccgaaaggccccgcgcccgccgcctttcctgtaaaaaacccaacctttagctagctaaccgctcctcttctccccctactccccttgcccaaatcagagaagatatttaacggaggaggggaaggagaggatatttagctgattgttgattggtggtccggggtacggtgttcttgagtcgtgaagcgaccgtacagtggctagggccgtctccgggttgcgtgcaggatggtcgtcagagatcgggagtgaggaggcagctcgtggtcgtggaggctaaatgtaccgcaagaacgactcggcactctcctgtttctacctcttcctcctctggttcttcttcttgaaatagaccagcgccagccaccaggtagctacctactagctagcagcccagttgcgactggggacgggctgctgcttgcaagttggaatcttggagcaggagcagaggagcgggagatggagctggatctgaacgtggccgaggtggcgccggagaagccatcggcggcgctggaggcgagcgactcggggtcctcgggctcgtcggtgctgaacgcggaggcggcatcggcgggcggcggggggcccgcgccgggggaggaggggtcaagctcgacgccggccgtgctcgagttcagcatcctcaggagcgacagcgacgcggccggcgcggacgccgacgacggcgacgccacgccgtcgccacctcgccaccaccagcagcagctcgtcacccgggagctcttcccggcgccgcagcattgggccgagctcggcttcttccgcgccggcccgcagcagcagccggacatcagggtcctgccgcacccgcacccgtacccgcccccgccgccgcccgcgcagccgcagcaggccaagaagagccgccgcggcccgcgctcccgcagctcgcagtaccgcggcgtcaccttctaccgccgcaccggccgctgggagtcccacatctgggattgcgggaagcaggtgtacttaggtggattcgacactgctcatgccgctgcaagggcgtacgaccgagcggcgatcaagttccgcggcgtcgacgccgacataaacttcaacctcagcgactacgacgacgatatgaagcagatgaagagcctgtccaaggaggagttcgttcacgccctgcggcggcagagcaccggcttctcccgcggcagctccaagtacaggggcgtcaccctgcacaagtgcggccgctgggaggcgcgcatggggcagttcctcggcaagaagtacatatatcttgggctattcgacagcgaagtagaggctgcaagggcgtacgacaaggccgcgatcaaatgcaacggtagagaggccgtgacgaacttcgagcccagcacgtacgacggggagctgctgctgactgctgaagctagcgcagaagttgctgacgacgttgatctgaacttgagcatctcgcaaccggcatcgtcccagagccccaaaagagacaagaactgccttggtccgcagctccaccaccaccatgggcggccgtttgacggctccgccgttctgaagaaaaccaagatcgatgctccgtctgagctgtcgtcggcgggccgccctcaccggtcgttcctccctcatctcgtggctgccgagcatctaccgcctcggtctcaccccttcttcatcacacaccatgagagtgatgcatcaagaagagatcccagctgggcagcagcagcagcatggaaggtgaccgcagctgcacctcctcctcctaccaccaccctgttgccgttgccgctgccgtcgacgtcgtccgctgcagcatcatcaggattctccaataccgccacgacagctgccgccgccccatcggccgcctcctcccgccggttcgacccgccgccaccgtcgtcgtcctcctcctcgagccatcaccaccaccaccaccgccgctgagaatcgaagaagccacactgtaaatctgccgggaagcggctggtggcatccggcccgctcctccctccgggcgccgcaacttttttcgatcggttttgcgccgcccgggacgggttgtagttgatcgattggattcttcataactgtatttgcgtactgcttacactacccaagtgaaatcgaaaatggcgccttctctcgttgaataaattgcacgtacgctactcgatccgctgcggctcttgctggagtggccgccgccgctatagatagaaggatcaagccaaggaatctgtcatgcatgggcatgtgaaggaggagcctcctgcaatgttta

SEQ ID NO: 16213 - DNA, 5799 bp, Zea Mays
ccgcgagctacagctttgcagcgctctctcttggctcgctcgctcgctcgcccgcctcgcctgcgccctctctttcactcctggctcgcttgcgttgtggagctcgagactgtcgccattccgctacgagaaaccctaaccctagccctcgcaccgccgcgggaggccgcgggagagaccgtgtcgcaccgcgccgtcgatcccgatccagacgccgtcgcgccgtgccgcgctgatcgagtgtggaggaatggaggacgggcagaatatcagattgcttgcagctagtttatttttccagcccagggtgaacttctgggtagtgtagtttgtcgtgggtttatcttctgcagaatagaagcaaatatttgtaaaagctgcttatagttctatatgatatgaaagtttgggaactatcaactgcaaattggccactctttctcaggcattagaccctaagggatactcaaggaatgtcacattttcatcccacacagcatgctagtgacaatgattttcagatgtggcaacagcagatgatgttcaagcacttgcaggagtttcagaggcagcaacaactacagcagtctgatcatggagccaggatgcagctctcttttggacagtttcatgctcctgcaaaacctttgcctggtgatcaattgtcgacaatgtcaaatgaaatggtcaacaatgagaccatgaattctggatggccacataattttacaggtggtgacctgagtttgacgagcaactcccagatgttgaacaatggtagcacaaattgggatcagattgttggttctcctgttgtgggcaatttcatgaatggttcaatgtttgtgaatgctcataatcagtcgatgagaccaatgggattagctacccaccaagtggatcaaactttttatccaatgcatgctaccagcagtagagggcctggaaaccagtattcccaatttttagggattcctgctgatcctcagagtgaagcggcaagggttggtccagttcagtcagaaaagacatccagaccattcaactcttcaatgaacgaacttggtcttcatatgcaaggtaccaccagtttgatgcataattttcgtggaaaagggggcttcttaaataacagtctgatgcaaagtcaaggtgataatatcagggcaggcagtccggttacaatgaatcaactacaacatggttttcaaacccaagattttcatggtaggccaaaccaagttgatcttcaagcgggcatgcaagagaaatcagcaatgcaggtagggcaagcgagtcgtggggctagccttgaccctactgaggagaaaatcttatttgggagtgacgaggatagcaactggggagctttgttgaggggtgacaatgacaatgtcaattctttggacaatgacaactatggtggtggctactcatctctacagagcggtagctggagtgcccttatgcaggaagctctccagtctacaaccagtgaaagtcccaaagaagagtggagtggcttgagtttccataaaactgagcaggtgatggctagcaatgcaaatttatcaggccgcaatggtagtaagtttactggattaagtggtgcaaacctagaaaatgcacgtccttcgccagcgtccagctatgctgatggaacaatgaataacccaaaccttgccagttttcagcatgtcataaggcctccatccgagcgaagggaccatatgtctcatgaatcttctaatgctcctgttaacaatcatcaatcaacttctgaagtcaacaaggggtactttcagcaaggcataaaacaaattcactctgatgcaaggcaaggacaagcgcacctagtaaatggaacctggccgcatcaaaagactgaactgctcagaagtaatttgcagtcaactggtgtacatgctacaccacctggtggacatggatttgggatgtcacaacaaattgcaactgatcacaatatcaacagagagtccagtaataatcaaaatgactggaaagctaacaatgcacttggacaagacatgtgcaatagccaaaatatctttaatagcaatgagaactcttggaagtcaactggaggtaatgccaattcagtccagagatttcagcagaggaggtctgatgtaagcgctactaatgaaagttcagatggtaaaaatattagcatgatgagctcaagcatgccaatgatgacacaggatcattaccagatggtcactagtcagagtggtgagcaaattggcatgaaccgtaatctgacacatagagctccagagacctctgagtcaccaggaaaaagcgcagaacaaagaccaggtgatttcaatcaggaatatctaaatgcaatccctaacgaaagagaaacacacatttcaaaccatggtcgacacataacaagtgattctgcccccagaaggcattctgtatctgctgggaaggaatctgaaaatttaggtcagtctagtcagcaagcaatgggatcttacatcttgcagaaccgtgctatggggagttctggaatgaacattggtctgtctccaggcaatccaatgtcaaatagtctgtttccacctcagacacgaaatagtctgcagcatcattttggcacaaactcccatgtttccaatagtatgccgtcagcaagtgaggaacaacttcaatcgcgacatggtctccccaacagctccagtgcatcaactttaggaggagctgatactggtctatcccagaatagagcagttcaaaacagtcaacatatgcttcagcttctgcataaggtggataactcaaggaatagcaatgtggttgctgacatacccaacaattcccttggcgttgtttctgcccagcaacaacttaaccattcttctttgcaaggatttgggttgagactggcaccaccatcccaactccaatcaatttcgggtaatttatggtctagtcagactaatgctgatggcaagcaattttaccaagatggcgaccgcacacagctaccttccacccctagccagtcactgactcctcagcatcaaaattctctatcttcaccatttcacagttcagaaacagaaaatactgggcaaccaattgcgtgtttcccccaattaggatcaggccaacagtatcctatggcagatgatagatctggtcctgcacccatgctgcagcagcagcctcagcaaagcaactctgcaacagtgttcaagaatgtatggacaaacatatcagcacagcgcctaactggtatgcaacctaacaagattacacccaacatcattcagtctatgatgtttccaaataatgctgcagcttccaacttatggagctctcagaaggcagatgatcaagggcagagggcatcaactccatcagatattgcaacaagttcagcgaactcacagaatcaatctccaaaacaagctgctgatagtgatgcaaagttagcatcttcccagaagggaaacctagagttgacaggaactaccgtaacaggaggaaacgaatccttgcagaagccttcttcagatgagaattctatcaatgctgtttcatcctttgcacagttgcgtcagcaaggcatccttggtgctaaacatggggagaacccaggagctaattttcaggctatgaatgtttcccacaataatgctaatcacagtggtggcattgttttacatggaagtccagcacctacaaacattcagcagcaaaattactctcttctacatcaaatgcaaacctcgaggcatatggatgttgatccaggcagtttatctggaaagacgacaaaacctgatattggttctgatgctgcacagattgattggaattctggtcagagatttgctcatgtaaccaataactcaaccaaatcgtctgcagataacattggaagccctggtgtcccagggtcattcacatcggacttgaaaatgttgagttttgcttcaaggaacgaggagagaaatccaaacataccttctcggtttccttccggagagtgcccgtctcctggtatgataaccacacaagatgataatcagaatcaagttcagcatatgggcacaggtgcaatgtcaaattctgatgaaagaagtgagaggccgaggataaaccctcaaatggcaccttcttggtttggacattacggaaactacagaaatggtcagagtgttgctacgcttaatgctgctacgcttaatgcgcagaagcccatggctttgccatttaattttccgaaagcatctcggaacaatgaaaataatagccatgctgaaaatagagttgaacctagccaatctgttaggcctgggcatcatctcccatcagcaagaatggaagctttggttccttccaatgtaaaagtgtcttcaatgatgagaaggcctaagaagcgtaaaactatggactccacacttgtttcttggcataaaataattgaaagcccacgaaaattgaggggcatcagcacacctgagatggactgggcttgggcagctaaccggttaattgagaaggatgaggcagaaactccagacgatgctcctttaaattatttgccgcggaagaggctaattttgacaagccagttgatccagcaacttctccctgctataccagcgaccattctgagagcacaagctgtgtctgcttacggaagtgcgacatacactctatcaatgttgacactaagggatgcatgcagcatggcatcatcatcatataactcttgctcacctgtggaggatgaaaataacccatctgaacaaccaagtgctaagaaaatggaagacagagtgtcaaaggttgtggaagtcttcgttggaagaatccggaagatggaaaatgactttataagtttgaacaagagggcctcgatgctagatgtgcaactggagtgccaagatctggagagaatttctattgtaaatcgtctgggaagatttcatggccggagccatgcagcggcagttgagagttcatcagctccagaaatgactcctcggagaatttttcctgaaagacatgtcatgtcttttgccgtgcctggaaatcttcctgaaggagtgtgctgtttgtcactctagtggaatgatcttcagttattttctagccgcaatgatgatcccgggtcgcgccctgtgattcccagtgctccttgtcccatgcaaagcatggtcaaacagaaggatcatatattgtcaaggggtaacttgagaactggaagcatcacagtaccacgatgaggcaggccggggacatgttccagccgatcaagtcagtgctggctgttgttgatgcaccttatatcaagtataggtccatgtatattgtggaaagtgaaggaaaaaaactgtggatctcccatcatttttctcgatgaagagtaattagcctcagaatttttttagagaagtcgatgcttactagcttagtgcatctggtgggtttcttgggtatttgtcgatctctaagaaatccgtgatgatggagtgttggcaggctagagtggaaataataatgtgagcctttctctgggttctttggttcctttaggatgggatgcaaattggctagtgtgtcctccagtctaactgaccacccctgttagtcagcagttaattattactagttttatgtagtgctgaaagcattcatggaacaattggcgggtaaagtgcttgggaattcttgtaacttgtgtacccgtgatgtttaaacgctaacgggttcttgtaaatttgaagtgccaatattcctgaggttata

SEQ ID NO: 16214 - DNA, 617 bp, Zea Mays
tgatttatcaacttttgccatgtgttagggaaattcagcagttcaggccatctcccttctattgaagaagggtgtacaagaagcaaatattatattccttaatcttatttcagcgccccaaggagtgcatgtggtgagcaagagattccctagagtgaagatcgttacttcggagattgagtttggtctaaatgatgatttccgtgttgtgcctgggatgggcgaatttggagacagatactttggaacagatgattatcagtcatcgacgccattcttttgtgacgataaaaatcgtgtcaggctcttgtgacatgaagccatggctgcggcgtattctccaatttttgagaaacttatatcagcattccaaactctagaatgccatcataatgttttcattaccagacactgtaccatggaacatccagacagaaatcacctcttaatataattggatttgttccatttttattttttttgtcccagtttcgaaagcagcctcttgttcagctcattttggcactctacacaatacatatcgtgtcctcttcagcagcctctagaggacgaaatgtatgttgttttggattggacccaagggtttgatgttgtgg

SEQ ID NO: 16215 - DNA, 697 bp, Zea Mays
ctgctgttcccctcgaccctcgtccgtccgtccgtccgtcacctgacggctcccaaaccctaccccgcagatccctccccttcctctacccccgcctcgccgccggtcttcgtcacccgtcgccgtgcccgtcggcgcggtgttaagggtccgctacgctgcacctcgcggggagaaaggggtgggcctcggggacctccgccctccgcgcaaggtcattgaatgaccttctatacgaatatggatttgaatgcatcaccggtgcctgacgatgatgagcaacagccttatgatgattcagttgaggttgggtatgctcagacggaacatgttgaatctgctgttgcaacattgcgccgggagcgtgaagagagacgcaagagactaaagagagagcagcaggatgatgggtcaaggctacattcccagcagattaggaatgattatgctcctcaacccaaaagacatagtcgcattaaagaggcacctcagggctggctggactgccctgcatttggggaaccaatagataaaatcataccatctaaagttcctcttgacgaaacattcaatgagtcagtgcctcctgggaagcggtactcctcaaagcaactagttaacaaacaaagaaaagctggccgcgaagtgagaaagtgctaagcctaagaagggagggactgcagaagaattaaatacg

SEQ ID NO: 16216 - DNA, 1140 bp, Zea Mays
tcatcaacgactttgcggctagacatgttcgaagaaatttttaagggtgtcattcttctcgtcgcctacttcaacagcggctcaggtgtaactgttacaagcagagagtctgtgaccaggtctgaaggttcttgcacatcagaagttatgcgggtgcttccatatcttaaaaaggcatatggaaatgccatgcaaaaggttctccatgtaggccctgatagttgtacagtagtttctaatttgttgaaagaaggaaaggttgaagcttggggagtggagccttatgatttggaagatactgacagtacttgcaaaagcctcgtgcgcaagggctttgtccgtatgtctgatattaagttcccccttccgtaccgtccagattcttttaatcttgttgtggtgtcagatgctttagattatctgaccccaaggtatctgaacaaaacacttccagatttagcaagggtttccacagatggccttgttatttttgctggcaacccaggtcagcagaaagctaaggtctcagaactaccaaaatttggaagaccggcaaagttgcggagttcttcatggtggacacggtactttgtccagaccggcttgacagagaacgaagggccgctgaagaaattcgaagatgctacatccaagaacaaatacaaaccaggttgtcagatcttccacctaagttcgccaaggtgatgcgcatccatagcaccttgaattgttgtcacaccccctgccctcctccggttggcttgctcattgttcgtgtggaggaaatcgtcgcaaaaaaagccatcaggaataggttagcttatgtagagaggctccgacacttgttgctagaaattcactctggaaattaaattgtgtcccccaatgattgcaaactggagccccgctgggatatatatgtaagaactttcacgctgttgtaccgctgtgctatccatgtattgtcaggtgttcaccgagcagtttgaaatgtaaagctcttgatgatccaggaggcggggggctatatttgaccactagttgtagacatcgtaccatgtcattttcagcaagttggatgatgcttcaagccgacccgttcttttctgagacgcgagaaagatggtctaccaaattctg

SEQ ID NO: 16217 - DNA, 727 bp, Zea Mays
gcgcgaatcgaccacctccagtaattgatggtgaacgtctgaagaagtatgtgttctacaaactgcgcaccgaattgcctgtgggtccattctgcattttgtacatccacagcaccgtacagtctgatgataacaaccctgggatgtcgatcttgaggacaatttatgaggagcttccacctgaatacaaggaaaggcttcaagttttctacttcttgcatcctgggcttcgctccagactggccatcgccacacttggcaggctatttttaagtggagggttgtattggaaaatcaagtatattagtcgactggagtatctctggggggatataaaaaagagagaggttgaaattccagattttgttattgaacatgataaggttcttgagcaccggccactgactgattatggcatagaaccagatcccctacatcttgctgatgtacctgctgtgggatactcgcttggaagatatgaagataaatggactccagaagatcgatggtattcaaggaattacatgtgaaattttctgttgtagcttaaaagatgattgtatagtaacacggtactatgagatttgtattagattgctatgaaaaccttgtcaaggtcctgtatttccaactaaatttatacctgtttgaagatttttgagcagacgctatatgctgtctgtggttaacccgccgtataaaactgtggccgatgtgtctgcttatg

SEQ ID NO: 16218 - DNA, 4410 bp, Zea Mays
gtccgcagctcacgccacgccctagtttttcgaaatcctccgagcgggcgccgggcgctgctcgctctcaagtctcacccgttcgccattccgctcgtctctctctctcttcctcccccgccctctctcccccctcgagggggcgatcgaccccaagcctagctaagctcgccgcatcctaaatccccaaaccacgtgcagctcgccgttgtatgtcgcagagcgtggctaatccggctcgatccgccggtttgagggttccgatggagaccacagaggcggcggccgcgcatccgcagaaggacagtgtgaaggtggccgttaacataaggccgctcatcacggtggagctgcaggatggctgcacggattgcgtcacagtcacgcaaggcgaacctcaggttcaaattgggccccatgtcttcacttttgatcacgtctatggcagctcgggcccttcatcatcattaatatttgagcaatgcgtgcaccccttgatcgatgcattgttcagcggatacaatgccactgttctagcatatggccagaccggttctggcaagacatacacaatgggtactaactatagcggtgaagagaactgcggtgggataattcctcaagttatggatacaatatttagaaaagttgacacctcaaaggatggctcagagtttttaattagagtatcttttattgagatattcaaggaagatgtttttgatttgctcgatgcaaatcaagctgctgtaagacttgatgcaggttctatggcaaaagcatcagcccctggcagagtgccaattcaaatccgagagactgcaactggaggcataatccttgctggtgtcacagaggctgaggtgaagtcaaaagaagaaatggcatcatatttgacacgtgggtcgtcgtcgcgtgcaacagcaagcacaaacatgaatatgcagtcgagtcgctctcatgccatctttacaatatgtgttgaacaaaagagaacatctggtacatccgacaagtcagccagcagtgactatgatatactatcatcaaagtttcacctagttgatcttgctggttctgaaagggctaaacgtactggagcagatggacataggcttaaagaagggatacacataaataaaggccttctagctcttggcaatgttataagtgcattaggtgacgaaaagaaaaggaaagaaggggcatttgtaccataccgggatagcaaattaacccgtcttctacaggattctctaggaggaaacagcaaaacagttatgattgcatgcattagccctgctgatataaatgcagaagaaaccataaacacactcaaatatgccaatcgcgcacgcaacattcaaaacaaagcagtggtaaaccgtgatccagctacagcagagatgcaaaaattgaggagccagctggagcagctgcaaactgaacttttgttttctcgcagtgggagtgcagcgttagaagaacttcagttgctgcagaaaaaggtctctcttcttgagctaaagacttctgagcttaacaatgaacttaaggagaaggaattgtcatgtgagcagttggcagagcgggcacaggctgctcagttggaaagggatcagttgatgctgaagattgaatccgtgaggaatggaaaatcgttggatgatattgaaaatattgataacgaccaagacatggaccttttgaagggctacatatcaaaaatacagcagttggagagtgcgctgatgcgtcaaaacttctccaatgcttgcagacatggcttacatgaccagcttgccatggaccaggacatttttctaaatgaattgggttctggatgtgaagtagaaacaactgatgcttcaaatgaagttgatgaagaagaaaaggagagggaacattcattcatgcaagaccaacttgataaagagctgcaggaactagataaacgacttcagcaaaaggaggcagagatgaaacaatttgccaagagtgatacttctgttctcaagcaacattatgaaaagaagttaactgacttggagcaagaaaagaaagctcttcagaaagaaatagagaatcttcgccatgcattaaccaacatatcttcttctatggatgataatgctcaaaaagttaaagaaaactatcttcagaagctgaatgcacttgagtcccaggtccatgagctcaagaaaaagcaggaagctcaacaacagcttctaaggcagaaacagaggagtgatgaggcagcaaagcgcttacaagaagatattcagcgtataaaatctcagaaggttcaacttcaacaaaagatcaagcaagagtctgaacagtttaggtcttggaaggctgcccgtgaaaaggaagtacttcagctcaagaaggaagggagacgaaatgaatatgagatgcacaagctcttggccttaaatcagaggcagaagatgaggaaaactgaggaagcagctgctgctacaaaaagattgaaggagttgctggaagcaaagaagtcatcacgtgaaacatatggcagtgcaaatggttcggggatgcaggccttaatacgagctattgacgatgaactagaagtcactgtaagagcacacgaattacgctcatattacgagcgacaaatgcaagagagagcagcaatatccaaggaaatagcaaaactaaaggaggaatcaaagcacaagatcagtgattgtcctcaagctatgtcacctagtgctagaagttctaggatatcagcattagagaatatgttgtcctcctcatctagtgctatggtatctatggcttctcaactgtcagaagcagaggagcgggagcgtgtattcaatggtaaaggtagatggtaccatgtcaggtccctcccagaggcaaagaatataatgaattaccttttccagttagcatcatctgcaaggtctcaagtactggataaagaagtaatttgtaatgaaaaagaacacaccattactgaattgaaggaaaaggtggttgtgcttaatggtggaattaggcagttggaaacacaagtgagggatctaaggagccaaaatacacagcttttcactgcattgaacaatgcaaagaaatctgctaggtcgaatggcactggatttgctgggcgtaagagtgttcgatcttcccagcattttggttatagtaaggacaacttcaattgggtggatgatatggacatttcagacagtgagcactcggatgagttagagaatatgagtgatggatccgattcagactgggtacagtcgacgaggaaagccaaaaaacaccagagaagagtgtctagccattcaaatcctaacctggattgtcaaaatacacaaggcagtgcagaaccagagaagccctcagatgaaaagtgcattttgcccaaatacatttcatcagacggctgttcatgctcaaaatcctcctcatgcaagaccaacaaatgcgagtgcagagggtcaggtgcacaatgcggtgcaggctgtggttgtaaggattccaaatgttctaacagggattcttctactatagaaaaagccaatcagggagccatgcttcttcagaccgcgttttctgagaaggaagcccaagatgcaaagccaagaaagcctttgactaacattggtaataatgtggttaaccaaactgccgagacaaagaagcccaggaaaaaccggcgcaagtcggcaattcaactcgtcccaggacctctcctgccgtccgagccagtggccaccgaagctgcccctcgggacattgccaacattcccctcaagctaccgagagccatgtcctcggtgactcctgcggagagcaaccctcccctcacagaccgcaatgctgccaaacccgacgaatcagtgagcaccggcagcaagaatagcaccggagctgcagccacgagagcaccgtctcagctgagaaaaaacgcaaccaccgagaaggagaaccagttgcgataatccgattgctgacatgcagtatccgtgactccgtgtcgcttaagccttctgtttaacagtgggggaggctgcctcggcgtcctttggagaggcaggtagactctggaagggctggcgctctcgggttcctgtgggaaatggcgtgttctgtggaaagccttagctctgctttggctggaatgcgaccttcttgtataatggaaaagtaacatgctggattaagctatgtcagtctcgtaaatggtctccgttcattttgaacatactgaggaaatcaatctgcgcatctgtatgcttagactggtacactgcaggatgcacatttcctccacagttcgacagcataacagatgcaatcgtatatatcgttgcaaccaagtggtgttcttttgagattataatatatcttgaaaaagtcaaa

SEQ ID NO: 16219 - DNA, 271 bp, Zea Mays
cgattcaatcgcgttgacgactggagcctaaccattatcgcaaggaaggagggagcaggggggtgattgggtggccaccatggagagtcaccgccaccatcatcgcgctccctgcggattgccttggatgtcagtcatggtctgtggcacctgggcaaaggatgttcacgcgctacgaaccttgatccccctggtaatttctcatcgggggcgccactaccttgagcccgcgccgcatcgcaattcgcgcgtccgtcgccccaactccagt

SEQ ID NO: 16220 - DNA, 1197 bp, Zea Mays
aactgagcaaaagacatctcactctcctcaccccaaattaggatatggcaggtgctaaaatttagcacatccaaacactacatgtgaaaaaatggagtttgatttccactccaccacccccggaagaaaaaaactgtccaatcgaatcaaagagagaaaaaaaatcctaaaccctagcatctcccatggacgacagcgatggcggactgagcttcgatttcgagggcggcctcgactctgccccagcttctgggggcgggggccccgtgccgtcctccaccgaccccggcgcgggtgtcgggggaggcggcgacgggctgggtatgcacgggcgcggccgaggtcgcgggagctaccgccaaacggtgtgccggcactggcttcgcggcctctgcatgaagggcgaggcctgcggattcctgcaccagttcgacaaggcccgcatgcccgtctgccgcttcttccgcgacttcggcgagtgccgcgagcccgactgcgcgtacaagcactcgtacgacgacgtcaaggagtgcaacatgtacaagatgggtttttgtcccaatggtcctaattgccggtataagcatatcaagctccctgggccaccgccttctgttgaggaagttcttcagaagattttgcagatgcgctcttttaacagatacagtcagaatagaaataataattataatcatcaaggggagagacctcaacatccacaaggttctgggttgcctaaccaaaactcggcagaaaatgccactgccgtggatccaccagctggtggacaacaagcacaaacgctgaatcaacaaccaccacagcagcagcagaagccaaatacaaatgatcaggcccaaggtgtttcaaatggtcatcaagccactagaatcgccacaccccttccacaaggaccatctaggtacttcattgttaaaagttgcaatcgggagaatctggaaatatcagttcagcaaggaatttgggctacacagaggagtaacgaggctaaactcaatgaagcttttgaatccactgagaatgttattttgatattctcaattaatagaactcgcaatttccaggggtgtgcaaagatgacttctaggattggtggctacattggtggtggaaattggaaatctgctcatggaacagcacattttggtcggaacttctctatgcagtggcttaagg

SEQ ID NO: 16221 - DNA, 169 bp, Zea Mays
attgaagtcttcgaccgagcacttgataagcgatgcacagggacctcgcttatttttgcataacgtccgggattcgggtttggatgagattgagcaagtaagaacgaggttcgacaggctcgacgacgatacgggagggtgacgtatatagagctgcacacacgacgcg

SEQ ID NO: 16222 - DNA, 2274 bp, Zea Mays
tgaggccgaggcgcctagggagtactacggtacgctttgcagtgctagtgccattggaactgctgctgcaaacctatcactagagacgggaaaaataaggagggatggcactagcgatatagaaatcaaactctgcgcaagtcatgcatgcgtacggaggaagtggagtgggagcacaagagcaaggaggcccggaagatgcacgcctgcggccacgacgcgcacaccgcaatgctgctcggtgccgccaggatcctccatgagcgccgcaacgacctgcagggcacagtagtcctccttttccagccgggtgaggaggtcggtattggcgcaaagaggatggtggaggcaggcgccgtggagaacgtggaggccatattcgggttccacgtcaccgtgctgctccccaccggcgtggtgggctccaggaccggcccgctgcttgccgggtgcgggttcttcgaggcggtgatcaccggggtcggcggccacgccgcctccccacacaacaccgtagaccccgtcctggcagcctccagcgtcgtgctcagcctgcagagcctcgtgtcgcgcgaggcggacccgctggactcgcaggtggtgacggtgacgaggttcctgggcggcggcgcgttcaacgtggtcccgggctccgtgacgatcggcggcacgttccggtgcttctcggccgagggcttcctgcggctgaagcggcggatcgaggaggtggtcgtggcgcagtccgcggtgcaccggtgcgcggcgtccgtggacttcagcgccggtgggagcccgctgctgcccccgaccgtgaacgccgcgccgctgcacgcgcacttcgaggccgtcgccgccgacacggtcggcgtgggcgccgtccgtggcgccatggagccctgcatgggcagcgaggacttcgcgtccttctcggcggccgtccccgcctcgcacttctacttcgtcggcatagggaacgaggcgatcggggccgtgcacgccgcgcactcgccgcacttcctcgtcgacgatggtgcgctcccgtacggcgccgcgatgcacgccaacctcgccatcgagtacttgcggaaccacgcgatagccaataggtccgttggtccccacgacgagctttagttagatctactgcagccagcctttcgcgagcagccacagcggtggcggcggcgccggcgccggcttcacgctcatagctcgtgcccagcgaagctcaagacgagctcatgcttgcgatcgtcaagcaatcacgtcgtgatccgatcattttgtggctcagggagggcgttgtaggaatgcagtgcgactgatgttgttgttcaatgcgcggggcgtaattaagctggttgagagataagaatgagatgttgcctttacaatacaggcgctcctgtccgagctctgttccacaattagtttgggaaatgaaagatgagaccgtggactccaatgtttcacatcctgcttttttttttataaagcaccgaaaattttaaaattagaagtactgattccgttctcgaatattgtcgcgtgctatataaaaaaaagaacggaagaagtaggttggaaggaaggagtaggttggaagggacatcttttgtatagttcatcagagaagaaacattacacaagaaattccagagaaaaaatcattaatatgcataatggttggaagggacgtgactctgattctgaaacaaatacctactgcggctgaggaactgccgatatagaatatctgaatcggtaaagatacatcatcataattcatacatgcgatgcagctagcgtaggaagaaacatgctaggactagtactagtacatacaaagtaggaacgggacaaactcgccgtggcctggagcactcagtggcgcaggctgccgaagaggagcgccacggcggggcagaggacggcggcgacgacggaggacgagacggcggcggccccagacgtggggctgggcgcgggcgcgtcggcggccatcgcgacccccgcgagggcggacgcggcgagcgcggcggcggcgacggcgcggaaggccttggatgccatttccttacggtacagtttgcaggcttgtaccgtgcaccgtagaaagggagatgccgaggagggatctgggattctgggttgtactggtgcagtggtgtttgtgtcagagatgaacggcgcctgctatttatagctgacgaacgccaaaggctggaagcggagccaccgcgttcacagactggctgccctggcgtgccatgc

SEQ ID NO: 16223 - DNA, 157 bp, Zea Mays
ctcctccgacggccacgacatcacacgaacagggtgccaaaacctctccggctgccacgacggcatgtacttagggcactagctcttctctgctagacacgttagcacactgctactcccccattgtacacctggaccctctccttacgcctataaa

SEQ ID NO: 16224 - DNA, 1519 bp, Zea Mays
ggggtacacggctatacatttgccaataagatcaatgacaagtggacctacataattcatggtcccacctgcaattaaaggcatggtggtaagatttagttagaagaaaaaaaaaatccgtcattcaccatggcaggtaatctggaggggaggagcatgataaaaggaggggcagaaggggagacgaacgcagactgcagcaggagcggagcgggcggagaggttccgggttttcggggtggggtttgggagatgcctcccgtgaagaagtccaagaaggggaagcggaaatccaaggatggcaagctcaagattgtcagggcgcggggcgcgccgccggcgctgccgccggagctccgcgccctcgacaccgagtggtggtacgctttcctgaacaagcaagtcgagctagagcatgctgtgcctccagatgagggggaagcattcaggcacttcttcaggacttcaaggaagacttttgactacatctgctccattgttagggaagatctgatctcaaggccaccgtctggactgatcaacattgaggggaggctgctcagtgtggagaagcaagtggcaattgccatgaggaggcttgcgtccggtgattcccaggtgtcagtagggactgcttttggtgtgggccagtctactgtttcacaagtgacatggagatttatcgagtcgatggaagatagggctaggtatcatctggcatggccaagccaagagagacttgagcagatcaaagctgtgctggaggatgcttatggccttccgaattgttgtggtggtgttgatgccacccacgtaatcatgacgcttcctgctgtcgagtcatctgcagattggtgtgatcatgcaaagaactacagtatgttcctgcaagggattgttgatgatcagatgaggtttattgatattgttactggttggcctggcagcatgacattctcacgcctgatgaaatgctctgggtttttcaagctctgtgaagctggggaacgtttgaatggctctgtcaaagtttcagcagagggtgcagagatcagggaatacattgctggtgactcatgttatcctctactcccatggcttatgactccattcgaaggaaaacatctgcctgccccattgcaaaactttaatgcccgccaaaaagctgcaaggctgcttggaacaaatgccttggcgcggctgaagggatcctggaggatcttacacaaagtcatgtggaggcctgacaagaacaagttgccaagtataattcttgtttgctgtctgcttcacaatatactcatagactgccatgatgaattgcttccgagtgttcaacttcccgaacatcatgatactggctataatcgagaaaactgcgagcaggtggatcctaatggcaaagtgatgagagaaaacattacagcacatctccaacactgtgaagcttccaagtttctctgcaactgaggcaacaaaatgctgacactctctaaaatctgcataaccagctggtaat

SEQ ID NO: 16225 - DNA, 549 bp, Zea Mays
gctcccccaaattcgtttgtttcccacggcgcaagaaagaaacaagggtacaagaacagcccgctaaaggaaagaaacaagggctacacaagaacagcttgagagctcctctccgatcccgacccaccgcctgcaactcttcttctctcctacgtgttcgtcagcccgctaagtgttaagatggcttcaagtgatggtcaaacagaagctgcggccccatctgtccccaaaaaccctgctatggcatcatgccggaagaagaaaacagatgatgctaccttcctcgaagatctgaaagaccacatcgatgagttcatccatgcctccatggatgagcacaagacctgctttaagaagacgatccagaagatgtttgggatgtcgaaggctgttgcagagagatccgcggcagaagcgaaggaagctggagttgaaagtgctttgccacttcagaccagtgtctcgcagtagaatttcacgatgatcgtgtcttctcggtctcggtgtaattgtcttaaaatttagcaaaagcgcgatgataggagcctg

SEQ ID NO: 16226 - DNA, 399 bp, Zea Mays
cttcctctcccctaggagatctctgtttcccatctgcacttccgagttccaggcttccaaccgctgtggaattttggctaccatcccactttcgctttgggtgaaagataaagaaaaagaactttggctaatgagggtcgtcgcaggaattcagtgagaacacaaagaatgtgctcttgtcatgtgcattcatacacttggaaaagaaggagttcatcaagcagtttgctgagatttcatcaataaaccaacgaattttgttattcggtccagcaggttctgagatttatcaggaaacattggtaaaggcacttgcgaaacattttggtgctagacttcttgtcgtggattcacttttgctaccttgggaagagagtggctcttcactcccatcggatt

SEQ ID NO: 16227 - DNA, 967 bp, Zea Mays
ccttgtcagccgcacgttccctctccccttttttctctccttcatttccgctcggtggatggacgactgaggctgtggcggtggcgctagccagcctcgcatgcgttgttccgggccggtgatggcagtgcccgcacgcgcctgcttccagacgacgacggcagccaccccgcgcgcctgcttttggggccgcggcatggccagagcgcgtgctcgcctacccatggcggatgaacgcagcccgatccgcagcgtggcagatcccgtgctcgcctgcttgcgcgccggggtcggcacgtgcttgtccgcatctgctggaccagcgatcacatgcctgctcacggcggtggcggggacggcctgcgcgcctgctcgcatgctgggcggcaggggcgctcgcccgcgcgctcgcggccatggcggtgctcgcacgtgtgcttgtctgcgacagcacacgcctgcgcgcttggttgtggcgacgcccgcttgcgtttcgtgctcgttgtctgctcaaagcgcggcagcatagcccggtgctggcagcagcagggaccgacttcagtgtctgcgaagcgtaagcatgccttctcgtggcagtgggacgccggtgctcaagtagaaaatttgtgtgtttggcatctcagacagcttcaagctgcgataaatctgcagagatgtttttcttttattttctatgtgtacgtatgtttatactcgaaggtcgaaagaagctgaaaatatagaaattacttagtgcgagtgaactcaccttcttattgttttgtgaacttctagattgcaagagcaatcgtgctgataacgtgttaagaaccctttgctatgaatgtagtccaaatgcttctttacacataaatataggagacataaagatatatggggagccgatattctcatcatctattctcttctctcattacaataaatggtggtgtgctcctagggctgg

SEQ ID NO: 16228 - DNA, 2220 bp, Zea Mays
ctaagggatggtacacttccataaagaaaacatcaagctgctggggaaggaaagagtggattttgcaggcttgggctacggatgaccatttcgtttctattgtctcttgagattggttcaagttgaaccgtctcccacaactggtactctaagcatggctgcaatcatcaacaagagcactcatatggacataatgccttcacctagggataattcagctggtagtggccaggaagatggaggttctcgggattttgaattcaagcctcatctcaattctcatttggcggctccttcagtcaacaatcaaaaccatcatgacactatgcaaaaatatagctcaaatcataccacaccatctagcaatttgaagactgaaaataaacctctctgttcacgggaatcgagtcacacagcacatgcttcaattgctccaaaccaaactgtttcgatagtttgtccgtctgacaacatgcctgctgaagttggtacaatggagatgcaccagatcaatagttctgaaaatgctacccaggagacacaaattgaaaatgtagctgaaaaatcagcagaggatggctacaattggcgtaaatatggacagaagcatgtcaagggaagtgaaaatcctagaagttattacaagtgcacgcatcctaattgtgaagttaaaaagctattagagcgttcgcttaatggccaagttactgaagttgtttataaagggcgtcataatcattctaagccccaaccaaatagaaggttagctgctggtgcagttccttcaagccagggtgaagaaagatacgatggtgtggcaactattgaagacaagccttcaaatatttattccaacctctgtaaccaagtacattcagctggcatgattgacactgttccgggtccagctagtgatgatgatgttgatgctggaggtggaagatcctaccctggggatgatgctaatgatgatgatttggactcgaaacgcaggaaaatggaatctactggtatcgacgccgctttgatgggtaaaccaaatcgtgagcctcgtgttgttgtacaaactgttagtgaagttgatatcttggacgatgggtatcgttggcgcaaatatgggcagaaagtagtgaaaggaaatcccaacccacggagttactacaagtgcacaaatacaggatgcccggtcaggaagcatgttgagagagcatcacatgacccgaagtcggtgatcacaacatatgaaggaaaacataaccatgaagtccctgtttccaggaatgcaagccatgagatgtccacagctcccatgaagcctgctgtgcatcctattaagagcaacatgccaggccttggtggcatgatgagagcatgtgatgccagggccttcaccaatcaatattctcaggcagctgaaagtgacaccatcagtcttgaccttggtgtaggcatcagccctacccacagcgatgcaacaaaccaaatgcagccttcagttccagaatctatgcagtatcaaatgcaacacatggctcctgtatatggtagcatgggacttccaggaatgcctgtgacagcagtacctggaaattcggctagcagcatatacggttctagagaagaaaacggaaatgaagggtttactttcaaagccgcaccattggaccgatcaactaacttatgttacagtagtgctggtaacttagtgatgggtccatgagtgtctctgctgatggtcatacctccatgaagcacatattaccgtaatcatgaagattgcttcagaaggtgctctactgtgtatcgtcatccacacataattgaatcggaggtggtcaaggtatacctgggagctgcagcgttgacacatgagccttttgctgtttggatgtacacttgctgtatgtgacgctgcagctcaacattcgttgtacagcaaaccagttatgattaattagattctgataatttggttatgtaaacttctttctgtactggaatatgggatagaaccaaagatccgtctggtggcaaagctttgttatgccctgcatatgaacgatgccagtttgatatccatatgaaatgaaatatatcatttcagcaaactgattttcggccctcactagtgaagatttccgaagggtcaagttagaaggtttgatgtcctttttgaagaggccacccttcagaatgcacccaagcaaaactgattaactg

SEQ ID NO: 16229 - DNA, 1114 bp, Zea Mays
caaatgtttgggcctattcatttggacatccctgatgctctggattgtcagaatgatgctgcttttgtggatctgttcccagacaatgcaaaaaattatgtagaaaatgatgcagtggcggccctggctagtggtacaatgggaaagctgcatggttgtgtgttaattgcgggcactggatgcattgcttatggagttacagaagatggaaaagtagcaagagcagctggtgctgggcctgttttgggcgactggggtagtggatatggcattgctgcacaggccctgacagcagttataaaagcatacgatggtcgtgggccacaaactagacttacaagagatatccttgagaagcttgatctttcttcaccagatgaaatcatagggtggacatatgcggatccatcttgggctcgtattgcagcacttgtaccagttgtggtatcttctgctgaagatggtgatgaagtagctaacaaaatcttgcatgattcagtccaagagttggctgacactgttatagcggttgttcagcgtcttagattgtgtggcgaagatggaaaggacatgtttccacttgttttggttggaggggtccttgaaggaaataaaaagtgggatatcagtggtgaggtcataaaatgtatttccaaggtcttcccgggcactgatcctatttggcctgaggtggaaccagcaatcggtgctgccttgctagcctggagccatcaccacaaagggttgaaattggagaatggaagttgattcccagcatttaagggtgtcaattgtacattgaggagttggcgagccaaaggggtattggtcccaatgatacattcatcggcatgaaggcttttcgttcccagcaaaaagaataaatcgtggatgggtgcaaacatgcggtgtggatagaacatatttctgatgtaagtaggtagtaagaattgttcaaatattcctctgattctaactctcggtgattgttgtatgtgttctgtttgtgtttggaggtagtaacatgtatctgtctaccatggataattgatcgtcaaatgttcagatctttttttacatacattgtgcttggcctctataaactttagttggc

SEQ ID NO: 16230 - DNA, 3091 bp, Zea Mays
ttcgtttcatcttagaggaggttcagaagcacgtaactcggaagacgacattgtagaagcaatagaagatgctggcttcgaagcagaaattcttcctgactctactgtttctcagccaaaaccgcataagactttgtcaggacaatttaggataggggggatgacttgtgctgcatgtgtgaactcggttgaggggatcttaaaaaaattgccaggtgtaaaaggtgcagttgttgcattagcgacctcattgggtgaagttgaatatgatccttctgccattagcaaagatgaaattgttcaggccatcgaggatgctggttttgacgctgcactgttgcaaagtagtgaccaagacaaggtcctattaaatgtccaggggttacatttcgaggaagatgtagatgtattgcatgatatcctgaagaaaatggaaggcttgcgtcagttcggtgtaaattttgcaaactcagaagttgacattgtatttgaccctgaagtagttggtttgagacagattgtagatactatcgagacggagagcaacaataggctgaaagctcatgtacaggatccatatatacgagctgcatcaaatgatgcacaagaggcctctaagacgcttcatcttcttcgttttagtttattcctaagtattcctgtatttttcatccgcatggtatgccctcgcatacctctgattagttcattcctacttatgcactttgggccatttcgtataggagatctgctgaggtggattctggtgaccatggtacagtttattgttggcaaacgattctatgttgcagcgtatagggccctaagacatggctctacaaatatggatgtcttagttgttattggcactactgcttcatatgtctactctgtttgtgcactactttatggggcattcactggatttcatcctccaatatattttgagacgagcgcaatgataattacatttgtgctatttgggaagtatcttgaggtgctcgcgaaaggaaagacatcagatgctatcaagaagcttgtagagcttgctcctgctacagctattctacttctgaaggacaaagagggaaaatattcaggagagaaggagattgatgcgtcgttagtacaacctggtgatgtgttaaaagtgcttcctggttcaaaggttcctgctgatggtatcgtcatttggggtacaagtcatgtcaatgagagtatggtaactggtgaatctgtaccaatctccaaggaagtatccagtctagtcattggaggcacaatgaacttgcatggtgttcttcatatacaagcgacgaaagtaggatctggaacagttttgagccagataatttctctcgtggaaaccgcccagatgtctaaggcccctattcagaagtttgctgattatgtagccagcatttttgttcctattgtcatcaccctgtccttcttgacattccttgcatggtttctatgtggatggttgggagcatatccaaactcatggtctgctgaaagtagcaattgctttgttttctccctaatgttctccatatctgttgttgtgattgcttgtccatgtgctcttggtctggcaacaccaactgctgttatggtagcaactggagtcggggctagtcatggagtacttgtaaagggcggagatgccctggagagagctcagaatgtgaagtatgttatttttgacaagaccggaacactgacccaaggaaaggctactgtaactgcaacaaagattttttcaggaatggatctgggtgactttctcacgttggtagcgtctgcagaggcaagcagtgagcatccactggcaaaagctatcttggattatgcattccatttccatttcttcggcaatcttccctcaggaaaagacagcatcaagagaagaaaagaagagatactttctcagtggcttctggaagtcgtggactttgctgccttgcctggcaaagggattcaatgttggatcaatgggaagaaagttttggtagggaatcgtgctttgataactgaaaatggggtaaacattcctgaagaagctgaacgtttcctggtagacatggagctgaatgcaaagactggtattctcgtagcgtatgatggtgacttcattggcttagttgggataaccgatcctttgaaaagggaggctgctgtggtcatacaaggtctaaaaaagatgggtgttcatccagttatggtcactggggataactggaggactgcacgagcagttgcaaaggaggttggcatcgatgatgtcagagccgaggttatgccggctggaaaagccgatgtaatccactccctgcaaaaggatggcagtgttgtcgcgatggtcggagatggcatcaacgactcgcccgcccttgctgccgccgatgtcggcatggccatcggcgcaggcactgacatcgctatcgaggcggctgactatgtgctcgtccggaacaacctggaggatgtgatcacggctattgacctctcacggaagacgttcatccggatccggtggaactacttctttgccatggcctacaacgtgatcgccatccccgtagctgctggcgcgttgtttcccttcaccggggtccagatgccgccttggttagccggcgcgtgcatggcgttctcgtccgtcagcgtggtgtcgtcgtcgctgctgctgaggaggtataggaaacccagactcaccaccgtgcttcagataacagtggaataagttccttttttttttggcaatttgttgtatctcactttatcggagagaaatagatacaaacgtgaatgttggtgtggacgtgcggtgcagtactgagagtcaaacacagaaacacttgtacatatcgaacagtttgcaattgcaaccgagttatacatgttaactatgtgagggatcaagagacatgcgacaagacaattctagttttctcctagtgttagtttggtttggaggataatatgatggatctgcccctagagtagaatattccctgtcacatgtcattcctcgccatctcttttaggcattatcggtgaggccgtcttcttctccacgcgctgc

SEQ ID NO: 16231 - DNA, 217 bp, Zea Mays
cgcgctcccaaacaaccgtccggcctcctccccttccattctcctccccacgccgccattcgctctgctccaaccgcgcttatagcttctatccctcaccggttgttattcctctccctagataagctttatctcaccaaactaatcacgctataaacaaggacccgatttcatccagtaatcccgctataaacaaggaccagatttcatcctttgc

SEQ ID NO: 16232 - DNA, 2851 bp, Zea Mays
taatataataaccccctctgctcgacccgcttccgggacaactggtcagtctctgccgcagcagcaggacgcgtcgctcgcagtcgcaggctcgcaagtcgcagcggccgcaacgccccaacctggcctcctcccaacatttttatagccagccgcccctcgccgcctatttccaacgtctctccagctcgtctcgcattcccttcgcctcctctccgatcctgacaactgttggcgatctagggttttcccaccggtctccggtgactccgaccggccgcaggcctccgcgctgcacccatggaggggctcaccctcatcgacgtctccgtcgaggacgatcttcttttcgacatcgcctcaccgccccacgcagggtctctggtgggcgccgtggcgacttcctctggcgcttttccgtcggcggcgggacgggctccggatccggacagtgtgatggaggagcaggcgctccccgagcggacggactccccggaacagcggaaggccaagaagggggtgaacctgcgcaagagcttggcttgggacagcgctttttttacaagtgaaggtgttctcgacactgaggaattggccattgtaaacagcaccttccgtaagacgcagggttccaggttgcctggaatcgtggaggaaatgagtagatcgggggaatcagcaacctcaactctggaaagtgaatcctgggtgatggagagcgttgagactgaactatttgacaatgtccgtgcttcgatccagaggtctcttggcaaacctgataaagttccaggtcggcctgttgctggctcaaaccacccaaaggccacagcaaatgtacctcgtgttgcagttgcagctagaaaaggtgttgatcggatgccccagccaaagataagggcccctgtttcaacaagccaaggagccggtgtcagacaaagggcccaagtcaccaccaaagagcctgtggctgcacgagttaatttactaggagctgcagaagcaaagatatcctcaaaacctcctagagctttgccaagagttgctatgatgaggtcatcaactaccacagctgtcacctctggggtttcagacaaaagaagcagcactgggggtgctgccaacaggcaggcagctggtaaaactgccagtacttcagctggcctgagatctggcgggggtacaaagtctagttcaatctcaaaatcaggtcccttcacatcagcagcaacttctcatggtgtgtcaatggacactaagccggaagcaaaaaccaaatcagcaaccttaagcaacaaaaataggactgcccagagggtccctgttcatccgccatcaaaatctggtatcagcaaaactattccctcaagatcatcagggaacacgattccagctaagggccatgctgaccgtgcatcaccaagcatttcacctagcagctccatggacagcatgagctctgtcatatctggggcttcaactgcttccaccgtagggaggatgagccatacatctgagagtttaaatggactgtccccctccctcaggaagagcaatgactgccctccaactccaaagcttaggcctcctgttgtcacagagggtcattcatctggaacagcagcacctggagttaatttaaaagctacttctgaaatgaccaaccagagaaaaggttttaagccatctgggcttcggaggcccacacccaagattggttattttgatgctgagaaatacattgaccaaaacatcggtgcacagctacaaccacaaccttcaaaggtccagtgtctacctgacacaacacaatttcagagcatgaatgtggatgccgcaccagctacctacgtccaacaggattcaaaactgacagcaacacctcatgaggaaagttgtgcttccgaaagtaaggtcgtgaagctgctgcctcttaaggtggaagtagagccttttaaggtggcggaaccatgcacgcaccagactgatccagttgtggtcagacccgaagcagtgcaacagcaatccatggagatccagtgcttgctatatgccacaccaaactctcagcaaacctttggtcaacaagtattagaacctatagtagcacctcatgaggttagtgcttgcaaaagtaacacagtaaagacgcctttggaaactgtgcaaatggaagtagaagcgcctctagaagcagtgcaattggaagcagaagcttttaaggtggacaaacctgaagcgtgcagacacctggtcagtccaattgtggtgaaactcgaagacaaattctgtgatcaaaatgctagagctcttgtcgctgaacgtgaagattgcacgctcatgactgaggcagtggtggcactggctacagactattcaaaagagaacattccggttttgcatgagaatatacaagctaatgtggatgcgagttcattagttgaggtgctgacccagaagttatcctccatttctcttggggaggataactctaacgtggctctcaggtcctgcagtgaatgaggtttggatggtatgctggttgttattttattaccctcttgttatctgtaggcaaccgtaccgcagctgacgagtccaattcccttaacctgcttgtggtgtaaaatccttgtgcacagagctttatagaactaagattttctattgtatgcatgaaaacctcatctttgtctattgccggtttgcaagtaaagtgtgtttgtttggtaattatattttactttgtttagtaattcacaatggatacctagagagcctgtttgtaactgctatacgagtgggtgattttttgtgggagagggtctaatggtatatgttttgatgtcgg

SEQ ID NO: 16233 - DNA, 902 bp, Zea Mays
ccgcgacggacttcccttccttcttcaaagcggcgaacagtggcttagcgtcttccgcagctttcacctgtaaagatcgataggatccccaaccaaccaatcaattttgcttgcagtagtttcttgcgatgcgatgcgacgcgacgcgaagaagaagaaaaaaaaaagatgatggtgatatatatatatattgatagggacagagtaacgaaaagtgcatagaacagaccggagagtgagcctcgagccattccgtgaaagctgcggaagacgctaagccactgttcgccgctttgaagaaggaagggaagtccgtcgcggtgggaggctactgctggggagggaagctgagcgtggaggtggggaagaccagcgacgtcaaagctgtgtgcctttcgcacccgtacagcgtcactgccgacgacatgaaagaggtgaaatggccgatcgagatcctgggggcccagaacgacacgaccacgccgccgaaagaagtgtatcggttcgtgcatgtgctgcgtgaaagacacgaggttccctactacgccaagatcttccagggagtcgagcacgggttcgcctgcaggtacaacaccaccgaccctttcgccgtcaagaccgcagagacggccctcgcctacatggtcagctggttcaacaagcacctcaactgaatgaagcctgcactgcacccaccagactgaattcaataaaccactgcagtgctgtgatattttgtttcgattcatggctccccagattgatttgtcatggctaagacctctactactgtaatttccttcattttttgtctcttcaaactctctgtattcttttttttgctttttatgatcgcaataaagttcagtaggggtatacccctcctgtttgcttcaaaccgc

SEQ ID NO: 16234 - DNA, 2560 bp, Zea Mays
cctggcccctgtgctccccttgccaccgaacgagagccaaaagcctcccgccccacgacgcgcccgccccggcggcgacgccccggaggacgtttcccgcagcgaccggcgaccaagccttgattgcctccgccccatggctacccgggcgcgggcgtagccgccgcctcggccgcagcaggctcggtccgcccccctcggcgatttctgttccagtcgcatcgcgcgacagctcgtcgtccgattcggatccccgccaccgcggcggaacgaggcgtctccggtccccgagggttaccaccaggaagtggaagatgagtacggagatgagtactatgatcaagatgagtatgaggaggaaggttcgggtgctggggatgggtatgctgaggaggaagagcctacagagggacaaaaggagatccttgaattgagagaaagattaaaagagcagattaggcgaaaggcaaaggctgctgctgcctgcacagctggtcgatcatcttcttcacaaatacctcaagccagggacaaatttggctctttttttgggccatccaagccggtgatttctcgtcgagtgatagaagaaagaaaatcattgaaagaactgcatagcacggttgcaagggagccaaggccttctggagtacataaggatattccatcgtcctctaaagtgcaaagtagagtaaatggacatcagcataaacaaaagattgttaatcaggtaaagaagaaggctgaggcacttaaggataaccgggattattcatttctactctcggatgatgctgacctgtcatcctctccaaaggagaaacctgctgctagatcttccttgactcaaagggctgatcgtgaggtgacacaatcaacagtaaagaggaaggcaccaacaagtcaacctgcacgcttgtcaaatggatatggacctaagaacacaatgtcaactcaaaggcatgctgaaggtaaggtaaattccatgagaagggaggatttctcgaatacagaaagggttgtttcacgtgacaatgagaggatgtatgaaagggttgtttcacgtgacaatgagaggatgcatagtattgcaagaaatggatccaaccaggcaagtactagcaaaaccacaatccaaaagcatccaagcaggggtcccattgctaataagcaaccgtccaaggattcgaatgatgcaactctgaggaagagcagtgtagcctcaaagcaccatcccttagagattgacagaccaaaatcctcgcaaagtcagaggatgcagtcagctggtcagagaccacagcattcttcccatggtcagacgccacatcaatccatgcagcataggacgcagcagtcattgcagagtcggaggccacaacaaatgacacagggtcagaagccacaacagtctttgcagagtcaaaggactcaacagtccttgcagaatcgaaggccacagcagtcctcacatattcagaaatcgcaatcctcacaagcacacagaccacagtcattaagtaacaggtctcaggctttacaaggacaaaggcctctttcttcacagggtcaatatccggagcaaagaagagtacatgcaagtgacagagtcaaacaagctgaaaggcagattcggcctccttccaagtccatgccatcacggccagtctcttccaatggaattcgtgatgatcatgcaaaaaggaagcaagtggcaaaaagaagatttgatgaagatgatgaagaccccttagcaatgatcagaaatatgtttgggtatgatcctagtagatatgcaggcagagatgaagatgtcagtgacatggaagccgattttgctactatagaaatggaagagaaaaggagcgcgaggattgctaggcaggaggatgaagaacaacttcgcttgattgaggaagaagagagacgcgagcaggagagaaagaggcgaaagatggcacgaggccgatagtcgaatacactcctatttggatgttataatatactaccttcgttctcgaatatttgtcgtccgctggttcatttttgaactaaaccgtgacaaataaaaaagaacgcaggagtatctggcaggcctgattgcctgaatacgaagccccatggcggatcagacaggcacttctcttgcagtcctgtttacccttaccacgatgattatctggaggcaaatcaagggaaaacgacaggtgaccaacactgggcacgtgtaacagcagactgtagttgtagtggtttagttctcgaagctgacatggactatatttaagttctcgtcagattgtttggatagcagaaggtttccattgttgcagcgcctcaccagattgtttcttcatatgatatactgattctttcagtcaagcctatataaggatgcgtaatacaagtgcccctcttgtatatctttttcgggtgtaatagtgttgtaataaacgatgttcgaattttcggatatgattttgagctttgtcaggcgatcactgcaccacggtccacagagatgcgcttctggccgggagccaatcgaaggaagcgggaa

SEQ ID NO: 16235 - DNA, 805 bp, Zea Mays
aacgttctgagtaaagacaaacagttttttgcagtcactttcaatgagaaagtcacaaggaccgtaagacagttttcaccacatttagctgcaaagatgaggccaccaataacacctgttcttcgtggtcgaccaaactcgaagagatcaattcatatttgtgggcgacctcgcagggtgtttgtcatattcttttctgcagttagctgtatactctggttgacctcatgcagtcttctcacagtcctctgggcactcctcattgctctatttgcaactgtgctccatgcaagcttcagaacaccaaatctgaaagcacgtctgaatacattcagagaggaattccgggctgtctggcggaattatagtgagctttaaggtctcatttgtttctctcatgttcattgtggtaaggaaaggtgtctagtgcagaaacgtccatgctgtttgtgagttgcactaggagatctagttgaaggtgaaacgccattggacactactacatggattatgggaggtgggatttgggttcggttggccgaatgcgatgttatgccttagcacgtgatccctcaagaacaataatttttctttcaggcttctccctaaccgaacattggagaggacagcatgtaaagaaatgtaaaaatgtaccggttctcgatcaaaacttatgttgtttgtagaaatttttactaattcgtattgcatcatcttttgaactatttgtttggtgactacaattttgcttgagcatttgtgtcaagttgagttacagcgagtagataatttctatgcttccttc

SEQ ID NO: 16236 - DNA, 1526 bp, Zea Mays
gagcgagccaccacccaacctgaccccttcgccccgtatcgttcccttcctcctctcttttccccaccgccccctttcttggcgtctacccggcgcgaccaggaccgaatcctaaggccgccggccgccgccgccgccgcctgctcccgttggacacggagctcccgcgtttcctcttatgagagccgccgggctggtgcctccccatacttctcatcgtctcatggacagagcagttcttgtcgccggtccgaggagtcttgtggggcagcagcggcggcagcagcaaagcaagctgcagagtgggaggatgttcggtgcccggtgtgcatggaccacccgcacaacgccgtcctgctggtctgctcctcacacgagaagggctgccgccccttcatgtgcgacaccagctcgcggcactcgaactgctatgaccagtaccggaaggcctccaaggattcaaggacagagtgcagcgagtgccagcagcaggttcagctctcgtgcccactgtgccgtgggccggtcagcgattgcatcaaggactacagcgcgcggaggttcatgaacaccaaggtccggtcgtgcaccacggagtcgtgcgagttcaggggcgcctaccaggagctgaggaagcatgctagggtggagcatccaacaggaaggccaatggaggtagaccctgagcggcagcgggactggcgccggatggagcagcaacgggaccttggagacttgatgagcatgctgcgttcagggttcaacagcaatattgaggacgacagtggcgggcttggagacaccgaagaagggggagaggaagctgaaatgactccggcctccataaccatggtcttcatcatgccatctagaggctcaatcatgcagtacctatcggaacgcagcagaacgatcattctggtcagtcggaggcgagcaagcagcagcagcggtggcgacgctgaagccactgctccagacagcgaggaaggtgatgaccctatgccatcggcagaggcatctgctggttcacagcattcttccgaacaagaggaggctgacggtgaccctgcccaatgacgtaagtcagctggcaagaggtgtgccatggcatcttcttagcctgaagatcccgaccaacatggcaacatggtatgtggcgaagaaaaacatggatgcaggtgccaccaaggcgtagccaggacaatctgtctacgcaggaaaatcgaggggaatcagcatcgcgcgaaggcttcagaaacgtggtggcctctagtaccaattctaatgtttccgcggggttctgtggcaatggagagagagaaacaattgggtggtagctatcttgtctgaatggatttcattttccttgcattgtaattctctaatatatattatcatatgaaatagattcggccgtatttgcactgcgtaatgtaatgtctataagagttagtttgggagccagaaaattaaaggagattaaagggctaaagtcctcttatttaaaaatatccctttcttcc

SEQ ID NO: 16237 - DNA, 1882 bp, Zea Mays
ggtgcaccgtgctgccttgttctggtttgtgccaacggttgcggggttatcgtctgcgttgcgtgtgactgcggatatggatcttcgttggccgcttttgaagcctagggatttccaggagaacaggctgttgatgtcatttgttaatttccatgagcaagagaagatctctaaagaaatcgtaacacacgctatagaaagctgcatgaagaaacaagcagataacctgttgaattcactggacgttatcagcggtaggttgtcacagttggagttatactgctatagactggaaaggtccattggagaattacgaagtgacgtgatggattatcataacgaagcaaatctgaacttccggtgcgttgaaaagcaagtgaaagaggttcagaaatctgtgcaggctgttcaggaaaagcaggagcttgctgaaactcagaaagaaatgaccaaacttcagatagtacatgaggattctgcacaaaagagtgaaggtactgctccatcagttttcatgaatagggaaaatgaggttgcccttgtgccattgcaccaagtaaatgctgttcagtcacctcctgtgcaattccaaagttgcagtggccttattctacagcaactgatgccagtccaagaccagcagcgctcgaaccaaaccgctgtgtactgtatgcgaggccaaagccatctggagcacagacaggcccaaatgttcgaagctgctggtcaatctctgcagacacacactcggaaaactcagccaccgacagtagttgaggtatctcaggtaaccagtcaggcaccagagttctaccctcatccgcagcaccaatggcaacatcagaccggccagcaggttttctcacaggcaaggcaaccacaaccacatgtactacagcagcagtacagcaacatccagcaaggtccagcacagatggttcagctgcaaacgtcctctccacatgctcatagtacaccacaggtcacagtagtatatcctccatacgggcctcatcagtctgcctgtggtaatgctgaggcacgcagtgggggcatagttgtgccaccttcatactctacaatttcttcatcccaccggaagcatcatgaagctgctcctgtttatgtacaaagcaacacagtttctgttccactggcggagcagcatcagcagcttcattcactcggcaatggctcatttgtacctcagccaagcaaagttagtccatgcggtctagcgtcatatacggtacaagggaatgcacagacctatagccctgcttatggaagcccttccagcaatcctgctactattgttgctgtccttaatcaacaagcacatggcagttctcccatggtgcttcatcacttgggaccccagtcagtgctgaaccatccgatagacattgctgaaaaggttactcggatgggttactcgaaggatcaggttgagggtcttgcactccgtatggtggctgcaggccagcctgcagaccataaccccctgcatgataggttgagctctgttagccatggtgtagctcctcatgcatggtctggataggtaagaacgacaaatgcagccgtcacgcttacttattactcatgaggtgtttgtgtgatatatctcggtatgtgctttattatcgtcggaaatcttcaggtatttcctctggcgtctttttttatcagccaggattgcatatccaccagcttatttttaccagttggaggatcgagatgaaataagtctgtttagattagttaaagtgatcctggcatatgtcctgccttttaatggacacatgcttgtaattttctcgtggacttgcacacgcatgattggaatataaaacgatacgataatttgttggttgctact

SEQ ID NO: 16238 - DNA, 3682 bp, Zea Mays
ttgccatctccatgtgtgtgtgctggcatgaaactgatattggagaaggtgaaatccttatgtgaggaatttcttgagtatattttgaagaatcaccaaatcagccaggagcctaagggcatactgcatgcattcaatttggctctgtgttggcgtgctgcttctctctcaaagcataagatcaatcacacagaatcactcgcacttgctgtaaaaaacttaaactatgagtgcaaagaagaacttgttgattttgtttatgggaagctaaagatccttaagaagaagtttgcacgtagagcaggggaagtgagcaagcaaaactatatggtttcagtgagcgacatatcaacttgtgaacaggtcacttctgttagattgagaaatgatgagttagtccctagccaggtaactttaactgatggtaactttgagaatggttcacatcacgaggctacaggtgacttttggaccgaggagatggtttcgggagagaaagaactgctacctgacccagtaactcatgaaggggaacacttattgagggatgaacttctcagcaaaataatggacaaaagaattaaattagttgacaaagttttctctctgagaggaaggagtatctatgataagcattcaaatcaggtttcatttttagacatgcataggcaaaaggtagtggataaactcagaagagcatgcagtttagttgtggagcatctacgtagtagtcaaaatcacattgctcaagaggacagagatgggaaaataaagctaataattgaatggtttactatgctgctgtatgcttttctggaacacatgaaatgccaacgtaacaggcttgatatgcagcaatcagcttccaggatcaaggagtctcaattgaaggaagaaacccttcaggcagcaagatgtggccaattagatcaaaattttgatcaacatattccttcaccagattttgaatttgctatggaagaatttaggcacttcagggaagtagttggtagctgctatgttgatccagctgctctggtaccagagtctttggatgacaattcagcaatggaaattatgttggttcaaagcgcaactgatgctgaagtcatcgaagaagtgctaaatcgacctactgaagttcttgttcaaggtccagcatcagaagttgttggtccatcagttgatgtgatttgcaattgttctgatggcatcaactcccaaagagatgcatctctggctgttcattcattggaaccttcaagtgacgaccttagaagtactgaccatgttgaggagaacacagttggctcacaaatacagggtggtacaagcaaacatttaggtgatgctgcaatggaagttgaaactggaaacaggaacactgctttggctgattcacctcactttgacaaaccagctttgactgctccatccaggcaggcaacattgctggtttctcgagaaaccgagatgctgagcaatcttgtggaccaatgtgcacaacagagtttagtgtcagcacaacctttgcaggatgagtcggaacaagcagatttgtctagtgcagcatcaactcaacccttgcaatctgagaggcaacaattaatctctgtttccaataatctgcttgaaagagcacagcttgatcagagtcaaccaaattatcagacagatgcggcacctggttgtgcgcagtctacagaactctttccagtgacgtcaatgatgtttaatcacgcacctattgattctgaaccactgaaaaatgagttgcacaaattacgattacacatggacacactcaataaagtccatgaaatgaagaaaacccaacttcagaccgcatgtagccaagaactagagaaggtaaagagaaaatatgatttgttaattaaagaacatgattccactcatcttcagcaaaagaaggcacttggtgatttttatgagaaagttcagcgcaaccaatcgctggctgaggattttcgggccaaattcatatcactgtctgcagcacaaggtgcagcaaaaggccatacccctccagttcgtcacacacctcaggctacccaagtggtgtcctccacatcatcaattgccctgtcatcagcttgtcgaccaccagtgccgaggcctagggttcaagctccacaggtggaccaaccattattgtcattgtcgcagttctcccgtccgtctttgcaagtggtccaacctcccaacctggaactaggcaatcttttcagagcaacgtcaacgactcttagtcatatgccacctcaacgtgggagctatggagttcagagtgaattggctcctcgctcacctgctcctcatcttcagttcagatcgccacgggcacattccatggcacctggaaatcagcagcaatcgccagcaattagtgtggatgcaatgtcctcaaggacacaaccagtgctggcggcaagcacatccccatcagatatacatgtgggacccctagcagcctcagccttgtcaagtttacactctgttctcccttcaacctcattaccctcaagcttgcatcctagtcacctggcacaacgtgtgccaccaactcctaacccaactttacaagccggggcaccgaaaggctcgaatgcaacaatgccttccatccctacaggcatgcagctgccagattctggttccctatcgctggatgcatggcttacagctaatcttgggttgaatgatgcgtctacagctcctgctaaggatacagccagtcttgggttgagcagtgatgcccctagggcagctcctgatacaaatacggccagtcttgggttgagcagtgatgtgcctaggggtacggctcctgctacaaatacagccagtcttgggttgagcagtgatgtgcctaggggaacgactcctgctacaactacaaccagtcttgggttgatcagtgattcacctagggtgattgctcctgccagcagtaattcgcctggggcgattgcttctgctacaaatggtggttccgagatagatgtggtatgcctgtcagatgatgaatgatgctagcacgtgtacaaggctgacagttatagatgactgcttgaaaggactaggcattattttacggctcccttgagtccgttctgacaaggtgggaatgttgtttgtgctgtgaatggctggtaacagcaatgacagttttattaagttcattgtaaatgtgtattatgacaaatgcctgccaacgtttgctgtaaatcgctaacctctggggaatgtggatattaacctctgagatggagttgggtttcaagcgctatgaggtttctgtacatgtttgtcattgattagttccctgaggtgttcgttgtaggccggagtgctagctccgtgtatcgttttggttctacgtatgtttcttttttttagtttgacttaaaaaaacagtagcaacaaaaaacagtagcaacatctccatgatagttattatgtataataaatgctgaaattttcttgtatatatttgattgaaacggcgggagtatgtaacagagcaatttagaccaaggcggtcacttcaacgttgtattgtatttctcttcttggtgaaatacggcagcactgtcctatgttaagttttatatctatatagctagctatctatgtatctgtatttatacctgttctatat

SEQ ID NO: 16239 - DNA, 830 bp, Zea Mays
gcgacttgcagcttgcctagtggggtggatattggcaaacaggcagtcggctcagaggtcacgagtgaggaagctgcagtacatctcggagcttgaacggagcgtcaccagtctccagatggaggtgtcggcgctgtcccctcgcgtggccttcctcgaccaccaccgctcactgctcaccgtcggcaacagccatctcaagcaaagaatcgcggcgctcgcccaggacaagatcttcaaagacgctcaccaagaggcgctggagaaggagatccagcggctgcgccaagtgtaccagcagcagcaggtcaaggtggccaccaccggcggcgccgacatcgccaccgccgcctcgccgtcgatgcaggccaggcaagagctgctcgcgtgcgagggcgctgctattcgatagcggaggcggcggcggcggcggcggcgttcacgcccctgttactgttagtagcttaattaacttttgtgcagtctgatcaatacgtgttggcttgtttgtttgctgcttcttaatttaattcgtatgtgatgtattctgctcaccctagcaaaaaaaaaaaaaaaaatgcatcgatgccaagttgtgaatgaattgtactattcagttatttggaccggcttagtcggaatatagtgagacggagtttgttggtgtgagttatccgttcttaatttattgttgtttagattgattttatttaaaacagagtgactctaaaaagaaaacttatgttcaaatttaagttatttggctcaccaaaatctattggatggttcgctaggatggagtcgctctatctcaactgactctgcaaacg

SEQ ID NO: 16240 - DNA, 446 bp, Zea Mays
ttttcctcaacataacacagcgaagatggcgcgcgccacccttggtcgttgctccctcctcggattcctcgtgcctctcggtgtataaaactagagccccgtttcctcccctaccctccatccaacccgagagcgtctacgtcgagcacatggagaagaaagagtggtagaaggttccgccggcaaggatcttgcccatgttgccgctcgggattcaattagggacctggagggtttcgtcctggtgtggggtcgacgcaccttgcttcgctgggtgagaatttgggatgaaggtccgaacaattgatcgtcggaggccgattccgccgctggaccgcatcccatcgtggccggtcctcaccaccacttaatcactggtatgatcacgtttccataattcgccatcgacccctcttcttgtagcatccgtccaatcgcgatttggg

SEQ ID NO: 16241 - DNA, 3453 bp, Zea Mays
atgcgtcccaacgcgacccactcttctcctcgctctaaactcttcctaccccgctacccgctctctcgttggacgtgacttcggaagattgccggagatgtcgtcgatggccacgaagctcttcaacaccgccgaggtggagtcgtcggacgcgcaagccctagtcgcggacatgcggaaggctatcggcaccatgaagtccctcgccgtagacttcgagagggacggaaagtccgataaggtgaagaagcttgaggagacggttctggagttggtggcttcgtacgaggactgcgcggccatggcccaggcaattaaggcagtacctggagtgtatcagtcatctgatcagccaacggatttcaaaacattgatcggggtggaggctagcaagattagggaagcgtcatcggccttgcaccaaaggactttggatgtggagtgcgcctttgaagagaactggtctggatggaactgaatacagtcttgtgttgttggatactgaaggaattgatgcttatgatcaaaccgggacctatagcatccaaatattttccttggctgttttgctgtcgagcatgttcatctacaaccagatgggaggtatagatgaatctgcgttggatcgtctctcgctggtcacagagatgacaaagcacatacgtgtccgggcctcaggtggaagctgcacatcatcttataaaccgtcaaacataaacctcaggccctgttatgcatcagacacctttggtgtgcgacgagccgatgacaccgtgcttcctttactacaggacttttatctggatttggcagaagacaacagaaaaattactccacgggattacctagagctagcattgaggcctgttcaaggtggaggaagggacatatctgcaaagaatgcgatacgggactccatccgtgcactttttccggacagggaatgttttacacttgtgcgacctgtgaacaatgagaaagatctccaacgtcttgatcaacttcctattgctcttgaaacatatttacactttaaacagtttgatggcatttacaaattatgtctgtcccttcatgacctgagtaatttccgtccagagttcagatccggtctggatgctttcacgaaatttgttcttgaccgaacaagaccaaaacaacttggagctactacaatgacaggtcccatccttgctggattgacacaatcgtttcttgatgctattaataatggtgctgtccctacaatctcttcatcatggcagagtgtggaggaggcagaatgccagagggcatttgattctgctgtgggcacttacaattcttcttttgaccataaaaaacatatagaagaggattctttgagagaagcacatgaagatgccatgaggaaggctatcagtgcttttaatgtttctgctgttggtgctggaagacagttagagcatatagatgctgaaaggaacgccctgagattgaaatgcaattcaagcgatgataagttggcattgctgaggaagcagcttgaagcaagcgagagtcacagagctgagtatgtgaggcgctatgaggaagttctgaatgataaacagaaaatttccaaggattactctattcgtataactgaacttcaggccaagagtagcaagttggaacaacggtgcttgagcttgtcttcttctcttgaaactgcaaaacgagaatccaatgattggaagagcaaatatgatcatggtattttgcagcaaaaggcagatgagagtaagttaaaatctcaaattgcttccctagagtctagggtgagtatcagtgagggtagattatcggcaacacgtgaacaggctgattctgctcaagaggaagcatccgaatggaaacgcaaatatgaagttgctgttagtgaggccaaaacagctctgcagagagcggcggtagcacaggaacgcacaaataagaaagtgcaagagagggaagatgctttgagggtagagcttgctaaccaactatctgagaaggaagaggaaattgcaagattacatgcaaaacgtagtcaaatggaaattcatgctacaagtttgatctcgaggcttgaggccactgaagcgaagtcgaagagccatgagtctgattcgttggctttgagggaggagatcagattactgactgataacctggagtctattagaagtgaagctctgtcacgtgagaaggaagttgggatcctggaacaggaaaagaaccatcttgaggagaagtatttgtcacagtgcaaaaagtttgatgagacagatattagatgcaaggaagctgaaagggaagcaaaacgagcaacagaattagctgatgtagctcgtgtagaagcttctgctgctcaaaaggataagggggaagctcaacggctcgcaatggagaggtttgcactgatagaaagaatggagcgacaggttgaagctctagaaagggacaaggctaagttggtagaagagattgagagacttcatcagtcagagaaggatgctgtgtccaaggtcgcattgcttgaaagaaatgtaggtgagcgggaaaaagaaattgatgagatgttgaagcagaacaaccagcaaaggtccagcacagttcaagtgcttgagagtctgctggcaacagaacgtgaagcacgtgctgaagccaataagagggcagaggaactgtcgttgatgttgcaagcaactcaaggcaaactggacatgctccaacaagaaaccacacttgatagcaagctcaagacctctgcaaggcgcttaaggggtgatgctacagagtctgtacatgatatggatatcgatggggacaatgggaggcgtcggaaacggtcaaaaagcacaacaagcccgttcaagaacaatcacacagaggatggcggttccgtatttattggcgaagatacttacaacgggagtcagcaagggacagaaagcgaagactatactaaattcactgtgctgaagctgaagcaggagctcaccaagcacgggtttggtgctcaactactccagttgaaaaatcccaacaagaaggatatcgttgccttatatgaaaagcatgtcatcggcaagtagttcctcggcaatacttgtatttatgctttatagacttccctctgtagcgttgaaactttaattgacacgatcggattgaagcaaacaatgcatgtaacttagtttaaatctctggtctgtgtattgcaacaatggtgcagttcattttagcatgcatcgtcggcaagtttgtagttaggagtcgtgattgaaatgtttgtctttccaatcccggcacaggttttcttgtaatgctatgacgacaatctattcggattccatggttttgtggtgtaattttatgccatcgatcttttcagattctaggcagtgttgtactgttatggctgacagtccctatccaatttgttaataa

SEQ ID NO: 16242 - DNA, 1644 bp, Zea Mays
tctctgctacctagcaacagaaaaatactaacataagaaatcagaggagcgagagcggaatactgcacagatcgaacctttgatccctagggaggtctgcccggatccgacagccgtgagcgcgtgctctatctgcacaagctttcccgacgggctgcagagaaatcaaccaaaaaaattcacatcaaaccaccgtaacgacgcaaaaatcccaccgatctcgatgggggagacgagtaagcgagcgatgtagcgaggggagcacgaacctgaaagtggtaagcgagaaggagtattggctgtcacccatgaccgaggcgcggagtcacctcgttgcctcttccgggttggagtgtcggcgattcgtggcaaggtttttgctctagcgagggagagaggtggctgaggaaaaaaaggggaagacaacgacgagacggagcagggaaagagatggagaatcgcaggaggaaagagagagcggagtgtttctcaagaagaaacgttttgggctggagtccaagttgtacttgggctggctatctgagttggtgaccaaatataggttgcacctgggctgggcctgacccaccgccgcctcttccgccttgcacggttcccccaactcccttctccgacggccactgcccaccgtcacagcagaagctcctccggtcctcccttctctccgtagaaacatttcccgacgggtgtttcccacgccggaatggaccagccggcaccataagcccaagattcgtttgcattcagtaatgcctttgcctaaatcagacctggggtcataactctttagtagagaaccaagaagatgcaggcatctagggcaaggcttttcaaggagtacaaggaggtacagcgagagaagtcagctgaccctgatatccaattaatatgtgatgattctaacatattcaagtggactgctcttatcaagggcccttctgaaacaccttatgaaggtggtgtgtttcaacttgcattcgcaattccagagcagtatcctctgctgcctcctcaagttcgatttttgaccaaaactttccacccaaatgtgcatttcaagacaggtgagatttgtctggatatattgaagaatgcatggagccctatatggacccttcagtctgtttgtagagccataattgctctgatggcccaccctgaaccagacagcccacttaactgtgattcaggcaatctcctgcggtccggtgatatcagaggctatcaatcaatggcccgcatgtatacaaggctggcggccatgccaaagaaaggttagccgtagaacatgtgccaggccaagagcctattgtccatgcatggctacatgttgtcaggtctgccttgtgctgtctgtatgaactttgtggttcttgattcatgaaatactaaccgttcgtgtgttgcgtgtgtgtctggggtaatgagaggacactcgggttctcgatgttgtcaggtctgccttgtgctgtctgtatgaactttgtggttcttgattcatgaaatcctaaccgttcgtgtgttgcgtgtgtgtctggggtaatgagaggacactcgggttcttgatggtgttggtctgtgatgtatttagtaataagaaaataaaaaatgatttctcgataa

SEQ ID NO: 16243 - DNA, 624 bp, Zea Mays
  misc_feature (1)..(2): n is a, c, g, or t
nnagaaccaaacatttctgaaaatggaagttctgtggaggctcaggacaaagacgttattctggaaggccttagtactgttagttctcatgatcagtggactccattatctgtcagtggtcttcgtccgaagcctcgttatgagcatggagcaactgtgctgcaaaataagatgtatatatttggtggaaaccataatggacgttaccttagtgaccttcaggctttggatctgaagagtttgacctggtccaaggttgatgccaaattgcaagcagaacctgctgattccactaaaacaacacaaattgctccatgtgctggtcattctttgatttcatggggcaacaaatttttatctattgctgggcatacaaaagatccatctgaaggcgttacagtgaaggaatttgatccacatacttgtacttggtcgattgtcaggacttatgggaaaccaccggtttctcgtggaggtcaaacagtgactcttgttggaacgacgctagttttgtttggtggtgaagatgcagaacggtgtctcttgaatgacttgcacatccttgatcttgaaaccatgacatgggatgatgtggatgcaattggtttttataatggatcaaga

SEQ ID NO: 16244 - DNA, 423 bp, Zea Mays
caaatggtccgtggatatatgagcaacactgagcttgagaccgctgtacatgcctttggaagtcgttgttccaatatctccagggtgtacagtatcaaatttacacactggcgaacacttctggttattcttgtagtgggtgattgaaatatcagacaagcccaagcaaagggaatctgaaccagcattcaagttcattggaaacgttcatggtgatgagcctgttgcaagagaggttcttatgcatcttgcaaattggctgtgtgataactatctgaaagattcactggcaactctcattgttgagaacatgcaccttcatatacttccgacaatgaaccctgatgggtttgctcttagatggcatggtaatgcaaacaatattgatctcaacagggattttcctgaccaaccgaaattgaa

SEQ ID NO: 16245 - DNA, 138 bp, Zea Mays
tcaaacgacacccagagctgtgatccttctctagcctccgaatttgacggtcccagctagcttctgccacggtttggtgatgtcgaatccctcccctcgctcagttcttcacggtagtactcaaagtttgtgatcgac

SEQ ID NO: 16246 - DNA, 4235 bp, Zea Mays
aaaaagcccacacccacagcatagggcacaggtccacagcggtccaagcgagtgctaggctgttagcaaatatcaaactccactgctaccactaatacacatcgcccccgcacatatcgatctcgtcgtcgtctcccccggtggcatgctccgctcccgctagatccgatctattatctatggatccccgccgtctccccatccttctctccctcctgcttgccttcttctccgccgttgtcgcctctgacgagatccacggatgcggcggcgtcgtcgaggcgagctctggcttggccaagtcgaggaaggcatcggattccaagctcgattactccgacatcacggttgagctctgcactgttgatggtttggttaaagaaagcacacagtgtgctcctaatggatactattttatccccgtctatgataagggttcgttcatggtcagagtgaaggggcccaagggatggtcatggaagcccgaaactgttcctgtcatcattgatcacaatgggtgcaatggaaatgcggatataaatttccagttcactgggtttatgatatccggtaaagtagtgggagctgttggtggtaagagctgctcaaaacggggaggacctgctggtgtgaaaattgaactgatgacagattctgatgagttgattgcatctgctttgacgtcatcatcaggagaatattcatttacaaacataattccagggcgttacatattacgtgcttctcatcctgattatgaaattgagttgagaggctcaccagagattgacctgcgatttggaaatgccgtggcagatgatgtcttctttgtatctggttatgacatttatggcactgtggttgcacagggaaatccaatagtgggagtccacctatatttgtattcaaatgatgtaacgaaggtcccttgcccacaaggtttcagtgatgcacccaaggaaggtgcactttgccatgcaatatctggtgctgatgggaagttcacatttagatcactaccttgtggtagctatgagttgttgccatactacaagggagagaacaccgtatttgatatttcaccatcttcactttctgtttctgttgagcatagtcatttgacgattccccaaaaattccaggtcactggattttctgttggagggcgtgttatcgatggttatggtgctggtgtggagagtgccaatgttatagttgatgggcagttgagagccataacagatagtcttggatactatagactcgatcaggttacatccaagaagtatactataactgccgagaaggatcattataagttcaaccgtttggaggattttatgattttaccaaatttggcaagtattgatgatatcagatcagttagatatgatgtatgtggtattgttcgaacagttactctgaattcaaaagcaatggttactttaacacatggaccagaaaatgtaaagccacagcggaaattagtgggtgaaaatggacatttttgctttgaggttcctgctggtgaataccagttatctgcattacctgtagattccgaacgctcttctagtcttatgttttcaccgggatctattagcgtcaatgtaaatagcccgttgcttgatctggaattctctcagtcacaagtcaatgttcatggtaaagtctcatgcaaacagcaatgcagccagaacattctggtctcacttgttagattggctggcggagttgaacaggaaaagaagacaactacattggaacaagataatgttaattttgtgtttaagaaagtatttcctggaaaatatcgtgtagaggtgaagaattctttacccgagggcttagctaaggatgattggtgctgggaccagagtatcttgaatatagatgttggtactgatgatgtgagagacattgtgtttgtacaaaaaggctattggattgagctagtttcaactcatgatactaatgcttatattcagcagccagattcttctagacttgatttgttgataaagaaaggatcacaaagaatttgtgttgaaacttcagggcaacatgagattcatttaactaatccttgtatttcctttgggacctcgtctgttttgtttgatacagctaatttaatgccgatccatatcaatgcaaagaagtatcttgtaaaaggtgaaatccatgtggacatgagctccattcaggaaaacattgattccaaggacatagtcgtggatatcttgaagagtgatggcagtttcatagaaaagatatccacatcacttgttcttggaaaggacaatcaaaatgacttcactgcctttgagtactctatttgggctgaccttggggaggacttcatctttgtcccccatgattctagcattggaaggaacaaagtcctattttatccagcaagacagcagtattcagtttctatgaatggatgccaagatactgttcctctaatcactgcaagaactggtctatatcttgaaggatcagtgttacctgcaacttctgatgttgacatcaagattctagcagctggaaagagcaactatgcccatctgaacaaaggggatgtagcaacagaggcaaagacagattctgaaggatcattttttgcaggtcctttgtatgatgacatagtatataaagttgaagcttcaaaggatggttaccatctcaaacaaactggcccatacaccttttcttgtcagaagcttggtcagatattagtgcggatttatggtgaaaattcagagcttttaccttcagtattattatcattgagtggcgagaaagggtacagaaataactcaattagtagttctggtggaaccttcacctttgacaacttatttcctggaagtttctatctccgaccacttctaaagcagtagctattgatcttaattctggagagtctagggaggctgaatttcgtgcaaccagagtggcttacagtgccatgggttctgtaacactattaactggccaaccaaaggagggtgtttttgttgaagcaagatctgaatccacaggtttttatgaggaagctaccacggattcttttggtagatttcgtcttagaggacttgtgcctggatcgacttactctataagagtggctgcaaaagataatcttcagtttgcagcagttgagcgtgcttcacctgaatatttgtcagttaatgttggtcatgaagacatgactggtattgattttgtggtttttgaacgccccgaagtaacaatcttgagtggccatgtggaaggagatggcattgatacgttacatccgcatctctctgttgaaatcagatcagcaacagactcttctagagtagaagctgtacttcctcttcctctttcatactactttgaagtccgagatttgcccaagggcaagcatcttgttcagcttcgatctggccttccatcacatacacataggtttgaatcggagttagtcgaagtagatctggaaaaggatccccaaatccatgttggtcccctcaaatataaaactgaggagcgtcatcaaaagcaggaactgaccccagcaccagtttttccgcttattgttggagtttctgtggttgcactggtgatcagtatgccaaggttaaatgacttataccagagcgctgtagggatgacttctctgggttcagggatggcaccgaccaaaaaggagccacgcaagaatatattaagaaagagagtgtaaatggcagattagcttagccttaggggtcgagaaatgagacatgacaaattgagcaatttcaagagtggaatagcttctggtttccccctcgggtaattttgccgacgaaaaggaatgccagttttgttgtacgatagcactatgcacagtttttgaagccttagattgtgccgttttgcagttttagactataaagaaagagttgctgcatcatgaatgaactttctcaccagtcagcatgcacgatcgaataggttaatctgagcggtccaggactaagtagaatagacaagtttgttgtggcacgttgtttgcccctctttttgattgtacaacgaccaagtaaagcgtgcgcaatgacttctctatgacttacggatctggttcgccctttagcatatgtggtctagcgtggagcgtttataatataaatttaaatagtttttaaaattatttttaatgtaaataataaataaatatgatttatctaagcgtg

SEQ ID NO: 16247 - DNA, 1091 bp, Zea Mays
ctcggatctggagttcttcgtccaattcctcatgccttgttgggtgtttcttccccgatcgatgtgttctcgtgatgtgtgggagctggtccggagcttcgaccagccgcagcggtacaagccgttcgtcagaaactgcgttgtgcgcggtgaccagctcgaggtcggtagcctgcgcgacgtcaacgtcaagaccggcctgccggcgacaacaagtaccgagcgcctcgagcagctagatgacgacctgcacatactcggcgtcaagttcgtcggcggggaccaccgcctccagaactactcatccatcataactgtccacccggagagcattgacgggaggccaggtaccctcgtgatcgagtcgtttgtggtcgatgtgcctgacggcaacacaaaggatgagacatgctacttcgttgaggctgtgatcaaatgcaacctcaagtctctcgcagaggtatctgagcagctagcagttgagtcacctacatcgccgatcgatcagtgagtcgcctgcatccctgatcgatcagtaacaccggtacaaagacatgaatcggcaacaaataagaagtttcaaaggctggctagagggttcaacctttttgagattggtggtttcgccatcgtcttctgcgtgtatgtctcttggaatatggaaggtttagtggtatgtaggtttaaatatcttgttgtagcttgtactacctccgttctcgaatatttgtcgttggctagtttatttttaaactaaaccgcgacaaataaaaaagaacggagggagtatgttagggatgatttagccttaggaactgcacctacatacctcatggcatctatgcacactgctagtatgtgtagaaatcagggaaagcatggagcggtttttgcatcattggtgcatggagatctatgccttttttctctccattttgcggcggctactatattggttggggtttatacttcaccgctgacacatagggtctggatcttggattttgtttaattctcgtgatgcgcagtattgtattctccagtgttactgggatttgagatttgaactgggtggtggatagtgcggcttt

SEQ ID NO: 16248 - DNA, 2986 bp, Zea Mays
cttgcgtgtatgctccccaaggcagaacttcagcttaattttcagaaaagaagaggccatggtttgctgtcaataatccgtcccaaatttagtggcgtgcttggtgaggcacttgatatagctgctcgatggagcggtgatgttattactatggaaaaatctatcctggagcaagctaatagcaaatatgaggttcaaggggagtatgtttttcctggaacgcgtgatagatttcctgtggaaagtcagagtaatgggttcatagagaaagcaatgggagggcatcttggtagcataatgtcttcgatgggcaggtggaggatgagactagaggttcctggtgctgaagtagctgaaatgcttcctttagcaaggcttctttcacggagtacagacccagttatccgttcgagatcaaaggaactttttatgcaatgtctgcattctgttgggttcaatgctgaaagtcttaatgatcagctaaaggcattagaaatttatcatgattggttggatgatgacacaatggaagatatagcatttcctggcttagctgaactaagaggctattggcgtggctctctggatgccagtggaggtggcaatggggataccatggcagattttgatttcaatggtgaagattgggaatggggaacttacaagacacagcgagttctcgcatctggttcattcagcaataatgatggtctgcgtcttgataaattatttatccagaaagataatgccacccttcatgctgatggttcgattcttgggccgcttacaaatcttcactttgctgtgcttaacttcccagtcggccttataccagctttagttcaggctatagaatcatcaaccacagactcaattcattttctgaggcaatggttgactcccatcaaaggtattttgcacatggagggagacttgagaggtactctggcaaaaccagaatgtgatgttcaaataaggctgcttgatggcactattggaggcatcgatcttggaagagcagaagtattagcttctgttacccctacaagtcgtttcgtatttgatgcaaatttcgaaccgacaatacaaagtggacatgtaaacattcaaggtagtataccagtcacttatgtagacaacagctcgatagaggaaagtccagaagaggcagatgggaaacaaggtatcataagaatccctgtttgggcaagagacagaggatcatcgaatgagatcagtgaagcaagaatggtgagagacaagacagaggagggctgggaatttcaattagctgaaaaacttaaaggtttaagttataacatgctagaaccaggtgaagtgaggatagatgcagatataaaggatgggggtatgatgctgataactgcattgagtccttatgcaaactggcttcaaggctatgctgatgttttcctgcaggttaaaggcactgttgatcagcctgttgttgatggatcagcaacgtttaaccgggctattgtgaactctccttttcttcggacaccattgacaaattttgcgggtacaattcaagtcatatccaacagactatgcatcagttcaatggaaagcagggttgggaggaaagggagattgtcgatgaaaggaagcctacctcttaaaaatagcgagccatctgccaatgacaagattgatttgaaatgtgaagttctggacatacgagcaaaaaatattttgagtggccaagtagacagccagctacaagttacaggctcaattttgcgaccagatctttctggaatgatccggttgagtcatggtgaagcatatttgccccatgataaaggcaatggtgctgctgtcactaggttgacttcaaacaagtcgagttatcttctttctggttttgaccaatcaaccacttcgcaggatgtctcacgaattctggggtcactgtcaacatcggcagaaagagatcaatcagacacagaaaagactcttgagcatggaagttttaatccaaacattgatgcacggctaaatgatctgaagctcaccttgggaccagaattgaggattgtttatcctttaattctgaattttgctgtcagtggtgacctagagcttaatgggatggttcatccaaagtatctaagacctaagggcatcttaacatttgaaaatggtgaggtcaacctggtagctacgcaggttagacttaaaaatgatcatttaaatgcagcaaaatttgaacctgatcttggtttggatcctgttcttgatctcgttcttgttggatctgaatggcaattcaaaatccaaagtcgagcaagcatgtggcaagacaatctggtggtaacctcaacacgctctgtggaccaggatgttctgtcacctagtgaggctgcaaaggtttttgaatcgcagcttgcggaatcattattagaaggtgacggacagcttgcgttcaagaagcttgcaactgcaacgctggaaactttgatgccaaggatagaaggcaagggtgagtttggacaggcacggtggcgactggtttatgctccgcagatcccaagtttactctctgtggatccaacagttgatccgctaaaatctctggcaaacaatatctcttttgccacggaggtcgaagtgcagctcggaaaacgccttcaggcctctgtcgtcaggcaaatgaaagattcagaaatggcgatgcagtggacgctgatatatcagctaaccacaagaattggttgtagcagctgcgtcgtacaaagattaggtggcctgataatcgttttttttgtagataagcaagctttgataagttgtacgtgtacaatcgctcagttgtattgtatttacattctttctcggaaacaaagtttctgagcctgtaaataataggtagcgatcttagcgtcgggtgtagagagaagtataaatgaatgaacgtttcctgtctcttgcgttgctgtccatacgtgaaattggctttcgt

SEQ ID NO: 16249 - DNA, 414 bp, Zea Mays
cctctggcgggttgttgcgctgcctgatatctccaccgcccacggcctcgccttgtcccaactacaaaagcgaacccaatccctcttgactcctctcatccgcctcgtctaaccaccaccacgagggagagttaaagtcgccagtacagaagagtgaaggggagagggttgctgggtccgattcggtgggctcatcgccgtcgggtccacgaattggtgcctaggagtctcgcgtgcttcggggacataatcgatggtctcgctgcggtgggttggtggctggagacctcagaattcgtcgtcatagtgcgagctcctccgcgtgtgcaccgtgcgccgtggccaggggtgtctgcgctgcaattgccagtgccactcgccggcaaggtcctaccagggagcgctgggctctgc

SEQ ID NO: 16250 - DNA, 1055 bp, Zea Mays
gttctcatcattctgagtgactgatcgatgaaattgtaattgagtagattatgtcgtgctaaccagtgtcgatagagatgacttacctgatggtggaagtagccattttgctcaaacagtgaaagctttaaaggagctcaaacctggaatactggtggagtgcttaacctcagattttcgaggtgacctggaggccatctcatctttggctaactctggcctagatgtttatgcgcacaacattgaaactgtgaggagtctgcagaggattgtgagggatccccgggcagggtatgatcagagcttggcagttctcaagcatgcaaaagcttgcagggagggcatggttacaaagtcttctatcatgcttggtcttggagagactgatgaagaggtgaaacaagccatgatggatctgcgggcaatcggtgttgacatccttactttgggccagtacttgcagccaacagaaagacatctaacagtaagagagtatgtgactcctgaaaagttccagttttggaaggagtatggggaatcggtcggtttccgatatgttgctagcggacccttggttcggtcatcctaccgtgcaggagagctctttgtccaaaatctggtcagaaacaacaaaactgggtcttcctcatcttagagcacattgtatccgtagtacgttgagagcagcaaaacaagagtagaacagcataaacatctggatcctccgaaagctgagacacagctctttttttccttttcttttcggatagtatgcacagatttgctctctgctgttagttgcccctgttgaatagagaaagaaaaagaggacgccggttcttttctgtatacacgaaaagctgttcaagtatagtggcctgtatgtttttggtcttctggatgattacacattgctttgttcaccatttcttttgatggaaagagagagagagagaaagaaagaaagcgaggaaagctgtccgtgaccacggctccaccttcactagagtacttgaatcatgacaagtagatgagctgcacatcccatgatagac

SEQ ID NO: 16251 - DNA, 1472 bp, Zea Mays
tccatcattcaaagaaaaaagaaaacaacttgcctcctttttccttgtcttgaatatgctgattggggaacaacctaccggaaccgcagcaacaaaagctgcgatgcccacacctgttcagatgcctgatttgatcgatacaggtgatcaagatgatctggcaacaagttctggacatgcaagcattgaacagaattctgggaacagtgcatatgtttcttcagttgatgatttgcttggtggtgaacctatttctgatacaagtgtcactgctgatagtaatggaagcgacccatttgcagatgtatcattccatgaggcagagactaaggagactaatgatctgttctcagggttgacagtagaagagaaatcatcaactaccatgcatgatagttcttcggacaaaaatgaattaccagatatctttggcagctcccctgattctttcaaccagggtagtgttactgaccaaggaactgtcaatgatttgattgctggcttgaaccttaatggaacaggccatgctcagtctgcagttaaagcagaacccaatagcaacagtggttcacagttctttgatacaaaaaatgagtccggccatgtgccaagtgctgcaacattgaatgacattcttggtcaaaactcgctttaccaacagcagcagactccattgcagtacagctttcctcaacatatgatgctcaatcaatcatttcctggacaacaattaaattatggtgccatggggattcttcttgctcagcagcagcagttactgcaaagttttggaaatttcaatgctggacttgggaattcttctttcaattcgatgaacggtgggaatacatctgtgcttccagatattttcaattcaagtaatcaacctcaaaatcatgttgcagtgatgagcagttcgaagaaagatgacaataaagcttttgattttgtttcggatcaccttgcagcagcacgtggttcaagaaagtgaaacaggaagcaatgaacatgtccagatgctggaaagagctcaagtatttgatggacacaatagctgggaattccaaaaactgcatctcgtcacagcctcgcagattggatgcgtgattcacacggctggtttggcattgtttgaacacatgagaaggaagggttgttccatacggttggaagacgagatgttgcgttgtgtactatgtatttagacgaagactgttcttttttacgctgaaaaataaattgcatcttccgtctttctttgtgttgtgctccttttctctatcctttttcttttctagaaaaaaaaagagtgagacactatacgtgtttgttacctgcaggttttatgtttcttttctgtacaagtatatggaggatttttttggtggcaattgtaaagctttggaacgtgaataagagggtgcagtatgatatgtgctgctacatgatcctggcaatgctgcctcgtgata

SEQ ID NO: 16252 - DNA, 223 bp, Zea Mays
gacgaatccgtgcgacgcggggctggatctcagtggatcgtggaagcaaggccactctgccacttacaatgcctcgtcgcgttttaagtcgtctgcaaaggattcagcccgccgcccgttgggaagggagcttcgatgcggcccgccgtggcgcgtcgaccgggcgggctgagccaatggcacgggcccttggggcgcgaacgccctaacgtgggtcggggcg

SEQ ID NO: 16253 - DNA, 136 bp, Zea Mays
ggcgcctagggcccccgggctttggccgccggcgcgggcgacaacggtccacgccccgagccgatcggcggaccagcaggagccgttccgcatacggtcggtgcgcgtcgccagcccccatccgcttccctcccgg

SEQ ID NO: 16254 - DNA, 2539 bp, Zea Mays
cactgcacaccgaaaccttttgttttgcatgggctcttctcgtcaagcgagtcgtcacctacgtatgctaaacgcttcttgggctgcttgcagctcgcattcatatcgttgccacctacacagcactccccccgtagccatatatagcttgctcgcataaacgtcaaaaaggagactcttttggccctcttccggcaccggcaccggcaccggcaccagcgccaatctagctagtcagtttagcttcgctccttcgcttgcttgcaagtaacagcctctctcgtgtccaaaaagaaagtctttctctggaaaggagagaaggatcatcatcaccaggatcaagaaagaactcgtcgattccttaccccttccgtcttcttctgatctcagctctatccactagctaggagatggacatgaacaacgggtggcttggcttctccttgtctccttcggcagcgagcaggggcggctacggctacggcgacggaggcggcggagcgagcgcgagcgcgtgcggggatggagagggctcttgcccctcgcctgccgcggctgcctcgcctctccctctcgtggccatgccgctcgatgactctctgcactatagctctgctccagattggaggcacggcgcagcagaagccaaagggcccaagctcgaggacttcatgagcatcacttgcagcaacaagagcagtggccgcagcctctacgacagctgcggccaccacgacgacgagcaggccagcaagtaccacgaggtccacggcatccaccccctctcgtgcgggtcgtactaccacggctgcatcagcagcggcggcggcggcggaggcggcattggcctggggatcaacatgaacgcgccgccctgcaccggcgggttcccggaccaccagcaccaccagttcgtgccgtcgtcgcaccacggccagtacttcctgggcgccccagccgcaagcgcgggcccgccagcaggcgcagcaatgccgatgtacaacgccggcggcggcagcgttgtcggcggctccatgtccatctccggcatcaagtcctggctccgggaggccatgtacgtgcctccggagcgaccggcggcggctgcgctgtcgctcgccgtgacggatgacgtcccgccggccgagccgccgcagctgctgccggcgccgttgccggtgcaccgcaagcccgcgcagacgttcgggcagcggacgtcgcagttccgtggcgtcaccaggcacagatggaccgggcggtacgaggctcacctgtgggacaacacttgcaggaaggaaggccagactaggaaagggaggcaagtctacctaggcggctatgacagggaggagaaggctgcgagggcttatgacctggcagctctcaagtactggggcccctcgactcacataaatttcccgctgagccactacgagaaggagctggaggagatgaagcacatgtcgaggcaggagttcattgcacacctgagaaggaacagcagcggcttctcgaggggagcatccatgtacagaggagtgacaaggcatcaccagcacgggagatggcaggccaggattgggagggtcgctggcaataaggacctgtaccttggcacattcagcacgcaggaggaagcggcggaggcgtacgacatcgcggcgatcaagttccgtggcctcaacgcggtgaccaacttcgacatcagcaagtacgacgtgaagcgcatctgcgccagcacccacctcatcggcggcggcgacgcgtgcaggcgctccccgacgcggccgccggacgcggcgccggcgctcgcaggtggcgccgaccgctcgtcggacgcgccgggcgaccaagccgcgtccgacaactcggacacctccgacggccaccgcggcgcccacctgctgcacggcctccagtacggccaccccatgaaactggaggccggggagggaagcagctggatggcggcggcggcggcagcgcggccggtgcccggcgtgcatcagctaccgatgttcgcgctgtggaacgactgttgattgtggcaatggcaacctggttggtagagtacgtagtagttagtgaagaaatgcatgtcattgcacctgcatgcgcatgcgcgagcacgaggtgtaataactttcggcagtagaagtggcggtgaagaagtggacgacacggcctggggaaggacatgcatggcgtactgcctccctgcaagcgagatgcatgcatgttgcacacgctcgccgtttcttcgcaagatggcgacaattttgccgcaatatgtaatgtaatggttccacatgcatgcatgttattcttcaatgaaacaccccactagtagttatctgatttttgtgatgacgttggcaaactaagctcgccagctttttgcggagtagtgatacaaaaacttacatgcatggtcggtgggtgtagtagattgatctaataataaagtgttcatattagtgcaagaatttggaaaaatgatgcatatgcggactaaattttggtagagtgcaaaaatggc

SEQ ID NO: 16255 - DNA, 580 bp, Zea Mays
ggctgcgaggcagggaactgaggaaacgtctcgaatggtcgaacagtagtttgctcgctattatccatggcgacttctacggctgctgccactgcactgctccgccccaggccggcagttccagccaagttggcgcagaggaggtgcctccatgcggttgctgggtggacgacgatgaggaggaggggagctgcaggggtcgtgcgagctttcttcaaccctctcggggatgagcgcatcctccgagaagccatcaaggagccagtagcattcatgggtggtgtgtttgctggcctcttgaggcttgacctgaatgaggatcctctcaaggaatggataagtcggacagtggaggcttctggaatagctgaggaaaacagctctgaagaatcaagtgaggcagatcaaaatgatgcacctcagcaaattgagattgagtgaggaatgtttggtactataagttactacgtacagtacatacacagttcctccaagagaccaagatacatctttgaccagactttggctgtggtaggtttaaggtactttccaagacaagtttctgtccatcattttcatg

SEQ ID NO: 16256 - DNA, 260 bp, Zea Mays
cgtccctcagatccctccctttcctcagtagcaaaaacacagcaccagacgacgaccgattcgatccaccaaacgcagctacaacagaagctgcttagctcctctcctctcctggattcttctcgggaatagtggactcctagtcgtctgctccgtcggcctcggtgagatcgaaatcgaagaatgggtgcagaagagaggccatggacgcaacgcaaccaacaatgcatagtgcaaaccatcgttgctgctgggccggc

SEQ ID NO: 16257 - DNA, 3408 bp, Zea Mays
cgaaaaaaccccaaccccgaaggcaaggggtgggaaaaaacacgaggcgggggtgggggatagaaatacgagagcgagcgagcgagcgagcgagcctgcagcagcgagagggacgagaggcgagagagataagcaagcggcgcgcgttaaccctagcccccgtctccgctccgctccgctccgctagcgctcccgcccgccgcctcgctcgccggaggattcgtacgcgcgccgggcccgacgacctgccgcgccaccttcgcgccgccgccgccgcgcgcgggcgcgcctcggtcgttgcagttgtccttcaccacagcggagtgatggctgttgtcaacccaaccaaccttgctattgacgacgatgacgacgatactcccatttcattcaagaggacgagtaactctacgaagactgccaggcccaccccttccaagcatgaggggtcgtcaggaggtaatggtgcacctgttaggatccccaaacctgtgtctcccaatccgcagaagaacggagccaccggggcttcaaggccgttgcatatgaagccaccgtcatccagtccaaaccatcgtccttctggatctggccagccaaacagtttggcacaacatagttcaaaggctaatagcattgacatgagtaaactgaaaagacctctcgtcaaagatgagagatctgatgactcagatgacgaggtgccgattgggttaaggagaaaggttgaggagaagaagttgaagggagttgatactcgggttcagaagacagatgactcagatgacgatgataagccattgggtctcaagatcaactcatccagaatgtcttccaacagagtgaataagcctgttctgcagagaactgtaccaaaggttgagcagcctgatgaagattcagatgatgataaaccattggcaagcaggttgcccagtaatgccggtccaaaaagtggaggtgatgtctctgaggattcagaggatgagaagccactggctgccagattttcaaaagttgctggtagtggaaacccaaaaatagcttcttccagcaaagggttaaccagtgatacaaatggccaacaaagtttgggtaaaaggcctctagacaatagtaatcaaacaagttcagctcttaagaaggctaaaccttcaaacgtttcagcttctgcaatcgttagaagagaaatcaagacagatgacaacacacctcttgcacaaaggctgaaaatgggagagtcttcgaaaggcaagtcatctgcaaagagtgtctttaagaagagtcctgcttctgtgaagaaggacatcaagaaaatgaaagggaaagggaaattaaagaagaacatgaaaaattctcagttctcaaagataatgaaggtcccccctggatctggtggaggaaagaaatggactaccttggagcacaatggtgttattttccctcccccatacaagcctcatggtgtcaaaatgctttacaatgggaaacctatcgatctgacaccagaacaagaggaggttgcaacaatgtttgctgttatgaaagacacagactatgcggccaagccaacattcattgataactttttcactgattggagaaaagttcttggtaaaaatcatattattaagaacttcgagctttgtgatttcacaccaatatatgaatggcacctcagagagaaggagaggaagaagcagatgacaacagaggagaaaaaaacattgcgggaagacaaattgaaacaagaggagaagtacatgtgggctgttgtagatggtgttaaagaaaaggtcggaaatttcagagtagaaccgcctggcttgttcaggggacgtggagaacatccaaagatggggaaacttaagcgccgcattctaccaagtgatattacaataaatattggaaaaggagctccagtccctgagtgcccgatacctggagaaagttggaaagaagtcaaacatgacaatactgttacatggttggccttttggaacgatccaattaacccaaaggatttcaagtatgttttcctggcagcaagcagctcactgaaggggcaaagtgacaaagagaagtatgagaagtccagaaaattgaagggtcatatacaaagaattcgtgagaattatacaaaagatttcaaaaacaaagatgtgacgaggaggcaaatagctgtggcaacataccttatcgataaactagcccttagggctggcaatgaaaaggacgacgatgaagctgatactgttggttgctgtacgctgaaggttgataatgttacatgtatgcctccaaatcagattcagtttgactttctgggtaaagattcaataagatactttaacaccgtagaggttgaagagcttgtgtacaaggcaattgagggtttccgtgctggaaagaagccaggacaagatctatttgacaagattgatacatctaggctaaatgctcacttgaaggatctaatgcctgggctcactgcaaaagtgttccgtacatataatgcttccataacattggacggaatcttgcatgaagaaacagaagatggaactgttttagaaaaaatcgctgtctatcagcgggcaaacaaagaggttgccatcatctgtaaccatcagcgtagtgtctcgaaatcacatgagtcccagatgactagaatgaacgaaaagattgatgagttgaagtcccagatggaggagctgaaagcagacttgaacaaagcaaagaaagggaagcctctaggctatgattcagaggggaagccaaagaggaacttggctcctgaagcgattcaaaagaaggttgcaacacttgaaggcaagatagagaagatggagatggataagaggataaaagaggatctgaagacagttgcgcttggaacgtcaaagatcaactatcttgatcctagaataaccgtggcatggtgcaaacgccatgaagtccctattgagaagattttcaacaaatctctcctcgcgaaatttgtatgggcaatggacgttgacccggaattcagattctaggagaccattggctaccatgtgccagccagtttggtccagtttccagcccttctccctggacactaattgcagctaggaaaggaaagagctcggtgtttgttttttcaaagtccccaccccccctgctcgtggaacgaaggaaagcacccgtcattctctttgtaggcccttcttttttttttcttttggttcaattgcgctaagttcaatatgtattctgctgagaaatctgagctcgtttgagaacggttggacattgaattcatagtgagttttaatcttgaatatagatgacttgttgagggatgatcccgtggtcgtttgtgtgttttgtcgactagtgagcttgccttgtccaccaaagtca

SEQ ID NO: 16258 - DNA, 2111 bp, Zea Mays
gtcacaggaaaataatgcaagaaaactatatacacacctccttcctcccgccagcacggtcagagagcatactatgacagcctcaaatccttagaggagaaatatggttgcggtttaaggcgcccaacgaatccaaaaatctggcaaaaacgtaggaagacgaagtggctacagatagacaagacggagggagtaaggacgaagaggagcgtggcagaaagaataatgagaggcgattacagtggaagactactggtcgaccgatgcaagctgcagaggatcgacggagggagtgaggagaaagagagacagaacaaaacgagcgagggtgggtgggaagtgaggaggaagagagacggagcaaaacgagggtgggtgggaagtgaggaggaagagagacggagcaaaacgagcgagacgaggctgacgctagcgtcacttggaagtctctagaggcgataagtacgaggggcgtatgagagagcaaggaagatggactaatgatccatcatcgaacggctacaaagttttctgacgacgtgaatgagctagtaggcgccgtccgttaataataaggaaatatgttgttaatatagatgtttaatgtataaaggaaaaaatgagatatcgaaaaaaaaatattttacgcgaggacggataggacattcggcgttcctaggtaccccgctgcttccgtgctcacctcgcctgcagggccgcagccgctggaagaacacgaagacgacgggagtgcggggtggcgtcgccgctggagcaccagctgtagccgccggctaggcctccgcgccgctctccgtggccaacgcgccgtcatgcttgcggcgtcggcgcggcggctgtccgccgccgcctcgttttcctcttcttccatgcgctccagccagctcgccgccgtactgaaccaacagaggtggatgcacgacaggaacaagaaggcgatggagctggtggccaagggatggagtgcgctccaggaggtcgaccgcgtcatcgactacgccgatctcaacgacaagcgcctcatcccgcttctaaggggcgctaaggaaaactttgagctggctttggagattgacaatggtaatacacatgcgaggtattggctgggaaaaatgcatttcaagtatcatgttcctggtgcttgcaaggcagttggtgctgctttgttggttgaagctgcaaatatgggtgatccagatgcacagtatgaacttggatgtcgactaagaattgagaatgactatgttcagtcggatcaacaggctttccattacattgagcaagctgttgatcagctgcaccctggtgctttatatcttctcggtgctgtatatctaactggggactgtgttaagagagatatggcttccgcgttgtggtgttttcatagagcttcagaaaagggacatgctggtgcagctatcgcatatggatccttgcttcttaaaggtgctgaaatacctgaagttattacaaggttcaactcaggcaagagtccatcaactgggaaaatgcggaaaaggacccaacagcaggatccagtaaagctagcgaaagaacagtttcaaattgcagctgaggcaggctgtgatctcggtctgcggtggttgaagaggcttgaagcttatgaaaaccaagaagaaaagctaaagcaggttcagcaatgatatccactgaaagaatcccattgcatttgtcgcatacaagtatggtatatggcagcatggttgctgcacataggtataccaataatttcctttcctgccttcattatgttggaggctattcgatcctcggatgttcgggtcaactttgcaggaagatatactgaaatttggatatttagactaacttcttggattataggcgattggatgttcactttgtacgatgtattagcgttgacattactggaagccctaattgtgagaagtagaaacatatcatgtgtgttgctacgggcattatggatgatttagaataaaattagactatataactacttatacgaaggaataaattgtggcatatgatgatgtggataacaaaatgttctgtggcttcctgacatcataattgcatgcgttagg

SEQ ID NO: 16259 - DNA, 1533 bp, Zea Mays
gcgctttgcatctcctcttatgatagctgaaagtggaaaggatcataaagatatcacaagtttgcttcgcctggggaaaacactaacaattgataatgaaacttttgaagacctcgatgaggttattgaccgatatgtggacccattggtaggacacctgaagagcatgctgtcgtaccgtaaattcagaaagggtttaaaaaatgaggttgatgagatgttaagggcagagaaagcagagaaccctatgagaatagtatatagttttggcatatctcacgaacatcctggcacctttatattgtcatatattaggagtacaaacccacatcacgagtacattgggttgtacccgaagggcttcaggttcaggaagagagacttcgacaacattgaccgtcttgtgtcgtatttccagaagaatattgacaaaccaccacctgatgctggaccatcaatgcggaatgttgctgcaatggtacctatgaaaaactcagcttggggttctggtggtggtggggatgcaaatggtggttggaggggagatggtagtaatgatagggatcgacctttctctggcagatcaggagggaggtttgattcaaggaatagctctggtggtcgtggacgaggacgggggcgtggccggggtaactttggcgatgacgataatgctggtggaggttggagtggaggaggtggtggtggcaacagtggaaggtggaccgataacattggcacaggtggcagtggtggttcttcctggggtggtggtggcggtggtgatgacagcaaccgtggcggtggaggagggggttggggatcagctggtggtggtgctgacaatgctggtggcggaaatggagcctggggagcagctgctggtggctctgatgacccagggttgggtagcgccaaaaaggtcgtcccagcacaggatggtggaaccggctgggggtcagaaggtggcggcggcggtggtggcggaggctggtaactgggctgtgccctgcgttgtagtccagacaacagctactagatgaaaacagtttcctcgttttaactcctgtcctatcgtactgtggacgggagaaatctggcacttataagtcttgcagctgctgcacgtctgcagatgttgcattgcggacagcgttatgtttcagtgcatgtacataaatccaatatgtctggtcacactttcctgctacgaatttgatcctggtgcttcattgttgaggctatccgcaattaggccagtactctaccccatgttggtaagcttttgtgttgaaagtgtaacacgctacattttgtttccctagcttcacataaccccgcttacaagtgtttcaatgttttggcgacccatatgcctttcggtttgtgggcgtttcgatagagtcaggtctggatttcacaactagcatttatgacagcaaaagccggaaggtggcattcgattgtacttgagtcctacaaatgatcgattgaaagttacatgttattataaaaacgaccatggactaggaa

SEQ ID NO: 16260 - DNA, 952 bp, Zea Mays
tatagccgctgcagctaatctacgtgccctggaggacgagtacgacaatggggagcaaaccaatgtgttgaggagtccttcttctgttagccattggcactaagctggagcatgtcatagctcagctagcccatgatgtagctgagaagcacacagcggtcgagggcgatgtgatcgtaaaaccatcagatgaacacttctggttcggcaagcctagggttatcctttacctgatccacttcatcctctttcagaatgcgtttgagattgcgtttttcttctggatactgagcacttatggattcgactcgtgcatcatgggacaagttcgttttattgtgccaaggcttgtcatcggggtggttattcagcttctctgcagctacagcaccttgcctctgtatgcaattgtaacccagatggggagctgctacaagaaggagatcttcaacgagcatgtgcagcagggcgtcctgggctgggctcagaaggtcaagatgaaaaagggactgaagggagctgcatctgctagcaaggacgaatcgattaccaatgccgattcggcaggaccttccgttaagattgaaatggcgaaggctggggaggatgttgagatcgttggaaacacaggttgattgggacaatagggtgcccgtgttgtaatgatgtaacaggttaatatgccatcatctttttttgtagatactagatagcttgctgtggcaataccgcaatagcggtgaactagagaaggtgagtttgggcccgggagcctcatctgttatcggtccagtaggaagcaaattcttatatacgggatatcgataagaaatgaactaagaacatgttcctggattcattaccactaaaaattagctagctaaaagctgttatttttttactagctacctttttgtcaggggctgtttagatccacacctgctaataggtc

SEQ ID NO: 16261 - DNA, 436 bp, Zea Mays
cttggccgctgcgctcctccactcccctattccccacatcactccgcttttgcggccgcttgtggcggtgccttccacggggctgcggctgcgctccgccggagcgagcaaatatccttgcccccacgagaccctcgcacagtcgcacctctccgacgtgaccggcgccgtagaaccaccgggtcttcccttgtgggattattcaagaacatggagagaaagagaaaccccattgtctttctggatgtatctgtaggtgatgagccagatgaaagaatgatctttgagttgttcgctgatgttgcaccccttgtgactgagaacttcagagctttatgcacaggtgagctgggaattggacacaagactaagaagccattatgttacaagggatcatcgttccaccgtgtcatcgaagggttcatggcacaagatg

SEQ ID NO: 16262 - DNA, 1111 bp, Zea Mays
gtgcttcactgcttcatgaagttgcatttttggcctcttcaattggacccagagttgcagcatcatgcgcacatgcagcattatcttttttgactagagacgaggattccagggtgagttcagaaggctcacatgctggtggtctgggcaatggtgcaaattcaaattttcagaaccataatggtgcttcaccatccatttctccaggaaatgttaaatatgctgccatgcttggtctgtcagcagcagcaatgaagtctaagctctttgccgatcaagaagaacgcgaagtgcaaagactaactgctactgtaataaatcatcagttgaagagattggagttgaagctgaagcagtttgcggaagttgagaccttgctcttgaaggaatgtgagcaagtagaaagggttagacacaggatttcagctgaacgcgtcaggatgaggtcagccctattaggtcccaccggaagcggtctaccagggggcagttgtagcactatgccatcaaatccagcaggcatgagccccagaccagtcggtgtgccaggctacatgccacagaccagcatgccagccacatatgccaacaacctgcaggggcatgggaatcctcagatgccgttcttacatcagcggcctcagatgctttcgttcggccctcgcctaccactctcagccatccagactcaaccatcaccacaatcatcaaacatgttcaactctggcatgcccaattcgattgctcctaaccaccatcagttgctgagatcatcctccggaaacaattctagtgcaggataggggaattgtccataagattttttttttctcagcttaggtttgtcaggtgtagcattatgtcatttataaacacatcactgtaattcatttatgtgatgtatgtgtttgtcatataagttttttattaggtcctataaattgtccccatattgctgcgcccttgtgtacctttgttaccaggtcacctcttcccagtgcagggagattcaaatgaacagaatatgttttcatatgtatcccttgagaactcttattgaatatatatgtatgtagttaattcaataagtttgaggttatgaaggtatttt

SEQ ID NO: 16263 - DNA, 4372 bp, Zea Mays
cccaaatctcgcgtgctgcctccgtcctgcccccagcgcgtgcgctccgatccgccgggtttcagcgctgcggctgtcgatttacgcgatttgtctggcagaatacagttcagagcctcgagcgctgcagatcgaggacctggtcgtcggattcgggcgccgcgggtcgttcgagggtgcatgcgcacgactgcatacctgcttcgagaacctgaagcctctgttccaggaactggagaacgggagcccgatggctatccttgaacccctcatgcagcaggcgtttattggaattgacacactcaccactgtggcgaatttgtataacttgccgaggagggagcagaataagacaacacttttgaagttgttgttccacataaaaaacagatattcggacatgctgacgcctgagcagcgagaagagatggacagccgcgtgaggaagttagtttttggagagaaagacaatgtcagtgacccaagtaccagttgtggcaccagtgcgataaatgtttcagctccatctgggcaggtttcaaacacaggaggactgccatttgaatcaggtgcagcaaatctatttagtagcttgccaaggttggaagtacctgccaaaaggaatagtcccttgttgaatcttcatgcagattatgatgagaacagcttaccctcgccaacccgggacaatgcaccgccttttcctgcgctaaagcctattggttttggagcatttccaatggtacctgagaaactatctttcctagacagagttgagcctacaaagaattcgttatatccacccttaaatgatcctctgaaggctgtctcttcctatcagcagaagtatgggcagaaatctgtatatccaagtgatgatctaccaagtccaactccatctggtgatgagggtaaacctgcagataaaggtggtgatatatttagtgatgtttccagcttccctgttccaaagagtattgtattaccaagtacaagtcagatgcctgcttctcaacctagcacagtcagcagcagcagtattagttatgcttcaagtacaagtcagatggctgcttctcaacctatcacagtcagcagtagcggtattagttatgcgtctggtccacctggttttgctaaacaaattgagcagtcgactgcaggtccgaatcatgcaataaaggcagcatccaaaagtagagatccgaggctcagatttttgaaccgtgattctgctggtgctacagatgtaaattggcgtgcaaatttttcagaactgaaggatgggaacttgggtggagtttcagttggtaaccgtaaacagaaagcagttgatgatcctcaggtggatgacaatgcgttaaaaagatttaggggcggaattgcgaatcagagagacatgcagcctacggggaaccccaatcagcttatgaacatcagggctcctacacatagtagcagtatcaatatgaaaactttgcaacctcctcaaactactgctccacatgtcagtgcggctcctgctgtcccattgcctcctatgttgttaaaggacattgctgtgaacccagcattgcttatgcatttgatccaaatggaacatcaaaagaagtcagcatcagaaagtcagggtggcatgtctagtgggatgaccaacaatggaattgcaggcatggttttcacacctggcaatgctccgaagatcacagaagctgcacaagtcccatctgttaggccacaggttccagtgcagacacctcctttgaactcacaaaatgatggtggaatcgttcgcatgaagccccgtgatccacggcgcatcctacacaataacatagcacagaaatctgatgcaatgagcttggagcaagtgaaaaataatggaactacacagccagactctcagggcaccaaggaccagactactccagtgccttctcaaccagccttgccgtctagcattgcaaggccattcagcagcgcaaaacatgttgatcctgtctctaattcacagttagctgctacagctattatggctccgacacaagctttgagtagcgtaaataaggtggatccaagactagcagttgaacagaatggacaaaatgctgatgcaacaacaaatggtgcttctgcaacaacacttgaagctacacagcctgttagtccatggggtgatgttgatcatctccttgatggatatgatgaccagcaaaaggctctgatacagaaggaaagggcaagacgaataacagaacaacacaaaatgttctcagcacggaagctatgcttggtgcttgatttggatcacacccttcttaattctgcaaagtttatagaagtggaaccaattcatgaagagatgttacggaagaaagaggagcaagacaggactttgcctgaacgtcatctctaccgttttcatcatatgaatatgtggacgaagctgaggccaggaatatggaactttcttcagaaggctagtaacctgtttgagttgcatttatacactatgggaaacaaactgtatgctactgagatggccaaggttcttgatcctactgggaccttgttcgctggacgagtcatatcaagaggtgatgatggtgatccttttgacagtgatgaacgagtgccaaaaagtaaagatctggatggggtactgggtatggaatctgcagttgtgatcatagatgattctgtaagagtctggcctcataacaggcacaatttgatagttgtagagagatacacctatttcccctgcagcaggcgtcaatttggccttcctggaccatcacttctagagattgacagagatgagaggcctgaggatggtacccttgcttcttcacttgcggtcattgagagaatccaccacaattttttttcacatcctaacctcaatgaggctgacgtgcggagcatactagcatctgagcagcgaaggatacttactggttgccgtattgtctttagccgggttttcccggttggagacgccagccctcacttgcatcctctgtggcagactgcagaacagtttggtgcagtctgcacaaacctggttgatgatcgggtcactcatattgttgcaaactcccctgggacagacaaggtgaattgggcattatccaaaggcaaattcgtagtgcatccaggatgggtagaagcttcagctctgttgtaccggcgcgccaacgaacatgactttgcagtcaaataacaccctccctgagcccgaattcatcatataggcttcggggaagaattcttctcagggatggaatgtgttcatggtaacctaacatgattaaaaaaaaaccataacaacatatctaaaatgggaccatggtaagaaggaaaaccaccacccaaagaatttcaggccttaaaatgaatggtaacgaagaaaacgctttatgatagcctggaagaggagactgggtctgttgtggatgtcattacctaggtggtgggtggtcaagattcctttttagaaagccagcaaagatgcgcgaaaaaagtgatgatgagcagatgctcaccgcctcatcctttgtaacatgtagtagtaaaagtggtgcagttttggtaagggtcctaggttcagaaatgttgcttctggccaagggaacttgggggattttgccgttttggtagctgccgctggtcgcctgtcgaaagtgtggcctcagctgaacggcgtcatgaatcattggtgcagcgcatttaataggatgggtttgctatgtcagtgtttgtgttaggagtagcttgagtataaagctggttcaaaggcacgggacacctggtgctttgcctgctgctgctcgaaacgtactcgtcccccttccgaaactttaaggcagaaaaacgttttgttcagttgggtcaggtaaaggggttgagttgatggcatcagagtcagagaagaaccagctgattcaggttaacgggttgaagatttcatgccgtcagtgaacgcgttggttgctatatggaaggttggtattccaaaaaagaaacgcgtgacatgtcttctaactgaaaaggaaaaaaaccgttataatttaactgttttcgcgagaattggttcttttgggatgatgcggccggtttttttagtgtttgttttccgaacaagcttttgtttgcggccttactgacaaggatgttttggccattttggttgtttcaactttcgatgggatttggagaatgatgatccgtggtcaaactttccttgcagcttgcaacttccaagttaatacgtcaaaaataccatgtatcttatgaacgacataaagacgtttttcttgttgagtacaataaaaatgctattttcagaaaaaaaatcattgactctagg

SEQ ID NO: 16264 - DNA, 811 bp, Zea Mays
ttgcacagcctcataaagcagactctgacattactgaacggttacgagctcagaaagtgatgacatgatgagaaggaagcgcttatttggtatgattaatgaattgcaaactgtttttgaagttgtctccggtgcgagacaacaacaatctaaagagaggtccagtatggacaatggtggtagagccaagcctgtaaagatagaaaataatggaaaagtcacagacgaagcatacgaagatgacagtgatcacggtgaaaccctatgtggaacctgtggtgggatatacaacgcggatgagttttggatcgggtgtgacatgtgcgagcgatggtaccatggcaagtgtgtcaagataactcctgccaaggcagagagcataaagcattacaaatgcccgagctgcagctccaagagggcgaggcagtagcaaaacccatgaacgcaggaagcctccgaatgtgggatgtatggtgcagaagaggcgcattgcaaagtttgcaggcaggagaaggccaagaggcctccatttacaagattagaactatattgctatcttcccagtgccttatgcttgcgtttacctatgataagctgatgtgaggaaagataagacatttggcaaccagaggcacttagttaaatgccccttgatatacatgggggtaaaagaagaggaactcatgttttgtcgaatatatggaatctttttttcccctcttacagtaacatgtactccatcatacataatttatcacgcagatcaatgttgaggacaaaagacctgcgtgcccctacgagaagaatgatg

SEQ ID NO: 16265 - DNA, 1969 bp, Zea Mays
attaaagccagaggtctcgagttcgaatccttgcagaatctttatttgtgcctccccctttatttccatgtttcacgtttaggccttcctctctggctgcacgtgagtgggggtgctgaagtgtagaggaagtgatgtcccacattcaccagtattttatagctacctcattgtggaggttagcactgctacactatttgtagacaacagcaaagtttctaaagatgttctggagcaccttgagcaagctggtgtgaaacttaagccatatgaagcaattatttctgaagtagaaagactggcagagaaaggtgcaaagctctggttggattcttcaagcgtgaatgcagccataattactgcatttaaatcaagttgtgacatgaaaaagaaaggaaaagcaggtgaagaagttggagaaaaagaagcatcttcaaacgaccggataactggagatcctagtgtccacaatggagtcataagtgctgtatacaatgtttcaccggttgcacttgccaagtcagttaaaaatgatgcagaaattgagggaatgaagaattcacacttaagagatgctgctgctttagcagaattctggtgctggctggaggaggaaatctgtaaaagtgtgccccttacagaggtgcaaattgctgaaaagcttcttgagtttcgtcaaaagcaagatggatttatcgagacaagcttcgacactataagtggttatggtgcaaatggtgctataatacactacagaccaaccccagagagctgcagctctgtaggaagtgacaatctgtttttgttagatagtggtgctcaatacattgatggaactactgacataaccagaacagtgcattttggtgaggcttccccaaggcaaaaggaatgcttcaccagagttttgcagggccatatagctctcgatcaagcagtgttccctgagagaactccaggctttgtgctagatgttctggcacggtcatctctgtggaagattggactggattatagacatggcacaggccatggagttggagctgcgctaaatgtccacgagggacctcagagcattagctatcgatatgggaatttgacagccttacagaagggcatgattgtcagcaacgagcctggttattatgaggacaactcatttggcattcgtatcgagaatttacttctggtaaaggagcttaatctggcaaattcgttcggtggaatttcataccttggttttgagaaactaacctttgttccaattcagagcaagcttattgagtcatccttgatgtcaccttcggagatcaattgggtcaatgattaccacgaagaagtctgggaaaaggtttcccctttgttgagtggccattctcgcgactggttatggaagaacactcgacctcttttagatgtgtaataataactcaacgcacagcacggcttgactgcgtaagtgaaagaaatgaacagacatgtttggctggagcatctcttgaagatctgatggccttcaatggaatgcaactatatggcagtaaacagaggcaagacaatagatgcgtaggctggccagggttcagcggatgataggttgaggctggtgtatttgacatccagccaatttggtgcaacacttgaaaaatgaattacatgcaagccttttctatttattacactatcgacgacaccgtccattgtttgatgaatttattatttattacatttggtacctttttttatacaaaaaaacatctttttagagtgatgaagccatttgagaccatggtttcgtatatggaatcagtcagattcttagggtgctcttggtagggctatggcgaaaacaatttgagctatgatttttgtggtgaattatgatggagctgaagctattttgaagaaaacgattgataaaatagtttggtgacttggcgttactattaaaaaagactgaaatatccat

SEQ ID NO: 16266 - DNA, 659 bp, Zea Mays
tcctgccagtagtcatatgcttgtctcaaagattaagccatgcatgtgcaagtatgaactaattcgaactgtgaaactgcgaatggctcattaaatcagttatagtttgtttgatggtacgtgctactcggataaccgtagtaattctagagctaatacgtgcaacaaaccccgacttccgggaggggcgcatttattagataaaaggctaacgcgggctctgcccgccgatccgatgattcatgataacttgacggatcgcacggccttcgtgtcggcgacgcatcattcaaatttctgccctatcaactttcgatggtaggttaggggcctaccatggtggtgacgggtgacggagaattagggttcgattccggagagggagcctaagaaatggctaccacatccaaggaaggcagcaggcgcgcaaattacccaatcctgacacggggaggtagtgacaataaataacaataccgggcgcgttagtgtctggtaattggaatgagtacaatctaaatcccttaacgaggatccattggagggcaagtctggtgccagcagtcgcggtaattcctgctccaatagcgtatatttaagttgttgcagttaaaaagctcgtagttggaccttgggccgggccggccggtccgcctcac

SEQ ID NO: 16267 - DNA, 1735 bp, Zea Mays
cctggacgcaaaaaaatgttaattgggtaaacgctgcggacggtctcagcccgccacgcgacaaccgacaatccttcgcagtcccgcaccgcaccgccgcaccgcaccaccgcaccgcggccaaggccaatagcctcgcctagcgctcactcgctcgccccactaccaccgcaccacgcgctcccgtttccgccgatccgagcgcgcagatcgcggaagcccagcggctcagagtccagggggagggagctcgcggcggctgaggaaggcgttcaccaccgtcgcggatttcattgaggaagagatggggctctcctttgggaagctgttcagccgcctcttcgccaagaaggagatgaggattctcatggtcgggctcgatgccgccggtaagaccaccatcctctataagctcaagctcggcgagatcgtcaccaccatccccaccattggattcaatgttgaaactgttgagtacaagaacattagcttcaccgtttgggatgttggtggccaggacaagatcaggcccctgtggaggcactactttcagaacacgcagggacttatttttgttgtagacagcaatgatagggaacgtgttgttgaggctagagatgagctccacaggatgctgaatgaggatgagctgcgtgatgccgtgctgcttgtatttgcaaacaaacaagatcttcccaatgctatgaatgctgctgaaattactgacaagcttggtctgcattctcttcgccagcggcactggtacatccagagcacttgtgctacatctggtgaagggttgtatgaggggcttgattggctttccaacaacatcgccaacaagtcttgaagcttttcagcagggctcctagcaagaggaagacgtctgaacaacttatggatgcttttttacattttattacaaagatactccctctgtctcgatttactattccttttgggatagtggttgattcatataatatttgatgtatgtgtttaatagatgtgtctagattcaccatcatctattttaatatggacatagatataaagagctaaaacaaatactattttgaaatggagtgagtacaatctatagtagatagtgtgggtgctgtggagagaaaaaaatctgagctttcttttgagtgtttgctagtgtttaccttcggagatgatatggtaaattatattgacatgctttcgcgtaggtcttcaccgatccagtgctgtggcagctacatttcgttcttagatggttaacgtgtgccaacataaatccaatatgttgcttgtggtacgcaccgttttaaaatagctatggacagaccataattgacatcatcttctgtcgaactagcgttgggcttagttaggacttgggatgtcaatgctagatagctagagctgtatagcatctctaaggggtatttggtttgatgttcgatgaatcatctacatattctttatttatttttatttgggttatgatgtggaataggttgatgcatcaccatctcatatctcatatattagaagataactagcaaagtgtccgttgctacagtttttatttatacttgaggataaagtataaaatataaaaatatgtttgttttattggttatttgagtgtgaatgtaagtttaaagcgaataattgtggttcaaatccaaatttatcataattttagttttttaccgtttaaatgtggggagcatgcatggaaaca

SEQ ID NO: 16268 - DNA, 4950 bp, Zea Mays
atggcgggcgtgtgcgggagcccgttctgctccagggaagcttcagctccagctccagcgtcatgtggacgatgggacgaactactcaactcctccacctgcgcgaacaacatcctggcgaccggcgccgctgcgctgctcgccgtcgtcctcgcgctgcagctgctcgtcagggtcgcaaggaacggactacgacacgcgcccgtcgtcgcgctcagctcgccgctgcagcgggccgccgtggcggccaacgcctgcctgggcctggcctacctgggcctcgcggcgtggatgctggggacggacctgacccagcgcgcctccgtctacctcccacaccggtggctggtgagcctggcccaggggctctgcctgctcctcgccggcttcgccttcagcgtcagggcgcagctgctcggagcggcgttcctccgggtctgggcggctctgctggccgcgtacgccgcgttcgtttgctgcacctcggtcgtgcacatggtcgcagacaaggtgctggccgtgaagacgtgcttggatgttctgtccctgcctggtgcgctgctgctccttgtgtacggcattcggcacgccagggaagaagaagaaggagatggtaacggaggaaccgaaagttctttgtataagcctctgaacgccgaggctcacgacgacggtgcggccgactcgcgtgtcaccccgtttgctaaagccggggttttcagcatcatgacgttctggtggctgaaccccatgatgaagaagggttacgagaagcctctcgaggagaaagacatgccgctcctaggcccctcggaccgagcgtacagccagtacctgatgttcttggacaacctgaacaggaagaagcagctgcaggcacacggcaacccgtcggtcttctggaccatcgtctcttctcacaagagcgcgatcttggtctcgggtctcttcgcgttgctcaaagtgctcacgctgtctgcaggcccagtgcttctgaaagccttcatcaatgtctcgcttgggaaaggttccttcaagtacgagggctttgttctggccgcggcaatgttcgctatcaagtgctgtgagtctctgtcccagaggcagtggtactttcgcacccggaggctagggctccaggtgaggtcgctcctgtcggccgccatctacaagaagcagcagaagctgtcgggctcttcgaagctgaagcattcctctggagagatcataaactacgtcaccgtcgacgcctaccggatcggcgagttcccgtactggttccaccagacgtggacgacaagcgtccagctctgcatcgctctggggatcctgtacaatgcggttggtcttgccatgattgcatcgctggtcgtcatcgttctcactgtgatctgcaacgctcctctgtccaagctgcagcacaagtttcagactaggcttatggaagcacagggcgtgaggctgaaggcgatgtcggagtccttgatccacatgaaggtcttaaaactctatgcgtgggagacgcatttcaagaaggtcattgaggggttgagggagattgagatcaagtggctgtcggcgttcaaccttaggaaatccttcaatggtttcgtgttctggacatcaccggttctggtctcggctgcaaccttcctcacatgctatcttctgaaaatccctcttgatgcaagcaatgttttcacgtttgtggccactctgcgccttgttcaagacccaattaggcagatgccggatgtgattggagtcgttatacaggctaaagttgctttcactaggataacgaagtttcttgatgcgcctgagctgagtggacaggccaggaagaaatactgtgtgggagatgaatatcgtatagtgatgaactcttgcagtttttcatgggatgagaacccgtcaaaaccaactctgaagaatataaacttggtggtcaaggctggggagaaggttgcaatatgtggcgaggtaggatcaggaaagtcaacactattggctgcagttcttggagaggttcctaaaacagaaggcatgatccaaatttgtgggaaaacagcatatgtttctcaaaatgcatggatccaaacaggaacggtgcaagacaatattctctttggatcttcaatggacaggcaaaggtaccaagaaacgcttgagaggtgttctttagtaaaagaccttgaaatgcttccatatggagaccatactcaaatcggggagaggggcgtaaatcttagcggtggccagaagcagcgtgttcagcttgctcgtgcattataccaaaatgcagacatttatcttctcgatgaccctttcagcgctgttgatgcccacacagcaactagtctttttaacgaatatgtcatgggagctctgtcagataagactgtccttttggtgacccatcaagtcgattttttgcctgtatttgattctgttctgttaatgtcagatggtgaaattattcgtgctgcaccttatcaagatttattggcacattgtcaagaatttcagaacctcgtaaatgcccataaagacactattggtgtttcagatcttaacagagtcagatcccatagaacaaatgaaaacaagggatcgattgatattcatggaagcttatacaaagagtctttgaagccatcaccagcagatcagctgatcaagacagaggaaagagaaatgggtgacactggtctcaagccttatatcctttacttgcgccagaataaaggcttcttcaatggctctatgggtattctttgccatgtgattttcgtatgtggccaaatagcacagaattcatggatggctgctaatgtccagaatcctgatgttggtacacttaagttgatttctgtgtacattgcaattggattcatcacagtgttcttcttgctgtttagatcgatagcacttgttgttcttgggatccaaacatcaagatctttattttcccagttactcaactcattgttccgtgcgccaatgtccttttttgattctacccctcttggaaggatacttagccggatttgagcattgttgatcttgatgttccatttggattgatgcttgctcttggtgccagcataaatgcatatagcaatctgggggtgttggctgttgttacatggcaagttctgttcgtctctgtgccgatgatggttttggcactcaggttgcagaagtactatttagcctcagctaaggaactgatgaggatcaatggcactaccaaatcagctctggctaatcacttgggagagtcggttgcagggtctataacaataagggctttcgaggaagaagatcgtttctttgagaaaaattcggaacttgttgacaagaatgctgcttcatatttctataattttgcagcgactgaatggctgattcaacgcctggaaacaatgagtgctgcagttctttctttttctgccttcatcatggctctcctccctgcaggaacttttagctctggctttataggaatggcgttgtcttatggtctgtccctgaacaattcctttgttttctctatccaaaaccagtgccagctatcaaaccagataatctctgtggaaagggtgaaccagtacatggacataccaagtgaagcagcagaggtcattgaagaaaatcgaccatcaccaaactggccccaagttggtagggtggagcttagagatctgaagatcagatacagggaagatgctccccttgtactgcatggaatcacatgcacttttgaaggcggagataagattggtatagtcggccggacaggaagtggaaagacgactttaatcggtgcattgtttcgtcttgttgagccaactggggggaaaataattattgactctgtagatatcaccacaattggcttacatgaccttcgttcacgtttgggtatcattccacaagatccgacactctttcagggaaccataagatataatctagatcctcttgagcaattttcggatcaacagatatgggaggttcttgacaaatgtcagcttcttgaagctgtccaggagaaggaacagggattggactcacttgttgtggaggatggctcgaactggagcatgggtcagaggcagctcttctgtttgggacgtgcactgctaagaagatgccgtgtcttagtcctcgacgaggccactgcatctatagacaatgctaccgatgcgatccttcagaaaacaatcaggacagagttcagagactgcactgtcatcactgtcgctcaccgtatacccactgtcatggactgcagtatggtacttgcactgagcgacgggaaactggtggagtatgacaagcctacgaagctcatggaaaccgaagggtctctcttccgtgacctcgtcaaagagtactggtcgtacgcatcgaatgggaatatctagaagccacctccaaactacgaccgtttgcatgtttccactcgctgcatcctcttgaaaggagatacaagaatctgggcttgcacatccgaagaactattgtatctgaaatcttgagaaaaggcgtcaggcattgtcatgaaatgcttgttgtcaagttttcaccactcgtttttcagcaactttttggtagtttctgttttgggtcattgcttcccttccaggcgctgaataaaagaaaacatgtctccatccccccccccccttcttctcccctccaaaaaaaagtagaggaaatcctcaacatttctttgctcacagtgatactttatgctcataacaaaaattcttaggcttggtgctcaacactattccattcagaatttgtggtgtatgcttacattcgtacaaagctgtagtagggtatatgatgtctgtttttttggggtgcaatcatggcttttcagcaccctcttgttcatgtttgatgtatattcatcggtgtctggagccaagcaat

SEQ ID NO: 16269 - DNA, 856 bp, Zea Mays
atacctgtcacagcaattgattatggtcttggttggtatgctatagtattacgcctgtcatgctagacgtgccagagacccagagcgttgtcttatgtcattgattccatttttcttgttaagggtctattctgtgtgttggaagtgagtggcatcgctatccatcatcgttcttcataccctcttatatcagtgaagtccggtggatagatgatggcttccgtgggttacttccatttcccttcaacgagacactgggtgggaccactgcagctccgtcctacttcaataacaagaacaaggcggctgaagggcaatatctgaaagacattggagcatgtaacttactggtggaacttgatctaagacggccttacccctcgcgcgggagtgacttgtcgacatgggagagagctttcccctgcattatatcggtccttcttcataccataccgatggcaacaaaacaatgtgttcggcctgtacaagctactgaggaggttgcatcctgaccatgcgtaatcaagggaaatgtggggtttgcttcaatgagcttaatcacgtgatttcttttaacaaacagcttgcagatttttactgccatagattttctgatcccaatgtgtaatggcgtacctatttttgtcccactgatccttccatcatacaaattcatcacgagatgacgaggatgagagtgctcaactgctgatgtagggagggatgttcgaggagaatcatgttgtgaaacggctgcttcgccagttgttacctttttggattgtttgttgaatattagccaatgacagactgatagatctatacctttttatgttgagcatttttttcctcctgc

SEQ ID NO: 16270 - DNA, 2888 bp, Zea Mays
gtgctgtatggttgtatattgcctttatcttctttggaaaatgaatttatagcgcctttatccatggatttcatacgtgaagtggatcctgatatcataattggatacaacatttgcaaatttgacatgccctatcttattgagagggctgaggttctcaagatagcggagtttccaatacttggccgaatcagaaatagtcgtgttcgtgtccgtgatacgaccttttcctcgaggcaatatggtgtgcgtgaaagtaaggatgttactattgaaggaagagtgcaatttgatctcctgcaggctatgcaacgggattacaagttgagttcttattcattaaactctgtatcagcacactttcttggggagcaaaaagaagatgttcatcattcaattatatctgatcttcaaaatggaaacccagagacacgaaggcgacttgcagtttattgcttgaaggatgcttatcttcctcaaagactgttagataaattgatgtatatctataattatgtggaaatggcgagggtcactggtgttcccatttcgtttctactttcgaggggacaaagtattaaggtcctctcgcaactactcaggaaagcaaaacagaaaaaccttgttataccaaatataaagggtcaagggtctgggcaagatacctttgaaggtgcaactgttttggaggcaagggctggattttatgagaagcccatcgcaactttggactttgcttctttgtatccatccatcatgatggcatataacctttgctactgtactttggtgccccctgaggaggcccgtaaactcaacttacctccagaattcgtcaataaaaccccatctggtgaaatatttgtaaaaccagaactacagaagggtatacttcctgagatccttgaagaactattagcagctcggaaaagggcaaaagcagatttaaaggaagcgaaggacccactcgaaagggctgttcttgatggtcgtcaacttgcactgaaaataagtgcaaactcagtttatggtttcactggagcaactgttggtcagttaccttgcttagagatttcttcaagtgtgaccagctatggacgacagatgattgaacatacaaaaaagcttgttgaagataaattcacaacagtaggaggttatgagcatactgcagaggtaatttatggggacactgattctgtgatggtacagtttggtgtttctacagttgaagatgcaatgaagttaggaagagaagctgcagattatattagtggaacctttaccaagcccatcaaactggagtttgagaaggtctattttccttaccttctaatcagcaagaagagatatgctggtttgtactggacgaatcctgagaaatttgacaaaatggatgcaaaaggtattgaaactgtaagaagggacaactgtttactggtaaagaacctggtaaccgagtgccttcataaaatactggtagaccgtgatgttcctggtgcagtccaatatgtcaagaacaccatatctgatctattaatgaatcgtgtggacttgtctcttcttgttataacaaagggtttgacaaaaacgggagaagattatgcggtaaaagctgctcatgtggagcttgctgagaggatgcgaaagagagatccagctactgcacctactgttggtgaccgtgttccttatgtaataattaaagcagcaaaaggggcaaaggcatatgagaaatcagaagatccgatttatgttttggacaataatatacccattgatcctcaatactaccttgagaaccaaattagcaagccacttttgaggatctttgagccaattctgaagaatgccagcaaagagttgcttcatggaagccacaccagatctgtttcaatctcaactccttccaatagcgggataatgaaatttgcaaagaaacaattaacttgccttgggtgcaaagctgttatcagtggtgccagtcagacactttgctcacattgcaagggaagagaagcagagttgtactgcaaaacagtagcaaatgtttctgacctggagatgctctttgggaggctatggacacaatgccaggagtgccaaggatctctgcaccaggacgttctctgcacaagtcgggattgccccattttctatcggcgaaggaaggcacagaaggatatgaccgaagctaggctgcagcttgatcggtgggacttctgagcttggaaattctcacatggctgcctgcgtctgcttatattgctgtggaagacaggaagctaccgtcgaccgcatcataatgcatgtgaagatgagactggacttctgcgagcatccagtcacacttgcgtccgtgtcacgtagactgacttgccagtacgattcattagcatgttttctgcttaggttttgcgtaatagtttaggtgtgagttggtacttggtagatggtaggtgtcaccttcctgtggctagtgccgagaaaaatgcttggtcctgagatgaggtgctgattatgtacagggcagaagcaatctggagcagttattatgtaacagagtgagacgagacaatttgaatggcacatgagttctctatctgtctgaattctaatgctgtccgcagcgctcgccgcctctcctagtggataggtttactttggctatgtgttttacctttctagcttagttatagactagtggatagatttagaacctaggttgcatgactgttcacgatagagatagcaacacttagtcaaaatcatagttacataagcttggtcctttttatttgttttgcttaagagaaaaataggggccatatattagaaataaattgtattgcctaattcacacttcttaggcatcaccattctctaca

SEQ ID NO: 16271 - DNA, 208 bp, Zea Mays
agtggcacatgatcgaatgtcacaactttatatataacaggagttctatacaaaataaataattacattataaggagacaacggtccagcaacccaaaagttgactgggagacgacgacctagacctctcacgaactcatcacagcatcctccatgagcgtcatcctgcagtacctggtcttgacctgtggtgtatgtgagacagcaa

SEQ ID NO: 16272 - DNA, 2055 bp, Zea Mays
agctaccttgtcttgcatcgcgaatactttgctgtggatgttatttcaatgagaaaatatgtattgttgaggtccttgatagggatgaagtaatgaagaagttccatgaatcaattgctcagctggagcaagccctgtgcgattttccatatgataaactggatatatctgatgaagctagagagcaggttgagttagtgcatgcacagctcaaaagagccaaagagcgggtcgacatgcccgatgacgagttctacaacgaattatgttcgctgtataacaagagccacgacccaagtgctgagttggatatccttgggagattgtcggagaagttacacctgacgaccatcgctgatctcacgcaagaatcacttgctttgcacgagatggtggcatctggtggtggcaacgatcctggagaacacattgagaaaatgtcgatgctgctgaagaagatcaaggactttgtgcagactcagaaccctgaaacgggcccgctggtgactgccaagccaatgggttccaacgggaagccaagacctgtaaacgttcctgacgagttccggtgcccaatctctcttgagctgatgaaagacccggttatcgttgctactggccagacatacgagcgggcattgatcgagaaatggctagcttccgggcaccatacctgtccaagcactcaacaaaggatgccaaacacgacgctgacaccgaactatgttctcagaagccttatcacgcagtggtgtgaggccaacgggatcgatccaccgaagcgcccgacgcagcagcctgacagacctacatcttcatgctcttcgagcgagcgcgccagcatcgacgctctcctctccaagctatgctccgcagatcccgaggaacagagatcggctgccgcagagctccggctcctagcgaagcggaacgcgaacaaccggatctgcatcgccgaggccggtgccatccccttgctactgagcctcctgtcttcgtctgacctgcagacgcaggagcacgccgtgacggcgcttctgaacctctccatacacgaggacaacaaggcgagcatcatactgtccggcgctgtcccgggcatagttcatgtcctcaagaacggaagcatggaggcacgggagaacgctgcggccacactcttcagcctatcggtggtggacgaatacaaggtcacgatcgggggcacaggagccatccctgccctcgtggtcttgctgagcgagggcaggcagcgcgggaagaaggacgcggcggctgccctattcaacctgtgcatctaccaggggaacaagggccgcgccatacgggctggcctcgtgccactcgtcatggggctcgtgacgaaccccaccggagctctgctggacgaggccatggcgatcctgtcgatactgtccagccaccccgagggcaaggccgcgatcggggcggcggagcccgtccccgtcctcgtggagatgatcgcgggtgggtcgccgaggaacagggagaacgctgccgccgtgatgctgcacctgtccgccagcgtgcggcagtccgcgcatctggctcgggcgcaggagtgcggcatcatggccccgctgcgggagctggcactgaatggcacggggagggggaagaggaaggccgtgcagctgctcgagcggatgagcaggttcctggtccagcagcaggaggacgcggtggatccacgtgtgcaggagctggaggagatcgagcgccagcttgccgcctttggacctggcgttacggaggctgatgtccttcaacagttgggggctctttaacctatggtacatttttcactatgatactactatacttatatagaaaagttctagcggcggactttattatcagtaaaatctcagttctagctactgaatgttagcgtgggtttcggatttcaagatttttatggccatgcgtgtatatgcatttgcgattttgacattgtcagtaggtggtatcgtagtctacggcagtgccagttgcaacgagaatgccatttcatgccgtcgaaatgcaagggaa

SEQ ID NO: 16273 - DNA, 1339 bp, Zea Mays
gaaggtccctgcaattatataaattttactgatgaacttgtgaagcttggcattgtggatggtgtgatggaggcagatttggaacactcaacaatatggacagcagggctgtacttgatccttttacttcagtttctggaaaacaaagttgctgtggaacttacaaggtcagaatttgttgaagcccaagaggctttagctcagatgaaaaactggtttactcgcttccccacaattcttcaaggttgcgaaagtatcattgaaaatttaaggggacaatatgcacattctgttggctgcttcgatgaagcagctttccactttcttgaagcaaaaaagctgacagagagtaaatcaatgcaatcgatgtgtgaaacctatgcagctgtgtcatatatttgtaagggtgatgcagagtcgtcttcacaggcactagaactggttggtcctgcctatagaacaatggactcatttgttggtgtgcgagagaaaacctgtatcatttttgtttatggactattacttatgagacagcataatccgcaggaagcacggaaccgccttgcaagtggtttgaaaatagcgcaccaacagttgggtaacatccagttagtttctcagtatttgacaatactgggcacattggcgcttcagctacatgacgcagcacaggctaaagagatcctgaagtcttcgttgaccttagctaagacgctatttgatattccaacccaaatctggatcttgtcagtatttacagagttatatcgtgaactggaagagaaggaaaatgaaatggagaactctgagtacgaaggaaagaaggaagacgatctgcagagaagactttctgaagcttattctcattcttttcaccatgagctggtggaaaaatcaagaatccagccgctgcacatgtcaagtaagcagccagagatggctgttccatcagctaatggtgatcttgacatcccagaatcagtggggctttccgctccccagccattcctcaaaagacttgttgaggccgagccgatgaggcgcagtaccaggaggcggcggtagtaatgaaactagtactgtaattaatagcgtagtgaatttgttggttaagtgttgttatgacttgtaacttttagcagtttaggtttttattttcttttgtttgttgtgttgattatgtgtatcttggtttagaatttatagatttggagaactgttggattgacaacattctgagtggtaaaataccaattattccactgtgttgggacggcgtgttacacctgcatctccaccatcagcacctgagggtcttcgttcggctcgcgtgcaaggg

SEQ ID NO: 16274 - DNA, 2447 bp, Zea Mays
aaataaagttaaatacattcccttgccttcctcagcggctcctcgtcctcggctcctcccgctcccctccgcactgtgtcgagccgagcgtgccgctggccgaccttggcaccttgcccgcgcccgcccgagccccgacgctgcctgaagcagcaagtgacagctcccctgggcgagccggtttactaccagcacggtgagcttcggtcgggcggagcagacgacaggcagcacaccaaggtagatcgacgggctctacacggacccgatctgcctctatgctgcaacctggattttcttcttccaatcaccaccacagcgcaacgcctgaacggccgtcgctgccggctacgccaggtgctcaggtcttattcggccccttcgccggcgacgagcgccaccaggatgcgtccgagactaagttgatgaagcagcctacttgggtcttctttgagaaagaatcggtaactgacttaagagaacaaattctccaactcattcagcatgattgtaaggatcaagaggaaaaatcacgggcagagctactggagaagctcaacagatgtaaaagagatacacttatcgaactgtgtcgctcgtttgatttaattggctcaagagctaataggaaggaggaacttgtattgtttctgatggaattcattaaggatcactgttctggtagtgatgtcataaactcggataagaaatacaagaaaagaaagcgtgtcagagaagaggaaaatttgtctgctggtaaaccttcaaagaaaaagaaacgagagggtgaagaggaagcagaggatagagtaaaacattctgactgtgatttgctggacaacaaatattcatgtgctgatagtaagaatggaaaattcccaaatgaacagaccaactttgagccttctgggaggataaattactctgtatcagagaatttagatggagcatcactcagtgaagcgccaattcctacagatgagcaagcaataataaccacaccacctacaaagtttgttacagctgctgaggatgatagtactgacgtgaaggctttacaaaggaaaatgtcttctattgccaagaaaaaaacgacttctaaggaagattgcaaagtcaaattgtgtggtaatcgggagtctaaaggagacacaaagcctcgaaaacaagtaatcaaaccaagtaaagatgagctgagggaagctgtctttcttatcttggatactgcggactttgccactatgacctttggcgatgttgtaaaagaagtcgacaaatactttggcaaggatctgtttgagagaaagccactaataaggtcgcttatagaagaggagctctttaggctagcagacgaggcagagaagaaggaactggaagagtcggaagcagcagaggcgaaggctagagccgagcaagctgccaaggagatggcacaagttcaaacagttgaattggttatcaacgagcaaaatgtacttgaagatggtcgagatagcaacaccaaagacagtctaaagaacgcaaatgacagtgctaacaagaaatgtatcgatggtggggcttctgtggagtatggtttcaatgaaaacagctgttacgctgctgaaggttcagaagagcacaaagttgatgatgataataaaaacataactaaggatggcaatggtggaaaggtcgcagttgcacccactgcaaacactgattgtaccttacaactacagggttcaagcaacgtcgaagctgagacgactatgaagagcaatgttggaaccctagaagcgtcaaaagatggagaagtgagagatgccagaaatggagaaaacaatggcactgaagatggtgggaatgaaggaatcaggagtgggaatgttggtagcaatgcagaagctgaagagtctcacggtcatggaaataatgaacgcgcagaacataccgaagatgacaaggctcaggaatgtagccacaatgagaacagtgcaagtgtaggaatccttggcgatggagacggtgaagctagagaaggcgatataaatgcggaagcggaacaaagtcaagcagacggtggcggcaatagtaaagcggaagatgctgagcacaatgaaaacaccaaaactgacgccaattcaagcaagaatggtactactgctgctgggaatggaaagaccgatgttgacgtgaagggcgcaacagcgatggcgcagctgaaggaagccctgtgtgatgagatggatgtagattgcaagggaggtggagtaggaccccggttatgtagatcgtagaagttgatttaggatccccagttgagagattatcagtgacgctttaactcttgtatttgtatgatagcttatgcgtagcttagatttgatgtgtatagcactggactactggagatctggaatacgggaatccaaacattaccttgtggaaattgagctttattg

SEQ ID NO: 16275 - DNA, 3338 bp, Zea Mays
gctcgcaaaggactcgctaccttaagtccagcactctcccactccctcccagaccctcccacttaaacccgccgccgccgccgatgccgctccttctcccggtctccactaggctgcgaatgctcggcgcccgcgcctcgtgagggtttcatgttccaaatggactgttttaagctgggtgagctacattttatcaggagaaattgatcaattgatttgaagtttgaacaatgtaccagaatgtatgaaataaagccagtaattgatcacgctcatggagatgggtgacgatgacaattcttcaagcagaaaatgtaacacatcatcattaaaaatgttactagagaaggagatgtctaaagaagcagagtcaaagagaagacatccaagtgtcattgccagattaatgggtcttgaggaggatttacctactaaagaaccaactgtacaccataccgtaagtgacttgagtagagatttgaatgccacaaacaacaccttacagggaaaagaacaccatcactttataatgtcgaagacacaaaactaccaatcctgtcatgaaaaaatcgaatacaatgatgtttttgaagtatctgaaggacaaccgggaacagactgttttcatgatagaacttcacagaaaggatggtcttccgagaacaagagtgagcaattcaatattgcacgagacaagatcatggaaccagaacagttagctattgaagagaagctcctttgtacaaaggagttgcctgaagctcttgtttttccatgttcaaatagagatttatttcttgaatttcctgaagaacataaccccacattctcaagacagtcgagtgggcttcatgcaaaccaagcaccgcctcaaacaaaacgcattacagtgctgaaaccaattagatctgttgatagtgatggcataagacgacccagagcagaaattggtaagcaaaatgtattgaagatgagaaggttccatcagattcctagttcaaaggaagagataccttcccaaccaagtagaataatccttttgaggcctaccccagggaagccaggtatatcaaaggcaaagctgacatccagggcaacttcatttcagttacctaaccgtaacagtctcaatggatcattagatgataaccaggcatccataggatctgcaggactagtgcatggtatgatgcagtgccggcaagatggatgtcaccaaagagatgattctttattatcttctgcatactcaaatggatatgggggagatgaaagctcattcagtgattcagaagttgattataccagtggctctgaaatcaactatattgaagattgtgataccctcagtgactccgagggaggtagccctctgtcaagacactcatggaattacataagaagatatgaaggtcaatgctcaagttcatcctttagcaaaatatcccacttttctgagtcgtcagttgtaacggaggccaaaaaacagatttcagagcgatggtcaatggttacatgcaatgagatgagtcaagtgcaactgtcgagaagaaaatgcacgttaggtgagatgctctccattaaggaagcaaaggaagacgaggccaccactgggatgttttatgtttccagcaaccagtcatgtggcctggagaatgaactgactacacgttctacaaatgtaactacttctagaaaaaatggtgacaatggggagagatcttcgaaattgccaagatcaaaatctgttccagtgatttcatccacgtctgataacatgacggtgaacatgcaagcttcaaatcctgagagctgcaaacttaaagtggctgttgtgtcaaataaaggaaaatcagctttcaagggaagagtttcagattttttcttgtctaaaagtaaaaggccaagaaggcagatgcctgcttatcatcaatctgattgtattgctgaggggcttgaaggctgtattactcataatagacaggactgcaatcataaaatggatgccatcgagaaagcgatgcattacgatgatgaattcaatagtttttcgacacgaatatcaactagcataccagatagaacaacttctggtgcatctgtttcattgggcagttcaaccggaaacctggataaactaggagtaaacaaatgcctaaatggtaaccgtgatcaaccaagccctacctcagttcttgatgcaccctctgaagatagcagttgtaatgagcctgaaacacttggaacaactacttccaagaatgcgatatcaagatcttcagcaattgaaactgtggcccgtttcttgtcattggatgacaccgcctcagagtcacagtcactttgtaacccaagaccgagttctcttctccctgatgcagatgatgatgagtcagagtgccacgtccttgtgcaaaatataatgtcatcagctggattaggcacttcacagtcacgtatggttttcgccggctggcatttacctgatcaccctcttgacccggtgctgcgtaacaaagtatctcagctgcaggagaaaagttcatacagaaggcttctttttgactgcgtgaatgttgctctaattgagatcggtgagaacgccttactgagcgccctcccatggagtaaaagaagttccagaacatggaggggcacctcatctcctgatctgggggtggaggtctggagtattctcaaggactggatacacggggcacggatgtttgtggtgagcaagagagataatgctgggatcatactggacagaattgtgaagcaggaggtcgaagcaagagggtgggtgaaactgatgatggcgcaggtggttgtcatcaccgaggagctcgaagggggagtaatggaggagctggttgaagaagcggtgctggatttttacagtctgttttcagtggtgagatatcgattgtgactggtaaaactttccacggagcagctggtttgtgtatgctcttgttttgcagctacaccggtcgttcgccgccgtatccattcccccctggttctctttctagctggttctgcttcttgtattacaaagtttgtataaacttctggtagatgagaacatggtaattgtgcagttcatgagaagttttgtaggcaaaataaagtgagccaaactttccatggtgggatctgctgtttgtgcatttcacattgttcgttcattgttaatgagcaagagcagcgaaaggttttgccagattaataagtgctgtggagcatatattatctcattgagaatgtatttattaggcgcatagtaaaatgtaatgtaaacactacatacctcaaaagacaaaacgactcataat

SEQ ID NO: 16276 - DNA, 1074 bp, Zea Mays
agtacctgtattttccacattgatttgaaaagtactgcagaataatatcaatatactatagtatacgcctatgttctgaactatggtttgaattgtgatattacagagacattaaatgcgcaaatattctggtgcatgcaaatggatctgtgaagcttgcagattttggactcgctaaggagattaccaaattcaatgaacttaaatcatgcaaaggaactgtttattggatggcaccggaggttgttaatccgcagcagacatatggacctgcagctgatatatggagtcttggttgcactgtcctggagatgttgacacgccagataccctatcctgaccttgaatgggcacaagctctatacaggatcggtaagggggaatcaccagcaattccaaacactctttcgagggatgctcgcgattttataagccggtgtgtaaaaccgaatccggaagacagaccatcagcatccaaactgttggagcatccattcgtaaacaagtccataagatcagtacggtctatgaggacgacaccttcacgctcgaattcatctactcgtggcatcaattaattggccgtccgtcatcatctattgggcagcggcagaatgatattggtccgcgcaaatcatgcggagctggccgagagggagtttgttttgactggagctagtattgtcaacgctcaacagcattgtcgtcaacctcttattggtgtttcattagttgattctttggcatacgcccgcgaggaagatgtcctcgttgagccgccggctaatgtatgttcttctgcctggatagagaatagtgggtgtgcatttgagcgcatgggttgtagagtgagaacgggctgtgtaaatagcttgtcctgatgccaaggatatgttattagttgtcacgagaaaaaagaaagaaaggaaaaaaggttcaaagctttggaactgtcaacagcggttgttagattggaatttgctgtcagcttttgtggtagaacagaatcatacggctatgctatctttttcttcaaccaacggcaacggaacttcctagaaaactcttcggttg

SEQ ID NO: 16277 - DNA, 137 bp, Zea Mays
cggaagtcttacaaaataaaaaaaaataaaaggatccaaaatctatccttggcgctagaaagtcaactgggagacgccacccagatcgaattgaactcctcgatgtgtggctccacttgaaccacatgttcttctcc

SEQ ID NO: 16278 - DNA, 2315 bp, Zea Mays
atggcggagagcgtggaagcagtcgggtcggcggagagcgaaggagcagaagcgtcgccggagaatgtagggttttcgccggtcgccggacgcagcggggcgaatattggagcgaggattggggacaccgaggacgcgccgctcaaatgtcgtttgcgactggatcgacagcgagcggcgaggggttggaagagtcgtcggaaaggggagcggagtcgccggggatggaagaatcgccggagaatcccggagtcgtggcggggttggggttttgcggttatggaaactgagccgggagcaaaggagctaatcgcgggatgcacgtcggtatttatatggaaaccgaaagggtgcacgcacgaggtggacctcgacaagccgccggtgctgcaggaggtggcgaatttcttcaagggacacggggtcggagatttcaccttcagcaggggcaggctgtcccaatggcggtgccgagcaaagctagctgttcgtggaacaccagagaacccgttgattggtttataccaggaagggacgcatgctgttatagatattccagagtgcagagctcatcacccaagcattaatgctgctgttaagttgttaaggcaaggtataactgagctaagtattcagccatttgatgaagatgctggagctggtgaactcagatatgttcagatggccgtgacaacatataacacatctattccggttgataaaagatacgagcaagggaaagttcaagtttcattggtttggaattcaagagacgagcgctcccagaacgcagagaagctgacttcaataatagaatacttgtggacaaatggtgggccaaaaagtagtgtccatctcattcattctatatgggccaattttcagacatcaaccagcaacataatttttgggcataaatggagacatcttaagggggagagggacatgtgggagcgttatgggggagttgatatttctctggatccttgtagctttggccaggctaatactctgtcatttaactctttgttgcataagctgaacaagtatgtaccacgtagttcaacagttgttgatttgtactctggggctggtgttattggcctatcagttgctgcttcaaggaaatgtaggtctgtgaaatgtatcgagattaacaaacagtcaaagatgtcttttgagacatcagcaagccgacttccagcgaacctgggttgcaccattacttggcacaataccgatgcttcagttgaaccttcgcactggcttgaagggtcaagtgttgttattgtggatccaccaaggaaaggattgcacccatctgttatcagcgctttacagaaagttgctttgtctgagcgcaaggcatacaaggctaaaagttcgcttgcaaaggttaaggatgagaagagaccatggatcttacgggcaagggaggctgcagttcatgttgataatacaacaactgaagagggcaatgaaacgtggcctgaaactctcatatacattagctgtggatgggaaagttttaagagggactgcaaaagcttgatatccagcaaggcctggcagttggaaaatgctcatgcttttaacttcttccctggcacagatagcattgaaattctggctatcttcaaacgggaatcagaagctggtcaaaagaaaaagaagaaagcaaaaaagaaggctaagtagattaacaaaaggctgatccaccttgcggattttgtatttttgtgaatcttaggcattgatccagaacttcagaatgagtgctcatgtctgttatgaggaattttgcatcgtccgaaccaatcaagtgaccaatatgacacaggtcactcaaaatgtagccgtccaaaagcgtcggctcggaatgaaagggtcttttttgctaatcataccggggacttggttttgcgtaccacccgtggtgacattgtgacaggcaagtgggtgtttgcacacaagctgcacgccgatggctctttccaccgatacaagtctcgttagatccttggcgggtcagtggcttggagttaactatgataacactttcagtcctacggtgaagttagccactatgtgcactgttctatctatggctctatctggttttggcttgtctatcaattggacgtcaagaacgtcttccttcgtggcactctgactgagataatgtattgcaaccagcagatcgtttttgtagattcagctcatttgaacattgtatgcaaactcaacaagtcattgtatgatctgaagcatgcaccttgagtttggtatggtcactttgcttcctttgaaaaaaa

SEQ ID NO: 16279 - DNA, 401 bp, Zea Mays
tggaaacattgcacatcctgcttatacagaacatagtatttcaggcaccagagcttacttgttggccaacaacatatagcttgtcaatgcgacggagggaaagagcccctttggctgaacgaactaataagtaatcagttggtgcaaccttatggggaaatacaggtgatctatacatgtttgtttcaagacaagattggtgggacccagaatgtatctctcctagaaaaggggatttatcagcaggatcaattgcaagcactgtgcccagtccatcactgttgtttcgcagtgatgcagctgtctgatcagtaggggtagttttctggtaatatgtacagagacgggctcccattcctgcattcgagagaagcaaaggtctctcttcacaatatctgcac

SEQ ID NO: 16280 - DNA, 1483 bp, Zea Mays
gagatgctctaacgtgatgtcatagggtgattgtcttctgttctgtctggcagtttttttttttttgagaatccgattagcgatcaaggctagaattgattattgctcgcgggcgacaagtgtggtgacgcgtctcgatccgcgcaccgcttgggcttctcgtaggagtactgctcagcctgtcaccgtcagcgcttccaaggtccaaccttctcctctgaggccgtagcatttgtctggttggattgggttgttccgcttgggtagccgggtgggatcgaaatctgtgtggcacccatatggcggcggtcgaggggacgaagaagaaggtaatcatcgacaccgaccccggaattgatgacgcgatggccatcttcctggcgctgcggtcgccggagctggaggtgctgggcctcaccactaccttcggcaacgtacacaccgcccttgccacgcgcaacgcgctccacctgctggaggctgttggcaggactgacatccccgtggcagagggatcccatgtaacgatcaagaaagccaccaagctgaggatcgcaagcttcgtccacggttcagacggcctgggaaaccaggacttccctccaccagctaccaagcctgtagatcagtctgctgctgccttcctggttgagcaggcaaatctgtaccctggtcaagttagcgttgtcgccctcggcccacttaccaaccttgctctggcagtcgagcttgaccctgcgttcccggagaagatagggcagattattattcttggcggtgcgtattcagttaatggaaacgtgaaccctgcagctgaggcgaatatctttggggatcccgacgctgcagatatcgtgttcacctgcggcgctgatattttggccgtgggactaaatgtaacccaccaagtggttctaaccgatgctgaccgggaaaagcttgagcagtgtgacagcaaatacgcccgctacttgtgcaagctaatgggcgtttattttgattaccacagggacggttacttcataaaaggagcgtatcttcacgatccaacgacggttattgctgcggtgaacccatcgctgctgacttacacagaaggcgttgtgagggtacagacagtcgggatcaccaagggccttactgttttcgacaacaccaagaaaaggtacggagagatcacagcctggagtggcatgcccaccgtgaaggtcgctgtcaccgtcgatgcccctgccgtggtagagctgatagtgcagaggctgatgaccgatgactagcaacaacgccaccagctgatccggccgcgttgtcattagaacacgagaatgcattgcgttgcattgcatgtggttatgtgcgtgcttggtgtttacgtacagtttatatatatatgcttgatacgtttgctgatgcttctgagagaacatgattaaattaaattaaacttgattaaatgaaattgccacctgatgatgccagataa

SEQ ID NO: 16281 - DNA, 624 bp, Zea Mays
ctttttttgttacaagttaaatgtaattcgcaggattcttttcaacagcaacaacatcctttgtgacatgaaaaaatgactattctcattccgatagctctggccagagtgttgcagggcatctgattttggctgtggcaaaatgctcacgaaccacgacaatgccatactaagatgccaggatcactcatcgccatctccagttttttgcttcttccatttgtaagcagcttctaggatcttcaggtttggtgctagagcaacttcatcagggaaaatgtaatctatatactcctcatatgctatagtggagccatcttctgtagggattggtctcttccgcttgacttttcttggtgccttcttttgcactaagctgacatctccaagatcaccaaagttcacctccttattaagccattcttcaagaagcatagctctttcctccttcaactctggggcactggttctgaagtaatcaaatgccctttcaaagacagctgatcatcaaaacacaaggtgttaattttagtctgcaacgagtcaataaatgcaaaaacatatatggtcgtacaaagtaagatagatctctaactcattatctacctctacatttttgaaccc

SEQ ID NO: 16282 - DNA, 3409 bp, Zea Mays
ccgccgccgccgcgtgttctctctcatctagggtttcatctccatctagtcgagcattcccgtgctggggtggggagtgggagactcgactcgatttgattcgactccatttcgtgctagcgcctagcgctgcagagcgagtgaggtgacgggaatggcggctccggggcggaggacggcggacgtgtcctcgtcctcgccctctccgtcccctgccgccccctccaccggcaggcgcctcctgcgcacgcagaccgtcgccaacctcggcgagtccatcttcgacagcgaggtcgtgccgtcctcgctcgtcgagatcgcgcccatcctccgcgtcgccaacgaggtcgaggttgaaaacccgcgcgtcgcctacctctgtcgcttctacgctttcgagaaggctcaccgcctcgacccgacttccagtggccgtggtgttcgtcagtttaagaccgcacttctgcagaggcttgagagggaaaatgaccccacactgaagggaagggtccacaagagcgatgctagtgagatgcaacgcttctaccgcgaatactacaggaagtacatccaggcactgcaaactgtcgttaataaggatgaccgtgcgcgcctcactaaggcataccaaacggctgctatcttgtttgaggttttgagggctgttaatgattcccagtccgttgaagtcgatcaagcgattttggatacacacatcaaggtcgaagaaaagaaaaagctgtttctaccttataacattctcccgctcgatcctgaaagtactggcgaagccattatgcgatatccagagattcaagctgctgtttatgctcttcgcaatactagaggtctgccatggccaaaggaccaagacaagaagcctgaagagaagaatactggcaaagaccttcttgattggcttcaggctatgtttgggtttcagaaagacaatgtgtccaaccaaagggaacatttgatactgttgcttgcaaatgttcatataaggaaaatacccaaggctgaccaacaaccgaagttggatgacaaagctctggatgatgtaatgaagaagctatttaagaattataagaagtggtgcaagtacctcggccgcaaaagcagtttatggttgccaaccatccagcaggaagtgcagcagcgtaagcttctttatatgggtctctacctgctgatttggggtgaggcggccaacttgagattcatgccagagtgtatttgttacatctaccatcatatggcttttgaactctatggcatgctggctggaaatgtgagcccaatgactggtgaaaatgttagaccagcatatggtggtgacgaagaagcctttttgacgaaagtcgtgactccaatatacaaagttatagagaaggaagctgaaaggagcaagaccatgaaatcaaagcattcacattggagaaactatgatgatctgaatgagtacttttggtcagttgattgtttccggctaggatggcctatgagagccgacgctgactttttcaaaactccaaaagatccttatctgaatcatttgaatggagagaacagatctgcaggcaatgtccattggatgggaaaagttaattttgtggagatacgttcattttggcacatattccgtagttttgacagaatgtggatcttcttaatattgtccttacaggccatgataattattgcttggaatggtggaacaccaagtgatatctttgatgctggcgtatttaagaaggttttgagcatatttatttctgcagcaattttgaagttgggtcaagtgacttacgcgtacacttgggagaatcctactggtcttgcaagaacaataaaaagctggcttggggatggtcagaatcagccatctttgtatatactggcagtagtgatatatatggcaccaaacatacttgcttctatgctatttcttttcccatttatgagaagaatcctagagagttcaaatgttaaggtcataacgatcatgatgtggtggtctcagcctcggttatttgttggtagagggatgcacgaaggtgcattctccctcttcaagtatgttaaaatgttaacccatcttcacattgtcttgtcttgtattgcatccttctcaattactgaacattgttgtcctgacaggtataccatgttctggattattcttttagcaatgaagttgattatcaaacctctggtacagccaaccaaagatataatgagagaacctatcaggacattccagtggcacgagtttttccctcatggaactaacaatattggtgttgttatatcactctgggctccaataatcctggtatatttcatggacacccaaatttggtatgcactgttctctactctgattggtggcatctacggggcttatcgtcgtcttggtgagatacgtacattaggaatgttgagatctcgctttgaatctttgcctgaggccttcaatgaacgcttgattccttctgatgcaaataagagtaaaggtcttcgtgctgctttttcgagtagacccaaggcttctggtgacgaaagtgagagagagaaaagagctgcaaggtttgctcaaatgtggaacgccattattacaagtttccgcgaagaggatctcatagacaatagggagaaggatctgctactggttccagactgtaaagaccgtgaacttgatatattccaatggccgcctttcctacttgctagcaagatcccaatagcactggatatggcagcagacagtggtggaaaagaccgtgatctgacgaagaggataaagtcagatccatacttttcctttgctatcagagaatgctatgcttcattcaagaacatcatcaataccttagtatttggtcagcgggagaaagatgtcctagtacagattttcacagttgttgataagcatatagaagaggaaactctgataacgggtctcaatatgaagaaccttcctgcactgagcaagaagtttgttgaattacttgagttactgcaaaaaaacaaggaggaagacttgggtcaggtagttattttgttccaagatatgctcgaggtggtcacgagggatataatggaggaacaggacctgctcgagacgttggattctttacatggtgccaatagtagaaaacatgaaggaattacaccgctagatcagcaagaccagttgtttgctaaagctattaagtttcctgtggtggaatcaaatgcatggactgaaaagataaagaggcttcatcttctgttaactgtgaaagagtctgctatggatgttcctattaatcttgatgctaggcggcggatatcgttcttcgcaaattctctatttatggatatgcccaatgctccaaaagttcggaacatgttgcccttctcgtaa

SEQ ID NO: 16283 - DNA, 95 bp, Zea Mays
tgaagatggaccttgtctttcgttgctagaataggaggtccaatatgcttgttgtaggtcttggtgtctgatccctgtgtctgtgtgattagtcc

SEQ ID NO: 16284 - DNA, 3943 bp, Zea Mays
cccgcacctccccgcggacagatcgatccgtccgtcctccgtcgtgttcgttcaggccgagcgagatccactgctgactgctcactgcaccgaaccgagagagcgtggcaggcaggcgggcggccgatcaccgacgccgacgcggcgtccacacgcgccaacggccgaacgcactctctcccacccctccgtcgtgctccacggcccaacccaaccctacgcactcctcccccctccccccccgcagctacatctcccctcccgcttcgccagtcgccaccgcgcggcgggagctcgctgaagagcttcccccctctccccccaggcccgcggcggcgccggctcggcccccgtcatcgcgctatcgtaggctcgcgggctcagctgatctggtcagcgaggcgaggttgccggggggccagattccgctcccgcccgcgcgtggtctggggtgtgggcggtggatcggctgcgcgggtcattagatctatgcccgagatctaaggcgccagcgccaggtgcggaggcggaggccgtgagccggtggcggtcggaggccggggacagggatggcgtggtggtccgggaaggtgtcgctcagcggcctgcaggacatcgccggagccgtcaacaagatcagcgagagcgtgaagaacatcgagaagaacttcgacagcgcgctcggcctagaggagaagcgcgacgatgaagaagcatcaggatcgcggacatccaactctgatggaataggattcttcaatcctgtcatggctttcatgggacacaatggtgaagaagatggcactgaagtatcagaaaagccacaatttccaaaggatctgtcagtagaggaagaaaatcatagcaccccaactaagaaacagacatccgaggtagatcattcagaagtatcagtaacaacatttccagaacagccttcaaaatcagaagaagctcatagtatctccaatgagtcacctgtttctaaggcagatgtttctgagcagtccataacaccacaaactccagcacatccttcagtagcagaagaaaagcttgatggctgcactgaggcacttgcatctaaggtgggtgatgatgaagcatcagaaacatcacaatctccaggacatccttcaacagttgaagaaaaccaggaccatcaatatagtaaacattcttgtcctagtgatgaagcagagccaaatcagcttagagagtctgctggagacttacctgatggtagtgcattttcttcgcctatcaaaatagataaatcaggtgacaccgaaacaggtgaatctattgatacaggaaaggaagacacatctgatgggaatgcctctcagtcacaaccagcagaatccatgctagctagttccgataatataactgaagttgaggacaagattgctcaagaatacaatgtcccaaaagaacttagtagcccacaggagaattgcgatacagtagacaaagttactcgtcttgaagtcaaattacatgatggcaatattgataccaaaaaaagtgaggaagaaagcaataagatggaggcaggggaagtatctgttgttgtacaggaggataatgtaatggagcaacctgaagatttaatgtcaaagtccataactgcagctcatgattcacattcgcagaatgagtcagtggtcagtttgaccgatgtacctgctggactagggggagtaggccccgcagataattttacagaagaagaaaagattgctagaatcacagattttcagattgtggactctgttgtttctgttggtgagctagagaaattaagacgtgaaatgaagatgatggaagctgcattgcaaggtgctgcaagacagtcacagtccaaagctgatgaaattgcaaggttgatgaatgagaatgaacaactaaaatcaacgatcgatgatctcaagagtaagtcttctgaagccgaaatggatgcacttaaagatgaatatcaccaaagagtagcaactcttgaaaggaaggtgtatgcattaaccaaagagcgtgatacactaaggagagaacagaataaaaaaagtgacgcagctgcccttttgaaagaaaaggatgagatcatcaatcaggtcatggctgaaggtgaagaactatccaaaaaacaagctgcccaagaagctacaatacgaaaactgagagcacagattcgtgagtttgaagaagagaaacaacgtctgaactcaaagatccaggttgaggaggctaaggtcgaaagcattaagagagacaagatggcaaccgagaagttgcttcaagaaacaatagaaagaaatcagactgaacttgcagctcagaaggagttctacaccaatgctcttaatgcagctaaagaggctgaggcattggctgaagcaagagtcaacagcgaagccaaagttgaactggagaaccttttaagagaagctggcgaaaaagaaaatatgctgattaagacaatcgaggagttgaggctttctctcacccgacaagaacaagaggctgctttcagggaagaaagactaaaaagggactatgacgatcttcaaaagcggtatcaagctagtgaacttcgttataatgaactggtgacacaagttcccgagtctaccagacccctcctaaggcaaattgaagccatgcaggagacatctgctcaaagggaagaagcttgggctggcgtggagagaaccttaaactctcgccttcaggaagcagaagctaaagctgctgcttcagaagaaaaggagcggtctgtaaatgaacgactgtcgcaaagtttatcccgcataactgttcttgagacccagattacaattcttaggacagagcaaacacagctgagccgatctcttgaaaaggagaggcagagagcatctgaaagtagacaggagtacctagcaattaaagaggaggcagcaatgcaagaagggcgggctaagcagctcgaagaagagataaaggatcttagagttaagcacaaggaggagctgcaagaagcagcagaacacagggaacttcttgagaaggaccttgaaagggaaaaggctgccagggcagaaattgagaaaacatcttcccgtgaagcgcctaaagtcccacttcccgatcagacaagaaatgcccctctcagaaagctgcctagttctggcagtataaatagtctagaagaaagccatttccttcaggcttcgttggatttatctgacaatgcttcattagagaggcgaatgtcttcagaaagtaatatgtcatattatctgaggaccatgactccaagtgcttttgagtcagcacttcgtcaaaaggatggagagcttgcttcttacatgtctcgcttggcctcattggaatctattcggaattcactggcagaggagttggtgaaactgacagaacaatgtgaaaagttacggactgaagccgctgctgtgcctggcttaagggctgaattggaagctctgaaacaaaggcacttccaagctctagagttaatgggggaacgtgatgaagagttggaggagctaagaaatgatattgttgacctaaaagagatgtacagggagcaggtggatcttcttgttagccagctccaggcattgggtgctcgtgtatagtgccggtatggatttgtcgtgccatcgggcaaggcaagacaggtctgagacttgagcatgttttcctttttattttgtaaccgtacaacggcactgaaaatattcgtctgtacacatcaaaaacaccttcggcgttgggtttaggaggatacgttgttgtatactagatcaagtagtttcacagttttacgtgcattcttttttatctgtgttcattgaaatgtatcaaatttgaatccatttgcatgtgtacctcagaggaatgcaatcaatcaataatatcgagagctctttttatgtcctaa

SEQ ID NO: 16285 - DNA, 1647 bp, Zea Mays
ggtctatttcttcttttttatttgtttaatttatataatttcggctattatttattatatacatatgttctcccctcttttctagtgacagggagcgaggcagcgaggcagcagctgcagccggccgcgcccccatctcatctcgggggtcgggacctgattaccccaatccgtttcctcaccaaatacgccacggcggcgcggcgcgctggctacccacaatggcgctcaccaccgcctccacggttgacttctcagggatggtggatgacgagttccttgacagattgggcatagagaagggcacgagaaaggtcataaaccatgaggagaggggacgggtcttgcgtgccatggatggatgcagctacaaggctgcagctggaggctccctgtccaactcgctcgttgcgctggcaaggcttggtagtagccagtctgctggctaccctgagcttaatattgtgatgggcggcagtgtgggcagtgacccactaggtagtttctacagggcaaagttgcgccgtgctaatgtgcacttcctgtctaagccggtcaaagatggaacaactggaactgtcattgttctaacaacgccggatgcacagcgtactatgcttgcgtatcagggtacttcgtcaactctgagttacgattcagacttggccagtttagtgtctaaatcaaatgtactaattgtggaaggttatctatttgagctgcctcacacaattgaagctatcaagcaagcgtgtgaagatgctcacaagaatggtgcaatcattgctgttactgcatcagatgtatcttgcatcaagcgttgctacaatgactttcgggacattgtaagaaactatgcagatatactgttcgccaacgccaatgaagcaagggcgttgtgcgagctaccctcaacagacagtcccatgtcagccacaagatacttaagccactctgttcccctagtatctgtgactgacggcatgcatggctcctacattggggtgaaaggtgaagcaatatacatccctccaccacaatgcgtggctgtggacacttgtggcgctggcgacgcatacgcttctgggattctgtacggcgtcctccggggtgcttctgacctgaaaggcataggactcctggcgtcgcgggtagctgctgtcgtcgtcgggcagcaaggcacgcgactgcgggtccaggacgcggacagactggctggatcgtttgagcaccatctggatagcttggagttctgctcggatgtttgaatagatcactctgcaaacgtctggtctgattgtatctgtttttttcccaagccttagaaatctatatgtacatgtacatacatcactaaccttggttagtaggtctagtacatttcctcagggcatttagccgagctgggtaaatcttgtgcgcccatttgatattactttccatctttgagtattgccatgattggaattacgtagatttcattgggcatggaaaatacaacggtatagttcatttccattgaaaatggatggatgctatgttggtctggcctttctttatgtgtagtatgtaaaaggaactttgcggtccactgaaaccgcagtgagactgaaattacggtaatgcaatccggctttgttagattgt

SEQ ID NO: 16286 - DNA, 126 bp, Zea Mays
atgccaatgccaagtcagcgtgaacagtacgggagtactgttcatctatttataggcacgagacgcagcccatgtaaaattacattaatgccctttgcttttattaataactctatagtaattctc

SEQ ID NO: 16287 - DNA, 2199 bp, Zea Mays
aaaaaagaatataaataaaaaataatatcatacatatacatttaaatagcctccaccactcccttctcgcgacctcagaatctcacggcatcacgcgaagcaaggagaaagaaaatggcgcagctggtggagacgtacgcgtgctcgccggcgacggaacgcggccgtggaatcctcctggccggggaccccaagacggacacgatcgcctactgcaccggccgcagcgtcatcattcgccgcctcgatgcgcccctcgacacttgggtctaccccgaccacgcctaccccaccaccgtcgcccgcttctcccccaacggcgagtgggtcgcctccgccgacgcctccggctgcgtccgcgtctggggccgctacggcgaccgcgcgctcaaggccgagtttcgccccctctcgggacgcgtcgacgacctccgctggtccccggacggcttacgcatcgttgtctccggggacggcaagggcaagtccttcgtccgcgcattcgtatgggactctggcagcacagttggtgagtttgatgggcactcaaagagggttctgagctgtgacttcaagccaacacgtccatttcgcattgtgacatgcggtgaagattttctggctaacttttatgaaggaccgccattcaaattcaagcattccataagggatcactcgaattttgttaactgtatccggtatgctcctgatggagagctttccactgaaggcggtcacacagggagcatatatgctgttagctggaatcctgacagtaaacaggttctaacagtttctgctgataaatctgcgaaagtatgggatatctttgaagatgcaagtgggaaattgaatcgaactttggtttgccctggtataggaggtgtggatgatatgcttgttggttgtctctggcagaatgatcatctcgtgacagtctctcttggtgggacatttaatgtgttctctgcaagcaacccagaccaagaaccagttacatttgcaggacatttgaagactgttagttctttggtcttctttcctcaaagtagcccaagaactatactatctactagctatgatggtgtcatcatgaggtggatattgggtgttgggtttggtgggagactgatgcgcaaaaacaacactcaaataaaatgctttgctgcagtagaagaagagcttgttacctcaggttatgataataagatcttcaggattcctcttaatggaaaccagtgtggagatgctgagtcagttgatgtaggtggtcagccaaatgctttgaaccttgcacttcaaaaacctgaatttgcactggtcactactgattctgggattgtattgctgcacaactcaaaagtcatttctacaaccaaagttaactataccatcacttcatcttcggtgtctcctgatgggacagaagctgttgtgggtgctcaagatgggaaactgagaatctattccatcagtggtgatacacttacagaagaagctctgcttgagaagcaccggggtgctatcacttccatacattattcaccagatgtttctatgtttgcttctgctgatgccaacagggaagctgttgtgtgggatcgggccagtagagagatcaaactgaagaacatgttgtaccacacagctaggataaactccctggcttggtcaccggacagtcgattggttgccactggctcactggacacctgtgcaattgtctacgagatagacaagccagtagccagtcgcgtcactatcaagggagctcatctgggtggagttcatggtttaaccttcctggagaatgatactctggtgactgccggcgaggatgcttgcattcgtgtttggaaggtggtggagtaataggttactcattattctggtgtgcattgagaatgtctttgctattcattggaataaacttctttctttttctgtgcttgttggtacggttgttgttacctgacaggtcatagcatcgttgttgccttctcagcgatttgtgctctaaatttcctttacaattcttttttgagttgtattatttttgcctttttccccgaaagaaagactcctttgtaagtgtatctccgcatctgattttgtcaggaactgtgagaatatagggatactactgttgcttttctcccctatgtcttgaaatagtcgggtaccatagatcgagagagg

SEQ ID NO: 16288 - DNA, 2133 bp, Zea Mays
tcacttcacttgctagcatgatgagcttcagaggagctgaaggttttgaagggcgctcaagtcatgatgaatgcagagaccataagtcagactttgaagtctctgaagacgaaaagaagaccagaatgggctctttgaagaaaaaagcaatagatgcatcaactaagattaggcattcattaaagaagaacaggaggaagagtggtagccgggtcctttctgtgtctattgaggatgtgcgtgatctagaggagctgcaagctgttgaagcatttagacaagcactactcttggatgagctgttgcctgcaagacacgatgactatcatatgatgctgagatttctaaaagcaaggaaatttgatatcgacaaagcaaagcaaatgtggatggatatgcttcattggcggagggagtatggcactgatacgattttggaggacttcgaatacactgagttggacgctgttttgcaatattatcctcatggttatcatggagttgacaaagaggggagacccgtttatattgaaaggcttggaaaggttgaccctagcaaacttatgaatgtcacaacgatggatcgatatgtgcgataccatgtgaaggagtttgagaggagcttcttgattaaatttccagcttgctctgttgctgcaaaaaggcacattgattccagcacaacaattctggatgtccagggcgtgggtttgaaaaatttcagcaaaactgcacgtgaattaattcagcgactgcagaaaattgacaatgataactacccagagactctataccaaatgtttattgtcaatgctggtccgggtttccggctactatggaacactgtgaagtcctttcttgatcccaaaactaccgccaagatacatgttcttgggaacaaataccaaagtaagctgcttgaaataattgacgccagtgaattgccggaattccttggtggcacttgtacctgtcctgaatacggaggctgccttaaggctgaaaagggaccatggaaggacccaaacatacttaagatagtccaaagtggtgaggttcattgtgctcgtcaaattgtaactatttccaatggtgaagaaaaaattattacttatgccaaaccgaagcaccattcaatgcgagggagtgacacatcaactgctgagtctggctcagaagctgacgatgctatctcccccaaagctctcagaagttacatacaacatcctaagttgaccccagttcgtgaagaggtcaaaattgtcagggctacgagcttttctactcgtctccctgaatatgatgtacctgttgttgacaaggctgtggatgctacatggagaagagagcagccacgaaagataccattcatgccccaagactcttctgtgaaaactatgtccaggccatctgattcctcctgggataagatcgttgcaactctgatggcttgtcttatggctattgtaatgttggttcgatcagtcaaagatcttgtcacaaggagattgccatataaaggcgggtcagaagaaatccactctacgctgtacccagaccccatccagaaagaggaattccgtcctccttctccgatccctggatttgctgaagccgacctgttcgccgtggtcttgcaaaggctgggagagcttgaagagaaggttcagatgcttcaagaaaagccttccgaaatgccttgcgagaaagaagagttgcttaacgccgctgtgcgtcgtgtcgatgcattggaagccgaactaattgtaacaaagaaggctttgcacgaggctcttatcaggcaagaggaactgcttgcgtacatcgaccgcaaagagattgccaaggctcagagaaagaagaaagcaatgctttgctactaggacaaggagggagatacttctgcttcctcagaggagatgccaaagatggcgcctgagatgtaaccagcgatccccttcattttcctgacacttgtgaatcttctacaagtttccgttgtaaatcgagaatattctgacatgaataaagtgttttttggcatcatgagctttgctgcctccggtcttgcaatctggttgttcgttgcagcataattggttggttggttgggtggccttagccgagccgata

SEQ ID NO: 16289 - DNA, 980 bp, Zea Mays
tcaaattgatgtatctacagctgctgtagcgaaggaatcattggaagggcattgcatctacgatggtggctactgcacatggtgacaagagcagagactatacaattccagctggcgtaatccaaggggtgccacctggtgtacaagctacatcctctgggtggcaaggtaacgttcaagcagctggggcatatgctgccccacccggtgccccttcgcaaagccacggtgccaatggacatgtgcagaactggaatcccggcaactcagtctatcccccagccccaggaccaggaatatatccaggccagatgtactcatctccctcacagtatgcagcgtcagggggcttccctaataccccatccactgctccgccacactatgcagcatcagggggcttccctaacaccccactcccagctcttcctggtgctcctacacaacagttgcacgcttcgcagcagatgctgcctcagcatggaaatcagtcgggaggcgcatccggaactagccaaccggcgccaccagcatcatactaccgttgagttgaaatcttcttttgctattgtacttaacctgttttgtcactgagtttgttattcatcatctaaaactgcaacactgttgtccgtagctgtgtttagatgatgttgggggagaacaacaacatagcaacatgattatattggtggttcttcctctcctaagattgggaaaggagaagatattgcgagtgtttcatattggtggagtttgaaacattgttgctggagatagttttacataagcaaacataatcttcagttataaaggaatataagagccattgctattcatgaacataagcttcagtgtcatcattgtatattcgggatctctctgatggcacgaatacaatagcaagcgcagactcaaatgattgatcctgccgtctatttataggatgtagcatttatataatagcaagcacagtttta

SEQ ID NO: 16290 - DNA, 1380 bp, Zea Mays
agggtgccagcctgccagggcagtgacattacattatgaacgaccggaacaattgcccatgcaaatgaagttcctgtcttgtctttctctgaggttgccgaaaggctcgatacattccatgcgtctggagctaggaatcaaaattacatggccatgtactctagcatttttggtggaattacaacaaacccttctgcaatggtgataccaatcgatgatcacatggttcatagaggtcatggggtttttgatactgcagctattatggatggtcacctctatgagttagaacaacaccttgaccgcttcctgaagtctgcatcgatggccaaaataccattacctttcaatcgctcaacaattagaagcatacttattcagactgtgagtgcatcaaattgcacccaaggatcactcagatactggttgtctgctggacctggagacttccagttatcttcatctggctgtacaaacccagccctctatgctgttgttattgaaagcccatccttacaagtaccgtcctgctgcagagtggtcacatcatctataccgataaagtctcctcaatttgcagtcatgaaaagcgtgaattacttgcccaatgcactcaccaaggtggaaggagaagagaatggtgcatttactggcatttggctagacgatgagggcttcgttgcagagggttcgaacatgaatgttggcttcgtgacaaagaacaaggagcttctcatgcctcgttttgacaagatcctgagtgggtgcacagcaagacgggttctgaccctcgctgagcatctagtagctcatggaaagctcagcagggtaatatcaaggaatgtgagtgttgaggaagggaagatggccgatgagatgatgctcatcggtagtggcattcttgtcaaacctgttgttcagtgggatgataagataattggttctggacaagaaggcccgatagctcaagcgctttatgaccttattctcgaggacatgagatctggtccgccgtctgttcgtatccccatcccttactaaaactgtttggagttgtgcaaatgattacaagggtgaacactgatttgttggttgtcagagtttggtcaaaacgagaggttggacgaactcatagaagagaacaagtcggcaacagccgaaattgtcaaagagattgatatcttaatttgatgtacaataggacttaagggcctacaaacatttgtgaaaatatttgtaatatataactcgggaatatgttgcaatgatgtttaccgtttgttggttttgcatgcactgactatatgcccctccgatccacatgcatctaaacatgcccttagattgactttcattgggacttgttaagcacaagcgaca

SEQ ID NO: 16291 - DNA, 1332 bp, Zea Mays
attggcacgtatgaatgctcagccacatgcgtatgtatacatcacggccacgttcacgcttcccccttctgcaagcaaacctaaccaagcctctgcggctcttcttcgaatccaactcctccccgatccccaaaatcgaacccaagtcgaaaccctaacctcggccttctcgatgtcggccgccacaaccgccccaacccctgcggtggccaccccgatggcgccgcctccgtcgtacccggcctcctccacgatctccgcctccgtggccgcgtcggtcgaggaagaggacgacctctatggccgcctcaagtcgctccagcgccacatggagttcgtcgagatccaggaggagtacgttaaagacgaacagaagaacctcaagcgcgaactcctccgtgcgcaggaggaggtcaagcggatccagtccgtaccgctcgtcatcggccagtttatggagatggtcgacggcaacaacggcatcgtgggttctactacgggcagcaactactatgtgcggatcctcagcaccatcaaccgcgagctgctcaagccgtcagcatctgtcgcgttgcatcgtcactccaacgctttagtcgacgtgctgccgcccgaggccgactccagcatctccttgctgggatcgtcggagaagcccaacgtcacctacaacgatattggaggatgcgacatccaaaagcaagaaatacgggaggcggttgagttacccttgactcatcatgagttgtacaagcagattggtattgatcctccaagaggggtgcttctgtatggtcctccgggtactggcaagaccatgcttgccaaagcagtcgcacatcataccaccgctgcttttatcagagtcgttggttcggagtttgtacagaagtacttgggcgagggccctagaatggtgcgtgatgtgttccgtttggctaaggagaatgctccagcaatcattttcattgatgaggttgatgctatagccactgctcgctttgatgctcagactggtgctgaccgagaagttcaacgcattcttatggagctactcaatcagatggatgggtttgatcaaacagtgaatgtgaaggttataatggcaactaatcgggcagacactctagatcctgctctgttgcgtcctggtagacttgacaggaaaattgagttccctttgccagaccggcgtcagaagaggcttgttttccaagtctgcactgccaaaatgaacctgagtgacgaggttgatttggaagactatgtttccagaccggataagatcagtgctgctgataactgggctttaggctgcaccttggatgcttg

SEQ ID NO: 16292 - DNA, 1428 bp, Zea Mays
tgatttctgatccttaggatttcttctggattgctcataatcatgctatcgagaatatgatgctgtttcagtatcttgtcaacacacttgaagcagattttgtgcctcgccaaattgcaaccaaagagtcactagactgggtgattttcagagagtctctcttaagtatgcttctgggatcacgaaagctcgtgttcaaatcttttgtgaagaactgcatgtgtattctactcaaccagtattaccatgaagctaaagatgattatgaagacatcataccttctgaaagagaaactgaatcaacatcttatcacaatttctccctaaactatttgtcctttgagttaaaaaagacactcatttctctcaggaaattatttgtgatggttatgaaacttgacttgaccaggaaagaagcagacacattagggttaacctcaagagctgacagattcaggcctttgtggaacggaagtggaaattggagattattttgcagtacttttcaaaatattgtggcaagggcgcagtccgtactcgaaggtctgataattcacaagaagatttgaaactggaaaatgttctgaatttctttgtgacagccacaagtgcaaaagctattgtcagaaagatgagtgcagaaattgcccagcttcttttaacacatgcttaccaggcgtgcctttctgctgaagatgccaacagcaattctgctgatacacccgaaaaagttggagctactctccaagagatatcttccaacttcatagctgcttttcaaaacatcaggaaagttagcccggatatccagatatcaccgttcgagaaagaagctctgtttactgctgcaacgttggttaggaaattgaagagcaaagaaaggtagagctgaggcccccgcttagggctggtttggtggacatggaattggagaggatccaacgggggagtaatcccctccttattcaaatttaaatagggaggagattcctcccacgtggattccctcaaattccctgtccaccaaatcagcttttaggatgtgataggttcagatggtgtagctttctggccactggtatcatcaagttgtttcatattttgggttatgtgtcacggttacggaattaccccgcctccagtagccagtgtccgcctcccctagtagactagcggtactggtctactggaaagttgaaggtacataacttatgcggctgttgcatatttacgagtggtggcatgtgtcgggaatatggtcttagaacctgattgtgggtcatctgatcaacccaacctaacccacccaaaacatcctgatttagggtgagtttgggtgaagagtggagaagaatgaagtcctattttctaaatctttagttctcaacaaagaacagtggagcgacttcgtgtttgatttaaaaaaaa

SEQ ID NO: 16293 - DNA, 515 bp, Zea Mays
ataagacatttttgggtcatatttttattcagcaacagagactaagttagttgtggacacatcaagaagagaaaggctacgagtaaatgttagtactttttaaacgaaataaactgtctgtaggctattggctgatcttggtgtttcttggggaaaagagtacgagcactctcaataatgtaactcagcaaatgtcatttgtacatatatattagacacctccagctaccttgccaacgcaagaacgagaagacgagttagactttgtcaaaaccctcttcactagtggaggtatcgaccatcactcgtcactgtaacccgatggtgatcggcaaccatgagcttccatgttattgtgttctgatacttgagacgtttattatgattatgtatgagatattgtctcttattagtactggatgatgagatgtgtcttattatgactacggatgagacttttgtgatgtaattgatgagactatggatttaaaaattgttatgtgattgtgtgtgag

SEQ ID NO: 16294 - DNA, 2926 bp, Zea Mays
agaagattcccgtctacattggccgaccccgcggcccacaccgtatatcaccgcctcctatccggcctctgcccttctcgccgaacggaaaaccctgcccggaccttcgttgcagcgctacgagcttcgacgggccgctcgatctccacctctgaagtggctgcttgtgatctagatctgaaagctgcagtggttgacagctgagtgtgaaactgtgaatcgaagatgagcgtggtgggcttcgacctcggcaatgagagctgcatcgtggcggtcgcgcggcagcgcggcatcgacgtggtcctcaacgaggagtccaagcgcgagacacccgccatcgtctgcttcggggacaagcagcggttcatcggcaccgccggcgccgcgtcctctaccatgaaccccaagaactccatttctcagatcaagcgcttgctaggccgcaagtactccgaccccgaggtacagagagatctcgcctccttcccgttccgtgtcacggagggccccgatggttttcccctggtccatgtacgatacctgggcgaggaacggacgttcacctctacccagctgcttgccatggtgctgtccaatttgaagggcattgctgagggtaacctgaatgctgcagttgttgattgttgcattggtattccagtctactttacggatctgcagcgcagggctgttcttgatgctgctactattgcgggtctccagccattgcgattgttccatgagacaacagccactgcactggcatatggtatttataagactgatctcccggagaatgaccagttgaacgttgcatttgttgatgtcggtcatgcaagcatgcaggtcagtgttgtcggttacaagaagggacagctcaagatgttgtcgcatacgtatgaccagtctcttggcgggagggactttgatgaggccctgtttaagcactttgcagctaaattcaaagaggaatataagattgatgtgtaccagaatgcgcgtgcatgcattaggttgcgtgtggcatgtgagaaacttaagaaggtactgagcgccaacccagaggccccactgaacattgagtgtttgatggatgagaaggatgtgcggggttttattaaaagggaggagttcgaacagatcagtgcctcggtgctggaacgcgtgaaaggaccactggaaaaggccttggctgaagctgggttgactactgaaaatgtgcactttgttgaggttgttggatctggttctcgtgttccggctataatcaagataataactgatttttttgggaaggagccaagacgaaccatgaatgcaagtgagtgtgttgcgcgaggatgtgctcttcagtgtgctattctcagccccactttcaaagtgcgagaattccagattggccctttccaaacctccaaaggagagaaggccaaactgaaagtgaaagtgcgtctcaacatccatgggaccgttacagttgattcagcaataatgctggaggatgatgtggaagttccagtttcatctgcaaatgaagctccaaatgatactatgaagatggacacagatgatgcaccaagtgatcctgctgttgcatctgatgtgaatatgcaggagcctaaaagcgctgataccgctgaggctgctcatgcagctgaaaatggaccacaagatactgaggaaaaatctgttccgatggaaactgatgcaaaggttgagccgtcaaaaaagaaagttaagaaaattactgttccggtccatgagttggtctatggggccttggctgcggctgacctgcagaaggctgtagagaaagagtatgagatggctcttcaagacagagtaatggaagaaacaaaggagaagaagaatgctgttgaagcttatgtgtatgacatgcgtaacaagctatatgacaagtacagtgattttgtcacgtctgaggacaaggaaggtttgattgctaagcttcaggaggttgaagactggctctatgaagatggcgaggatgaaactaagggggtttatattgctaagctagaagaacttaaaaaagttggtgatcctattgagctgcgcttcaaggaatgggagattagaagttctgctgttagccaactggtatactgcatcaatagcttcagagaagctgcacagtctaccgaccagaagtttgaacacatagacatgtcagaaaagcgaaaggtcattaatgagtgttcggaagcagagacttggctaatagagaaaaagcagcagcaggatgctctgccaaagcatgctaattcggtactccttgctgctgaccttaagaagaaagctgaaacacttgataggttctgcaagccgatcatgacgaaaccgaagccagctcctaagccgcagactccgcctgtggcagaaaaccaagctcctgagcctcagacaccagagcagcagcaatcaggtggcgaaagcacagccagcgagggagccgcagaggagcctcgagccgagcagatggagacagacaaacctgagggagccacagatccctcggcttagctttgccagtgatcaaacatttgtgtgattgaccctgttcacctgctgttatagtcggtaggggggagtgaactaagcgagaggttcgccacatttgatttgaggatgtgtgttgggacattcaaggtattctgtttcttgtccttgacaagggaggtggttgggtgtttgaaggataagagcagtggggtacactttctcacgtttttgtgccccacacgctcgatatctttattgatgatggtccgtaaaaccaaggtaaatggctattccaaaattttcgtgttttttactgtaacggtctacttaaaattttttttctgcaaaaacatcagtgtctgaacatttagttcgttggttagaccatattcaacagtttacc

SEQ ID NO: 16295 - DNA, 3982 bp, Zea Mays
cgcgcctcgatgcctcgtgctccataaccaacgcccacagccagtctatactctagagccccccaacacagcacacaacactcgctcgcggcgcagcgcttcgctcgttgccaccgcccgcctttccccgcgcccgacggaagagccccacgcccccaccgccgcgggagggggaggggcgcggaggagcatgcgcgcaggctgtcaccgcggccagagaaagagaaggaggacctgcgccgcgcgcaccgcgacgagccgctctccgctggcacccacgccaaaaggcgaagattctcggccgagcccccgtcccttccaccatcccccgctgtaggtagccgccacccagatctgctcccctccgcacccgcccgccgctctccccttagattcgcaccacccgccgccatgcgtttgccgccgccgccgctgtgactgggctctcctcctttgtgaggcaggaataaaaggcggttcttgcgggcggttgccatggggtgcggccagtccaagacggaggaggagtacgccgtgcagcactgccgggcgcgctccgagctcctggcgctggccatccgccagcgctacatgctcgccgacgcgcaccacgcctacgccgagtcgctgcgcgccgtcggcgccctgctgcacgacttcctccgcggcgtccagtcgctgccgccgccgccgcccgagcccgcgctccgcctcccgctgcagcggaagggcgacggcctccccgccgcgtcgccgccgccgcccgcaatcgcgtcctcctcctccgccgccaagcaggtccgcatcgcccccaacgacggccatatccagttctccgacgacgactccgattccgatgacggacacatcaagttccactccgacgaagagcccgacccggctcgccgccgcccggatgtcgtccactcagccggggcgcctggtcctccgccgccgcagatgggaccaccctattcctccgggtatgctccgccgccgtatggtcctggatacggctacgggtacgccaatgggcctgggccgggtcctggtcccgattatggcggtattggcatgagcagcggcggcggcggtggttacgggcaaagctatgggggcatgggtggtggtggcagcggcggcggtgccggctacaatgaccagagctatggtggcatgggcagtggcggcggcgctggcggctatgaccaaggctacggtggcatgggtggatatgggcagagcttctttaacatcaactacgcgcgcagccagccacctccaccgtcaatctcgcacgagcaacgcctgcaggccactaacgccagggtccactactattccggcattggaggatgaagacatggaggtagtcaaggaagcttatggtgatgagaagcacccaatgaagggttacatgggaaacgggaaggcgacaaaggaagatggtaggagcagtacgagagatgaactgccccgcaagtccaagtcatctgaggccagcagtagtgggagcagcttggagcatgacgtgcatgtagtagagaagagtgttgtcggagagcaagttcaacactcagagccacagcagcatgttgccggtctgccacccacaggatcggacaagatatacatcgatgacactgaggtggtggtggagatcaggactcaatttgagcgtgcctcacaatcagctagtgaggtatccaagatgcttgaggtcggaaagatgccttactaccagaagagttcaggtttcaaagtctctgcaatgatggtctgtggtataccgacaatggaggaggagtttctgcgttttgaagaggacaaggcgatgggatccggcaacctctcctctacgctacagaagttgtacatgtgggagaagaagcttcttgaggaagttaagacagaggagaggatgcgggtactgtatgacagaaaacgtgaggagctgaaaatgttagatgagaaaggtgcagaagctcataagcttgaggccactgagctttacatcaggaaactatcaactaagattagcatagccatccaggttgtaaacactatttcagaaaagattagtaagttgagggatgaagagttgtggccacaaacatgtgagctcattcaagggttgatgaggatgtggagcgttatgctagaatgccatcagatacaattgcatgccatatcccaagctagatacatagactccatgatagacactgcaaagttcggtgatgatcatatggacttgatcaagcggttagagcttcagctattggattggattgcttgttttgctgcatgggttagcgctcaaaagaattatgtcaaaactttaaataagtggctgacaaatggtgtcatctatgtacccgaggaaaccgaggacggggcgcctccattttctcctggaaggttaggagggccaccgatattcgtcatatgcaataactgggctgccagtgtggacagggtatctgagaaagaagtggtcgaggcaatgcaggcctttgcgtccaacgtcctgaacctctgggagaggcacaggtcggagcaaaggcagggtctgatggcgaacaaaggcatggacagagatcttagggtgatggaaagagacgagcaatcgatgcgcaaggctctggaggcacagaacaagaagcttgtgctcatttcgaaccagggcagcgtgtccttgtctgcacaagcgttacatgagcgaggccctggcgctgaagccggtggtagtctgcagacaggtctgaggaatattttcgaagcgatggagaacttcacctctgcatctgcaaatacgtacagggagctccatcttcgcgccgaagaagagaaagcccgggttgcgcaggagagcggcagcgtttcctagttccacatgaggacatgagcatttgtcggtggaaagaagggggactaacgccagtggcagcgtttctacggcacagtggcacaaccaacccctagtggcagctgatgcaccttgctcgccaggtgcctcagttttttgggttccaagctctctctgatgtagaggcctgtggtacttggtggagttaacaggttgtgacatgggggtgctgcatttctttgatcgggatgaacaggcattctcctcagaccgtaattgggaagcgcagttgtgaaattaggtaatcgccagacacatcctggtagttgggagaccccgcctgaagggaccgagtgaagagcagatgcccttgtgcatctgagaagccgcagatgatctcttagttcagatgctgttatcatgaacccaagattcatggaacgctcccaatcccatgcatgtcagcgcccaacacacagggaagaggccaggctaccaggtttatcagaagctgtttcaataaccgcagaattttttttcccatgccaatgcacactgtacagaggtgatgcgggacgaatcgagctggagccttgtgtccgctgccgagaagcccgagacgatgtcgctttgagcttcctctaaggtgttcggactgcggcttcgccgtgccaccgcgctggaagtacactcgtagggtttagcagagttcgatgagcttgtagggtagacgccctgaccccgttctgttgcagatcatctaaccaccgctccggatttgtttttttgttttattttgttttgtttatttaatatacatattaattcatttgtagcaccccccgtgtacagcagctgctggctaacttaaacctgctgtgccatattttattcattctattcacaccctggtttgccaatcttgtggatcgctgaaagctccgagccgcctgtggtgatcgcccgttgggtgtaggtgtaataaacggtagttagcggtagagcattgcgatggtgagtttagctatggctccccttccgttccgtctcgcatcgcatcagacgttctcggagcgcgggcatcgtggccagggtacagacagcagcttgtcg

SEQ ID NO: 16296 - DNA, 7886 bp, Zea Mays
cgcacaccccccatccctccgcccccgccctcctcctggctcgccagtcgcacctccccgcccccgcccctcggtctctccgcctccgccccgccgcctctctccgcctccttctctgctccgccccgccgccgcaaggatccaacacccgcgcgtcgccttctccgctgtctttcttaccgagattttccaggagttttcttccctttttatggcactgtgcgtttgagaaggtcttcaattgtgctgtctgggccacggaacgacaatgtcacagcttggattagccgcagctgcctcaaaggccttgccactactccctaatcgccagagaagttcagctgggactacattctcatcatcttcattatcgaggcccttaaacagaaggaaaagccgtactcgttcactccgtgatggcggagatggggtatcagatgccaaaaagcacagccagtctgttcgtcaaggtcttgctggcattatcgacctcccaagtgaggcaccttccgaagtggatatttcacatggatctgaggatcctagggggccaacagattcttatcaaatgaatgggattatcaatgaaacacataatggaagacatgcctcagtgtccaaggttgttgaattttgtgcggcactaggtggcaaaacaccaattcacagtatattagtggccaacaatggaatggcagcagcaaaatttatgaggagtgtccggacatgggctaatgatacttttggatctgagaaggcaattcaactcatagctatggcaactccggaagacatgaggataaatgcagaacacattagaattgctgaccaattcgtagaggtgcctggtggaacaaacaataataactacgccaatgttcaactcatagtggagatggcacaaaaactaggtgtttctgctgtttggcctggttggggtcatgcttctgagaatcctgaactgccagatgtattgaccgcaaaagggatcgtttttcttggcccacctgcatcatcaatgaatgctttgggagataaggtcggctcagctctcattgctcaagcagccggggtcccaactcttgcttggagtggatcacatgttgaagttccattagagtgctgcttagacgcgatacctgaggagatgtatagaaaagcttgcgttactaccacagaggaagcagttgcaagttgtcaagtggttggttatcctgccatgattaaggcatcctggggaggtggtggtaaaggaataagaaaggttcataatgatgatgaggttagagcgctgtttaagcaagtacaaggtgaagtccctggctccccaatatttgtcatgaggcttgcatcccagagtcggcatcttgaagttcagttgctttgtgatcaatatggtaatgtagcagcacttcacagtcgtgattgcagtgtgcaacggcgacaccagaagattattgaagaaggtccagttactgttgctcctcgtgagacagttaaagcacttgagcaggcagcaaggaggcttgctaaggctgtgggttatgttggtgctgctactgttgagtatctttacagcatggaaactggagactactattttctggaacttaatccccgactacaggttgagcatccagtcaccgagtggatagctgaagtaaatctgcctgcagctcaagttgctgttggaatgggcatacctctttggcagattccagaaatcagacgtttctatggaatggactatggaggagggtatgacatttggaggaaaacagcagctcttgctacaccatttaattttgatgaagtagattctcaatggccaaagggccattgtgtagcagttagaattactagtgaggacccagatgatggtttcaaacctactggtgggaaagtgaaggagataagttttaaaagcaagcctaatgtttgggcctacttctcagtaaagtctggtggaggcattcatgaatttgctgattctcagttcggacatgtttttgcatatgggctctctagatcagcagcaataacaaacatgactcttgcattaaaagagattcaaattcgtggagaaattcattcaaatgttgattacacagttgacctcttaaatgcttcagactttagagaaaacaagattcatactggttggctcgacaccagaatagctatgcgtgttcaagctgagaggcccccatggtatatttcagtggttgggggtgctttatataaaacagtaaccaccaatgcagccactgtttctgaatatgttagttatctcaccaagggccagattccaccaaagcatatatcccttgtcaattctacagttaatttgaatatagaagggagcaaatacacaattgaaactgtaaggactggacatggtagctacaggttgagaatgaatgattcaacagttgaagcgaatgtacaatctttatgtgatggtggcctcttaatgcagttggatggaaacagccatgtaatttatgcagaagaagaagctggtggtacacggcttcagattgatggaaagacatgtttattgcagaatgaccatgatccatcaaagttattagctgagacaccctgcaaacttcttcgtttcttggttgctgatggtgctcatgttgatgcggatgtaccatacgcggaagttgaggttatgaagatgtgcatgcctctcttgtcacctgcttctggtgtcattcattgtatgatgtctgagggccaggcattgcaggctggtgatcttatagcaaggttggatcttgatgacccttctgctgtgaaaagagctgagccatttgatggaatatttccacaaatggagctccctgttgctgtctctagtcaagtacacaaaagatatgctgcaagtttgaatgctgctcgaatggtccttgcaggatatgagcacaatattaatgaagtcgttcaagatttggtatgctgcctggacaaccctgagcttcctttcctacagtgggatgaacttatgtctgttctagcaacgaggcttccaagaaatctcaagagtgagttagaggataaatacaaggaatacaagttgaatttttaccatggaaaaaacgaggactttccatccaagttgctaagagacatcattgaggaaaatctttcttatggttcagagaaggaaaaggctacaaatgagaggcttgttgagcctcttatgaacctactgaagtcatatgagggtgggagagagagccatgcacattttgttgtcaagtctcttttcgaggagtatcttacagtggaagaactttttagtgatggcattcagtctgacgtgattgaaacattgcggcatcagcacagtaaagacctgcagaaggttgtagacattgtgttgtctcaccagggtgtgaggaacaaagctaagcttgtaacggcacttatggaaaagctggtttatccaaatcctggtggttacagggatctgttagttcgcttttcttccctcaatcataaaagatattataagttggcccttaaagcaagtgaacttcttgaacaaaccaaactaagtgaactccgtgcaagcgttgcaagaagcctttcggatctggggatgcataagggagaaatgagtattaaggataacatggaagatttagtctctgccccattacctgttgaagatgctctgatttctttgtttgattacagtgatcgaactgttcagcagaaagtgattgagacatacatatcacgattgtaccagcctcatcttgtaaaggatagcatccaaatgaaattcaaggaatctggtgctattactttttgggaattttatgaagggcatgttgatactagaaatggacatggggctattattggtgggaagcgatggggtgccatggtcgttctcaaatcacttgaatctgcgtcaacagccattgtggctgcattaaaggattcggcacagttcaacagctctgagggcaacatgatgcacattgcattattgagtgctgaaaatgaaagtaatataagtggaataagtgatgatcaagctcaacataagatggaaaagcttagcaagatactgaaggatactagcgttgcaagtgatctccaagctgctggtttgaaggttataagttgcattgttcaaagagatgaagctcgcatgccaatgcgccacacattcctctggttggatgacaagagttgttatgaagaagagcagattctccggcatgtggagcctcccctctctacacttcttgaattggataagttgaaggtgaaaggatacaatgaaatgaagtatactccttcgcgtgaccgccaatggcatatctacacactaagaaatactgaaaaccccaaaatgttgcatagggtgtttttccgaactattgtcaggcaacccaatgcaggcaacaagtttacatcggctcagatcagcgacgctgaagtaggatgtcccgaagaatctctttcatttacatcaaatagcatcttaagatcattgatgactgctattgaagaattagagcttcatgcaattaggacaggtcattctcacatgtatttgtgcatactgaaagagcaaaagcttcttgacctcattccattttcagggagtacaattgttgatgttggccaagatgaagctaccgcttgttcacttttaaaatcaatggctttgaagatacatgagcttgttggtgcaaggatgcatcatctgtctgtatgccagtgggaggtgaaactcaagttggactgtgatggccctgcaagtggtacctggagagttgtaactacaaatgttactggtcacacctgcaccattgatatataccgagaagtggaggaaatagaatcgcagaagttagtgtaccattcagccacttcgtcagctggaccattgcatggtgttgcactgaataatccatatcaacctttgagtgtgattgatctaaagcgctgctctgctaggaacaacagaacaacatattgctatgattttccgctggcctttgaaactgcactgcagaagtcatggcagtccaatggctctactgtttctgaaggcaatgaaaatagtaaatcctacgtgaaggcaactgagctagtgtttgctgaaaaacatgggtcctggggcactcctataattccgatggaacgccctgctgggctcaacgacattggtatggtcgcttggatcatggagatgtcaacacctgaatttcccaatggcaggcagattattgttgtagcaaatgatatcactttcagagctggatcatttggcccaagggaagatgcattttttgaaactgtcactaacctggcttgcgaaaggaaacttcctcttatatacttggcagcaaactctggtgctaggattggcatagctgatgaagtaaaatcttgcttccgtgttggatggtctgacgaaggcagtcctgaacgagggtttcagtacatctatctgactgaagaagactatgctcgcattagctcttctgttatagcacataagctggagctagatagtggtgaaattaggtggattattgactctgttgtgggcaaggaggatgggcttggtgtcgagaacatacatggaagtgctgctattgccagtgcttattctagggcatatgaggagacatttacacttacatttgtgactgggcggactgtaggaataggagcttatcttgctcgacttggtatacggtgcatacagcgtcttgaccagcctattattttaacagggttttctgccctgaacaagctccttgggcgggaagtgtacagctcccacatgcagcttggtggtcctaagatcatggcgaccaatggtgttgtccacctcactgttccagatgaccttgaaggtgtttccaatatattgaggtggctcagctatgttcctgcaaacattggtggacctcttcctattaccaaacctctggaccctccagacagacctgttgcttacatccctgagaacacatgcgatccacgtgcagctatctgtggtgtagatgacagccaagggaaatggttgggtggtatgtttgacaaagacagctttgtggagacatttgaaggatgggcaaaaacagtggttactggcagagcaaagcttggaggaattcctgtgggcgtcatagctgtggagacacagaccatgatgcagatcatccctgctgatccaggtcagcttgattcccatgagcgatctgtccctcgtgctggacaagtgtggttcccagattctgcaaccaagaccgctcaggcattattagacttcaaccgtgaaggattgcctctgttcatcctggctaattggagaggcttctctggtggacaaagagatctctttgaaggaattcttcaggctgggtcaacaattgtcgagaaccttaggacatataatcagcctgcttttgtgtacattcctatggctggagagcttcgtggaggagcttgggttgtggtcgatagcaaaataaatccagaccgcattgagtgttatgctgaaaggactgccaaaggtaatgttctcgaacctcaagggttaattgaaatcaagttcaggtcagaggaactccaagactgtatgggtaggcttgacccagagttgataaatctgaaagcaaaactccaagatgtaaatcatggaaatggaagtctaccagacatagaagggattcggaagagtatagaagcacgtacgaaacagttgctgcctttatatacccagattgcaatacggtttgctgaattgcatgatacttccctaagaatggcagctaaaggtgtgattaagaaagttgtagactgggaagaatcacgctcgttcttctataaaaggctacggaggaggatcgcagaagatgttcttgcaaaagaaataaggcagatagtcggtgataaatttacgcaccaattagcaatggagctcatcaaggaatggtaccttgcttctcaggccacaacaggaagcactggatgggatgacgatgatgcttttgttgcctggaaggacagtcctgaaaactacaaggggcatatccaaaagcttagggctcaaaaagtgtctcattcgctctctgatcttgctgactccagttcagatctgcaagcattctcgcagggtctttctacgctattagataagatggatccctctcagagagcgaagtttgttcaggaagtcaagaaggtccttgattgatgataccaacacatccaacacaatgtgtgcatgtcacatctttttgttctagtacatacatagaaggatattgcttggtcttgattgatcatgtctgatttaagtcgactattatttcttggaattttcttttggacctggtgctatggttgatggatgtatattggatatgtgcgttctgccaggtgtaagcacaaaggtttagacagaccgagagcaagagcgagtgaacctgttctggttttgcagtggttcagtaaggcagaaagttgttaaaccgtagttctgagatgtattaccagtggcgccatgctgtacttttagggtgtataatgcggatacaaataaacaatttagcggttcattaaagtttgaactcaaataacatgttctttgtaagcatatgtaccgtacctctacgtgaaataaagttgttgaattagcattcgacatcagaatttgttaggactaggttttgtatggtttagggaggtgtaatagtgtcacacccggatttcggggcatcaagacccgggcgcgaacataatcatcaggtataatcatcaggtgtgctgggaccaagtctcacacatatgatgaatcatggcacatgatcgaatgtcacatctttactatataatcg

SEQ ID NO: 16297 - DNA, 767 bp, Zea Mays
ccccccccccgcggcggcgcgggtagcactgccggctgcagtgcggctagccccgggctcggcctcgcggtaggccactggtgtgcggccctcggccaacgcagcctccggccgaagcgcggtacgtcgcggcgcgcgtgcgcggtctagcgaccaacagccccatacggagcaaccgcccgcgcatatgcaaaacgtaagtcttacaaggaaaacccgttcgctcatctttgtccatggagacgatgccattgaatatgaacaaaaattcaagaataatatcttacaagaaaatccgttgttgcatgctgtgtccttttatcgcttggtctctttctcagttggttgctgtagcgacccaagtctatgttcattagaacaaggaactcagcacaagtctttttctctgatctcgcgagcagtgctgataacatgttgtaactcagtgaaaacgagattcaagataatagtgcaaatgatagttgtgttctttattgcagggagaactctgtttatatacaggtgaaaggttgcgttctcaagggatgtaccccttgagaataatctgtcgcaccccttggattgatcacaaatacaatattttataacacaaaacacgggcttggatattattgccacgtttccgtgacctggctccggtttcccaaaggcgcgtaaatcccgtgaataattgctgcctgaagcccacgaagtacaatggatttgattcgaaaaattgttgctttttcactgtactatgctttttc

SEQ ID NO: 16298 - DNA, 1077 bp, Zea Mays
cacgggtccattctgatcctgccgctacccctccgcttccgccctctcgctttcgttgtcatgaggagcctcaccgtggcaagccgccacccgggcgccgctttctctacccgccgccgcccccttcttcaccccgccgcagccggaagggactcgaccttccagcggtgctggcgatgggaaaaaactcaggacagctccttcgggagctcactaaggaccagccgccttccaagaactgtgcacggagatattttgaagaatttgctcgcaccaactgctggtgctgtttcagttgagcaagctgaagctattgctgacctcccaaaaggtgaaatgtggtcggtgcacaagtttggtggcacatgcatggggacctctgagagaattcacaatgttgctgatatagtccttcgtgatccttctgagaggaaactggtagttgtatctgcaatgtctaaggttaccgacatgatgtataatcttgtaaacaaggctcaatcaagggatgattcttacattgctgtactggatgaagtttttgataagcatatgacaacagcaaaggatttgcttgctggagaagaccttgcaagattcctgtctcagttacatgcagacatcagtaacctaaaagcaatgcttcgggccatatatatagctgggcatgcaacagagtctttctctgattttgttgttggtcatggagagttatggtctgctcaaatgttatcatatgcaatacagaagtctggaacaccatgcagttggatggatacaagggaagttctagttgtgaatccgtcaggagccaaccaggtagatcctgactatttggaatctgaaaaacgacttgaaaaatggttttctcgatgtccggctgagacaataattgctactgggtttattgcgagtacacctgaaaacatcccaacaaccttaaaaagagatggaagtgatttctctgcagccataattggttcccttgttaaggctcgccaggtgaccatctggactgatgttgatggggtatttagtgcagatcccagaaaagttcatgctgccagctagaatctc

SEQ ID NO: 16299 - DNA, 353 bp, Zea Mays
ccgcatgcagcaacaaaatagctagtaaaaaaaaatttctcctggtgccggctggccgctcggagtcaaggtctgggcggtataaatccatctccttcttctttcccccacaaccacctctctccattgtcgcgaggaagcttggtccggcctgagtctgcgccccgctcgcctgccaggaaggtgaagacgaattgctgccagtggggaggagcaccagcgcgagggcctgtgcctcattgcggaaagccggggacggagttatgcagggacggcgcacgtagacttatcagaagcagcgacggctgggcagctcttcggtaagtgactcccctccctcgcacctgctcggc

SEQ ID NO: 16300 - DNA, 900 bp, Zea Mays
gtctcaaagatagagacagtagtttttcgactccacctggctgcatgggctgggcatgttgatgttgtgagatgcctttgcaagcacaaagctgatgtgggagctgcagcaatggacgacactgcagcacttcattttgcttcccagaaaggccatgtagaagtggctcgtgagctgctggcatctggggcctctgtgaaagccaagaaccggaaaggcttcacggcgctgcactttgctgctcagaattctcacctggatcttgtgaagtaccttgtgaagaaaggtgttgacgtcacagcaaagaccaaaggtggccagacagctctacatgtcgctgaggatgatgaagtgcgtgcgttcctgaaggagtgcgagcaatccttgaagaagggtgccgagctaccatcggagaaggatgattctgccgagaaagagggcgatagcaagtcttcaggtgaggttatgaaagatgaggaggatgcagagcagggcgagaagaggaaaagcgaattggttggtgcgtcgagtttgtcaggagcaaaaaaagccaaagtttctcttggtcatctagtttgtgaaaatgacatggacgaggaagaggagtgatttcgagcagccttgaccttgaggatgcaatagaagtgcacttcgatgttttgttatgctagtcttagtctgtacggcgatcttgaatgtaaagacaagtgcaaagttgaatctcagttctcatgtattgcatggatgaaaattctaagggcttgtttggtaggactctggctcctttgaaaacggatgtagctctggctcatttatttgtaggagcagctcctccacatgagtcactgtacctcaatttctgtaaaccagtttcttaaaaaaaaatgggtgcttttaaac

SEQ ID NO: 16301 - DNA, 1565 bp, Zea Mays
gccacatcgctggaccaccgatcaagcgagagatctcgaccatgaagctcatcaggcaccccaacgtcatccggatgtatgaggtgatggccagcaagacaaagatatacatcgtcatggagctcgtcaccggtggcgaactcttcgacaaaatcgcctcgcgtggaaggctgaaagaggatgacgcaaggaagtacttccagcagctgatcaacgctgtcgattactgccatagccgaggcgtctaccaccgcgatctcaagcctgaaaatctcctgcttgatgctagcggcacgctcaaggtttcggattttggactgagcgcactatctcaacaagtccgagaggatggtctgctgcacacaacctgtggaactcccaactatgttgctcccgaggttataaacaataagggctatgatggagctaaggctgatctgtggtcatgtggagtgattctctttgtcctcatggcggggtacctcccatttgaagattcgaacctgatgtcgctctacaagaagatcttcaaagcggatttcagttgcccgtcctggttctccacaagcgcaaagaagctcatcaagaagatacttgatcctaatgctaacaatagaataactattgcagagctcattaacaacgagtggttcaagaaggggtatcagcctcccagatttgaaacagcagatgttaatctggatgacgtgaactccatcttcgatgaatccggggagccagcacagcttgttgttgagaggagagaagaaagaccatcagtgatgaacgctttcgagttaatctctacgtctcagggcctcaatctcgggacgctcttcgagaagcaaacgggttctgttaagcgagaaacaaggtttgcgtcaaggcttcctgcaaatgagatactgtcgaagatcgaagcagcagcgggacccatgggcttcaacgttcagaagcgcaactataagctgaagctgcaaggggagaaccctggaaggaaaggtcagctggccattgcaacagaggttttcgaggtcacgccttccctgtacatggttgagctgcgcaagtccaacggcgacacccttgaattccacaagttctaccacaacatctcaaatggactgaaggacgtgatgtggaagccggagagcggcatcgtggaaggcgacgaggcgcggcaaaggaggtccccgtgatggggtctgcaaccaagttttagaagtagcgctgcagataactagtcatcagggagcctggcgggaactgagcctgtgactgcttcctgtttgtttggatgttttgtttttgtctaaggtgctttctgactaaagtatgctggataatgtgaatgaagaatgtgcagagttttcagcaaagtaaggttgtcggattttctttcgtttgtgcagtgttgcacgtggtggagagttgcccgttgctgacgaacttgctatcttgctagctagagcctagaggataaatatgaattcaaaatacgagtagaaatatcttaaagtctgataaattttgtagagaaaaatataaagatccaacacatcaaa

SEQ ID NO: 16302 - DNA, 1693 bp, Zea Mays
ccgaattgatacttgtgattaatcaccactgatcgtgactaattgtagtgcatagctgatcgctatggcaccgatcagcctaattaatcgcgatcattgcatctgagtttcaagtatgattcttaatctgatgagcgagactgcgaagtcatatgacatttctcaaccacttcaggaaatcaatgagtctgttagacttgcatttttgaattcctttctggactttgctggttatctggagaggtttggaggtgaactaaccgagaacagaccaaacaaagaaaacaattatgtctcaaatggatacataaatggtactagagaaacatttgttaacacagatggagatttgcacaaaaagctgctggttgttttgagtaacattgggtattgtaaagctgaactttcagaagaactttacagcaaatatagacacatttggtctccagtcaggaataatgaggagcgaagttctgacatgcgagacctgaggacttctttctctgcacttgaagagaaagtcctggaccaatatacttttgcaaagtcaaacttgatcagaagtgctgcacaaagttatcttttggattctgggatttattggggagcagcgccaatggtaaagggcattcgagatgcaactcttgacttactgcacatccttgtagcagtacatgcagaggtatactctggcgctcggcctctgttggagaagacaatgaaaattttggttgagggtttggtcgacatctttcttagtgtttttcatgagaataagaccaaagatattagattgttggatgcgaatggtttttgtcaactgatgcttgagcttgagtattttgagactgtactgcacacgtacttctcacctgaggcgcaacaggctatgaaatctttacaagagaatttgttggaaaaggcctgtgaaagtgttgcagaagccatggaaaatcctggacaccaacgtcgaccaacccgtggcagtgaagatacagcatcggatgacagacagccatcagtatcacctgatgatttgcttgtgcttgctcagcagtgcagtagtgatctgctgcaaggggagttggagaggactcgattgaacatagcctgtttcatggagtcgacccttcaaccaacagctgcgccagcaggcccaaagcctgccgcacattcttcttaccaagcacagcatgctcccgtccaaacgtcctcgcctagttttagaaggcagcagactggtacaagttcccctgtagtctccaggcggcgccggtgagcttagtgcatctttccatcattggcgtagcctcttcccggagtttccttccttttcccccctcacatgtgtgctttttttaatcacttgtaattgtcatcctgttgtcatgtgttacgaatttcgatccattcttttggtgttgtataagatgaaaaggaggagtacagtactggtgctgctgcacgggatcatggaattgtataatatcgacgagtcaaatattattgctgcttgaagataccaccacagctttatgtatatggaattctggagttgtcggtctgcgccaacttccttcctgcggtcgtcaccgcatgtttgtacattcgtcgcttggacagttttatgtatcccgagatttgttaatattgtatcagttggttcgtgattgttgatatgtctgcatgcttt

SEQ ID NO: 16303 - DNA, 295 bp, Zea Mays
atggcagaagaaagcgtcgtaaaagcttccgctggcgatgcagtgaagggtgggaaagtggaggagagtggcgagaagatggtgacaatggctaaggttccgttccacagcatgtttaagtgtgccgacagaacggacgttctgctgatgctggccggcatggttggggcgctgggcaacggcatgtcgatggtggtcatgacgatcatcttcgggcagatggtcgatgcctttgggggcgccaccccggacaccattgttccccgagtcagcaagagatatcatgttggacaat

SEQ ID NO: 16304 - DNA, 1475 bp, Zea Mays
ggacgcctaggcgttggaccaccgcttggacgcctttaaaacagtgcctgctgccatatggattggaaatatggcggattgaaaagttacaggctgttcctgttcccaaggaatcatatgggaaatttttcacaggagattcctacatagtactgaagacaactgcccttaagaatggttcttttcgtcatgatatccattattggcttggcaaagataccagtcaggatgaagctggtacagctgcaattaagactgtggaactcgatgctgcccttggtggaagagctgtccaataccgtgaaatacagggaaatgagactgagaaatttctttcatactttaagccgtgtattataccagaggaaggtggtgttgcatctggtttcaggcatactgaagtaaatgagcgggagcataaaacacgattatttgtctgcagaggaaagcatactgttcatgttaaagaggttccttttgcacgagcatcactcaaccatgatgacatatttattttagatacaaaatctaagatattccaattcaatggatcaaattcaagtattcaggagagggctaaagcacttgaggttgtgcaacatcttaaagatacaaaccatgaaggaaaatgtgaagttgcggcagttgaggatggaaagttgatggcagatgctgatgctggtgaattctggggtctctttggcggatttgctcctttaccaagaaagacattttctgaactcaacgggaaagattctacttccacttcaaaattgctttgtgtaaacaagggccaatttgcccctattgattgcgaaattctaaaaagggagctattagattcaacaaaatgttacctactagactgtggttctgaaatttatgtctggatgggtagagaaacaactcttgaagaaaggaaacgaggcggctcagctgctgaggaattactacgtgaaggaaaccggcaaaaatctcatattattcggctcatggaaggatttgagactgtcacattcaaatcaaagtttgataaatggcccaagaaagctgatgcagttgtgtcggatgaaagcagaggaaaagtggcagctcttcttaagcgacaaggatttaatttcaaggatccagcaaaagctgctcctgtaaagcaagagcctcaacctcagattgattgcactggcaacttacaggtttggcgcgtaaatggcagtgataagactttcctttcgttttctgagcaatgcaagttttatagtggagactgctatatctttcaatacacctaccctggatatattggagatgaatgtcttattggtacctggtttgggaagaagagtgtccaggtaactgtttaatgcattttctatttgctgtattgcacatatgattgatacattgccatgaatcttactcaacgtctcattatttagtgcatgtttgtactttatcaacaatgtgctttgtgttgt

SEQ ID NO: 16305 - DNA, 999 bp, Zea Mays
taatcaaatggtgggaatgggatggacctagaaaggaatttgaatctctgattcagaagccttacacaattgtctatttccactctgtggcatcattacaaccacagcctgatttaggattcatgaaacggttacaacagatactaggtcggaagcataaaaaaaatcttcatactatatacatactccacccgacactgggactgagaacagccgttatggcgatgcaactttttgttgacggggaggtctggaagaaagttgtatatgtcgacagacttgtgcagctattcagatatgtaccacgtgaacagctcaccattcctgattttgtgttccagcatgaccttgaagtgaatggtggaaagggcataatcgttgacccaagaacaaagcatatctaccagagaccatctggttgatctgtcataaacctgcaaatgaacgcttcacagtaccactctcactatgcacagactctccatgaatgactctgtccagtcctctgtagaagagtacccttctagagctgtgcattttgtatctagttgacattgttgctctgtgctattccttcgcctttttgggaggcatatttatgtatcttaataactattctgtataaacaaaaaaaatgctaaatgtctctcaatttgcctatagctgggcgtgctcgttaggttctgtaaatttttgacaggtccatagatattgagaaataggattgcagtctgttccgtctgagtaattgatcgccttggaatgtcttaataggctgaagactgatctgtttgctgttgcaaacaataagtagcaagtcccaaaggcgaggaagcataaactctggtctattttgcttttggttaactgcatgagatagtctgttaatttttaagattctaattgtgattctgagggtcaccgtccaaatatggtactctcggtaccctttattttttttttaccatgaacccattttggaggttcttgagttatttg

SEQ ID NO: 16306 - DNA, 1581 bp, Zea Mays
gtgaggtaatcccgcagtgcaggtgagcgaccggcgcctagcgttctgtggccgccgcccttctgccgtccgaccggaccaggtcgccgacgtcgcccctatcccgcacgcgtcatcgcagcgcctccgagtctccgccaagatctgcctcggccacggcgcggcgccgctggagctgcagccgtccagccgactgccttccgccgaccaccgaccaccgaccactggccgagccgccgcagctagctgcgctttgaagcatgggtcgttttgaacaagttactccagaaggccctgaaactaatcagcatgatgagcagcgctccatacgtttacatgcattttctgatctatcacacgtccctgcagccacttttatttatctcttaaaggactgctatggatatggtacgaacaaagcaacctcaaagtttaagatcctcatgcagctggtaaaagtggcattgcataatggtccacagccaggcccgttcacatatgttgtccagtgtatgtatattgtacctctgctggggaaaacttattctgaagggttcagccatatgttgacatcctctttaaagcacttgaaatctgtggaatcagcacagaaagatttcttggaggcaaagcaccttgccgcacaacttgttcttgatatccttgattctattgtaccccatgagaaccgcatattggtcaagcttcttgagacatttgaaattgagttgagagacatggcccgtgctttgtatgattcagagttggacgatggtgatctaatgaaagcacgtgaacatctcagacagcaagttaagcgctgtatggaatcagaatccaatgcacttgctgtgactctaataacacatttttccatccaatgctgtgatgagtccttcatcataaaattgattaaaaacaatcaattagagattgcagagcagtgtgctattttcatgggcaaggaaatgatatcgctagtcgttcaaaagtatctagatatgaaaatgctgaagagtgcaaacaaattggtcaaagaacatgaactcacagaagagtttccagatgttagctatttgtataaagagagttcagtaaagaagttggctgagaaaggatgctgggatattgcagaaactagggccaagaaggacacaaaactcctggaatacctggtatatttagcaatggaagctggttatatggagaaggttgacgagctttgcaagcgatactctattgaaggttatgttgattctttggttccggagaaggttttctgtgtatctgactacttagatctgaagaaattggatgtggaagaaattgtctgggttgatgagatcaatgggctgcttaatgcaacaagtgatattgaagcttgtaaaattattggcatggattgtgagtggagacctaatttcgagaaaaatactaaatctagtaaggagacaagtatgtgttgaattgattcgtcagcttgatcatagaggagcagattgttggatttggtaatctgcacttgacaagatggtcaaaagttcaacatcaaattgttaacagctagccatagaataattt

SEQ ID NO: 16307 - DNA, 2078 bp, Zea Mays
agggagagtgaaagtggtagtgattgggtctctattcatgtgatgagcattactaacaagcagcctatgcctgataaattatcctgggtaaagttctcatctatcagctggacgcatgacgggaaaggttttttctatggtcggtatccagcacctagaggaggggaagtggatgctggaactgagacaaacatcaatcttaatcatcagatatattaccatgttttgggatctgatcagtcagaggatatattgtgctggaaagatcccgaacacccaaagtattcctttggtgcctcagtcactgaagatggaaagtacatcatattgggcatctatgaaggttgtgaccctgtcaacaaattatactattgtgaaatttcttctcttcctcaaggaatagagggctttagagggacacaggatttgcttccgtttgtcaagcttattgacaattttgatgctcaatatcaagttgtggccaatgatggtgatgaatttacatttttgaccaataaaagtgcccctaagaataagctggtaagggtaaatatcaaaaatccagagctgtggactgatgttctctcagagcatgaaaaagatgtgctcgaatcagccgacgccgttaacaataaccaacttttggtgaattatatgtcagatgttaagcatattctgcagataagagaccttagaactggaaactttattcatcagttgcctttggagatcggttctgtttcagagatctcgtgcagacgagaagacaaggaagtatttattggcttcacaagctttctttctccaggcattattttcaggtgtaacttagcatctacaatccctgaaatgaagatgtttcgagaaatttcagttcctggatttgatcgcacaagttttcaagttaagcaggtttttgttcctagcaaggatggaaccaaaattcccatgttcataatgtcgaagaaagatatcgatcttaatggatcgcatccaactttgctatatggttatggaggattcaacataagcataacaccttcatttagtgttggtcgcgttgtgctatgcaagaacatgggctttgttgtctgtgtagcaaacattcggggtggtggagagtacggggaggagtggcacaaagctggagcacttgcaatgaaacaaaattgttttgatgactttgctgcctgtgctgaattcctcatttctaatggttacaccagttccagacgtttatgtattgaaggcggaagcaatggtggtcttctggttgctgcttccattaatcagaggcctgatctctttggatgtgctctcgctcatgttggcgtcatggacatgctccgttttcacaagtttacaattggtcatgcatggactacagactatggttgttcagataaggaagaagagttccagtggctcattaaatattctccccttcataatgtacggagaccttgggagcaaagctctggtaataactgccagtatccagcaaccatgttgttgacagctgatcatgacgatcgtgttgtgccattgcattcactgaagttattagcaactttgcagcatgtcctgtgtaccagcactgaggacagtccgcagacgaatccaataattggtcgcattgatcggaagtcagggcatggagctggcaggccaactcaaaaaatgattgacgaagctgcagacagatatagctttatggcaaaaatgttaggggcttcgtggactgaatagtgaattttgtccagcttagtgtggagatggtgagcaagattactctatgcagtcaaagtaaagtggctgtaaaagttatattgcttatgttttgctcttgcttggatgatcatccaccaaatagtatagtgtttatgcttcggtttgagataagggttcagggagcattgtcatgcttggcgttggtgcaccatttctttcatatatatcttttgattgttaaattttatacgttactacttcattgattctaaattataagatgttttggttttttcagatatattgtttttgttatgctatattgctatgtatactatatgtctaaa

SEQ ID NO: 16308 - DNA, 905 bp, Zea Mays
gcgcgaaggctccgacggcgacggcaagaaggtggatccccgctgccccaacgcgcccaacccgttccacgtctgcaccgaccactgcctcgccaagatatccgaggccggccgctcgtcggagggagccaagtcgccgatctcgctcttctcccgccactcccgccgctcctcctcgtcctccgaagcgtgaagtccgcggggagcaagaaggtggatccaaggtgcccgaacgctggcaatctgttccatgaatgcggtgagcattgcgccgccaagatgcagcggtcggagcagcagcacaagggggtcaatctcaagtcaccgcgcaggaaagtggggaagaacgctacagcgatcccaaactggaaggttgatccgaggtgccctaacgcgtccaatccgttccacatgtgcgcccagtactgcttcgaccatctgagtgaaacagcgcagacaagtgcagcaaagtcagacaagagacgaggcaagggcgtttctgaagacgagggaagaggagaaaccaaaaccaaccctggttgcgccaacgcgtccaacccctaccacaagtgcggtgaccaatgcaagagaaagggtggtggtgataggtagaccgtagacgaggaaggtaaatttttccgctcataactctcagtttcatcaaacggtcgtcggtcaattggtggcagcttgatggggaaaaaaagaacattctccagtttttcgcgagcatcaagccaaagttaggtggatgtcaatttaagggtagacaaacggtcatctggttaaaactgaggcattgtaatatgcttactacaggctagtgaagttcctctgccaaccgagtcagtcgttcactcatttgttatctttgagtaagagctgctgctatattgttagtggcg

SEQ ID NO: 16309 - DNA, 2308 bp, Zea Mays
gcagcggccacgcattctcccttccctggactattcttggtgggtggagagagccgcagaaggcagctggaagaggagaggaccgcgcgaggctccgtgccggcgagttcgggtgcttttcctgcggtccgagatgcgatcgttgggacccgggagatagcgcagctcgggttcgggttcgggggcggctaccgcgacggcggccgccacctgagcaggatgtttaactggaacgacgagcagcaccaggtaagggatgcaatatgggctgaattcaatgagtgtgatgaccattttgggctttgcccaaagggggcaaaaaaaaacccaatatttatttccggggtccccaaaaacaatgaggaagaggtggctagtattgctgccatcactgaacagtctgcaggtgttcaaaatggacatcaagggaaggaaaaagcagactgcaagtcacacaagtgcacatatttcacccacacaaattgacatggaatcctggcccggacttccttccctgaatcctacacttgatagaaactatagtgatgacaacatagcatccacatatctggatttttgtgctgcaaccagtttacaagaagtgaccagaaattctacagagcaactagatggtaaatcagaagtgtttggtaatgatcaagaagaaaagagtaacagtttccttgattgcgactggggcaatattggaggttttgatgattttgaccgtctatttagccatagtgactccatatttggtaatgagatagttgccaacgacagtgattttctttctgcatcttcgaatttgatggatactgctgtgctatcaatcccagttccggtcgaagcacataagaggccagtgtggtcacgtagaaaaccagaggaaagaggtaaaagtaaaatatccagcagtacaagtggcttctcccacagcaaagtagagagttcatcgacgaatttgcaaactcctatggaacctgtacagactcctcaatatgcactgttccaggatagcaagaagataggagaagttcagcatgctaatcagtttatgtttcctggatatgggtatcctcctgcatatccatttcctaccattccgttagtgtcaaacattcaagctgaaggctatcagacaaaaccagctggcacaagctaccgaacttcggaagattacctaaaacagtcaagttccacagaaatgtcacaagatataccatcaagaccactaacaatgacaccacaagaaaagatagaaaagcttaggcgccggcaacaaatgcaagcactgatagctattcagcaacaacagcaacagtttggtcaacagggtcctggcagtgacacaatggtgtctcaagcatacacccctggtaacaaaaatccggattccttagggagttcaattgtcatagatgaaaacacaaataagttggataccaaaactcgactatgcattcgagatagtttgcttcgtttggtccatagtgcaacagagagaaagattgatggtgataggagcactaacaagactaataaagatgaagatgaagcttcggaagacgcatctactaggaaaacaaggtctccaaacaaggaagcagaaacaaccactaatccaattgatcgtatagtggcccatttgctgttccacagacattgctccaaggttgcaaaagcaacaaaagaaataatatcgtcaatccccttgactctagaacctgagccgaaggtacccttgggaactcctagggttccatcaaaagatcaacgagatgagcaagaaattgtgttgcaaccatcacaataatgtgagatgtgctagaagataaggataaaaagttatgcaaatccagtgatgatggcagtcttatgatcgcctgtggccctggagatcgcttgtgtaatatgtagccatttcaacattgtaggatccttttattttcatcctgtaagaacatctcagattgtataggaacctacgattttgtgccgagccgtaaaaagagcaaaccttggctctggacataaggcgtgtttaggagcaagaggattaaagcaaaccttggctcttggctctggacataaggcgtgtttgggagcaagaggattaaagttgattgaaggggctaaaatccttttctattcaatttaaaatagtaagagagattttagtcctttcaatctttttatgatgcgtttggttgcaatgataagacgagacgagatgagataatccttcaaataatgttgtttggtttagggtcaaaggttgagataggattatctcagtgttgttcca

SEQ ID NO: 16310 - DNA, 954 bp, Zea Mays
ttttgacatcatggaatacattgcagtaccctgaggcttatacgtataatgggatagtagtggttcgaattgatgcaccgatctactttgccaacattagctacatcaaagacaggttgcgtgagtatgagctcaatcttccaagttcaaacaagggacttgatgttggaagggtgtattttgtgatcctcgagatgtcccctgttacatatattgattcgagtgctgttcaagctcttaaagacttgcaccaagaatacaaagcacgccatattcagattgccatagctaacccgaaccggcaagtgtaccttctgttgtcaagatcgggcatcattgacttggtaggagctgggtggtgctttgtgcgagtgcatgacgccgtgcaagtgtgcctacagcacgtgcagaattcatcttcaaatgcgttgaagctacccgtgcaggcatcaggcgtgttgaccgattctgtttcgactcctaaaccagagcagcagcatcaaaagcagcacggcctcttcaaggacctatggaaggcacaggacagtaacgcggatgctggtggtgaggtgcagccactgctccggcaaaaccttgtgtaatactcctacaaaatacggagtacttcctgggatggactcacgccctcgctggcctatacatatacgtgtttatttatttgtctatgttgttgttaacatggtatcgtggtgaacaaaagaaactgaacatgccattgttactgtggtgtggcgttttttgtacacttttgatacctaaatggaactcctatgatttgggtctggaaagggtgtgtgaagatgttttgttccaggttttggagttccgctcccagattggcttgacaagcatgttaattccatgaactctcttccacaaaaacagtacagctgattatcagttttatgtttagaatgagaaaatagccctggc

SEQ ID NO: 16311 - DNA, 551 bp, Zea Mays
cagtcatgcagaagggttatttatctgctttacaggtttggaggccaaccaggacaagaccaagtgccagcagcagttcgacgattacaaggaatgcaagaagaaagagagggaggctcggctggaacggaataaaaccagatcactctttgggtgaacaatggcgtcccacctgagcaatatgctggcggtgcaataagtctcctgctgatgtgagcgaaatcacggcttttttctttggtttcatgatgatcctctgcaacttgtgcaaggtagggaatagaaataccgatctcgagattgagggagatgtaagggcgtctgggaacagctcattaacacaatggctacggtgaatgaatcgaatgagcgaggatgtattttgagaacaaccaggcgtcatgaaacgacagtttgttcaataaatttgtattccacccctgtaacgattgtacttcaaaatatttccatgtgttcttagctgccttgcatccagctttttcgacctgccgtcctatgtggaagtggaagctcccctttcgaacttgttt

SEQ ID NO: 16312 - DNA, 1007 bp, Zea Mays
caagccgtcgccgagcagggtgcagggagagagatatggcttctatgatgaatgcttaagaaaatatggaaatgcaaatgtctggaagtattttacagacttgtttgattttttgcctctcacagctcttatagaaaatcaggtcttctgtcttcatggtggcctctctccgtcattggacacgttggataatattcgttctcttgatcgcgtacaggaggttcctcatgaaggacccatgtgtgatcttttgtggtctgacccagatgaccgatgtggatggggaatttcaccaagaggagcaggttacacatttgggcaagacattgcgcagcagttcaaccatacaaatggtctttctctcatttcaagggcccatcaacttgtaatggaaggatttaattggtgccaggataagaatgtagtcacagtcttcagtgcgcctaactattgttaccgctgtggtaacatggctgctattcttgaaatcggggaaaacatggaccagaacttccttcaattcgacccggcacctcggcaaattgagccagacacaactcggaaaaccccagactactttttgtaattgtggtggtgacattaacttactggtgttgatgctcctcttttccgcagcatcagggtctgtagatcatctgtccttagatatgggttccatgagcccgacctgtacgtctcccaattcttttgtttggagattttgttgccgcttaacgatctttatacaatatgttaaaaagttaaatgccattggatttttcttctttctgttgtacgtcgactttgtattatttgtagacggtgaatggaagtcgcagcaggaaagccagcccctgctatggttttgttttgatgtgcatcatatcatccgcgtggctgagtaaattatgtccagacgggtaggttttggtttgggtttgcagcatcccgatctgatgtgccctagtgctgtttaatgttggttggagccttctaccttgtggtcg

SEQ ID NO: 16313 - DNA, 1955 bp, Zea Mays
caagaataggcgtttgtcgtgtctcgtgcccgtgcctgtgaacctctcacgtgccgtgccggaatctcgcagccatcgatcgatccagcagatgtgccagccgccgcggccgcgccaagcccaagccgagctgacgatcctgatgcggttgaaaatttccacgaacatatagatcctcatcgtcgaccccatccgtggtgctcccggtgcgccaggctaccagagtccgacgcagacgtagctcccggccacagcagagcccacgccttgagcccttgacgcgctccgtgtgagtggagcgtacgggcgccggccggcggccagagaggaaacggatctaggaggctcagctgagtcgaggagatggaccgcaaagatgtcgggatcctcgccatggacatctacttcccgccctcctgcgtgcagcaggaggcacttgaggcccatgatggggcgagcaaagggaagtacaccattgggcttgggcaagattgcatggccttttgcagcgaggtggaggatgtcatctcaatgagtttgacggttgtcaattctctgctgaaaaaatacaagattgatcccaagttaatcggtcgcttggaggttggaagtgaaacagttatagacaaaagtaaatccatcaaaacttggctgatgcagatctttgaggaaagtggtaacagtgacattgaaggtgttgactccagcaatgcatgttatggcgggacagcagccctactgaattgtgtgaattgggtcgaaagtaattcctgggatggccgttatggtcttgtcgtttgcacggatagcgcggtttatgccgaagggccagctcgtccaacaggaggtgctgctgctatagcaatgctcattggtcctaatgctccaatttccttcgagagcaaatatagagcttctcacatggctcatgtctatgatttctacaaacctgatcttgcaagtgaatatccggttgttgatggtaaactatcccaaacatgctacctaatggctctagactcatgctacagacagttctgcaacaagtatgagaagattgcgggtaaacaattctcaatttgtgatgcagaatattttgtgttccattctccatacaacaagctcgtgcagaagagtttcgctcgactttattacaatgactttttgcgcaactgcagctctgttgatgatgatgctaaagagaagctccagtctttttcaaatttgactggtgaagagagctaccagagtcgcgacttggaaaaggcctcacaacaggtcgcgaagcacctccatgacatcaaagttcagccatcgactctgcttccgaaacaaattgtggtttgacatccactatgttttcattgaggctaaacaatggccagcatcccttcagcctatcaaacattgcttcagttcttgatgtcaccgagaagcttcagtcaagacatgagactttgcctgagaaattcgttgagacactgaagctgatggaacaccgatacggcgcaaaggacttcgagacgagcagagacacgagcctactgcagccgggcacattctacctcaccaaggtcgactccatgtaccggaggttctattcccagaagctgtccgaggaaacaggcggcgggaaaaccaagtgctgcaacggcctcgcaaatggccactagtggtcgcccagcactgttgctcatcattctcagtattttgataatgctcatggttagcgtttagtctagcgtgtttctgaaataatataattgttctttgaagctgtcccaccccacctagatcagctagttttttattttaatattttattcttctgaacattgaaattcatcagtctctacattgtttctctttgtttcttcttttagtactctcttcgttccaaattctaaattacgtacataatgtttgctatgtctaatagtaaaaaaaaagtcaac

SEQ ID NO: 16314 - DNA, 1973 bp, Zea Mays
ttcatccgttcgcctctgtgcctctttgagctcgcactcgctcgtgaacgctccccgacctccgtgttgtccagctcactttagcagttcagcctaggactctctgcgagtagcatagcagcagcttcttgcgaagcagaggcagagccttgtgttgcgttgcgtcttccttcctgcttgagcttattagttggctcgcgatggccggcggcgtggtggtgagctccggtgggggcaaggactaccccggcaagctcaccatgttcgtgctcttcgcctgcatcgtcgccgccaccggcggcctcatctttggatacgacatcggcatctctggaggcggagcggaaccagagcaaccagtactgcaagttcgacagccagctgctcaccatgttcacctcctcgctctacctggcggcgctcgtggcctccttcttcgccgccaccgtcacccgcgtggccggccgcaagtggtccatgttcggcggcggcgtcacgttcctggtcggcgccgcgctcaacggcgccgccaaggacgtgggcatgctcatcctcggccgcgtcctcctcggcgtcggcgtcggcttcgccaaccagtccgtgcccgtctacctctcggagatggcgccggcgcgcctccgcgggatgctcaacatcggcttccagctcatggtcaccatcggcatcctctgcgccaacctcatcaactacggcaccgccaagatcaggggcggctggggctggcgcgtcagcctcgcgctcgcggccgtgccggcggccatcatcgccgtgggcgcgctcttcctgcccgacacacccaactccctcatcgaccgcggctacaccgacgccgccaagcggatgctcaagcgcgtccggggcaccgacgacgtggaggaggagtacagcgacctggtggccgccagcgacgagtccaagctggtggcgcacccctggcgcaacatcctgctgccgcgctaccgcccgcagctcgtcatggccatcgccatccccatgttccagcagctcacgggcatcaacgtcatcatgttctacgccccggtcctcttcaagacgctgggcttcgcggacgacgcctccctcatgtccgccgtcatcacgggcctcgtcaacgtcttcgccaccttcgtgtccatcgtcaccgtcgaccgcctcggccgccgcaagctgttcctgcagggcggcacccagatgctcgcgtgccagatcgtcgtgggcagcctcatcggcgccaagttcggcttctccggcgtcgcggagatccccaaggggtacgccgccatcgtcgtgctcttcatctgcgcctacgtggccggcttcgcctggtcctggggccccctcggctggctggtgcccagcgagatcttcccgctggagatccgctcggcggggcagagcatcaacgtgtccgtcaacatgttctgcaccttcatcatcgcgcaggccttcctccccatgctctgccgcttcaagttcatcctcttcttcttcttcggcgcctgggtcgtcgtcatgaccatctttgtcgcgctcttcctgccggagaccaagaacgtgcccatcgaggagatggtgctcgtgtggaaggcgcactggtactggggccgcttcatccgcgacgaggacgtgcacgtcggcgccgacctcgagatgccctccgccaacgccaagctcggcggcatgcagtagccatggccgtccctcgctgctcatgttgttgggcaataatctacccatacagtattattcttggggctttaccgggaaatttgaaactcatcatcaatgtgtattataatcgtctcattaggtaggatgactggatgatgacaaatagtcaactagtcttcgtcccctgtctttttttttattctgtgcgggatactgaatgtggagtataattatgtttgcaacagatcaaaccaaatatgaatatcaattgcaagttgcac

SEQ ID NO: 16315 - DNA, 847 bp, Zea Mays
gggtgtgcgaaaccctgtgactgtgcagcaggcagggacgcagcaatattcacattctgaagtctgaacactgaattgagtatctgcacagcacaaggacgaacaagccggccctcgtccaccaaaacatctcagcggacaaggtcctgctggactacgcgtacaggcccctcatctccgggtgcggcctgcacaagctcctcgtggacgacctcgtcttctcgacgctcaaagccagcgccgccatggggtacctggcgccggagtacaccaccgtgggccgcttctcggagaagagcgacgtgtacgcgttcggggtcatcgtgttccaggtgctcaccggcaagagcaaggtgacgacgacgcatgcgcagctgcctgacaacgacgtcgatgagctcgtcgacggcaacctgcagggggataattactcggcggccgaggccgcccagctggcgaagatcggctcggcttgcaccagcgagaacccggaccagaggccgacgatggcggagctgctccaagaactgagcaccgtctgaaatctaatggaggtccaacaatcatccgctgtaactgtttcatgcaagagtcacatgccttttgtaacctagctacgtacgtaccctgtctaggatcaccagtcagtaatcgctgatcttagaaagaatctgagctagtaggctctactagttagctagtaatcgctgatcttaggaagcacatgtgcccatgatcatgagatcttgtatgctaatgatgtgtcgttaccaccgcttttgaaaagtgtgcattgtttggatgtgctctagtacatggtagtaatgtgaatgcagccatttcctgc

SEQ ID NO: 16316 - DNA, 1498 bp, Zea Mays
gtctaaaccatctcaatcggtgtttcataagcttttcttaaattgggttctttaaatgatgttggaagtgtagatgtcttctcttggataagctgtttggatcttcgcactctcgctgtgctgacaaattccaccctgtccagctcaagtgatccacataatatatctttccattacttaatacctgaaggaggcaacgataaattgtcctacctcaagctaaaagtcttgctacctgattcagatctcactgttactagtcagaagcaaatcaaggacaagctaaacgttgccactccagaaggaaattttctttggttattccacactgaattgtcaccctttcttatcgcaaaatctcagttgtcgaaaaagagatttgtttatatcgctgcagattccatcataaagggcaaagtcgaagatcttggtcgcatggaactaggcggttacgccattggcgctgttgaagattgcagcaagcgtctcagcgattatatcagtatggatgttcttagtgccatacaaagagcgggagctgcattcagttgggtgcctaaagaaccttataacgaggatgcatgcctacttgattttgacgtgctattgatggagcctcgcaagctggagaaaaccctgattacttccatcatgtggtgggctgatgccattcgtttagccaatcaaagggacctgattagactggccgtaactctgtccttcaatggcaagtacacgaggctaccttcaaactggaagcgcgcagatgatgacaacgctgatatcctcaacttcgatggacccaagaacgtctgttctgaagatgggcgccagcatgagcaaccaggctacggcgcaacctggcagcaataccttcatcagaaatctgaagccatactgagcacctaaataacggcacttcgccggacacaaattttccactgtcaccgagtggaagctgactgttggtattgacctgtaaaccctccatagaatgcattttgtactccagtactctattccagcacagaggaagcatgctctcgcttccgtatgtataattcaggatacaagagattttttttttggcggctgacgccggaaagttttcctggttccagttcagtttactcttttttttccatcgtagaacctcactaaaagcctaaaaggtggatcaattaccacgcccatatgagcaaatattgtattaaactgtatgataattgtgcagaaccatgccatcttaccgaccgcccactgcatccttggctccttgctatgcctggatccagcagtacccattcctggttggaattgacgagtgcgctagaattctattttgcttcaataagtcatgtggctcgatgcatcatatggcttggtgcaagaaaatcatttgttgttcttaaatgattttggatatcattggacactacaggagggtcaaccctgagcggaatttcaatctcctcaggttccagcaagacttgtaaca

SEQ ID NO: 16317 - DNA, 107 bp, Zea Mays
ggtctcttccgccgccgtgaaggacccctccgtggccagccctcctcgggtctgtactcgcccatttggctcttgttctggcttgtctttaacttcctattgctctc

SEQ ID NO: 16318 - DNA, 1137 bp, Zea Mays
cagcaagctacaacatatcgaagaacaaaggatcagaaatggctatgcaggccacaaggaggctagcgtctttgagcctccaacgacgcctactccttctctctcagaccgaggccccaagcatcccaaccgcggcggcggcggccttcctccactcccatgccaccagcttcgggtacaagcagattcgcgaagaggataagagcaaattggttggcaacgtgttcagcagtgtggcttccagctacgacctcatgaacgatctcatgagtgtcggcctgcataggctgtggaaggacaggcttatttccaagctgaacccctttccggcaatgaagcatctcgatgtggctggtggaacaggtgatgttgcttttcgtgtactggaaagaattaagagtgtgagtcacagagctatgcagggtacacttactgaaaccgaagaagacacccacatttatgtctgtgacattaatccaaatatgctaaatgttgggaaaaagcgtgctgcagaaagaggttatagcgaagagcattgtcttagctggatacaaggagacgcagaagctctgagttttgaggatggatctatggatggttacactattgcatttgggatcagaaatgtgacgcacattgagaaagctctatcagaagcttacagggttctaaagcgaggggggaggttcctatgcttggagttgagtcatgtggatgtccctgtttttaaagagatttatgatgtttactcgttttctgtgattccgactattggagagctggttgctggtgatcggcagtcgtaccaatacttggttgagagcatccgtcggtttccaaatcaggaaaagtttgctcagatgattcaggaagccggattccagagggtggaatatgagaacctcgtgggtggtgtagttgccattcattctggactgaaactgtagagctgaatacggatggatgttttttatcattcatgcgtgcaccgcaccttctaaaaacaataaattctacaataagcagtactcctgcaatatattttgttaatgttgtttttgaaatgaattctataacatcaaactgattttattacatatctcctgcaatatattttgataaagaattcatttgaac

SEQ ID NO: 16319 - DNA, 356 bp, Zea Mays
cttgcagccattgttcccatatccatgtctgaaatccatgtttggcgattaacgacagggcgcagggagctggttgttttgtcgggagcgcacacgattggagggaaaagggtttcgggagtcccagttgttttcgacaacacctatttcaaggtgctgctcgataataggccgccgcagacatcttcgagtaagtgcatcttcctcaccaattgcttttgattgatgtctatgcttttatcagaacttactgcgtgttcctctgtgaagaagctggcaatggcatggcggcgatggttgggctgcgcacggactgggcgctcactgaagacgacgagtgcttgagcttaatgacg

SEQ ID NO: 16320 - DNA, 2201 bp, Zea Mays
aagcgtgcatttactgtttccagccgaattcgctagattgcgagtgtttgtcattttctaatccatttgcagcagtagctaggctgtggtgcagaacgtttcggcggggggcgcagcgcagtggctcgagcacgaggccgataaattagcagccctcggccttggaaatggaatcccaaggcataatttagctactacccctacccccgcgcattggttccgttccatcccaagctaacacaggcatcgtatatatggcgggcgacgacggggcggacgcgtcggagcggctggagagcatcctgacggcggaggcggcggcgtcgccgtgggccgcggccgccatcgagctgcggctgctgacgcggctggcggcgcccgcggtggtgatgtacatgatcaactacctcatgtccatgtccacgcagatcttctcgggccacctcggcaacctggagctcgccgccgcgtcgctcggcaacgccggcgtccagatgttcgcctacggcctaatgctgggcatgggcagcgcggtggagacactgtgcgggcaggcctacggcgcccacaagtacgagatgctgggcatctacctgcagcgctcggccgtgcttctgtgcgtcacgggcgttccgctggccgtcatctacgccttctcggagccaatcctggtgttcctgggtcagtcgccggagatcgcccgcgccgcgtccgtcttcgtgtacggcctcatcccgcagatcttcgcgtacgccatcaacttccccatccagaagttcatgcaggcgcagagcatcgtgctcccgagcgcctacatctccaccgtcacgctggtgctgcacgtggtactcagctgggtcgtcgtctacaaggtcggcctgggcctgctgggggcctccctgctgctcagcctcagctggtgggttatcgtcgccgcccagttcgcgtacatcgtgatgagccccaggtgccgccacacctggaccgggttcacctggcaggcattctcgggcctgtggggcttcttcaagctctccgccgcgtccgcggtcatgctttgccttgagacctggtactaccaggtcctggtgctcattgccgggttgctccccaaccctgagcttgcattggatgccttgtccgtatgcatgactgtcaatgcgtgggtgttcatgatcgcagtgggattcaatgctgccgctagtgtgagagtgagcaatgagcttggtgccggccacccaaaatctgcctacttctcagtgtgggtagtgaccggggtctctacgctgatatctctggtgcttgccattgtgatcctctgcctgcgcaactacatcagctacatcttcacggagggtgaggtggtgtcaaacgcggtggcagatctctgcccactgcttgccatcacgctcgtcctcaacggcatccaacctgttctctcaggtgtcgccgttgggtgtgggtggcaagaattcgtagcctacgtgaacgttggctgctactacatagttggtgttcccctcggcgccatcctcggttttgtcttcaagctcggtgtaaagggcatttggagtggtatgattggaggaactttcatgcagacggctattctagtgtgggccaccttgagaactgattggaacaaagaggtagaggaagcacagaaaaggttaaataaatgggcggattcgaagacgacagagccccttcttgttggtttcggcgatggcaactaatttactgcaagggtggatggatggatccacatcatcctctggcttcaccatcgtcaccatcaggaatctacgaaggatcagaagagacgacggagccccttcttgccggcgttggcgatggcaattaatttactggatggatgaatggatccacattattctctggatggcttcaccattgtcaccatcaggattgctaataaatcatgcggagggttattttagccagtaccaaacgtatttcgaggactctatatttcaatttaataaatatgtaccatttataatgaataagatgagattcttcgtcattatctcttgtatttatgtgtttgtgctgttgcggtgaaggaacagaaaacgagccttccacatcttcctcacacctgacaggaggtttagttatctagatctagatttccgatgatactgttactcaatacgtcatcagctctgctctacctt

SEQ ID NO: 16321 - DNA, 2644 bp, Zea Mays
ccgaactaccgaaacttccgcctcgcagcgcgcccgcgcgtcgccgttgcctctagcggtctagccctctactactcacccgacctcccgcgcgacgccgaacctgcgagccataacgccacccaccgcctcgccgcgcagatctctggggcttatccctacccccgggctgtgattctcccgcctcctcaccgatgcggacgccggcgatgctccggtgggccgcggcgctcgcggtcctgctcgccgtcgccgcgccggccgccgggttctacctccccggcgtcgccccgaccgacttcgccaagggtggtccgcttccagtgaaggtgaataagttgacatctatcaagactcaactcccgtatacatattactcccttccattctgcaagccagatgccatagttgacagtgccgaaaatctcggggaggttcttcgtggcgatcgcattgagaactctccttatgtgttcaaaatgcgagagcccaagatgtgtcagattgtctgcaaagcaaagatcactgagaaagaagccaaggagctgaaggaaaagatagaggaagaataccgagtgaacatgatcctggacaacctcccgctagttgttcctgttaataggcaagataagaacagtattgcttatcaaggtggatatcatgttggtctcaaaggcgtgtattctggaactaagaatgagaaatacttcatccacaaccatttgtcatttacggtgaagtatcacagggatgataattcagaactttccagaatagtgggatttgaggtcaacccactcagtgtcaagcatcagattgatgataaatggaatggtgtagacactcgcttgagcacttgtgatcctcatgcaagcaaatttgtcataaactctgattctcctcaggaagttgaagctgacaaggaaatcatattcacatatgatgttcattttgaggagagtgagatcaagtgggcatcacgttgggacacctacctgttgatgactgatgatcagattcattggttttctattgtgaactctctcatgatcgtgctttttctatctggcatggttgccatgataatgcttcgcactctctacagagacatctctagatacaatcagcttgaaactcaagaagaagcgcaagaggaaacaggctggaagcttgttcatggggacgtattccgtcctccaacccactctgacttgctctgtgtttgtgttggcactggcgtccaattctttggcatgctcctagttacaatgatcttcgctgtgttgggtttcctttctccatcaaaccggggaggactgatgactgcaatgcttcttgtctgggtcttgatggggctgcttgctggctattcttcttcacgcctctacaagatgttgaaaggttcagagtggaagaagatcaccctgcaaacggctttcctgtttccaggggttgcatttgttattttcttcatcttgaatgctcttatatggggggagaagtcatctggtgctgtccctttcaccacaatgtttgcactggtcctcctctggtttggcatctcggtacccctcgtctttgttgggagttatcttgggttcaagaaacctgccatggaacctccagtcaagacaagcaagattccacggcagatccccgagcaggcttggtacatgaatccgcttttcactattctgattggtggcgtccttccatttggagcagttttcattgagcttttcttcatcctcacctccatctggctgcaccagttctactacatcttcggcttcctcttcctcgtgtttgtgatccttgtcatcacctgcgccgagatcgcagtcgtgctctgctatttccagctctgcagcgaggactacatgtggtggtggaggtcctaccttacctcaggatcctccgcgctgtacctcttcctgtacgctgctttctacttcttcacgaaactgcagatcactaagctggtgtctggcatcttgtacttcggctacatgtttctcgcctcctatgccttctttgtgctgactggcacaattggcttctgcgcctgcttctggttcactaggttgatttactcgtcagtgaagatcgattaggtgccaatatatgacagaatagcacgtgtttcagtgatggagacaagagaactgtaccattgatgtggattgggaattaccccccttcttttagggttttcagggaaaaaagtttcttcttaggatttagtttatgaattattatggtttgttgtcagattatacactttagggcttgttcgttttggtgataatccacatgtattgggtgggattgagctggtttaaatccataacaagtcaaaatccaccccaatcccactcaatacactccaatacacatgtaatatcaataaccgaacaagcccttagtggtttggaactgagaaaaaatataagggtaaacacattgcgaagaggctgtacctttttgacatttttttgtgcggctctatataaattcaattcattatgaccggtatgcttgtactggtgaattactgtaaggctccagggccagcatgaaataccctcatggcagctggctagaatgtaacctcagtttcttagaaatcagagttggcgcttcg

SEQ ID NO: 16322 - DNA, 2601 bp, Zea Mays
gactattgtgaatgtatatcttgatgtttgaacatggtcagtgccaactgtgaattctacgactttgaaggtgttgaatctctcttccaatgttctatcaggatcattaccagccaccatgggcaaatgtacctcagttgatctgagcgggaaccagttttcaggggaattagctatattgcgttcctgggatgggattgttgaggtcattgacttgagctcaaacaaactggtgggaagctacccaaatgatgtctcccagtttcagaacctagtgtccctcaaactacgaaacaattcattgtcaggatctctcccttcggtgttgggcacctatcagaagttatctgtccttgatctgagtcagaacgcaatcgagggatctgtgttacctaccttcttcatgtcaccaactttgactgtgttaaatctttctggaaacaaattttctggaactattccatttcagagcacccattcaacggaatcgatacttctttcatctcaatcggctctcaggattgtggatctgtccagcaattcattggctggaccattgccaccagatatctctaatctgcaaaaacttgagttccttattcttatgatgaatgaattatctggggagattcccagtgagataagcaagcttcaagcactggagtatcttgacttatcacataaccacctcacaggcagaattccggatatgcctcaaaatggcctgaaggtgttcaatgtatcttacaataatctagaaggaactgttcctaaaagtgttgaaaagtttcctttatcttgcttccgacctggaaatgacatgttagttttcccagatggccttcctgctggaaatgatgattacaccggagttgatcagggccaaacatctcatggacataaggctggtgttcgagttgctcttattattggctgcattggagctgtcttgctagttatctccatagccctagcattctatttggtaaggtctcaagagctttgcggaagaaatggatttagaggtcaaattactatcagggatctaaaggggagaataagccgtccaaatctgttcaggtcccccaaagacaacgttataccaagtaaaacaagcttctcaaatgaccatctcttaagagccgcaactagatcgatgtctgcgcagaaagagttattggctgaagcctctgtcgaatatggctacacagatccaaaggaagttgccgagtccacaagtttaggtgtgactgagacttcatctgcgatccaggctcacgagtctcctccacggtctgcattgccagcagcaccacattttgctgactctagattcctcgaggaacctgtagcttttgaagtgtactctccagaccggctggttggagaactgatcttcacggacagcactttggttttcacagctgaggatctgtcgcgtgcaccagcggaagttcttggaaggagcagccatggaacgacatataaagctgttctacaaagcgggcatgtcctgacagtgaaatggctgcgtgttggccttgtgaagcataaaaaggaattcacaaaggagataaagaggatcggcactatcaggcatccaaatatagttccatggagagccttctattggggccctaaggagcaagagaggttaattatttctgattatgtcagtggtgatagcttggcactctacctctacgagtcgactccaagaagatactcccgcctgtcggtttcgcagcgtctcaggatcgccatcgacctagctcgctgcctccagttcctacaccacgagaagggcctgcctcacggcaacctgaagccgactaacatattcctgactggtcctgatctcactccaaagctggtggattacggcctgcacaggttcatgactccaagtggcgccgccgagcagatactgaacctaggagcgctagggtaccgagcaccggagctggcgaacgcggggaaggcggcaccgacgttcaaggcggacgtgtacgctttcggggtggtggtcatggagatgctgacgcggaggagcgcgggagacatcatctcggggcagtccggcgcggtcgacctgaccgactgggtccagatgtgcagcagggaagggcggggagccgactgcttcgaccgcgacatcgccggcctggaagagcgccccggggtgatggaggagctgctggcggtctcgctcaggtgtatcctccctgtaaatgagaggcctaacatgaagacagtctgcgatgacctgtgctccatcataacagcgtgagtttagtttccccttccttgccttgccttgccttgccccagtgtacatgtaaccgatcggttttcccgtccgttggttggtccctattttttctttctttctcccggtgggttttccggagcccgtgtagccagggtgggttcgtttgattggtaactgctagtgtaaagaggattcgattcgatccacccccattgattgattgatatcccaaccattgccgtcttgatgagttggaacacctctgttcgctggtcaagttcttcacactgagcattttcccagctgcccgatactgtagctgcaacacc

SEQ ID NO: 16323 - DNA, 1171 bp, Zea Mays
gtcttttttttttccgaaaggagatagcctcagtcttttttcacgaaaacaggggagaacagatggaaaggcgatggtctgaacctccgctttggatctgttgggcagtgggctgctggagttatatccgccctcaaagggagtcaagcctcctccagcctttcctttcaaatcggatttgtttgctcaagttgcaagatggataagaggaccaaggttgcagtttgtgttgctgctgcacataacttactgtcaatgatggccgtgattattgcgtctagaaaaagaaaacgaaatgcaaggagcgcacagattacctatgcaccattgcatgtgagtggtacaggctgggatgaagataattttgttattactctggatgaagagcactataatggttatgttaaggatgacaaaagcgatgctgattgtttaaacaagccttttgaacactttgatgagatgcaaacaatatttggaaataccatggccacatgtaagtttgcaaaggattccagtgcaggtctaggtgaagatgatgaaactgaaaatgaagaggtgacggcacgtgctttcactaaaaggcagttcgcttgtgatgataatgtcgcaacatcttctgcaagcaagagcaacaagaaggcaaaaaaacgtgacagtgaagaggagttgattgctgcattcaaaagtgtcgcggataagctatccaatgctattgagaaggttgccacatgggacactgatgtaccagatgatctttttgacaatttgctaaaccttccaggttttgagcagacccacatatctctgtatttcaattatttggtggcgcaccctcacattgctagagccttcaacaagttgccgttcgaccacaagttaatttgggctcgcaatttcgccagtgagaagttctctagagtgtgagggtaattagtaggtagatttgggcggctcttttgcttgaaccacatcgaacaatgaattgtgggctaagtacgtgtggattttgtagaagccttgaacttgatattatgtgcaaggctaggacacattattatgtgtgctgtgtggagttaataatatgtgttttgtggacttaatattagttgtaacatatcctgagatgggggcaatggctataagctttttggttgaattccagtttttt

SEQ ID NO: 16324 - DNA, 3094 bp, Zea Mays
atgacttgcgccacccggagccccggcttcctccgcgaggccgagctccgcctcctccgctgcactctcccctcgctgccctcttccccgcccccacccgcttcccctccccctgcgcatccgctcggtcccgccgcggcctctgcgatcgctgccgttgaggccggcgactacgaggctgcgctcgccaccgccgcgccgcacttctttccggcattcgccccctctaggcctcctggctcagccgcgcagttctacgccgacctaggtgccgcagctcgggcgttcctgctggtcgatggggacggggcagcggcgggagaggggttcgattgcaggtgcgcagttgtgctttccgctgcagtggccgcgctgctcgcgttcacgcaacagaacgtgactgggcctccaaggaagtttcccacttttcctttttcaatgtcatcttttgatgaaagatgctatagtaatcttggagacacatgggatgcatgggcttctgacaatttagcttcttttggctctcatgttcatgggaaattttcactcttgcagttcattgtatttgcaaggcttttgtttaccagcgtacagagtctggatctctctgattgctggagcgtgtcatggtggttgtttagaatatcaatgttgcagcagaacatcttggatgagttatcatcgtctctgtttgatcaagtgcaagtgtacaagaataagatgttggatcattttggtgaactggaaaaggtttctacctactgggattgtttactgtctgatggagaaggttcttattttgtttcagctgctttcttagaggctggaatcgtggaatacaaatatggtcgggttgatgcttcaaggttgcatctcaatagcgcacaagaagcatgtggtctgcacctttcccttacagggatccttggtttccgaacaatataccaggtggatgcgaagtctcaaatggtgcttgttgcgaagaccaataagtcaggccctgatgaaggacaagtgacagaacccacagtagctcagaatgacaatgcagctttgaaaaatgcaaggagcttcgttcctgttgaagacgatgaattctgtgacatactaagaatgcccagactggtgcaagatgggagtaattctgccagtgaagacgccacgaaccccagtgcaaaaatatcactatcggctatacagcaggctgctgtacttgcacaatgcttgtatgtgagccggaggagtcgtgttgatgaaatgtctgggtgggagatggcaccatacatagagtcgattgattctcaggatgaatcttactttgtggtcaggagtttgtgcgatatactgcgtgttagatgggagtcaacccgcagtcggacaaagcagcgggcattactaatgatggagaatttggttgaagatatcagcaaagaattccctgctgccccacaaagagttaaaatggtttttgcggttcatatgccaactcttcctgcattgaggaaagaatatggtgaacttttgatcagttgtggcatagttggagaagcactggagatatttaaagatcttgaattgtgggacaatttaatatattgctatcgattgttaggtaaagtggctgatgcagttagtctaataaatgctcgactttctgttacaccaaatgacccaaggttatggtgttcacttggtgatgttacaaataatgatgaccattataaaaaagcattggaagtttcaaataataaatctgcgcgagctatgcgctctctggctcgcagtgcatacaacaggaatgacttccatacatccaaaattctatgggaatctgcattgtcgttgaactctttgattccagatggctggtttgcatatggcacagctgcatggaaggacaaggatcttgacaaagctgtggatgcgtttagtcgtgctgtacagatagatcctgagaatggagaagcatggaacaacatagcctgcctgcacatgattagaggaaaaagccaagcagcagtccaagcattcagggaagctgtaaagttcaagaggaatagctgggaaatttgggaaaattacagtaaagttgctttggacacagggaatattagactgacacttgaagctttgaaaactgtattgaatttatcctcaaacaagcagtttagtgttggtatattggacaaggtgatgacaatgcttgaagaacaatctccagattttgttgatactcacgaagcatcagatgatgcaaataaagatacaagacaatccaatcaattattagatattactggtgatatcctccagcagattgtgcgaagtggaggcagcaatgcagccatatggggtttgtatgcaagatggcataagaccaagggtaacctcatagcatgttctgaagctttgttgaagcaagttcgatcccttcagggctcaggattattgcatgaccaaatgaagttcgcaaagtatgctcaagcttccttaaagctttgcaaggtgtacatggaaatttcttcctcaactggaagccgacgagaattattaacagctgagatgcaccttaaaagtaccttgaaacagacgatggacttctcagacactgaggagtacaaagctcttgataactgtcttgaagaaataaagaacctgattgccgctactgcctaggttgttgcatccaagttttggacgctggttatgataatgtattgtccgtttctaattaagcatttctattgttgtcttgttgggaatcaagatcacattatcggactctgttagcacacacaaggatgccaagacaagtgaacctgcgccagagactggaagcgaagatggtgtgctgctacagccaagattaaaaaggaagcttaagcccaatagcaaggtgtccggcctagagtgggttcgttgactgtaatagtgtggcccagtcgttgtgccatatgtatggcttcagtctgtaaactgggacatcgaaaaaaagaacagaaaacactactgcctatcttcttcccctcttccaagtcttctccttccctgccgccgtcttgctttccccttcctcctggaagctaacagtggt

SEQ ID NO: 16325 - DNA, 776 bp, Zea Mays
ccacatctgcgcgggcgccgttcatcccacggcggagggcccctgccaggactgctctgccagacctccctattccccatggcgagcctcctgtgcaccccctccctttccgacgagtgcatacgcatagccgcatacaggtgaatcaatgccgagcgcaaacgagagttagataggagagacagtgtgggtcgctgctgttgctccccgctgcctccgttgaactcgtgacgccttcgctgacgggtcttggagatccgcccttgtgcggagctcgtgttggcaggcttcctagttcgcgtgtggccttgatggatcgacgatttctcgccggatttggaaaccagccatcctgtcgctccccctccgtcgacttcatatcccggcatgccaaatccaggtatggagcatgcagcggaattcgcctccgtcttctctgcgcctagcacctagttaatttcgggttcgtgcgcttgggtgctggcgtgaatctcgcccgccatggcgtcgccgccgcgcgggctggcgcaccgccgtctccgaccggggtgagggaaacgtggggccattgatctcgtgtgtagcggccaagatttggtgttagagtaactcgtcgtgaagtcaaatctggaccataggtgttagatccgaccgctgctgtcgagtaccggttcattcgtcggggatctaatctgggtcgtctgttttgatctgacggctcagatcaagtgtttcccctaggccgcgcccattttacataagaaccctcgctgtta

SEQ ID NO: 16326 - DNA, 2397 bp, Zea Mays
actggtaatccttgtcaagtgtcaacccaaccgtccacggtccgccctcctccttcgttcacgtcttcctcctcgcgttcctctcgtcagtacggcgacgccgcaaggctcgcaccgctgacagtcccccttcccggatcgagcctctcttttcccagatcggattctaatttggctatcgccgccgccctacgccaggtgccgagtccttagctgatcttcgccggcgaggagcgcccaccaggagttacagattgaatgacaagaatgttctctatatcatcctcagtatgtgtgaagaaatagtctgtaactacacatacctttcattgcaattaccaagaactggaaatggacgatgataatgggcttgagcttagtttgggcctatctttgggcgggtcatcagggaaggccaaggctagagatgcacctctagaaccaaaagcagaaccccaagtggaagaaagcagtagcaaaggtggtttacaaactcctgatgctccttctgggaaattttatcaaaagagcgctgataaccatgaacaaaatagtaaacagaggcacagccctgttgcaccacaatttgggaacttctggggacaaccagggaattcctccggtccagtggtagatggttctgttgaaccggtgagtcatcagcctcagctttccagttatcaagatggaaggatgccaattaacagtggaaataattctgaggagcagaagccagtttctggtaaccacaagttgccttctgaagagatgaactttcagaagaaacatcagacagctagtgaccagcctgatgcattcagtaagagctctgacggaggtgcaaagaatgcacctatctcgattagtacggatgatggttcaactggtgaaaatgaggatgttgcagagtcagaagcagaaggctcaaattcttggttggttgcacagcgtgaagacagtgctaagggctctgttgttaacaaaggaactgataggaaaaggtccgccgatgctgctgcagatggttttaaaggaaagagacaaccaagtttctcaggaagcgagtccagctctggaaagttgacacctggaaatcttatatcgatgcaggcatcaaatgtagtggctttgccatatcaagtcccaggtcaagtttctggacctcctgtcttaactaatgcaccaaattttcacccggtatgtactgtgcagttgaggccgcccacaaatggtggactagctgtccagacaatgggtagtgcctctcaagttgcttttggttacccagcagtccagctaccaacacttgaaacgggctcttcatgggcatttggtgctccacctcaggctctgtcttcttttactgcaaaagacaaagctgatcaaacaggaaccaagcaagttgacgatggcaagaagccccaggaggcaggtgcttcctcgtctgctcatgctgaagatgagaaaaaggctgatagaggactctctcttatgggttctgccataaggccaggcatcgcaccaaatgtcaaatttggagggtctggatcatatccggatcttccctgggtttctaccatcggcgccggaccaaatggcagaaccatatcaggtgtgacatacaagtttggtagaaatgaggtaaagatagtatgtgcttgccatggcactcacatgtctccggaggagttcatgcggcatgcaagtgcagatgctccggcccaagataatagtgcaaccctgccagcattccctgctggtaaccaagccacgtctgcagaaaattagacaaatggaactgggtgataaggcggtcggttttctgctgactctgacaagcttaaccttatttacatactacacattctgggtcatcattttgccatttgtcgacagcgaccactttgtgcacaagtacttcctgcctcaagagtatgcgattttgataccggtactggccggcgtggttctcctttcgttcttgagcgtgtttgtgggccttgtgatgctcaaatcgaagaagaagaagacggcttaatcgggtttgccatgtacactgctgtgtcattcacttagtgtgatgaaatgcatgagttcgcagtatctaattgctagaagctcggttctgtaatcagttccgtcatactttaaaggtctttactttgtcatctggatgtgtgttttttttattctggtggtcaattaaaagcagtgttcatcaaaactctagttagaggtcacatatcgttagccattattcggaccgaacagcattttgaagagtgaacgattgacagtggctaaaagacgaccgctcactcatcctcttcacagctgtcgggttggtatccaagcgctgatgatgcagaggcaagattctggcgtgcaaaaaaaaac

SEQ ID NO: 16327 - DNA, 703 bp, Zea Mays
tgatctctcgtagctgttgcctgaaccggccggtcctgtgtcaagaagctgcagagggaagggcatctcgacgccatcgttgaccgcaacttgaacagctgttacaacgggcaggaggtggagatgatgatccagatcgcgctgctctgcacgcaggcgtcgcccgaggaccgcccgtccatgtccgaggtggtccggatgctggagggcgagggcctcgccgagaggtgggaggagtggcagcaggtggaggtgacgaggaggcaggactacgagcggatgcagcagcgcttcgactggggcgaggactccatctacaaccaggacgcgatcgaactgtccgccggcaggtgacgacgtcgggtcgtcacacggagcttgtcgtcgtcgacgtcgcagtgccgacatgtaactgtatatgtaaggcattgttgcgaagcttgttagcaaaatataatctgtgacactcacttagtgttgatacgtgcctgtattttattatttgtgtgtataaggaaggatgatttaaacgggttcaggtgtttaccggttgtccggctcccatcctgtaaagctctatataggggggtggggaccggttgaaaccacatcacatgcaagctgcaagaattggcttgacaaatatttaacgaactctattgtcgacataaaaagtaagtgataaacgaactctattgtggga

SEQ ID NO: 16328 - DNA, 922 bp, Zea Mays
gagtcgatccgcccgtacgtctctctcttgttcctctccggcttttccttcccctccgcctccgccacgccacctcccctcccctcccgccgtgcgccccgatccctcgccgccccacgccggcctcatctcgccgaggactggatcgccggggggtacatcccattactaaaggagacatttatgttcccacaaagcttgggcattttaggtggaaaacctggtacatcaacatacattgctggggtacaggatgatagggctctctacctagatccccatgaagttcagatgacggttgacattgcactggataacttggaggcagacacttcctcataccactgcagcgttgtccgagccttagctctggaacaaatagatccctccctggctattggtttttactgtcgtgacaaagacgactttgatgatttctgttctcgggcctctgagttggcggagaaggccaatggcgcgccactctttactgttgtgcagtcaatcgagccatcgaaacaaatgtataaacaggatgatggactgggttgttctggcagtagcatggccaatgacgacgaccttgatggctctggtgaagcagaagagtggcagatcctttagacgaggctaagacatgttgggctgaagaaaaaaaaacttgcattgaaaatgttgtctgaatgccctcgtctgcgtgtgaatagaggggattatttgtgtgatctcggggtggaaatgttcagaacatacactcgtagtcgtggatgataataattaaatgtatttattattccatattctaacatcgttttaccacggcgtggttgtttctcaattgttggctacagttgcacctgccaaaaagtttgtggtgttggtatgttacatttgcaatgccaacatatcgctgtttgatgtg

SEQ ID NO: 16329 - DNA, 495 bp, Zea Mays
tgataatatagaagatcatgtaaaatcccagtcccattctatggcagacattccaattacaaatggagtgaggaaacactaccgagatggagcttttgttaaagcaagttccttttctgcatcttcaggtcatgatgcaatgcaaatgctcaagtcagagatgcaagatcatggatttcattatatgccacctaggaaaccaaggaaatcagatggttatcttcgttataggcggcggcggctaagtggtggctttatttttgttgcacatgctgattattacttgttgctacgtgcttttgcaaagcttgcagaaattgatattcgtatcatgcatattagtgtgttgaaacttgagaagagactcgcatgtattgaggagcgaattgaaagaagcttgaacaccttacataacttttctactggaacagtagatgagctaagatctgtatctgactgaagttcctagtgtagtctcatactctgctagcatgg

SEQ ID NO: 16330 - DNA, 1953 bp, Zea Mays
gcgcgcgagctcctcccctgtacccctacctctccaccccctcctcgtgccgtccacgcaccaccggcgcgccgcgctgccatggccatgaggccacgcgccgcgctcgccctctccctggcagccggcgtcccgctggtcctcctcctcctcctcctcgcgcccggcgcgcgcgccgacgacggcagcggcgggtgcggggcggcgggcggcggcgaggcggcgccgggcgaccgcgcgcgggccagggcgctgaagatcgcggccttcttctccatcctcgtgtgcggggcgctgggctgctgcctgcccgtgctggggcggcgcgtgccggcgctgcgccccgacagggacgtgttcttcctcatcaaggcgttcgcggcgggggtcatcctggccacggggttcatccacatcctccccgacgcgttcgagaagctcacgtccgattgcctctccggcgggccgtggcaggacttccccttcgcggggctcggcgccatggtcggcgccatcggcacgctcgtcgtcgacaccgtcgccacgggctacttcacgcgcgtccacttcaaggacagcgccgccgccgccgtgggcgccgccgccgtcggcgacgaggagaagcagcagcagcaggcggcgtcggcgccgcacgtcgacgacggagcagacggcgacggccacggccacggcgggcacgtgcacatgcacacgcacgcgacgcacgggcactcgcacggcgcctcggcgctcgtggccgccgtcggcggcgccgagggcgacaaggagcacgcgctgcgccaccgtgtcatcgctcaggttcttgagcttgggattgtggtgcactcggtgatcatcggcatctccctcggcgcgtctcaagaccccagcaccatcaagcctcttgtggtcgccctcagcttccaccaaatgttcgagggcatgggtctaggcggctgcatcgttcaggtaatcatcatacagtccattgtcctaagatatacagtccattaatcggtctgctctactacgtaccttgatttgtctaagatgaccgcactaataagctcctgttccaaacaaattaaattagttaggaggtttaaaaacgaacagctaatgaactagctagtaatagtaattggaggtctaaaactagcagtctaaagcgaagtatgatttgatttggtatccttaacctgacgaccgtcagtcaggctgcttttgtgccgctacttttttttctgttagattagaagaaagtaccaaagcactgcacttcgggtggttcggagacatgcgctgcacaaaagctaggagacatcagacatggatgcccattcctttctttcgtgaatctactctacttaaaactttttccgtgtccactccacgcacgcgcaggccaagttcaagctgcggtcgatcgtgacgatggtgctcttcttctgcctgactacgccggtgggcatcgtggtgggcgtcgggatctcgtcggtgtacgacgaggacagccccacggcgctggtcgtggagggcgtgctcaactcggtggcggcggggatcctggtgtacatggcgctggtggacctgctcgccgaggacttcatgaaccccagggtacagagccggggcaagctgcagctcggcatcaacgcctccatgctcgtcggcgccggcctcatgtccatgctggccaagtgggcctagtttactagccacttttttgctctgtgccctctcgattccagtttttttagttgagttgctgtaaaaatactactgttatggagaaacgaacgaatacaacaactcttttttctgaaacccatcgcgacatggatggttgcttgcggatgcggagattttttttccttctcccgatcaatgtcgacacactgtcgccaccctttgtttttttgtttgcttgggaaaaaaaagagtacttcgaag

SEQ ID NO: 16331 - DNA, 645 bp, Zea Mays
gcccagtctaccggcccattaagcctgcccgtgtcgccctcgcccgccccccaaaccaaagggaaaccctcaccacgcttcccgaaacttctcctttctccatcctcaaccctactccccccttcatccgcacgaacgaagcagcgcgagcgaggagcagacgatccttcccgacctcgaagcgtacccccccttccagccgcagccatggcgaccgtcatgcagaagatcaaggacatcgaggacgagatggcaaggacacagaagaataaagccactgctcaccatcttggtcttcttaaggctaaacttgcaaaattgcggcgggagttgctcactccaacatccaaaggtggtggtggtgcaggtgaaggatttgatgtgacgaagagtggagatgcacgtgttggtttagttggctttccttcggttgggaaatcaacattgttgaacaagctaacagggacattttcagaggttgcttcctacgagtttacaactttaacatgtattcctggagttatcatgtataagggtgctaaaatccagcttctagatctcccagggatcatcgaaggtgctaaagatggaaagggcagaggaagacagaacctgaaccagtgggtacctctgaaaatgacctgc

SEQ ID NO: 16332 - DNA, 1274 bp, Zea Mays
gttcgctcctcgcaatgggagcggagcggagcggacccaaaaactcgaaaagtcgaaatccaaacccgctgatcagcttatccccttcgcaggagccaggacggacgaactgcgagtacacgagagaggacagaggagaggagacacaggcgacacgcgccatttgggagagggaaaggaatggagctgacgtcttcttcccgctccgtgctctcctcctgcaaccggccggtcgctcgagctctttgcaggacggcgtacccgggtgcaaggaggaaggagaagggaatagtatgtatcttgagcgaggagaaagaagtggtacaaaggacgatccggaggcgagctgccttttctttgttgctggcttcgccggtgctatcagtggcgttctcggcctatggaaagagtaaaaccatgaacccttacgatgaaaggcgtctgcttcagcagaataagaagattcaggaagccaaccgtgcccctgaggatttcccaaacttcatcagagaaggcttccaggtcaaagtagtgacaccggacaactatattacacgggcctctggactaatgtatgaggacattaaagtcggtacaggcgactctccaaaggatgattatattccattatgtgggctacaatgaagcaggacgaagaatagatagcacctatattcagggttcccctgcaaaaattcggttagggaacggaacactagttccaggttttgaagaaggcatacgggacatgaaaccaggtggtaagagaagaattataatacctccagagcttggtcctcctgttgggccttcgacgttcttcagtgcgaagcagttcgaagtgttcgatgtggagctactggcggtgcaggactgccagcggaggacgatagcattttactctgatgtcgtgtgcagctgagcttcggtttgtctagtcttccgcctatggcacatcgcagcagcatcctgcacttttggctgctggtctgagttgccgtccaattgtgtatatatatagccagctgttgttactgcggctactgatgatgggcaatggtagtgtgttattagttcttcatttttgtcttgaatctcctgatggcgggatatgcgcatttggtgtgtctgtttagaagttggcatgtgtaccttgatgttgaggttactcctggtcctacctctaccaaggactccacaccatctgactctgcttcttgttcagtactaattcttgcgagtttggtggcggtttttgtaaactattttcaaat

SEQ ID NO: 16333 - DNA, 1771 bp, Zea Mays
cgcctcctagaccgtccgatcggtgtcgttccagaacaatccgcctccgaatcaacggcgggctctgacaggtgacagccgctcgcgccgtgagccgcttacccgctataaaggcctccctccgcccaaatctgacctcttttctctctccccgtctgcctcgccctccacaccaggccacgccacacacaggatagcgagcgggagcgacggcggcggcggaggagctagggttttgatccggcctcgccggctaggctgcgccgccccgacgccgaagccatggacagggagcttctagagacgtttgacgcggccaagaaggcggccgacgaggcggcaggggacggcaactcgccggaggctggccgctgcctcgacgcgctgcggcggctgcgcgacattcgcgtcaacaccgacatcctcgtctcgacgcaggttggcaaacgccttcgaccccttactaagcatcctcactcaggcattcaagcagttgctgcagacctttttgggtactggaaaaaggttgtccttgaagagtcaggaaagaaaaatggcggctcagagaatgaaagatcaagtgactcttcaggaaaggttgagaaggtgaggcccgtgaagattgaaaagaactctgcatcagcaagcatgaagcttgagaaaagagatgtggatgttaggggtcagaagcctaacaatgtcaaagttgagaagactactagtaatggttccaaagctcaatctgtgaaggtggaaagggtatccaaagaagtcataaggactcctgactcgaagaggccagcatccgtccccaatggccacccaaagcttacatctcttgtcaaatgcaatgatcctacccgagataaaatccgggaactacttgctgaagcctttgtaagtgtttccagagagactagtgatgatgacagagacgaagtgaaaaacatcttggatgaagtcgaggcatgcgacccatacagggttgccgtgacagtagagtctgcactattcgagaggcttggaccttccactgggactcacagggcgaaatacaggtcaatcatgttcaacctgagggctgaaaacaataccgatttccggaggagggtcctcatcggtctagtggcgccggagaggcttccagacataccccctgatgagatggctagcgacgcaaggaagcaagagaacatgcagatcaaggagaaggctctgttcgactgcgagcgtggagcggcaccaaaggcgacgacggaccagttcaagtgtgccagatgtgggcagcggaagacgacttactaccagctgcagactcggagtgctgatgaaccgatgacgacgttcgtcacatgcgtgaactgcaacaatcactggaagttctgctgagtgttcagccttgctaaagtgtttacttagttgtgctgagcacactatcctgctgtgatgtgtgtgctctgttagttgtgactggaagttcgacagggcaggctgaacaactcaacttttttccccttttttaccccccgtaaactaggagcagttatcctcttcctctgtcaggcagcctcctgattcattcagattgtactagtcgaacgcgtgaatgttgttgacttgatcgcatcgtcaccagatgtgaatgttcttgggtggagttagaatagaatggtgccaagtcagacgatgctgatggattaaaaaaaaaagacatttcaatgcaaaaacaaaggctccagcatttccagtatcagcaacagttagaatcaaa

SEQ ID NO: 16334 - DNA, 1485 bp, Zea Mays
aaaacaaatttagctgttttttctttcgacgttttcgtccctacctcgcggttggggctcgcggctctcgcggcccgcctgtgctactgctgcacccgcacggccgcgcgcacctccaccgcaacggtcacttctagctctcgtgcagtcgtgcgtcctccatcgtcgcctctcctcccgcggtcagggtaacgccgcgtgtctcccgtcgcatactcgctcacacccatggccgcaccgccggccgcctcgctagtggcacgcgccgccctcccgccgcgccttcgcccaaccaccgcttctccccttggccccgccgtcctcggtcccagcagccgccgccggtacctccgtctccgccgctcgccatcgctggcggggactgccgcggcggcggcgagctccccatccgtgccttcctcgtttccggggcccgggccaggtatcggcgatgccctcggcgacgtcgaaatctactccgcggccaccggcgagcccgtcctgttcagagacctgtgggaccaggacgagggagtgtctgttgttgcgctgctaaggcatttcgggtgcccatgctgctgggagttggcctctgttctgagggacacaaaggagagatttgattctgctggagtaaaactgattgctgttggtgttggcactccagctaaagcccgtattcttgccgagcgcttgccctttccgttggaatacctctatgctgatcctgatcggaaggcgtataatctcttgggtctatattttggtgttggtcgcacgttcttcaatccggccagtgcgaaagtgttttcacggtttgactcccttaaggaggcggtgaagaattatacaatcgaagccaccccagatgacagggcaggtgtcctacaacaggggggaatgtttgtgttcaaaggtaaagaactgttgtacgcaaggaaagacgagggcacaggcgaccatgcacctttggacgatgtgctcaatatctgctgcaaagttcctgtaacctaacccgacggcttgtcccacagctcagtagtaggtacttggaaagcactttcggcgtccttgattcctgaacttccaggatcgcctgctgcaagagtgtcttctccaccaatgtgccgatattttcttttgagatgcttggtttactttgatatctttttggtgatggatcgtgagttgttggcttgttgcattatgaattgcgtactgtaagtatccagtttgctgtttagcacttatacaattcgaaagcaaagttcgaagtcctggctgcctggctcttccttggagatggaagtttttgcacttccagaaatatcgggaacataaagtccatgtgatcttttgtgcctttaaaattttggatcgtttcctaatggaaatctgttccagttttattgacatcagaaatcctatctcctgtagtcctgttattcagcgtctgagtggagctataaaattgatcttatcatt

SEQ ID NO: 16335 - DNA, 287 bp, Zea Mays
agtagcaggagcacaaagtgcagaagcagagccagtcctaactgcttagccaggaaagaagcagagcgtgcttagccatgtactcatccagctgccatgtgatgtccgagaagccaaacggttccaaggcggtgacgctgctgctcaggctgtccacgctggttctgtcgctcatctcggcggtcgtcatggccaccgccaccagcgactgcaccatctacggccacggcggcgccgccaaggtcactatcatgttcaagaactaccggcccttcgttatatgctct

SEQ ID NO: 16336 - DNA, 2448 bp, Zea Mays
gggccgcggaccgtccgcgctgctgcagagggcaccgccaggcggtgtgtggcccttaaggcaaaggaagctgaggacaagtatatagcttctgttcacagcaagaggcatataaagctgatgaaggaaattagctcaacaatatatgatgccagcaggaacaagattgctaggaaattcaattccatttacttgaataagggttcctcggaatctgctgttcttgcagctggttctgtcatagaggtagctgagaaagttgctgcaggtgagttaagttctgctattgctctagtcagacctccaggccaccatgcagaacatgatgaggctatgggattttgcctcttcaacaatgtggcagttgcagctaattatctcttaaacgagaggcctgatttaggtatcaagaagatattgattgtcgattgggatgttcaccatggaaatggcacacagaaaatgttttacgatgatcctcgtgtattgttcttctcagttcacagatttgattatggaagcttctatccttctgaaggggatgcttctcattgtttcatcggggaagaagctggtaaagggtataacatcaatgttccctgggagcatggcaagtgtggtgatgctgattatattgctgcatgggaccatgtactgcttcctgtcactaaagtttttgatcctgatataattctggtatcagcggggtttgatgcagcattgggtgatcctctcggtgggtgctgcattacaccaaatggatatgcactgctactaacaaagttgttaggatttgctcaaggaaggatagtgatggcccttgaaggaggttataaccttaggtccatagcgaactcagtttgtgcttgtgcaaaagttctcttgggagacaaattcacattcaacactccagagatgcaaccatttgaatctacatggagagtaatacaagcggtacgcaatgaattgaagacatgctggcctgttctgagtagcaagttgccagaaaatgtatcattgaggattaagcctgcaccaagcgagctctacgcttctgattctgaatctgatagtgaagatgttgatgagctccttggcactgttgcatctgtcagtgttattgaagctactggtgttgctataagtgaacacctctcaaagatgaaacttgatgatgacagccttgcagtgaagactaactcaagttgctcagcagcagaacagcatccagttgattcagtaaaagtacataacaatgcatctgttgtgctgaccaaaaaaatatctgatttatctcttgagtggcgatcagatttatcgaaaactgatgtctggtatgccagttttggatcaaacatgtggagaccaagatttctatgttatattcaaggagggaaggctgagggtatgaatataccatgctgcggatcacgtgacacaagctcaccaaaaggaaccgtgtggaagactgtacctcacaggttgcttttcggtagatcgtctaccccttgttggggaactggtggtgtggcttttctcaaccctgagataaactacaatgagaagtcgtatgtctgcatgtacaaaataacgttggagcagttcaatgacatcttgtttcaggagaatcgtttagtgctggaggatggcaaagacggaaacactgtgtatcctgactctcctttgattggttcatctgaaatcaagtttatatctacaaacagagctgttcatcttgaacctattaaggatagctggtactccaatgtactttatcttgggaatgaggatgaagttccaattctaactatgacgtgccccgcatcagatattgagaggtataaatctggtgagctgcgtttagcacctccatcagagacgtatgcggccactctgataaagggactagtggaaggcaagcaaatggatgcggacggagctgccagctacatcaacgctgctgctgcaagagccttgtgaaggcggcttcagcgtgtgcttttgtacagccagtaaggagtagcaaggatacactatctgttagcgtggcgacaccaggaaaccttcattgtccgcaaatggagaacttggatccaatttgaattgggaagcatgattcgagcttgccctagcttgattactggtgaacggtgatctcccctggctggttgattctgggagaaacactagctgtgtcggggtggagcaacactagttggcggttgcaacaggtgctctcactgcactggtatcgtgcttgtctgacataccgtagtatttgcatggcatgctggtgatggtatttgtgcaattactgcattatgttctgttgcctggagttattgttgtttggccgccaccgctgctgctgctgggcagcgtaatatccactcgtcgaagcggattggcactccgccttcttggccggccgcgcctggtgcccaagcg

SEQ ID NO: 16337 - DNA, 5307 bp, Zea Mays
ccggctgctccgcgagcagtcgaggttgacggctagtactagcaagcagtagtggtgtcgcatctgccgatctcctctgtccgagtcactcactcccccgactgaggaggcggccggcgctccccaggcacgcacgagttgacgggtccagcagcggcctcgggatcttgccgccagctgcagcggcaatccggtccgtccgcccaggaaaccagtgctgtcttaggtattgttgattcatgattcttgattccgggaggcggtttcgtgttgtgacagcccgatcttgcggttcagcagagagccaatccgctgggcttccgtggatatacatatactggtctgagttgtcaagtccttgacctgatcatatcagttttgcttataaggatgggggtttacctcagtactccaaaaactgacaagctatctgaaaatggagaaaatgatagacttaagtttggtctttcatctatgcaaggatggcgagcaaccatggaagatgctcattcagcattgctagatcttgatagcgagacagcattctttggtgtttttgatggtcatggaggaagagtcgttgccaaattctgtgcaaaatatctgcatggtcaagtcctcaaaagcgaagcctattcaactggtgacctaggcactgctgtccatagagctttcttcagaatggatgaaatgatgcaaggacagagaggttggcgagaactatctgcacttggagacaaaataaacaagtttagtggtatgatagaaggattgatttggtctccaaggggcagtgattcaaataatcaacaagatgattgggcttcagaggagttgtgagtttaacagctgagcttttcgttggaaagagaaacccatgcaaatagaacttttgtgttatggcggcggctagggttgagggagcacaagggggccggctaagggccttgcccacagccgaacaagagggaagtgtttttcttcttaagtcttgcttgattatattgatacatctcctctccttatacgtagagccttacttgacctctaagaaaatattctaaccaactcaatctaactcatctcttttcttatcttaactaaccaaatatttccttattctaattaactaaatcaatctaatttactctatcctaatggctctactcaggggtggatctagaattttcctatgactcaggccaaacctactaaatttccttctcttccttttatcttaactattttatactagattaaataaatacttatgtagagtagttacatggatcaagccttgggccacggaccgggtggcccggggtgtagatccgcccctggttccacttgtcataacactactccactccatcatagctcttcctcggggttgtgctgttggtcatggctgcagatttcaatgttcccatggcgacatgtgtacaatctcacctagatcccatgacatagtctcgcgagtgtcaatacctaggagtggtcacaacaacaatcggcaaagacacccttgtggaggccggtgatgaaatgtggcagagctatgtagtgcacgcctaagggaccccatgccttcttctcgtcgaacggctgctagtcagcgccacaccgagaggagaggatcctcgatgtctgaggtaccctaggggttgatgccgaggtgccttggggtccgaaacatgtgcctcaagggtagaataggtgtccgaaggcgggaacagatgccccaagtggcggaacaggtgcctcgacggagggaacacgtgttcgaggccaggacaggtgccctggcggtgggaaccagtgccctaggggtcgagacaggtgctgcggaggcgggaattggtgccccgagggctggcagaaggagtgccctaggggccagatcaactagtgctccgaggggtggagcacacagtgcactaagttctaggggacgtggttgtcaagagtctaaggccaccatacgtgcctagagagatggggcgaagtcgatcaacgtcttggagattggatccggtgatggctcatcggtaccgaagcgtgagttgcaaagctctatgaagcgctactaggaaggctgtcatgtttacatcctgttcgagaatgtagtaccacgtctgcatcgcgccgtgtagatggtatgatgcaagccaatcacgatcagatgcgagcgtgtgttgccctcgaaaaaattgctcacaataggtgagccaaattacagggcaatcgagcttgcgggggatggcagtggtggttgagtaagttagaagcgctgttgggccgtactccaacatccgtagggaaagccttcaggcatgacacccgccgatgaggatgcctgatggctcttcacggtggccagccgtgagagtacatcgacctattgtgtgtcggaacctgagatctttgataccatatattattgcggagtgtcggaacctgagatctttggtaccagatattattgcggatgttatggcagcgactaaggttgaggtgacgcaaggggggcggccggagatcttgtccacaaccgagcaagaggaaaggattttcttacttaatgcttgctttattagattgatacatcttctctccttatagagagacttacttgacccctaaagaaatgtcttaacgaaatcaatttaacttatctcttcccttatcctaactaaccgaatattttatatcctaactaactaaatcaatttaacttattttttccttattctatcggctccacttgccataacatattgccatctagaaatgaacggtttgttgttaataatgatgtacatgtactatgagttgatttagatatatgaaaaatcagttttcaaatattagtttgtgtatcagttttcatgattgtttgaattatgatattaaatttgggaatctctcatagataatgtttttgttagggaagtcatcctgattttgtctgtggtagatggctactgctgttttcacttttctaaaatagatgcacatctgattttcttgcattaaaataaaggtaatgtcttttgaatgcttgcaagctgtgtcagatgtgaattgcaaataacatccgaatttttgtgtaaaaagaaatccatgtgaagagaaaacgggcacccaaacatggtagctgcaatgttactaatgatgtaatatgagttaattatgaaatgtaatattctgaagtctacgtctttattatcgtttgaactaaaaaaatggtagatccagtgccgtaggctaccacatgagagcttgtaccatataagagcttgttcggttaggagtggattgaaggagattggaggggattaaatccattcctagtcaaaattgaataagaggggatttaatcccctcaatccactccgatcctcatgcaaccaaacaagacctgagtggggtctgagaaatgaataaaccgagacaatcccacatgagtggggtctagggaagggataaatcgagataggccttcttagatgcggagagacagctctcaccgctacaccatgcttttccttactttattattgtttaaactatggtattaaattcatggagtatgtcacatgtataatcgtttatcagggacctcactctgactttgctgggccaacatgtgggagtacagcgtgtgtagcattaataagaaacacccaacttgttgtggcaaatgctggtgattcccgatgtgttatttcaaggggtgggaaggcatacaatttatcgagggaccacaaaccagagcttgcagctgagagagaaaggataatgaaagcagggggcttcatccatatgggacgagtaaatggaagtttaaacttgtcaagggcaattgtgtgcaagtacctctttataggagacgtggaattgaaacagaacaaattcctgcctcccgagaagcaaattgtgacggccaatcctgatatcaatgtcgtggagctctgcgatgatgacgactttgttgttgtagcatgtgatggcatttgggactgcatgtcaagccaacagctggtggattttatccacgagcgtataaacacggagagcagcctgtctgccgtgtgcgagagagtgctggacagatgcctggctccatcaacgatcgctggagacgggtgcgacaacatgaccatgatcctggtgcagttcaaaaaacctgtcgatcggaacaagaaggccgaagcagcagggcaatctgccagcaatgtggacgaagccaagagtcgtgttgctgaggagtgaagcatggctggcactcaccagggcgcaaccatttgctttcataaggtaatagaatgaacatagagggcgctttctgtttgccgtgttccacaaggaagagagcaagttatagacctttccgagtgtacagtttatttggagggaagaaggataaagatgagaatggtgatgaggcgccatcgaaagcaggaatttttggaaatatgcaaaatctctatgaaactgttaagaaggcccaaatggttgtccaagttgaggctgtccgggtgcaaaaggagcttgcagcgactgagattgatggttattgtgaaggcgaactaatcaaggttacactttctggaaaccagcaacctattagagttgaaatcacagaagctgcgatggagttgggtgctgaaaaactttccgggttggtcaacgatgcttacaaggatgcacaccaacggagcgtccaggccatgaaagagaggatggctgacttggcgcagagcctgggaatgcctgcgggcctcggcgatggtctcaagtgatgccgcaattcgggaaagctttccaataatcctttttcctcaattttgtatgctagccgtgtgagtagtaagcataacccctccgcgacctctcataagaagtgtacttgtgagcacttgttttctttcagctttagctgccatttgctgttctgcgcacgcagatatttgcacattaacttcacgtctggtctacaaagttgcaagatgcgggccatgatcttttgggcatttttccaacaagttgttgggctggcccagttgtagcccttcgaagatgagacaaccaagcccatatatataacacacaccgaaagccttcagaatctgtcgtgtgtgaccaaggataaatcatggctttggtgaacagtgatttaacagcaaataaaacactaagtgggtgttcggtttgaggaatcactctatccaaaatgtggtggtgtatcatgggtcaattcctcaaatttggtgggatgacctattccttatattagtactaact

SEQ ID NO: 16338 - DNA, 2289 bp, Zea Mays
aggccagcgacagacaagagcagcgtggatagagcgggatcaagtgtgtgctgtgtggtagttgcgttgcgtcctgtgcttctgattggaggccgccatggatgaggtccccggaaggagcagctccgtgagagctacaaggagcatctttggcgaaagcatcggtgggaggaagccggagatgaacagggcaaggaatgttttaggacaagagaatctgcggccagagatgaagcagctagcaaaatccagcatagataagctgagtgaacgcaagaccgccgtggacagagaaagagccggcgccgagtccgagctgtcgagggcgcgcgccatggcgaaggagctggagcgccaaatagagcaggccaaggcccgggcgtcgtccaagaggtcagagcctcacacaatgcggccggcgaccagggcaagcaagacgggacacggtgcgccgcgctcgcagggggagcggcgcgacgctgccgagtacgcggaggtgtcgcgggagctgaaccgtgccaggcaggagctgctcaggctgcggctggaggtcaagtccgcggcggaggccaaggccaaggccgagagcgacatcgtgtcgtcggcgataaacatccagtctaacctgctcgctgccgacgagatgaagcggctggtggacgaggcgaacgaggagcacgtcctggtggagctcgcgcgcatcgaggccgagcgggagcgccgcgagatcgacgcccagcggtgtgccgaggccgagcggttcgcccgggaaatggaggccaccagggctaagatcgaggcgctacggaaggacctgagccgcgcccgggaaatggaggcgaagctcgcggtgacgaacgctgacgtggaggtcctacaggccgagatggagctggtccgtgccatggagaggaacagtgtcaagaacgacggcactgcggacgtggaggctgaggacaaggcgctgctgcggactgcggaggccgagctggatgccgccaagaaggagctggatagcatcaaggccgggagcttccagttcatgacgtccatggacagcgcgcgcaccgagatcatgcgggtctccgaggaagtgaaccggctcaaggcgcaggagaagaaggcggacgcgcaggtgcagcagctgaacgccaagttgctgaaggcgagggcccggctggaggccctcacggagaccagcgagcggtccaaagcgatcgtttcaaatatgacgtcggcactgcagcagctgcaggacgagaagaaggcggcgatgaaagaggaggagctgaacgagcttgagcaacggtgcgtgcgcgccgagaccgagaacgcgaacgccgagatcgcagcgaccgaggcacggatgcagcagtctgtgaaggagctcgaggcggcgaagacggccgaggccgcggcgatgaagaagctcaaggccgccgtggaaggcacaatgcaggcgagggcgtcacggcggtcggggaccataaccatctcgcggttcgagtacgagtacctgagcgggcgcgcggcgctggtccgcgtggtggccgacaagaaggtgtccgcggcgcaggcgtgggtgcaggcgctcaaggccggcgagaaggagctggcggcgcgcgcggaggccacggagcgcgtgacagccgagctgcgcgccagggaggccgaggcggcggcggaggcggagagcgcggcgggcgagcagaaggcgctggagcaggagctatacgacctgaacgcggtggcggagcgggacgggctgctgtgcgcgtacccgcgacggcggtcgaccagggtgtcggcgacgatgcggaggacgagggcgcggcggtcgtccgtgtcttcgtcggcggggatccggaacccgcggacgccctcgttcaccatcaagaggaagaagaaggtgatgcccagcctcttcaagctgatcaaacagaggaaagacgagcgcgcgagctgagagatgtgcctcgccaaagaaaaatgcatttgtcagttcttttttctgctcgtacatgtcatgttagacgtcactgttgtgcaaaatgtacaaaaaatggattgaccgtgcttagcaacggatgccataaaaaatattcctatagttcgcccacgttcgaaagagcatattcatagcttgattaatggatgtaagttataattaatggatgtatatttaattaaaacgaattatattttagaatgaagtgagtatataaagcttccaccgtgtctcttattttccttgatcagcattaaaataggtctcgtttggtttctcct

SEQ ID NO: 16339 - DNA, 909 bp, Zea Mays
tgttgacccttgcctcgggacgggcatatctctgaagacacaggagctgtatgcacttgtttttgcagcacggtacctggacctgtttgttcattttgtgtctctgtataacactgtcatgaagctggtcttcttggcaagttctttctcgatagtttggtacatgaagcggcataagattgtgcggaggacatatgacaaggatcatgacacctttcgccattacgttttagtgttgccttgtcttcttctggctctcctcattaatgagaagtttacttttagagaggtgatgtgggcattctccatttatttggaagctgtcgcgatatttccacaacttgtgttgctacagcggacaaggaatattgacaacctgactggccaatatgtcttcttcttgggtgcctaccgtgtgctttatatccttaactggatttaccgatacttcactgagccccattttgtccactggataagttggatggcaggaatagtgcaaactctgttgtatgctgacttcttcttttattacataatgagctggaagaacaatgtgaagctagagctgccagcttaaggttgctgctcctgtccccaagatatagtagggtaatatatcagataggcaggccccatacacagcatgatcattgctatcgccaactgggttatgaaaaaagcattttagttgcgtggcttgtatcgccttgtatctctctgctattgttggaagaacaggaaagtcaggctcaccatgtaactttttacaataagctgcgtaagatcagcactagaaggttgtgaattgtgatcgtccttagggaattttgtgctgatgtaaccctttcggcaagtgattctcatacaatataatctcagactataattggtaattgtttgatatcc

SEQ ID NO: 16340 - DNA, 1644 bp, Zea Mays
atctttctaaagaattttgaagaaaacatcttttaatgtttgcagatgcttcactccagggttcaccagaatctcccaaatctgttgtactggtcacaggggagggggaatataacatggtatccctgcgtaaaaccatcagagcctaccttttggaaatgggctccccattcttgccatgtagagctcggtcaggtcgctttgtggtaaaggattactctcttaagatgtggctgaaagattctcctttctgcatggaccttgagttaaaagatgctccagctcatcctaagttaaactcaatgaagctgatcgaaggatatttcatgagagctggttttgtatcagcatttaaagatatacatgagagacttggggaagtatggccaaaaaagttttccaggttagctctgttgtcagaagaatgtagggatgaggttatcaaggctgatatacaaggaaggaaagaaaaactggagagaatgaagaagaagggtattgtcacagcaagaaaatctaaaacaagagcacgacgaggaaaatttgttaggcagcagaaataaaacacgaaagtagtgttggagtagtcgtggcctgttattttttgcttcaacacatgacattttctcaaacagcacctggcatctacatgaaaattttctgataggggtggggatggaggtgtggaaacaaagaatgaattatgattgctgctattttagcattggttacggttggttctgtaaacttcttactggaacaaacgatgtggttcatgttctccaagatttactgagcagcgggcacagctgggtaaccagctcatactgagatgaacaagctttggatattattcggcagtgtgcacctatgcagtgcgccttgggctgcgctgatgctttcatggggagcgcactagtgtggcagtaagatcggtgattgctgcagtgtggccttgccatggaagctgcgagcttctacaaacaaatgttgagggccggtgagaaggaaaatggccttgtgagtctcgagcatggcaagatggttcattgtcgcagcatgaagtctaggttttgttttgaaatgatgcacttcaagtgtggcaggctggcagctcagttaatactcaaattgtcttctaatgggaaaataggtctagtggagtggtgagagttttctccctaagtcatcaggtcatgagttcgacatagcctcttcgtatttacggctgaatgttgccttggtttatccctttccaagagccaactcatgtgggagccttcagcactaagtctgttctttcacttagcttatctttatgctgctttgaatccgataatttcatttgcggcttatgacaaggaaaaacttattgaacctgcaaaatttcatcctcaatatttgacaactataaatttggtccaactttgttcccaacttaatatgttcatttaatgtagtttgaaaacgcaggagagctacattcattgtattagagagagagaaagcagccatacaacaccagcttctcctatggggacatatatataagaggttgttacagactcaagagactagccttataaaaagaaatgacaagacctgactgagaagaacctaaccaaattagtcttaaacccccaa

SEQ ID NO: 16341 - DNA, 1563 bp, Zea Mays
tggtcaacggtcatctgtacacctacgccccttgccaaagtttgggcagtggaagtttctcagttccgttgtgggaaaagaaattttgcactgatgcttgtgctatcccctgggctaaactgtgtgagaccaagagattgatgtctctgtataaaagcgtggttgattgggacgactcagctgcattagaagccttcaatgacgcaaaggcgcgcttctgtgctgtatatcatggtcaatgctacgatatccctttgcccgacccaaacatgtttattgatattatcaacccagatgaatatgttgatcctgaattggtggctgatctggagaagtcacgtcgtagtgttcccagaaaagataatggtgttcctgatgtctgggactcttttattttctctgacaagccagttccagttacaggatggggtgacacggagaccagcttcacccatggccagcagctctctgtaaactgggacaatcagttagaacactcagttgaagcaaatcataagcaaatgtcggcaagttgggactattctgtcaagcaaccttctcaaagaattggtcagcaaaactcagggaactgggaagtgtacaaggaacagcaggatcaagccagcaactggggggagcagacgaatccttgcagtaccaactgggtcatggatggctcccaggatgcttggaagcatggctatggttggggtcctgcagctattcagaccgatccatgggacaactgtcaatatagctatcaggtgcctgacagccagggcacatatggacactggactcactggagaaggcgaaacaatgacttgggtagaagaaacaccaggaatagaggagatcccatcagctcaaagccaatgaaatcaaagtaccaaacggatgaacacagtggtgcaaacaatggttggaggaactgtcgagtgaagaatgatatgtattattactcatatgagcaggctgattataccaagcagtcactggctatgtgagtaagagctaaggggcttacgccatcgagagaagatgacaagttcctctctgccgttcactacgctttagaggtgtcagtagttttacaccagcaatagtaatggtggacatcttgagatgaggtacagtagagttagtagcaggttatgttcacctacccccccccccccccccccccctaagctgctgtatatagtagtaattatcgtcctaatgattgtttcgtttagccatttgcggccgttgtttgtttatatatatctgtctcgatatctgtagttttggtttactggctacttcttagcttcagtgttgcagcagttagaattatgatggttcttctttaatttacatcttcggtggtggtaagaacaaatgctttgactgatttgtatgttggtgtcgaaatggcacgagcagaagcttatatcctgtacatagctgcattgctctctggtaattgtgattttctcattgtacccgtttcatgtggccgtgttcaacgcctgcagattgtgtagttcgatttagaagaagctgctagtcgtatttaag

SEQ ID NO: 16342 - DNA, 1207 bp, Zea Mays
tccggaagaaacaaatcctgttcgctcttcttgtcgagaccagaccaccgtatactggagagaaagaatcctccctcgcctccccaccccgccccacccatggcctccgccgccagcactgccgccgccgccggggccccgctgcgcctcctctcatcctcttccaaccgtatctccaagcccttccttccccgcccccaccgcctcaccctctcctcccccatctccttccagcgcctcacagcccggtccgcggcctccccttccccatccaccgccacctcgtccccgtccggctctgtcgacccggcgcaactgccccccgcgctacgcgacatcgtcggcctcttccagtccgtcccggacgcgcgcacccggtacaagcagctccttgcctatgccgcgcgcctgccgcccatggacccggcgctcaagaccgacgccaaccgcgtccggggttgcgtctcacaggtctgggtccacgccgagcccgacgagggcgacgccggccgccgcagcgtcaggttccacgccgactccgacgcgcagctcaccaagggcctcgccgcgctgctcgtgctagggctctctggcgcgcccgccgcggatgtggccagggtgcccgttgacttcatcgagctgctcgggatcaggcagagcctctctccctccaggaacagcggcctgctcaacatgctcagcctcatgaagcgcaaggcacttgagatcgccggtggtgactcaacgtcaagtcagcaatctgtccaagaggttaccagaccgcgtctagtgaacgggaaagagcctgaatttgcagctttcgaggtgcaagaaaaggaaaaggaaaggccacaggatgcagagaggcgcgacgaggatgaacaattgggtcaacttctaccacttgatgcagaagtgaatggtgctgcgggcggtgggaggaaggagaggataagggagagtttggagagggcactttctccggtagagttggagattgaagacatatcacacctccacaagggccatgctggcgtggctgggaccaatggggagacacatttcaatgtgagggtggtgtccaaggagtttgaggggaagagcttgctcaagaggcacagggctgtctatgatctcctgcaggaggagctcaagaccgggttgcacgccctgtcaatcgatgcaaagactccatctgaagtttagg

SEQ ID NO: 16343 - DNA, 2121 bp, Zea Mays
atttttgaaaggggattggtgaataatgaccatcctcctcagcaagcataaagaagatcgtccttcgcagtcgcagcaagcattccggctctgcatctggcccagctctgggttgcgcgaacagtcggaaccctaattccctccccggcgccggcgccggcgccccctagctgcgcccccacgaccagcagaatccagatcgaagttttgctcttgccgcggccccgcctaaactccaaaagtgcgaaccccctaactcatcgatcccagcctgcctccgcctacgcgcctcgtgacggcgtggacccctcccctatctgcgtgctgcgcgcatccgcctgcggcctgtcccgtgcagccgtgcctcctccgcgcacatctccagggtctagccgagagcagaccgccgtgacgccaccactcgcgctcgcgctcctgacatcgttgtctgccttctctgtctaagatcagagcagagctccatcgaaagcgtcgcccgcctgcttggatgatcaatcaccacgaaatagtgcagtttgggaagctgtacaatagagacatggaatcagctcctgctcatacccctcttatacatggtcttcctgatgaggtagctctcatttgcttggcaagagttcctcggcggtatcataatattctcaggcgtgtctcaaggagatggagagctctgttatgcagtgaagaatggcacttgtgccgcaagaggaataacttggacgagccgtggatctatgtaatctgtagggaagcaggcatcaaatgctatgtgttggctccagatcctccaagccggtgctttcgaatcatgcatgtcattgaacccccatgctcagggaggaaaggtgttaccattgaagctttagacaaaaagctatttcttctgggtggctgcagttccgtgtatgatgctacggatgaagtatattgttatgacgcatcctcaaatcgctggagctcagctgctccaatgcctacagcaaggtgctattttgtgtctgcatcccttaaggagaagttgtacataactgatggatacggcttgacggacaagtcaccaaattcatgggacatctatgacccggccacggactcgtggtgcacccacaagaacccgttgctcacccctgacatagtgaaattcgtcgcattgggggaggagctggtgaccattcaccgagcggcgtggcacaggatgtactttgccggcgtatacgacccgctggaacgcacctggaggggcagagggaacgagatcgctctctgctactcgagcccgacggtggtcgtggacgggacgctgtacatgctggagcagtccatgggcacgaagctgatggtgtggcgggaggacgccaaggagtgggccatgctcggcaggctctccgacaaggtcactagacccccctgcgcgctcgtggccatcggcaggaagattcatgtggtcggaagagggctgagcatggtcaccgtggatgtggacacggcggcaagggtggacgggttcctggttaccacctctgtaggcccgttggtggaggaagacctgaccccggagaggtgcgtggtgatcaccatctgaaggggtgggcgtgtccaagcttccttgacgccgggtgtattgtggtaactgtgactgactatcgtcgctggcgccgaacatttggctagctagcgtggatgatatatactgcgatgtgagtgaattcaataagaggcttggctctccatacagccaataactatagttagcatttgtatctcgtgttgtttgggctgcttttgtcgactgctggctgtaagaacaatatttgagcttcgtttgttgagtactgtgcgtcccagatggatgggattaatacaagctaatgtgatcctcgtcctggcacttttgttattgtctatttgattgatcgatcaagcgttcgatttctgcagacatggatggcgatgtgcatcgacatttgagggtttcggttttttcttttactgtcggtgtaatggttttggatgctgtgcgtcggtagctttacgatttgtgttcgctacatgcgtaatgatctgattgagatgtgtggtgtactggtgtgtgtaaaataaagc

SEQ ID NO: 16344 - DNA, 646 bp, Zea Mays
gttgatcctgccagtagtcatatgcttgtctcaaagattaagccatgcatgtgcaagtatgaactaattcgaactgtgaaactgcgaatggctcattaaatcagttatagtttgtttgatggtacgtgctactcggataaccgtagtaattctagagctaatacgtgcaacaaaccccgacttccgggaggggcgcatttattagataaaaggctgacgcgggctctgcccgccgagccgatgattcatgataacttgacggatcgcacggccttcgtgccggcgacgcatcattcaaatttctgccctatcaactttcgatggtaggataggggactaccatggtggtgacgggtgacggagaattagggttcgattccggagagggagcctgagaaacggctaccacatccaaggaaggcagcaggcgcgcaaattacccaatcctgacacggggaggtagtgacaataaataacaataccgggcgcgttagtgtctggtaattggaatgagtacaatctaaatcccttaacgaggatccattggagggcaagtttggtgccagcagccgcggtaattccagctccaatagcgtatatttaagttgttgcagttaaaaagctcgtagttggaccttgggccggg

SEQ ID NO: 16345 - DNA, 1533 bp, Zea Mays
ccgaggtgcagggcctccgacgagggccccctccccgtgtagaggctgtgggtccggaatcgggggatcaacctccgcagaagcgtcggctgctatcagccgtagttaaggtggatggggctgaaaataacgaggaaggcacaaaggatgcggatgcggaggggcatgggacaggttcaggtgccactgaaggcagtgccgggaggggtttcaacaatggcgggttcagaagggatggtggcttgcggatgcagaggagagtggactataattcgctgccagagccagctccaagggagcttcccaggaatgaggacccgaatttggtgagaagaaataagaggatgctggggcagcttcttgtcggtacattagagaaatttcaacaagaagataaaaaactatctaactccgaggcttttctgcgtagatcagagactcagcgaaaggctgagcaaaaggtccgcgaagaaagtgaaaggctgcgacagaaggaacgtgagcaaattgcagagaagcgtaagcgtgatatgctgctaaggcggaagaaaagaggttggagctgttgtacattcagtggactgagcaccataaaaggctgtccaatttcttaaggttatttttatttctggtccaaaagtgtccatattgacaattaaattgagggaagatacattctaattatgcagacttgatgtttgataaccattagtgtatctatttacattgtatactgatgaacaatatttgttccatgtttgactctatcttattacccccttatgttggcaggacaaaagctgaaccacctatttactacatgccaactaaaccaattattgacgatccagccattgttgaacagaacaaggaaaaggtattcgaagaatggaaatctatgcgcagggatgagctgactcggttccaaaagcaagttgaggagcaatatctctcaaatgtggagaggcagctggagaggatccagaatgcccggaacgctcgaaaggcgaacgggcatgctaacatgcaagaaatggacaaggagctggacacacacagggcggagcatggtccgaagactcggcgagttcctgaggagggcggtaatgatgacgacgaagacgcagaggacatggctgcggaagacgaggtgatggatgaagttctgggcatcaacgatgggatcaacgaggacccatccaagccgtccgaagaagctactactgaaggtggtgagcctgcacccgaggaagcacaataggattctttgttcacacaagctaggcacatagccgtacgtaccattccgtatgcttagttgccgtattgttgggaactgtttgtgcgtgtatttctgttagacgttccccgctggtttaggctgtgttttatattgctgttttgtctttttgaatgttgagaccatacaactgtcgatcattatctcataattgttgtaaaaatactataattgataccttgatttggacgtcggtggcgttaaacgtttcgggttctgttcttcactacccg

SEQ ID NO: 16346 - DNA, 1627 bp, Zea Mays
atggcgtcgtcgccgcagccgccgccgccgttcgccgcgcaaaaccctaccgcgcagggctcgggccaggggccgccaggctccggggtgggggctctccccggggcgttcgccaacctccagatctcccgcggcgcggccccgccgcccggcgccccgcgggggctcacgccgcagcaggcaccgcccaccttagccgcgcgtccgggccccccaccgtccgctgcccgtcccgccttccctggcagcccgcccgcaccgccattcgtgcgggcgccgacaccgtcaacttccgcctcgccgccctttggcggacagcctggggtaatgtcccagccgccgccaccgttcggagggcctccaggtgcgtcgtctcagccgccgccgccgttcggtgtcccccccggggtggtgtcccaggccccttccctgtttggaggccctcctgcgacggcatcgcaggcgtcttcgccttttgttggtcactctgttgctgcgtctcaggcggcaccattcggtgccccccctgttgcgggttcgcatcctccacccttcggtgggcctcctggagcggggcctcagccagcaccgccattgcggcagacattcgctggccagcctgggccaatggccgcagcggcagcttggacgcagccacctccacctagctttggagccccgcaacagcctccaccaccattcggttcgcggccagctgggcagccgctctttgctacacaatcagcgcctgcggcacaacaactgccattcatggggccacccagggtaaatgccccggcgtttggacctccgtcttggcaaactcagggagctgggtctggtgcaatgcagccacctttgagaatgccaggcattcctggtagcatgcagccaaacacactaggaccccctggcaccccgactataccttattctccacatgctggaacccaggtatcaaccccgtccaaaattgatcctaatcaaattccacgtcccatgcgtgaatcatcagtcatcatttatgagacccgtcaaggtggccaagcaaccattcccccggctgcatctagtgaatttattgtgaaggacactgggaactgtagcccccgtctaatgcgctgcactgtgaatcaaataccatgtactggggatctcttgactacttcgggcatgcctttagctctgatggttcaacctttttctcttcctcacccatctgaggaacatattcagcttgtggacttcggagagatgggacccattcggtgttctcgttgcaaagcgtacataaaccctttcatgaaatttgttgaccaagggaggcatttcatctgtaacttatgtggattcagaaatgatactcctagagactacatgtgcaacttagggcctgatggtaggcgacgtgatgctgatgacaggcctgaattgtctagaggaacagttgaatttgttgctacgaaggaatttctggttcgtgatccaatgcctgctgtatacttcttccttattgatgtctctatgaatgctatacaaactggtgcaactgctgcagcttgcagtgctatttctcaggctatttcagatctgccggtagaacctcaaccttgctagatgagaaaat

SEQ ID NO: 16347 - DNA, 3169 bp, Zea Mays
cctacccaaagcacaatgcgaaacgccttaagtcctcccagggtttatgcatgacagcccctgtgtctcttccaaatgagctagaagcggtctcccattctgcaagggttgagttattccgagacgctagttgcaacatagaaaatgaggtgttggccagtttgggaaatggccaagattcaactgctgttggagcaactcctggtttcagagttggagagatcaggtttgctaatggagatatttattctggcacattgttggggaacacaccagagggttcaggccagtatcgctggtcagatggttgcacctatgatggtgagtggaataaagggatgaggcatgggcaaggaaagacggaatggccatctggagccacctatgagggtgagtattctggtggctatgtatatggtgaaggtacctataagggtccagataaaatcatttacaagggacgatggaagttgaatcacaagcatggacttggacatcagacatatccaaatggagacatgtttgaaggttcgtggattcagggagaaatagtaggtcatgggaagtacacgtgggcaaacggggacacttacgttggcaacatgaaaagtggcaagatgtcagggaaaggaactcttacatggaaaaatggggactcgtatgagggtaactggatagatggcatgatgcatgggtatggaatctatacatggaatgaatgtgggtattatattggaacatggacaaggggactgaaggatgggaaaggtaaattctttccgaaaggttgtagagtacctgttaacgacgagatgtatatcaataatctaagaaatcgtggtgtactgcctgatattagaaggcagaatcatggttcacgcatacttcactcttcctcggttgacatggggaacatgaaggttggtatggctaggcaatcttcagatgttttgttcaaaaggaattcagctgagcaatcttctttgaagaatgtgtctttggaaagacggtggagtcttgaggtggctattgaaaaatttattggccatgaatccagcgaaagttctggtctagaaagcttggaaaacttgagtgattctcgtttgcccatactggaaagagaatacatgcaaggtgttctaatcagtgaggtggttcttgacaggagtttttcagactcctcaaagaagacaaaacgccgccagaagaaaacggtgagggacacaaaaaagcctggagagacaataattaagggacacagaagctatgatttaatgctcagcctgcagcttggaatcaggtacacagttggaaagatcacaccaattcaaaaacgtgaagttcgtgcttcagattttggaccaagagcaagtttctggatgaacttcccaaaagaaggatctcggcttactccttcacattcagcggaagattttaaatggaaagactactgtcccatggttttcaggaatttgagagagatgttcaagattgatgctgcagactatatgatctccatatgtggaaattctgctcttaggcaactatcttcccctggaaagagtggaagtgtctttttcctgtcacaagatgatagattcatgattaagactctccgaaaatctgaagtgcaggttcttttacgaatgcttccaaactattatgatcatgtccgtacctatgagaacaccctcataactaagttttttggcctccacagggtgaaaccttctagtggtcaaaagtttcggtttgttgtaatgggaaacatgttttgcactgaattgagaatccaccggaggtttgatttgaaaggatcatctttaggccgttctactgataaaattgaaattgacgagaacacaactctgaaggatttggatcttaactattccttttatcttgaaccttcctggcgtgaggctcttcttaaacagattgaaacagacagtgattttttgagaacacagcggataatggattacagcctactgcttggtgtccattatagagctccacagcacttgcggacacgtgcatcttatcaccggagcatggcagcagatagattgactgttgtttcagaagaagatgctcaggaagatgatgcccttagccatccagaaggactagtcttggttcaaagcagtggtgagaacagtgttattgttggccctcacataagaggcagccgcttgcgtgcatcggctgctggatttggcgaagtagacctactgctgcctggaacagccaggcttcagatccagctaggagttaacatgcctgcaagggcagagcagacccctaaggaagatgaaagcaaaccgttccgtgaggtgtacgatgtggtcctctacctgggcatcattgacatactgcaagagtacaacatgacaaagaaaatcgagcacgctgtcaagtccatgcagtatgactcggtctcgatctcggctgtggacccccagttctactcggagcgtttcttgaacttcatccagaccgtcttccctgagaattcgtagctccatccaccaatacttttcttggaagatgcccgcccactaccacttgctgagaacttcatccagacgacagtccatgtcttcgaatttggagcttgcgagcatcataagaacattgcactctcttcagtgcgtgcctgttccttcctggatgaactggcaggaagagtggccaacaaaatgagattcgttagtgaaattgtgcagaagcaaatcgatcttctctaggctattttgccccgatccctggggtcaccggatcagccgtctggcttcctggagtaggcttggcgtattgggactcgagcaggaagtagatgtgagttgcgaggattctagtgacagcggcgccatagagctctgggattcactgttatgtctcggcagttgcagaaagctgaagcgcctgttgcctctggctcgtgtttcatctgttaaggtgctatggaggatatgtttaataagtccctgaaaacacgcatcaagctccgatacatttttttgtaggacaaacaaaagagtactatgtattttatcgcaaaaacgaaaagaaatggaagcaacagatgaaaatcgcgcgtggtgacggaggaattacgagtgcggcctagttagcatatgtttcctcgtttccatggtgtgagtat

SEQ ID NO: 16348 - DNA, 2233 bp, Zea Mays
gaatgctatacagagagaggctgcgttgcctcgtatccaatctaacggcggataacaccgagtggcgaccgcctgacgcgcccgtgtcggcaagccgccgacgacttgacgtggggcgggggaaacaaaacaacgcgggcagcgctacggcaagcgcgtccctgccacggcgcggacacagagagtggaaaccggaaggggggaagagagatggattcctccacctcggcggcggcggcaggggaggcggccgtgccgccggaggacgacgtctgctccgtctgccacgaccgcttccggatcccgtgtcaggcgaactgctcccattggttctgtggagagtgcatcatccgcgtttggaattatggacctcctgtacaggcttgcaagtgtcccatttgtcgccgccttataaatctactggtgcctgctgcattatcagggcaggaggatggtccacaagctcaacgtattctaggagagattcagcactataactgtatatttggtggagcaccacgcagcctaactcagaggttgcaagacctacccttcttcatccgaagactgttcagagaactaatggacccccagcggaccctcccactcgtgttcagggcgcggatgctgatgatggtcgcactgagtgcaatttatgtgctgagccctgtcgacattcttcccgaaagcatgctgggcctctttggattcgtcgatgacctgctcatcctgctgatcgtgttcctccacctcgccgcggtgtaccggtcgttgctcctgtaccgccacgggggccagtagaagtcgctgtgcataaaccgtttgtttagctggtttccatgtggagttctctgagatcgcagcagcggatttggaagatcgccgactcgccgagtagatggcaacgtcacggacggcttagcctgtccctgctctgtaccattctactacgcctgtttttctgagactctgacacggtgaactgaactttggttggttgatgcaagtgaatttcccttcgttttactcgtcaggaaaagaaagggaaagagtttgcgttcgtttgtctttgtttctgctctttggaagttggaattgaaactgcactgatgtttgcgtttcaggaactgcattgacgtggatcctgctcagttctcttagcatttacttatgggccaagtttgtagaagtttagtgggctgtagacccattggtgtcatgttgggccaccgcgacgagtaaagaagaggatgttggcaagaccatcagcaccgcctttggtgactgctcaaactcctgaagtcggcatcttcattacagctcgcaacgtctcgggtgcactggtcgccaagcttcctggtaacaaaaacaagtgtggaggaagatcgaatgtccggcagcggaacatccaacctgggaaaaggggctgtcgtcgggagtggcgggcgctctcagcagctgaccaagcgcaggcttctaccttggacgtagatgaggagtgcaaacgggtgctcactccattgggtttctccagcgaagacgccgagaagatgctgaagaaagcgtttggctggacccactcgccgtactggagcgaggagagggagaaggaggttccgaccgccgaggcggtagctggagtgctggactacatcaggagcctggggctgtcggacgaagaccttggcaggctgctgaagaagttccccgaggttcttgggtgcgacctcgacggcgaggtgaggccgaatgtgggcaagctggacagtgactggggaataaacgggaagaccctgcggagccttctgctgaggaaccccaaggttctgggctacaatgttgactgcagaggggattgcatggcccagtgcacccgctgttgggttaggttctgatgatgattggttttgttcttcgtcgccacatcgttggtcaggaacttgggacttggttttgcttgctggccatttttctgtaagctagcacctgtcgaatgtagcacaatcgctagctgctggatattgggttggccactgttagttcttatgtacgtacaacagattcaagagctaaaccatgctgctgttgtctgtaaaagagttgcaataaatatggccagaattcctgaatggcctgtggtaccgcagtgacttgctattgttcttctgctctggatttccacattgtcttgttgtgatgtgaggtcctgtccttgtgctttgatgcatctccc

SEQ ID NO: 16349 - DNA, 2182 bp, Zea Mays
atggcatttgaaatcgataacaacttgatagatgttcatagttctggctctggtacaagtttagatgatttgtcacgcttccgtgcacaggtacctcctattgcagtgcccaggaggaacccttttgaccttccatatgattctgaagaagcagcaattcctggctcagctccttcaatactgcatgcacggaagaacccgtttgaccttccccttgaacagtcaaatgacagtgttgttgtccatgcacatgatattttaaactctggagaacctgcgacttctcgtcgtgacatgatctttagaaggcatgaaagcttcaactttggaaggatggatgtgatccaggagaagcgtttttctagactcaagccatattttgttcctgaaactgtggaatggaatgcaagcaatttcgaaagacagttcaatgataagtctgagtctaagatgagctctgttactaaatctgatattgcttcttcagttgctgatcaggaggatcataaggaccaagatgaaaaggaccttgcagatgttggaagtgaatgctcagatggtatcaactccatagatgttgaactagaccacagtgacatcgatgaccgtgagattgctctacagcaatttgtctttgaaagagcacaagaaagggaagcacattggctccctaaaggaaaaggacgtgaagaagattatgcaccagaatcagctgggagttcaacgatgccatttcatgcagtccctgacctgcttagctgggaagatggagatggccacccgtggagggagaatctgattctggggatcttccagagtaccttgatactgaagttgcatcaagctcaaacacagccatacttggtgcaaacaatgcagctgagaaaggtggaaatgttgatcgcatgtcatattcaaacgatgaaatgcctttagataacctgattcatcggtctatggagctgccttctgaatttttcactgaaacattgccagtcatatctagggacctacaccctatcccagaggagagagttgttgagaacttcaacgtgcaagaaaatcatgaagcagcaatttttactgattcagttgttgccttgactgggttgcatgtaattgaagagcactttgatgatggaactgacagaactctaagctctgaagttgtttcctcatatcctcgagctaatggtgtcacccaatctccatcaaatgcaaaatctctggaggatattgagactgcctttaggctggttagtgatggtgtggtctctgaggccaccatgggtactgaaactttgcagatctcaggtgctgatgctgcagagcccaaaggggctgctggagagctgcatgtcattgatgcgaaatctgtggacgacatacatgctgctttccagaagcactttgatgctattgtcaatagttccttggaagaaaatgaagacaaggataggcatgtagagatggcagaatccatgaagcctgatcaacttactgaagcaatacatgccgaaagtcagcacaacttgggagatgctagggaggctttaccagcggaggagggtacaagcgatatgagtactagcgaagcagagagtcacaacaacattggtgcagcatccgataaggtctccgatagcagtgccaagaatactgcgcaggcagtggtgttggaggtttctagtgaaagagaagaggaaagtgaacagcagtgaagaccagtggattgactgctgaaaggaatcaatagaattccaccatatatgaatttgagacaaaaatgctccctggtttgaagtttgaaggagctatagcaagcattgatggagcgctattgctgagtttcacgggcttgccactgtgcatatacttcacacattcaaaacacaaagttctgaagtagaccttttgtgaatgcgtttgctttttatttttgctattgttttgaggttttggtgggtttgttttagattgatcccccctcgtttggctgtaatttgaagaggtaagttttgcccagacagttcggtgtggctgcagggacatggaacgatctgttctgccatgtgaattgagattttgttgtattgtttgaactttgaactagcgaagctggcaatagaagaacaagataggtgtatttcacctttgaatgtgtcggtgacatttattagtg

SEQ ID NO: 16350 - DNA, 6514 bp, Zea Mays
cgcaactgccatcgtcctctgctcgtcgcgtcgttctcctctcgaccgcatcgcgcccgtggcggggaacgagccatcgacgccgcgtcgcgtgcctttcttcttcgtcccccccctgcctgcctagctgtctcaggctgccgcccgcccagccccaaaacattcggcagccgagtcaaccgagaacacgagccatccacccaccctgtcccttccccggctttcccccgtcctcggctccaccaattgctctcgcgtcagtggaaggaaaaaccaagggcgagggagggaggagcgcatctccgccccgcccgcgttcccgtaccccgatccgccacatgatctgacaccgcattgccgccgaggtgacccctcccgcccccagaatggaggcgctcaacgagctctgcgacctggtggccgcgcacccggatctcctcctcgccgacaagcttgcatggctctcctcccgctgcgccgccgccccgggtgccgccgccccgcagcgtgcgtcgagggcgcaccttcattcgctcctcgcgttggcgcgcctcctcccggcgggtggcgccggtgccggtgccgaaggcgatgcggcgcccccggccccactcctattcttcctcgcgtcccacgccttcctctcgccggccttctggccccagtctttcgccccggcgccgtttctcgctaggctcctcccgctcctcgccgcggccccatcctcccccgccctttcttccgcgctctccgccgccctcctcgcggcgctcgacgtcgccgacccgacctccgcgccgctcgcccgcgcgtttctctccgccgccgctgccgcggcgcccctgccgctcctccccgcggatgccgcgcccatcgctgcccggctgctcctcgagtttcttggctccgaggaggagccgatcagggccaaggggaagggagaggacaccttgggcgaggaaaacggtggggcaaaggaggtagtgcggaggttcgaggaggaggaggtcgatgagctggagcggaaggaagtcgcattcagactgaccgtgcatatgcttgggggcgagggtgggctagagaccgagcagattgggaaggtcaggaatgctgctgcgcgacaggtccgatcactcacggattttctcaagattagaaagcgggactggagggagcagggtacacagctcagggcaaggataaacaccaaattgatgtgttgtcaagctgcagtgggggtgctggtgcgaagcgtttccaccatggatactgatatcaaatcttcgaaggatatgctccagcagactctagcttggttcatcgaggccaccaagtcgtgcatcctgtcatcctggcggaaactgaagatatgcgaggagctattttgcacactgctcaatgggatcagccagataactgtctcacgtgggggccaacttctgccggtgcttttgattcccttaaaaccgcttgttgtgagcacatgttcgcaggctgacatggcaggcagtagtcctggggctctatttgaagcagttgtgaagttgagctgtgagatcatagagtttggctggacaaaggatagggcccttgttgacacatttgttatgcgtctagctgcttatgttcgtgagcggaatgattacgaggaggagattgcaagcacaccgattcagattgttaaattgattatggttgaggatggcaaaggaaaagaggcagttccagttattcgacttaatgtcatacgccttttggctgagttatgtgtttgcttgaaaaaatgggaagttgtggacatgattttaccccttttcattgaacatctagaagagggtgatgcttcatctccaagttcattgcgtttacgattattagatgcaatatctcgtgttgcgtgcttgggttttgaaaaatcatatcgtgagagtattgtcttgatgacaagaagctatcttgacaaagttaaagctctaggggcttcagaaaacaatacagttccatcagaagcaacaactgagcgaacagaaactcttcctgcaggctttctgcttgttgcttccaaccttacaagcacaaaactcaggtctgattatcgtcataggttactgtctctgtgctcagatgtggggctagttgctgaatctaaaagtgggaggagtggtgctgatttgatgggtccgttacttcctgcagttgctgatatatgttctgattttgatccagtgtccactgttgagccatcattattgaaactattccgaaacctttggttctacgttgtattgtttgggctagctccacccatacagaataatgaggcacctacaaaaccggtttccacttcattaggtacagcagaaagcagcagtgctatagcccttcaagctgtagctggaccatacatgtggaacagccaatggtctgtagcagtgcaacgtattgcgcaaggaacacctcctctggttgttagttctgtaaaatggcttgaagatgagctagagttaaacactctacacaacccaggtagtcgtggtggtaatggtaatgaaaattctgctgttgggcagagagctgcactttctgctgctttgggaggtcgagttgaggtagcagcaatgaacactatttcaggggtaaaagctacgtacctacttgcagttgctttcctggagatactacgttttagttgcaatggtggcatactctcggctacatctacattgaatagatcaaacagtgctttcagttgtgtatttgaatacctgctcactccaaatttgacaccagcagtaactcagtgtttgacggcagttgcacatagagcttttgaaacagtgctgtcgtggctggatgatcgcatatctgacataggtgaaggagctgatgttagagaatcggttctttctgttcatgcttgctttctgataaaaagcatgtcccagagagacgagcatgttcgtgatgtgagtgttaagcttttaacgcagctgaaggaaaagttcccacaggtcctctggaactcttcatgcttggatttacttcttatttctgttcacaatgagttgacttctggtccagtcagtgatcctgcttgggttgcaactgtacgctcactgtatcaaaagatcgctagggaatggttaacaagtgctctttcatatgctccatgtaccacacaaggccttatacaggaaaatttttgcaagccaagtggagtacaaagaacacaacatacagcagatgttgtttcacttttatctgagatacgtatttgtagtggaaagaatgattggaacggtattaggacggccaatgttcctgcagttatggactcagcagcagcagcatcgggagccaaaaaagaagcacctgacttcactttggaagtactctctactgcagtagtgagtgcaactgtgaagtgcaatcatgctggtgagattgctggtatgagaaggctgtttagtactatgggaggcataaacatgggcatgtctcctcctgggacacaatctttgcacccccatcagtcatttgatgaagtttttgtctccaagtttgtcagtcttcttcagaactttgttgttgcagctgagaaacaaccaatagataattcacaatttcgtgaaacatgttctcaagctacagcattacttcttgatcatatggtgtctgattctagagcaaacctggaagggttttctcagcttatacggcttctatgttggtgtcctgcttatatttctacccctgatgcaatggaaactggaatctacatctggacatggctagtatcggctgcgccttctttaggtcctcttgtgcttgcggaacttgttgatgcatggctgtggaccatagatacaaagcgtggattgtttgcatcagatatgaattactgtggcccagatgcaaaattgaggccgcatcttatcgctggtgagcctgaggcaccaccagaaaaggacccagtagaagcaataatagcccatagactctggcttggcttcttcattgatcggtttgaggtggttcggcatgacagcattgaacaacttctacttctaggtcgaatgttacaaggaacaatgaagtctccagctcatttttctcaccatcctgctgctactggcactttctttactgcgatgctccttggattgaagttttgctcatgccagtctcaatctaacttgcagaagtgtaatatggggcttcagttgttagaggacagggtataccgtgctgctttgggatggttttcttatgcgcctgagtggtatgaatctccaaacaaaacttatgctcagagagaagctcaatctgtgtcagtatttgttcattttctacaaaatgagcgcaccagtggtcctgtcgattcggtttcaaagttacagggacgtgaaggtgaacctagcatggcagatcacattcatcctgtttggggctgtgttgacaactacacaaatgcaagggaaaagcgtaaacagttacttctgacactttctcagaatgaggcagacagacttgaagtctgggcacaaccaatacatacaaaagatacaacgacttttcgcggtaaaatcagctcggataaatggattgatcatgtcagaactgcttttgctgttgatcctcgaattgctctttctatgcctttgaggtttccaacgaatgctacaatgcaatctgagattactcagttggtacagacacgattactggagcttcgtacaattcctgaagcattaccctttttcattactccaaaagcagtagatgaaaattcagtgctgttacagcaactaccacactgggctccatgttctgttacacaggcattggagtttcttactcctccttataaaggacatccacgtgttatggcctatgtccttcgtgtcttggagacttacccccctgagactgttaccttttttatgccacaattggtacaatctctcagatatgatgaagggaaactggttgaagggtacttgcttggagctactcgaagaagtaatatatttgctcatatcttgatatggcatctgcagggagaatatgttgatgaatctgagaaagatgcagctgctctgaagggcagtgcattccagtccttgctcccagctgttaaggacaaaattatagagagttttactccagaggctcgtgacatgtttgaaagagaatttgatttctttgacaaagtcacatctatttctggtgttcttttccctctccccaaggacgagcggagagcgggtataagaagggaactggagaagatttctattccaggtgatgacctctacctacctactgcaacaaacaagctagtacggggtatacagttggacagcggtattcctctccagtctgctgcaaaagttccaataatgattacttttaacgttgttgaccgtgacggggacccaaatgatgtaaaaccacaggcttgtatttttaaggttggtgatgactgtagacaagatgtgctggcgctgcaagtgattgctctattaagggatgtatttcaagctgtcggattaaacctgtatctttttccatatggtgttttgcctactggaccaggccgaggcataattgaggtggtcccagatactcgaagtagaaatcaaatgggtgaaacaactgatggtggtttattagagatatttcagcaagattatggtcctgtaggttcaccttcttttgaaactgctcgagaaatgtttatgatcagtagtgctggatatgctgttgctagcttactccttcaaccgaaggatcggcataatggcaatcttctctttgatagccatgggagattagttcacattgattttggttttattttggagatttcacctggaggtaacatggggtttgagagtgcacatttcaagctaagccacgagatgactcaattgctggatccatctggaactatgaagagtgatacatggaaccaatttctcaggttgtgtgtcaaaggatacctagcagcaaggaggcatatgaatgggattttaagtacagtcaacctaatggtggacagtggccttccttgctttagcaggggagatcctatcaataatcttcggaagcggtttcatccagagatgaatgaacgtgaggccgctaacttcatggtacgaacatgtgctgatgcttacaacaagtggactaccgcagggtatgacttgattcagtacttgcagcagggtattgagaaatagtttgtttctcgttttttaagtggcgttcgtgtacatcaattgtatgtagccactatctttttatgtagaatttattttttgagttgtatcatcgggcaaggatggaattcatgtgattaacgtaggatgcttggtgcaaagaggcaattctttttttttcttgcactgtaaaactgccaagaaagtagctagtaagttgatcaagattctgtattgctgtcgcagaatgcattttcgtttactagacatgtatgattcgcatttttatc

SEQ ID NO: 16351 - DNA, 2618 bp, Zea Mays
cgacaccgtctctggccggttccccgtccaggttcttcctccggatcgtcgcattaccccgatcctgtattcccatcgaccacacctcatggctcacgcgaataccacaccacacctcacggcgtccattcgttcccgtctcgtcttccgctgcttgcctccgactcccccacgcgtcgtctcgtgcttcccaatccccatagagccggttgatccccaaaggcccatggttttctccgacgccgcgtcgcctctcgtagccactgccgctgactctgcttcctcctgcgtcgcccacctccgctgctgctgtcgcgttagttgttgctgttgttgttgaagacgcgttgctcgctagggttcgtgatttctcgccgatcgattcgggaactggtaagctatggatctctcgcggcccgcatcgtcagacctctcgctcgggctgcactcgcatgcccacgcccacgctcgcgtgcacgcggcagccgcgccgctgcgcctgttcgacgacgcgaagccggagcgcctcgtggccggtgaggccgacgcggagagggacgacggggacgggggcgaccagcacttctccctcctcgggcactccctctgcgtcaagcgcccgcgccgcgccgtcaacggcggtgggggtgggggcggagagacgtcatcctgctcgtccacgtccccggcgctgcgccccgccaagcggcaggcggcgggggaagatagcggcgcggatctggagacccgccgcgccgcggtccgctcctggggcaaccagtcgctggcggaggccgacccggatgtgcactcgctgatggagcaggagctggcccgccaggtgcggggcatcgagctcatagcgtcggagaacttcgtctgccgcgcggtgctcgatgcgctcggcagccacctcaccaacaagtactctgagggggccccgggtgctcgctactacggcgggaatcagcacatcgatgccatcgagcggctctgccatgagcgcgccctcactgccttcggtctcgaccctgcctgctggggcgtcaacgtgcagccgtactcgtgcacgtctgccaatttggctgtctacactggtcttcttcaacccaaggaccgcatcatggggctggagccaccgtcgggcggccatgttagccatggttactacacgcccagtggcaagaaggtgtcaggtgcctctattttcttcgagagcatgtcgtacaaggtgaacccacagactgggtatattgattacgacaagctcgaggagagagcaatggatttccacccgaaaattctcatatgtggtgggagctcttaccccagagagtgggactttgctcggatgagattggttgctgataagtgtggtgcagtgcttctttgcgatatggcacatatcagtgggcttgttgcagcaaaggaatgtcgtagccctttcgactactgtgatgttgttacgtcaactactcacaagaatcttaggggccctagaggtggtataatattcttcaggaaagggaaaaatttaaggaaacgagctggatctttttctcaaggagatgagaatgaatacgacttcgaggataggataaattttggtgtttttccttcaatgcaagggggaccccataataatcatattgctgccttggctattactctgaagcaagtcgcaactcctgagtataaagcgtacattcaacaagtcaagaaaaatgctcaggctctggcatcagcgttgctcagaagaaaatgcagattggttactggtggcacagataatcacttaatactttgggatctcagaactcttggcttgactggtaagatctttgagaaggtctgtgaggcatgccacatatctatcaacaagacaccaatttatggggataatggctcaatatcccctggtggtgtgcggatcggaacacctgcaatgactactagaggttgcctagaagaggacttcgagtcgattgcagacttcctcataaggtctactcagattgctagcaatgttctgaaagaacatggcaaagtgcaaaaggagtttctaagaggcctaatgaacaataaggatgttatggaactccgaaatcaggttgaggcatttgcgtcacagtttgctatgccaggttttgatgtatgaatgtgcatatatactgtagtcagcaattatccagattcacagcaacattgtcatccgctcagttcctcgaatactagcaagtcttgctctcgactgcacaacgattaggagagtttttattaggttgtagagggtcttgactcttgattttgattcaaacaggaaagttgtgatgagttatgtatgtcaaccttggtatcacgagttactatagtctataggagacctgttgtggccttcggagacctgttgctgccgagactgaataagcttaccatatgatttctggctaactattaggcgaagggatgaggttaattgtactggggcgtaccgtcagtttcgtatgtttgcaaacacatcaagaatcaggtgctcatggcttgttgcatcaactgtttagatttattaggcgaagtgatgctgcactgtttagatttatttttctgctttattgttg

SEQ ID NO: 16352 - DNA, 718 bp, Zea Mays
cgcagcgtcacgagagagggggtggggcgcttgccagtaaattgcgtaggcgtaacgacgaatccggcactcgcaaccaccgcatccgtcctcgtctggtccggttgcctactcccctcccactgccccgctgctgctgcctccccgcgcaatggcgccgagatccccgcgctgagcgagcctcccgggggtcgacctccgaaccggcgctgccgtcccgcagtgcacttgaagaccaggcagctgttctctactcaaggaagagatggcccatgtttcgttcaaaagcaaagatgtggacagcggcatgtcccggtggtctgaatacctaagtgttgaagagccaattccttccgcaatggcaacctggaggaacatgagcgctgatgcgccgcaaggctcttctgctggtagccacaaacatcttcagatggagccggtggttcagctgtccaaggttgcggaaggcttgctggccaaaatgtaccggctgaacagcatcctggactatccagatccaaacacgcacacattctcggatgcattttggaaagctggtgtctttccaaatttccccaaaatttgcatcacgatgtcaaaaaaatttccggaacatcctaacaagctgcagctagaaagggtagataagtttggtcttgatgctttaaacgagaatgctgaaggttacatgcacaatcttgagcagtggatcctgtaa

SEQ ID NO: 16353 - DNA, 1320 bp, Zea Mays
gtcgggacctggcagtcgcgtcgacctccccgccgcgcccacggcactcgccactccacccaccaggccaagcacgcggcggcgacgccaaagcatcagggcaccaatggttgtgctccccgcggccccgcggcccctactcctacagtcctaaataatagccttccattccaatctgttcccacagttcagtcgcacactcgggcgggtcaaattcgactcgggaggaaccaaccacccggaaattcccccctcctccagtctccacttgatcggcgaggcgctgcggccgcgggcgaatggcgtcggaggcggagtcgcccgtggtgatccacgcgtggtcggcgccgcgctccctcagcaccagcctcatgtactccttcgcccagagggacgacatggaggtgcttgacgagcctctctacgcaaatttcctgcgtgccacaggcgtcgacaggccctaccggcaggagctcctgtccaaaatggaccctgatggaaataaggttgtcaaggaggtgatttttggcccaggggacaaaaagtatcgttactgcaagcacatctcaaagcaacatctcccaaatctgtcaagcgacctcatgaagaagggaaaacatttcatattgatacggaaccctctagatatactgccatcttttgataaagtcgttccaccatccttcatggagcttggcataggcgaacttgtctcaatatacagtgaattatgtggacttgggagcccaccccctgtgatagatgcagatgatctgcaacaggatcctgaggccgtcctaagtggtctctgtgaggatctgggcattcctttccagccacaaatgttgaaatgggaagctggccccaaggaatttgatggtatatgggcaccctggtggtatgggagtgtgcacaagtcttcaggtttctctaagcctcgccaatatcctctgactttcccattcgtgttttatgacctgcttgagcaaagcttgcctttctacaacatgctgaagcgccaaataaggaagataagaggaccgcagcaaccaccattatcggaccctcctctgcctgtccctgcaaataaaaacattcttgtttgggttggagatgaacttttgccccgtaacagtgcaaaggtttcagtgtttgattcagttgtacaaggaggagatgctgtttgggaaggtttacgtatatatgatggaaaagtattcaaattagatgaacatttggacagattgtttgattctgcaaaagctatggccttcagcaatgtgcctactcgtgattggagctgtcatttgcacatgcttt

SEQ ID NO: 16354 - DNA, 3592 bp, Zea Mays
gtaatttgatcagtatgcctattccgacaaatgtcaatagattggaacgatgagctcaatgacgaccctggtaccaatgaggatactgcacctattgacaatgatggtagcgagcaggcatctgaatcaaagcaaggtgctaccaatcgttcagaagaaaatgaatgggataaacttttgcgtgtcagatgggagcaatatcaaatagaggaggaggcatgtcttggtcgaggcaaacgtttaaggaaggctgtttcttacagagagacattcgcaacacttcctaacgaagctttaagtgaggactctgatgagggagatgaaccaaagagagaatatacagcagctggactggccttgaaggaaaaatatggaaagcttcgagctagacaaaaggaaaggattgctcagcgacacattatcaagaactatgctgatgataatcttgaagagttcatgactccatacgactctattgctaatgaacctgctgaaaatcctttggtaatcgtagaagatctaaattcttcacagctatctggcgcgaaacgtttcagtgactcaactggagaaatgaggcaatcctccaagaaatcaaagagatattctgaaatccctcaagatctttatgccaaaattcctggtaacacagcttcattcaagcaccactcaaaggccactgatgtattcaatccagggaccccaaatcacttgctacctgtacttggcctttgtgctcctaatgctgatcaggtgaactcatacaaaaactcaatttgtgcaccaagcataaaggagcgtaaaagggccagtggtgacattgtcaaacaactgtcaactcctgctgaccattctaatgtgcatagaaacgaagctcaatcagcttctgataaggccatctttcctggtgcatctgaggaggctttgcgaagaataagtaacatgattccagatagttattttcccttcagtcatattcctcctatatcagggaagggggttgatcctgttgaaaatcctggaccctccattgcatcatttcaagggaatctgggtcttccaaacttcagtctggaagacaacgctccacttaagcatattaagcctatacctgatatatttcctagcctgtcactgggtgctcataaggattatattcgtagttctgtcccagagttgccagatggttcattgctgccaaacttcatggcagatattactggtacttcgaagcaaaagtcatttatgtctggtctacttcctgggctgggtcttagcccagggcaaccaatacattcggctatgcctgataatcacaagaaagtcttggacaatataatgatgcgtgctcagtatgcgtcaaacaaattcttgaagaagagatcaaaactagattattggtcagaggatgaacttgatgctctgtggataggagttcgtaggcatggaaggggaaattgggatgctatgcttagagatccaaagctgaagtttttgaacaaccgaactagtgaggagctggccttgaggtggattttggaggagcaaaaaattatagatgaacctatgtctacatccaccaggcgttctaactcagcagcatttcctggaatatctgatgcaatgatgtctcgggcactgaatgaaagtaatttctctaaaatgaggatggagcagcctaaattgcagtcccacttaactgatattcagttaggttcgagtgatatcctatccacatttcctcatgttgacgctgctagttacattaactcaggggagggtggcccatctcaaataccatggcaggattttaagcatagatcaagttatgctggagattttcctgccggtgcatttgacaagttggagaaacctgatgttggaccgatcccgccatttatgccaaatcctttcatgactgacagcattggttcacttcccataaacagaaaaaacaatagttccatcccgcatagtgaaatcaggtcaagttctcgtgagaacattctttctggtgtttcggatggacagatcaacttgcttcatgagatgcagcgtcgtcgtcgtgtgaggtcaggcaaagaacccattgagatgaatctcaaccacatagaccactcaaatctccagcttgataatactagtgaccttggaggtttaaaaccaaacaagttacctcattggcttcaggaggctgtacgtgctccttcatctaagccacctgaacgtgagctaccagcaacagtttcggcaattgctcagtcggtctgccttcttcttggagaacaagaaccatcaatacctccattcttgatcccgggaacacctctttctcgcccaaaagatccaaggattaattcaaagaagaaactccgcaaggctcagcaatctaactctcatgtagagcattcaaaaattggatctggtgagggtgattgtgtcactaccccagcacccccatccattgaagcttcacctgcacttcctgtcgattgcgatgatggtgagccttcactcaacttgaaatctgcatcgttgtcatcttcagctggcagcaaggggctagatgaattacctcccacatttaaagaagcaaaccaaaccgtggatggctcagaagctgttgcggccaagtcagatgctcctgaaattggttgtcaggtacctggttcctctccattacatgacaaaggtagtgaatcctcggggtcgccagtgaaggacactcctgacgctggaatcagattgccaggatcagataactcagttatggcattttctgcactcccacttgttgatgaagcacctgggacaagcagcagagcagctgacacgcctgtgccatgtgatggcaatgagtcgaaagaggatgttccactagacaacgctgaaagcaccaggaaactggagccgaacggatgaactggctcctcttgcgagcatggatgcatcgcatcgagtttctgctaatacagccgacgaagatgggtggatgaaatgatcattagactcgagctagttagctcaacattcctttcttttgcgttcagcataacactgggattttccctctcccaatgtttccagtgttgatctcgtgttgtgtaatgctttagtgcaggtctcgttgcagataggatgaaacgcaaagggctagtggtacttagcagtagttgggcactagtccgtcgggggagcaactcgtggaaacctgtatacaagaaatgtatattttgctaatatggtgctggttgggtgtgtagaaggtagaccgctattcgtttatttatgcgtatatggtttagtaatttgccatctgtctagcggtggctgtaagagtagacgtgatgatgatattgcctagccttgactcgttggcctccatgcctagccgaagagaagctgtgttcatactgacataactgacatactgagcgacttttgactgtttttttttatttcattagcggcaacgaagccaagaaccatgatcttcactcttttgtccccaccccccaaaaaaaaccccggaactctcaactattgttgtgcactgtaatttacctcttcaaattagaaaagtgatgttttg

SEQ ID NO: 16355 - DNA, 1478 bp, Zea Mays
gaggaccagatgttcgtatacttcatccaagatgcaggagatggatatgcattcacacagggagactatcttttgacatattatattgctgaactccactcatcagtggttactgtcaaaatcttaaaatctgaagggtcatggaagagaccaaaacgaaatctgaaaataaatatattgcttggtggaggtgctatgataagtacagatggtgttgatggtgaagtaatacaccttacaatgccttctgaatctgtagtgtcaagcttagttgcaaccagcgaatttgagcacaagaaacgaatggagatgattcagcctatacctgatatagaagagccatcggggcaggaaggtgctgagctatcaaaaatacctgttgatttgaaaagtggagactggttccttaagattgtaccatggattggaggccgtattatatcgatggcccatattccttctgattcccagtggcttcacagcagaattgagataaatggttatgaagaatacagtggggctgaatataggtctgctggttgcacagaagagtacaaagtcatcaggaggcaccttgaacaatctggagaggaggaatctatttgtatggaaggagacattggtggtggtctggttctccagcgccagatatccattttgaaggacaacccaaagattgttcagatcgactccagcattcaggcaagaagtgtaggagctggttctggtgggttttcaaggttggtctgtttacgagttcatcctacattcaccctgctgcacccaactgaggtagtagttgctttcacggccatcaatggttcaaagcaagagatctccccggaggcaggagaaataacattcgagggagacctcaaacccaacggagaatggatgctagtggacaagtgtgtcgggctgagcttggtgaaccggtttaatcccagggaggttagcaaatgctttgtgcactggggaactggtgatgtgaacatggagctctggtcagaggaaagaccggtgtctaatgagacgccgttgaggatttgccaccagtatgaggtgcagcaaacaacctaaacacctgcccgaagagcagaaataaaaataccaatttggaggatacttcagttgcttgcacttgttttacggtctctgtattgacggtcgcgcaccataacttccatggtattttggagtcgtgtcgttagtcattaccctcttggaggactttgggtctgctgaaaacatggttactcagcaatatctgctactgttcacgactgacattcaaagggttactcagcaatatatggataaaatttgtgttaaagataagttgtgtcgtgtgggttgagttatgtgtgttgtgttgtgctgtaccttcttctatctattaatggaaagatacgtagatctcctgcgtattcgagaaaaaaaactatatggataaaattttatgaaacatcgtaagtgtg

SEQ ID NO: 16356 - DNA, 1204 bp, Zea Mays
gactgcaaattgcgcgtctcctccgcccttaatcctgacaaaaggaaaaacgcgaagcagagctccctccctcctctctcctcttcttcttcgtcgtggtgttggtgtggggcatctcgcaccccacccatccctgtcctcccgctcgccggtgcgcgcgcttttctagggtttccgctgccccagccgccaatcccgctcacctctcgtcaccggcgatggcgtcggcgtcggtgtcggccccggtggcaggggcaggggccgggggcgggaaggacgaggagctcgccgatctggtgcggcgcctcatggacgccctcgctcgctacgctgatcgcctgcccttcgaccttgatcgccagctgactcttgagcagcttgtcaggcataagctaagcgaagggcgaaggttcacatgccgcttgcttggtgtgattttagaagaaacagctccagaggagcttcagaaccatgtcacagtgaagccttccgtggtggaggttctccttgagattgcaaaattctgtgatgtgtatttgatggagcgcattcttgatgatgagagtgagggaaaggttttatcggccctgagtgaagctgggctttttggtggtggtggcttgataaaagataaggttctcttctgtagcacggagaatggccgtacatcttttgttcggcaactcgagcctgattggcatatcgacacaagtcctgaagttgttcaccaattagctaggtttatcaaatatcaactgcacatctccccgcagcgacctgaaagaatagcaaccaatgttttcaccgctccaagcttggaacagtattttggaggcctagaccagagataaagaggtcaaactccatccaggaaattggcggcggcggcggattagtgagaagggaggacgtcattgttttttcttttctctgctcgaatgatggaactcgttttttttcctgtatcatgtgtaaaagcctgtgctatgtaccagtaatccattgttgtgcgatatgtagtgcctcagaatctattcaagggaaaacatatgtagtagcatacttgtcgaatcagttgtgttaatgtacaactacaaccaaaatagcatagttgcaagtgccaacctccctgctattgccattcgctcttgtgtctgtttgtcacatcaagattcgctcttgtgttgtcacacgagtttgccga

SEQ ID NO: 16357 - DNA, 662 bp, Zea Mays
accaaaaaaatgcggtggcacacacatactgtactgtagcatcggccatggtcgcggccgccgccaccaccacctccaactcggactgacctctccccggtcccagctcccgaacaaaaccctagccaaccctagtccgccgatggcgttcgcgccgccgcacctcctcccgctgccccctcctccggcggcggcatccacgcgggccgtctccgcgcgcaaccacggggggcgcacggcgcctgagctctcgggcccgaccccgcgcgtggtggtcgtcacctccggcaagggcggcgtcggaaagacgaccaccaccgccaacctcgccgcctctctcgcgcgcctcggcctcccagccgtcgccgtcgacgccgatgctggcctccgcaacctcgacctcctgctcggcctcgagaaccgcgtccacctcaccgccgccgacgtcctcgcgggagactgccgactcgaccaggcgctcgtccgccaccgcgcgctccacgacctccacctcctctgcctctccaagccccgctccaagctgcccctcgcgttcggatccaagaccctcacctgggtcgcggacgcgctacgacgctcgaccagcccacccgcattcatcctcatcgactgccccgcagctgcttgatgttttgttttgc

SEQ ID NO: 16358 - DNA, 3092 bp, Zea Mays
ggaacttactaggaaatctcaagcaatggacaacaatgacacatctgatctgagaaaattctcaaggcaagcgtacctgcaaaagcgacgagacaaaaaaattgaggaaattcgtgatgaaattctggaccaccagtacatttttcaggatctgaaactaacagaggcagaagaaaaggagttgagatacaagatgaagatatatgatcttgtcaaggaacatgttgagactcctgatgatgttggtgcgtacaaaatgcctgaagcttatgacatgggcgaaaatgtcaatcaagagaagagattcgctgtggccatgcaacggtacaaagatcctaaggccaatgataaaatgaacccttttgctgaacaggaagcatgggaagaacaccaaataggaaaatcgaaactgcaatttggatccaaagataagaagccgtcttcagatgagtatcagtatgtatttgaagatacgattgattttgttaaatcatcagtcatagaaggaacccagcctgaagatgattcagataaagaagacgttgaagcaaaagatattttgaaaagggagctccaggatgagcgaaagacacttccaattttcaaatttagggatgaactgcttaaggctgtagaagagtatcaggttatcgtcatagtgggtgagactgggtccggtaaaacaacacaaatacctcagttccttcatgagtctggttatactgcaaaaggaaaggttgcatgtactcaacctcgtcgagtagctgccatgagtgttgcagcaagagtatctcaagaaatgggtgttaaacttgggcatgaggttggttactctataagatttgaggattgcacttcagataaaacaattattaagtacatgactgatggaatgcttctaagggagttccttggtgaaccagatttggctagctatagtgttgtcatggttgacgaggctcatgagcgtaccctctccactgatatcttatttggtctagtgaaggatatttctcgttttcgaccagatctgaagttgctcatttctagtgccacccttgatgcagaaaaatttagtgactactttgattcagctcctattttcaagatacctgggaggcgatacccggttgaaattcattatacaaaagctccagaggctgattacatagatgcagcaattgtcactgttttacagatacatgttacccaatcccctggcgatatcctggtgtttctcacaggtcaggaggaaattgaaacagttgatgaaatccttaaacacagaacaaggggcttaggcaccaaaatctcagaattaattatatgtcctatttatgcaaatctgcctaccgagcttcaagctaagatatttgagccaacccctgagggtgcccgtaaggtggttctggccactaatatagcagagacttcattaaccattgatggtataaaatatgttattgatcctggcttttgtaagatcaaatcatacaatccccgcacaggaatggaatctctacttattaatcccatctcaaaagcttcggcaaaccagagggctggaagatctggacgcactggacccggaaaatgcttccgtctatacacgagttacaactacatgcacgacctagaagataatactgttccagagatccaacgaaccaatcttgcgaatgttgtgcttacactcaagagtcttggtattcatgacttggttaactttgacttcatggatccacccccatcagaagccctattaagggctctggaacaactttttgctctcagtgcactcaacagtcgtggggagttgaccaagactggaagaagaatggcagaatttccactggatcctatgttgtcgaagatgatagttgcttcagagaaatataagtgttctgatgagatcatctccattgcctccatgttgtcaattggcaattctatattttatcgtccgaaggacaaacaagttcatgcagataatgcaaggttgaatttccacactggcaatgttggggaccatatagcactactaaatgtgtataattcttggaaagaaacagactattcaactcaatggtgttatgaaaactatatacaggtgcgcagcatgaagagggcaagagatattcgggatcaactagatgggcttatggaaagagttgagattgagatttgctcaaacaccagtgatttagatgctattaaaaaagctataacatcaggtttcttccatcactctgcacggttgcagagggatggtacatataagactgtcaagaaccctcagaccgtgcatatccatcctagttcaggattagcggaggtacgtccgcggtgggtagtgtaccacgaattagttctcacgacgaaagagtttatgcgccaggtgacggaactgaagcctgaatggctggtagagatagcaccacattattaccaactaaaggatgtggaagactccggaacaaagaagttaccgaagggccaaggacgagctgcattgtagctatgatacatgaagtttcgatggatgtattgtgttggactcatcgtaggagcatcataggatgtatataactccttatatcacgaacaggatacaagatgtcacttttcattgccctgcttaggtttcagagtaagctgattgtgaatgtaaattgtgacacgaagacatgcatgtgaaccgctataattgtcacactggagggagcgccggcatgcaactttcgtgtcttccagccgctacgcttgacgatcgttcgcatcctgccgccgtcgcgactattatccaagaaaatgcatatgtgcctttcctcgccggcctcttggatatggatgtatgttgaacaaacgcctatcaagggaaggataaatgagggatgagtatgggattttgaaaaaaagaaatcctgaatctttctgtaaattgggtaagcaaattgagaaaaatggatgggttgggacggaatcgtgagtcttgaatctgaacaactcagggtctttggttgggaccggattatgggccacttgatccgaccaactcgtaaaaaaagtcaggcttgattgtccaaaaaaac

SEQ ID NO: 16359 - DNA, 459 bp, Zea Mays
gggcgaggcgatgtccatggagtattcaggtgactacggaagattctctgcaactctgaagctaagacctggaaggtacgagatcaagtttttggttgatggggaatggagattgtcgcctgaatatcccactgctggagatggactgacgcagaacaacattcttgttgtggagtaatacaacttcctcatctaccatttcaatcatccaaacaatgccgaagtgcacctacatctacatgtcttcttccatctgtaatactatgcttactatgtggacatgtggttgcctcacagaaatcgaataaattagcctatcctggcatatgatcctttcgtatttaaatatatgacgaataaattaacctatcctgaacgtcatatacttaaaaatggagcgaataccagtgctagatcacaatgatttgttcttttctgtgccctagactagaccagatc

SEQ ID NO: 16360 - DNA, 3249 bp, Zea Mays
agcagcagcaagcaggccagcagcagcagcagcaagcagcagagcgcgccctgttcttgtgccgaggaattatttattgccaccgcatcgagatttatatatggggaggttagcacccggcacaagcaaagcgccgggttcttgtcgcagtttctgcgcgctcgctcgctttttgcccgtaagatctgatacaaagaggagagggagagccaagagaggagaggttctcgtgtggaattcttcggcgatgaggtccgacgcccgtctggattcggtggtcttccagctcacccccacccggaccaggttcgatttggttctgatagcgaatggccggaaggagaagtttgcatctggtttgctgaaaccgttcgtcgctcacttgaaggccgcccaggatcagattgccaagggagggtactcgatcacacttgaaccaagctcagggttcgatgtgccatggtttacgagaggcaccgtggagagatttgtgcgtttcgtgagtactccggaggtccttgagcgagtcagaacactggagtctgagatcctgcagctcgaggatgccattgctatccagagcaacgatagtcttggattaaaatctgtcgaagaccatggaagaaagttgactgaaagcaatggaggtggacgtgcaaattatgatcctgattcagccacagcaattgttgtctacaagcctggatcaaatccaacgccacaaattcagaatgaaacagcagcacatgaggagaattcaaaagttcaattgctcagagtgcttgaaacccgcaaaactatgttaagaaaagagcaggctatggctttcgctcgtgctgtagctgctgggtttgacattgacaacttgggttacttgatcgcatttgcagagcgctttggtgctgcacgtctgatgaaggcatgttcacatttcatcgaactgtggaagcagaagcatgaaactggacaatggattgaagttgaacctgaagcaatgtctacacgctctgaatttcctccatttaacgcatctggcattgtgttcatgggagacaacatgaagccaaacttggaatcaggctccattaatggagaggcaaatggcgaggatggagctaaagctgatcagaagtccagccagcagatgggatctcatgctgcatatcctccatgggcaatgcatcctccatctggtgcagttgtttacccaccttatcctatgcaaggcatgcctttttatcctggggtgaatccatactaccctccatatcctccagtggatgatcccaggtaccactactcaggaaggaaatcttcgaggaagcactcctcggatagtaaggactcagaaactcttgacgttgaaagtgaccattgcagttcagatagaggaagttctcatggtcgcaagtcacatagaaaggggaagaggtccggaaagaaaaaacctagtgtggttgttatcaagaatgtgaatgtaacatctaaaaagcatggctcatcagagagcgaatcacaatcaagttctgaagttgagtctgcggacagtgacaattcacactccaaatcaagtgaaaggaagcataaaagctcaagttcaaagaaaaaggagggtaggagaactacttttgcctccggagatgaatatagcaaggatgaaatgtcaaatggccacgatgctgagcaaggaaactggagcgcattccaaaatttcttgttgagagcagaagaaaaaacaagatctagtgatgcagacctgtttgctggtgagaaagaacccccatcaaggagaaaacagaatgtaaacacagcagatcctattcttttagctgagagagatggtggcattgtccatgagcggaacatagtaggttttgattcagccaatgggaggactagagctatccgggtcatgtccaatgatgaacttgttatgtctggagaagggaggaactatatgcatagtgaaataaaggagattgaagctggtggaggaaggtacaggagagggacaggtgatgactacatggtttatggtcagggaagtcagatagccagacatagtttgttggatcctcttgcagaggcccagtacaagaatcctgttcagcaggacaagaataggaatggtgtggcggacgagtcctttatgatccctcttaggtccagcttacatgataatatcggagcagaaagcagaactactattgacatagatgttgagcttccttctagaattcataaagcatcagatgaaaaggctggacatcagcttttttacgaacctgacgaattggtgccagagcgtggatctgaagatgtttcatttggatatgatccagcaatggattatgatagccacatgcagactactgtgaaggtggaagatgaaaaaacagaggatgacttgccagttgctgacaatgatgtacagaaggtagagaaagagaagctaaggaatgcaaaggatggttcagataaacgaaggaaagatgccttattgaggaggttatcggcgccaaggaccccactgaatgatgcacaaaaacgtgcacagaacctgcgtgcatataaggcagaccttcagaaactgaagaaagaacaggaagaagagcaaataaagcgattggagaggctcaaattggagcggcaaaagaggatcgccgcaagaggtaatggaaagggtccagggaatggttctcctaaagcgaatggtacgaatggactcagtaaatcagttccaaccttcactgggttgaaaaaggagaaaaatggaacaactgaatcactcagcgatcgactgaagaggctttctgaacccaaaagcattgctggggcagagcattccttgaatccaaagtcaactggcgcagaccattcacgaagaagaagcatggcgtgagacggagaaccgagcatcttgaatccatcgtaccactcgctagctcagcaaccatgaatggcatatcaaaaggcttcttgtacagaaagaggaaatggctggcgctgtagcactgcctgcttccaagatttgtgatggaaaatcaagttaccttttcaatggcatggcgttgtacttccaattttaacataattatttcattcttttattgaggatggcttgtaatagctgtaaacctggatttttcggcgacgcggagctatattttggtttttggctgtatttatggaatggattgatcgttgtttgagatatattgtggtatttatacagtgtataaatgtcaa

SEQ ID NO: 16361 - DNA, 1183 bp, Zea Mays
aagaggcattggctgatccctactttaaaggcattgcaaaagtggagagggaaccatcctgtcagccaatttcgaaaatggaatttgagtttgaacagaagtttaccaaagaggatgtcaaggaacttatattccaggagatactgcagtaccatcctcaacttctgaaggactacaagaacggctctgaaaagacgagttttctatatcccagtgctgttgacaggttccgtaggcaatttgctagcttagaagaaaatggagagaggaatgccacgcttgacaggaaacatgtttctctcccaaggacaacaaccgttcactccactccaattcctgcaaaggaaggtccagcagcaacctcccagattgctcaaaggattccagcagctagaccaggaagagtggtaggcccagtattgccattcgagagcgcaagcgtcaccgatcaacacatcgcccgacgggtggcaaggaacccagctgttcctccagcaacgaacacctcgtcagtctactgctaccacctcaagtcggacagctccgacaggcaggagcatcatctagagcgtgagaaagatcgaaggcagtataggccagggcagcatttcatggatgccaaggagcgctcttcatggcgttgctcccttcaatggcatcgcagcggccgctggtggttacagccaggccggtgttcttcactatggagttacaagtttgtactaagagcgatgcccttggggagggtaatataagatggggaaaccggagtgcagatccagctgcccccttcccactcttgcactgcctggaaaatcggagcacgcgcgtacctgatccacgatgcatgtgtccggaaaggattttcaggctgggaactggcgagtgtcaccttcattgctcctgtttgaatgagctatggggatggtcttgggccaacgttgtgatctgaagtgaaaagcaaggtggtcgacaattcgggttggttaactgcctgcccctttcgaagaaagggggaaaattatccatgtgaggaaaaggctagggaaaatttgtggatagctgtacagtgcaacacttagatttgtatttaaccaactgaaatgttttgttccagttataaacgtttaaatcatataatgttgtttatataggtggaattttcctaatgtccattccactt

SEQ ID NO: 16362 - DNA, 1671 bp, Zea Mays
atccataacttctcgcaattgatctagtcaccatatccgcggtaaggtcgccacgcccgcagcccgccgacgcaaagccgcgcgcgaggcctctcccctgcgtacgcggcgatgaagatcgtccaccgcgacctcgttcgcaacgggcctggctccgtcaagttggtgccggaggaggaggacgacttgtggcacgcgtacaacctcattgccattggtgacagcctccaggccgtcaccgtacggaaagtgctgagagaggtggcatctggaggacgtgatgccgagcgtgtgaagcttaagttagaaattgtagtcgagtctgtagactatgacaaggagggatctgttttacgtgtgcgtggaaaaaatatcactgagaatgaccatgtgaagattggccagttccacacgttagagcttgagctgaagagaccttttgttctacgaaaggaaatttgggattggttagcacttgagaccattcagcaagcatgtgatcctgctgcaagtgctgatctagcagttattctcatgcaagaaggacttgcccacctattcctcattggcaaaagcataacagcaacccgggcacgtattgaaacatcaattcctaggaagcatggccctgcaattgctggctacgagacggccctcaagaagttctttgagtatgttttgcaagcatttctgaaacacattgattttgaagttgtccagtgtactgtaattgcaagcccaggttttacgaaggaccagttccgcgattatttgtttcttgaagctgcacggcgagatttaagagtaataattgagaacaagcaacgccttgttctggcgcatgcaacatcaggttacaagcatagtttaaaggaagttttggacacaccaggtgtgatggcactgataaaagatacaaaagcagcacaggaggtccgagctctgcaggatttcttcaatatgcttactaatgagtcagctcgtgcttgttatggaccgaagcatgttgagtttgcactgcaacagtttgctatccagactcttttaataactgatactttgtttcggaacgctgacattgctacgaggcaaaggtacgtgaagttggttgaagatgtcaagaaaaatagtggcacagtacacatattttcctcgatgcatgtctcgggcgaacagttggcgcaactgacaggaatagcggctatacttcgttttcctcttcctgaactagaggacatggagctgtgatgaaaccaacctttttgcttctcgataacattctttttggttgtgatctgttagcatactacctgtatcatgtgtaacgttatggagctatttgatattgtataggcaaccctggaaaggaattctggtattttttaaggtatatcctattcgttgtaaatggttcatcgtgcgttgtttgccagttctttttctcgttaagggctagtttagaaaccctaatttctcaagggtttttcattttcccaagagaatttagttcattttctcatgggaaattggaaatctcatggaaaaatagggttgccaaactagacctaagtcttgttgttatttttcacatcctaaactatctgcatgtaaagttaccactgagcgttggagctccagacatcagaactaattttcgtgggccttcttgtt

SEQ ID NO: 16363 - DNA, 2153 bp, Zea Mays
aatgttctaatcgtgatgaaagcttgccctgcgctgtgcgtgtaggatgcgcaaattaccaaaagggccctgggctactgagttggcggctgctctctcggtggtcccaaagggaagagggggaaccgggcagagagcagcgcaggacaagacaggcagagaagtcgctagccagactagtctgcgcggtgatccgtcttccctggggtgttccgccgtcctgcagcagaggcagggggttgccgctctcgccgccgcacgctgcggctctgctctgctccgcctgatccttcctgcggcccttgttttttcctctcgtttcaggtggccagccttggttttgcagaactcattcagtggcctctgctgaaaagtgttcaatggcgtcaggagccaccttaagctgggttaaaaccccatttgacacccgaagatttcatgacctatctaatctaagtttccgctgccgaaacccttttggatcaattcagccctggtggctgcaaactgatcaagactcatccctaatcaaggttcgcgtggctgctgattattcagactcaatgccagattcaaagtacacgagagatcggggttatcaccctcttgaagaagttaaagaacgtccaaagaagaaggacctgttgctgacagatattgaaacagctagaacagtagtagaggcgcgtaacaaacaaaatgatggtttatacctttataagacatgccagtgagtatctgagcctaggtaacgtttgcaatcttccttctctaggcaaatagcaaggggttgcttgtatttcctgctagggtacacaatgaacctcatggacatgtttcttggtcggagtttcaatatgttgttgatgaatatggagacattttctttgaagtacctgacagtgagaacatcctggaagatgatactgcaaacaatcctgtgacagttttgattggaatggatggacccattattggagaaagtagtgtggcgattagtgatttcagtgattacatggatggtgaaaattttatggacgttcctgatgagcaccacaccaagattgatacagaaataactgatattctcatagagtgggggatgcctgcaacaatgcgtgcaatacatccgatttactttgccaaatgtttgacaaaggccattcataataataatggggagaagatggatagtccatcaaacggtctctctattgtaggatatctgagacctgctttcatagaggaagagtcttacttgaggagcatgtttcatggtgacaatggtggttattcatctgactggaaagtaaatgaaaccgatgaatacaacagagaaactcggccagtttctggaaccaatcgcctcattgatgatgataaatcaagatttgacttcaatcatgctgaaactagaactgattcaatgatctacaagctggagataatgacaattgaactgttttccatgtatggaaagcagtttaagattgatccacaagattttcaagattcagaaccagatattcttgcaaattctgcttcatcgataatagaacggatcaaagaaaacagtgatcagtgtgccgcggctctcaggtcgctctgtcgccggaaaaagggcctcactgtcgaggaggcaagcttgattggtgttgacagccttggtattgatgtaagagccttttctggcttggaagttaagactgttcgattttcattcaatgcacaggcgctctctgaacgttcagctgaaaagaagatcaggcgaatgcttttcccccgttaccagcgtaaaaacgtgaaagcctctactgaagatgagtcttaacctatcagctgtttttcctgagaaagcatgcaaacacctggttcaaagacaaggtgtcaagggaatcaacacaatatcatcttatgcgagtttgctaggagatagcgcacaacctgtcgactatgagaatgaccaaaaacatcagagtaataagacataaatgtcatgcaacgcaactgcgattatggcattgttttgttgaactatacataaaagaaaacttgataaagtttcgagtgcttttagctgtcagattctactgtgctcgattgcactactgtactcgtgtactgtaagaaaagactgaccagttattttccag

SEQ ID NO: 16364 - DNA, 235 bp, Zea Mays
tgtgtcatggaagtccggtacatagatatggcctcatgctctccagtggatcatcgaaattaatgggcaaccaacaactgatctggaaacttttataaaggtggtgaagggtctcgaagatggtgaatttgttagggtgaggacggtccatttaaatggaaagcctcggaggagcatagaggagagggaaacagggaagagacttgggacagctaccaggcgtaatggattgtgg

SEQ ID NO: 16365 - DNA, 1115 bp, Zea Mays
ccgacggaaggcccttagcagcgccgccaccaccacgggagatgcgtggagagatgaagcaaaccaagtcagggcggatttggtggcggcgactgtgaggcgggcgagcgaggtggtcattgggctcgcgccggagaacgctatgatcccgctgttcgagacggggggcgcgcagctcgagctcatacgggatgccgagattgagccgtgtgcctacgtgaggtgggagcaagggaggccgagaggatccgcttcatgagttggatgcacacgagagacgttggggatcccagcttcccaatgcgggagatccagaagagtcaacggcggatcgatcaagtggattagcactctcccctgtctgcgtgatctgtagaacaaggataagtcggggacgctgttctgctttgccgcgatggaacatgtgttccaatccgagaatttcaggctggggcggttgggatgagggggaagccaatgggagatggatcaaggagatgagcatgttcaatatgtctcggaccttcaaatcgacgacgggtctctctcggcggtttctgaatctgatcgcggccaaccactcccctggcgtcaagtcgctgcaccgcatcggcctgggtcgcatctttaactcaacgccagcgccaataccaaacggagatcgattggagtccgcagcaggacaagaagactacatggtgcggccccgcgcgttggatatcattcggctccccacgccggtaatgagcttccgatcttcagcgtcatttgaaagcaaagaatggaagttggattgcttcccgttttcggactgcaaagttttctgcatggaccagtcagggcgcggtttcctcttcgatgccaactcgtgcggggtgtcaaccgtggcccatctccatacacccaagcagctgaagacttcttttctgctatgcttgattgatggggctgcgtcttcacccagttctgcctgtggcttgggctattttatcttcctctgcgcattatgtttttcggctcactttcgagcttgtatccccggtattgtaataacattattcagactctgtaactatttgaagtaatgaatgtggttactagcctcctgggactag

SEQ ID NO: 16366 - DNA, 2114 bp, Zea Mays
tccccctctcttcgctcgtggtctctctctccaggtcgtgcagtacgatccatatcccggagctcttgcgcgagcgacatgtcctcggcggcgggcggtggatacggggctgcgggcggcgccgagcaccagcacctgttgctggggcaggcctcggggcagctctaccacgtgccgcagcacagccgccgcgagaagctgcggttcccgcccgacccggccgactcgcccccgcccactgcctggccggcgcctccacccttctactcctacgcgtcctcgtcgacgtcgtcctactcgccgcatagcccaacgctggcgcacacgcagctagtggcgcacgcgctacctgccggcgccggggcccaaatcccgagccagaactttgcgctctcgctctcttcggcgtcctcgaaccctccgcccgcgccgcggaggcagctcgccgcgggggtagccgctgggccgtacggcccgttcacgggctacgcggccgtcctcgggcggtccaggttcctgggccccgcgcagaagctactcgaggagatctgcgacgtgggcggacggcccccgcacctggaccggcgctccgacgacgagggtatgctcgacatggacgcggcggggggcgtggaccacgagatggacggcggtgactgcgctaccgctgaggcggtcgccgtctcgggcgccgagcagcagtggaggaagacaaggctcatctccctcatggatgacgtctgcaggcgatacaagcagtactaccagcagctgcaatccgtgatctcctcgttcgagactgttgcagggctgagcaacgcggcccccttcgctttcatggctcttcggacgatgtcgaagcacttcaagtgtctgaaggggatggtgatgagccagctacggaacacgagcaaggtcatcgccaaccatgggattattgccaaggacgatatggcgaacttcgcgctcatgggtggtggagcaggcctcctgaggggaaacagcgtgaacgcgttcagccagcctcacaacatttggaggcctcaaagagggcttcctgagcgtgcagtgtctgttcttcgctcatggctgtttgagcacttcttgcatccgtatccaactgatagtgacaagcagatgctggctaaacagacagggttaacaaggaaccaggtgtccaattggttcatcaacgcaagggtgcgtctctggaagccgatggtggaagagatccacaacctggagatgcggcagctgcacaagaccacatcggtggaccagaatcaactcggcatgcagcagcagaaccaccactcgtcggacggcagcgggaggccttcctccgacccttcgaactcccagcggggccaaagcagcggcatgacaagaaacctcagctctcgggcaccacgccacatccaggacgacgagctctcccagatgccccacgacatggcaggacaggtgagctttgcgtacagtgggctcccccccgcgcaccacggtctcgcgctgtcacaccaccaccacccccagcaagcgcaagctgaggcggttggtgttggcggcgtggccgccagcagcggcggcggcgtttccctcacgcttggccttcaccagaacaacaacaacaacagggcatatatcgccgagcccctcccggccgcgctcccgctcagcctcccgcaccggttcgggctggaggacgtgagcgacgcctacgtgatggggccgttcggcggccaggaccgccatttcagcaaggggatcggtggtgggcacaacttgctccatgactttgtcggttgatcaaattcgtccctggaagtgtttgtcggcatgtattgtattgttaggggtagtagggcagtggaagagagacgaccgtttggtccatctgcatccaagaacgctgtcgatatttgccaactcgaggtctatagagtggttgacgacataccgttgaagatgtgttccagttgtatgttgtagagttgaacgaaccctatctgttctaatcccagctggtgtggcgttaacacatgtaccgctgttccggccttcgacatgcaagtatgcaactgaaggtgaaggttgaaaactgtgtggttatt

SEQ ID NO: 16367 - DNA, 573 bp, Zea Mays
attacggtttttttccctgttgcggatactggaaatgttggagcctttgtttttgcattcaagtgccatttttttttcttggttggagattatgcgggtatcaagcattgtgcacaaccatggatttggcgatttcgacaggcatcggtttagaagtcctagtccaatgtcttctccaaaccctagagctaatctccctggcaatgggttcagtccttggagcggactacaagagagattaggttttcctcaaggaaccagcatggactggcaaggagcacccccaagtcctagctcccatgttgtaaagaagattcttcgtctggaggttccagttgattcttatccgaatgacctagaggtaattctctaaagcgagtagaagcatccactgggtgtcgtgttttcattagaggaaagggttccatcaaagattcagggaaggtaagagaagtttctgttccttttttacattcgccaaattaaagtcacgttgctcttatttaactctcaggcaaatatgttgatcgggagcctttgaatcccaatgtgttttcttgaacttgtaatgct

SEQ ID NO: 16368 - DNA, 1757 bp, Zea Mays
catgtcacatatgcaccttatttaaggactggcactctccaatgaactgggtatgatggagaatcagttgagtcgatcaaaggatgcagcttctgaagcacttgcattgcgtgagcaagctgaatcattaagatcattggtagctaaaaagattgaggaacacaagaagatttcggataaatacaactcacaagtaattgagatcaagtccctcaaggcattggttgaggagttggagcaggaaaagcaggagctggagtttattgcagatatgtacgtgaaagaaagttctgagtctaggacaattgctgatattgaagaatcagaaacccgagctcgcaatcaggctgaatatttgaggagcaatctagaggagcatagtcttgagcttcgggttaaagcagcaaatgaagctgaagctgcatgccagcaaaggctttcctttgctgaagtggaactagaagagttaaggaccaaagtagatgcatctgaaagagatgttgtggaacttaaggaggcaataagaattaaagaggctgaaggagacgcctatatttctgatatcgagacagttggtcaagcatatgaagacatgcaaacgcaaaatcagcatcttcttcaacagcttactgatagagatgactttaacataaagctagtatcagatagtgtgaagatgaaacaagcttgtagttcccttctctctgacaagcttatgctagagaagcaactccagcaagttaacacttcactggagtcatctaaactgaaaattgcccgtggcgaagagcagatgaagacttgtgtagcgcaagctataaaaacttcagctgaaaacagacatcttactattagcctggaaaggattgcgctggagttatccaacacagataaggaactcaagtggcttcggtcctccgttggatcctctgagaaagaatacgagcaaactcagcaaaagatatctgagctgagagcgttactggagcacgagaggagtgagaggcggcggcttgaagaacaatatgaagaggtgaaaaatgaagttatggagctgacctctgagactgaagagactactgtccggaaacttgaggatgaaataaaagaatgcaagggtattctcaagtgtggtgtatgctttgaccggcctaaagaggttgtgatcaccaaatgtttccacctattctgctcgctatgcatccagagaaacctcgagattcgccaccgaaaatgtcctggctgtggaaccccattcggacaaaacgacgttagggaggtgaagatatgaacctcaccaaagtgacagtgacaaaaccgacttgcgtgtgaacagcagcaacaaactcccttgtgaatatcgtctgttatgttggcgaacatctagatctaacttgctttattactgggattaaaattaggataagaactggaagaagtgaagttcctaatttatttgctatcgtgtgtgctatgtatgattacccttggcagcgagtggtgtatctgctgggtgtcaatatgctcgaattctagctcctccctgctagcgggtgcatgccagttttattaaggctattccatgtacatggtgtcacactctttaatacataccacataggatgaaaatctgatgtgacatgtgattgaaacatagggagacaccactcatgcaccagattatagacattgaaatctgaaccatctaaatgaactgtaactcatactcttatatatatctaacattttgtcttgtg

SEQ ID NO: 16369 - DNA, 1066 bp, Zea Mays
ggtgcttgctgcatcatacccttactttgcgaaaaggctactgactgatcccaacccatatctcagagatgctttaattgagcttgtattcaaggatggaaaattcaggcaagtacctgctcatctgtatatattttatactcttcacagatcaaagcaccactcaggatagcgttgtttaatgttcacgtctctgcagatggaataggcttgaaaatcttcttgttcaagggcgccaagatagggagtttgcagccaaagatgcactgcagcctgttctaaagcttctccttggtcctggtggggaggaattgcgtgcgttagttgtgaaagaggcagttcgtgtgacagaagccatcgccattggaacactggtcgattcatacaatgcagctccatcatttttgaagccattaatttccagcggcaatctagctgaaccctttaagtttagtgagactgaacaagaacagatgatggagctccgagaccaggttttcagagtatggggtcttttgagatcctcaaataactttgatccgagccttttgcagccaatcgttcaggttctacaagaaccagaggcccgtgtcttgggttctcgtgtcgcaggtggtgtaacacagcgccttgcggcacgtctgctgcaacagcttctcaggacccctcctgctcctggatcttcttagcagatatatagatataggctcgtatgattgtatgaagcatgtaaattgacacgatatttttcacaggaaatgagaaggaagcacaacccagaattcgagtatatagctagtttcttggttctaagtggataaagacattgtgcatcgagctttgtccagcagaccgtgtatatagttgtgtaaaaaacattgttttgtgctgtagattacactgtttacggagtgaagattgaaatgataagacatggacgagtgagctgctaagatgtcacgcagcttagatccaccgctgttcaccctgtaaatcatgatacgcggaccaattatgcatttacgcgtatgtgtagccctaaaacttctacgtgtcaaaataaaag

SEQ ID NO: 16370 - DNA, 546 bp, Zea Mays
caagtttaaagtttatgggttgcatatttacttgtaaggtaacaacgagcacatagaagtgttatgttcatataagtttcgacgaacaatgaccaaagaaagctaaagccgttaaacatgacctagtcatcattatttgggacaagatgaagctttcagatgtctaggctaacagaactatgagatccccacattttgctttccaaaacaggccaggatctatctgaaacgctacttagaggcaccatgtgtccaatagtgcccatatattttaattcataatcttgtgagtgcactattgaagtgtacagagtaacccatcacaacagaaagatcgcttgctaagtatgtggagcaggcagctgggcgaagaattcagggaagatcgtttcatttagcaccacaccatgcttgttgcagtaaacatcattagccatcctttctctgtctgccacgtcccccacagacatcatgatgtactcattgaggttattggtggttccatctgaaacgagcatgaaggaagcacagaagagtgagacatct

SEQ ID NO: 16371 - DNA, 75 bp, Zea Mays
cgttgctcgtcataaatcattgctctatcgatcactcatgggtgggtttaggaactatctttttctatagatgta

SEQ ID NO: 16372 - DNA, 1596 bp, Zea Mays
aacggaacaatacttatctttttccctgcccccgcggccgccgccccgaacgcgcacgcctcctccgccgaagccaagcaaaccaccgacctcgacggagtcttctagccgtcaccctcgttgtcgccctgctcctcctctcagccggtccggccggcggcgtggcgtgaagatcaatccggacccggaacgagttccctcttttgctggttacataaactttggaataggaggatatcccatattgatctttgtgattgagattgattttttttctggaaaatggagatacaaacttcagggaagcccattgatgtgctgatggagaaggttcttagcatgaacattctgtcttctgattactttaaggagctctataggttgaaaacctatcatgaggtcatcgatgagatctacaacactgtcaaacatgtggagccttggatgactggcaattgcagaggcccctccactgcattctgtcttctatacaagttctttaccatgaagcttactgtcaaacagatgcacggtttgttgaagcatcctgactccccacacattagagctattggtttcttgtatcttcggtatgttgcagacccaaaggttctttggatgtggtatgagccctatttgagggatgatgaggagttctcccccggatctaatggccgcaagacaaccatgggtgtttatgtgcgtgatcttatacttggacagtactactttgatagtcttctaccaagaattcctctcccagtaactcgtcagattacagccaatcttgaaaagatgaaattgcccactaagctttctggggcaactggagactccagtcgtcagggatcagaagatactgcacgccgtcctccttcagtgaaagcttctctgtcagtttcctttggacagcgtgctccacatcgggcttccaccagggattcatctccagttcgtcgaacagtcacccgtgatggtcatcgaagttcatactcaccatctcgtcgtagtggtagccgtgagggtcctgatcatgaccgttctgaccgggaactggatcattctagtcgtgaccgtgaaagagcccgggatcgttcaaaccgggatcggtatcattcaagccgagaccttgaccgtgacaaggatgccagagattatcatcggcatgagcgtgatagcagggatcgtgagtactacaggtccaggcattcagaagaaagacgggacgacagaagagatcatgaaagtagcaggcacaggcgctctagctctcgccacaggagcaggagtaggagccgaagcaggagcaggagtaggagcaggagaagccgcagccgaagcacgagcaggaggagcctgaatgagcagcgatccagcccattcagggatgcaaataaagagaaggcagccaccgtgtcgagcaacctagcaaagctgaaggacttgtacggtgacataactgcaaagaaggaagacagtgatgctgaaaagcttcaccgtgattcatgcgctgaggaggtcatcaggctgggaggccctcgatggaggaagtcgcccgcatgattcaaggcacttttggacatccttgtctttgca

SEQ ID NO: 16373 - DNA, 197 bp, Zea Mays
gctacagataatggcagcaagataagaacctctgagcattctccagcatcttgtttaaagttttctcactatcatcaactttcctaagcaattccaaatttctttcctgagctttggaaagtgcttgtttggtttgaccatgctcctgtctttctgctacatataaggcatcccttgtggttgtgctgtcctcacac

SEQ ID NO: 16374 - DNA, 676 bp, Zea Mays
tcaaatcgctatctcagctttagagtaaattagtgagctgtcaaactgaaggtcattgagcatttgccgtatgatcatagagcagatgttttcagttttgggatagttctttgggagctgctgaccggaaagcttccatatgaagacatgacacctcttcaggcagcagttgctgttgttcaaaaggatctgaggcctactattgctgttgatactcatcctatgctcgctgagctactccagagatgctggcagaaagatcctgctctaagaccaacatttgcagagattgtggatatattgaactctataaaggaggcggttcggagttctgtgcatcacaaaaggcattcatgtcgatctcactccgggagaagacgaggctgttgatgtgccagttttatgtggtgccgcacgcccttttcattttatttttgtagtcgagcgataacttcagaatacggccagaagagcttactgtgttcattccgagaggttttggtaactttattttttttaatttggacttatgcttcaaggattttcatcgttaaaaagcttagaggtgcatatccacgtttacatttggcatgtatctgtatctcgtactcgttttcttaagtttggcaggcaaccaagattttaatgaaaatctttaaccattactcactccgtc

SEQ ID NO: 16375 - DNA, 985 bp, Zea Mays
agacgaaacctgtttttccgacaatcgagcgccgaaaaaggactgccaccaaccgctcgctttccctcacctccccacctctctcgctccctccctccctccctcccattgcaggatcggcaccgatgcgattcaaccgcggcctcgcatccggtgcggaggtctgcaattggggggaggctcctctccgccgttggaaccgctgcggcgtcgcagcctgtgcgactttcctgctggttcctcatccctcagggacagattttgcattctttggcattactgtttgatggcagacagtagtgctccttctctgtggaggcattggggcaaaaggcagttgaactgaacgggcacatcaatagtctctggcctccaagggaaattgggaaattcagattgaacgtggctgcatcatttttcctttcattggtcttttcagcaacagcgatccattctcgtaggggggagagagagagagagagagagggagagaaatcaaagaggagagtgatcatggagcatgtgatcggagggaagtataagcttgggaggaagattgggagcggatccttcggagagctatatctcggtgttaatatacagaatggagaggaagtgggaataaaattggagcctgtgaaaacaaaacatccacagctgcactatgaatctaaagtttatatgctgctgcagggtggaagtaagtcgattgtaatttatatgattatttgcagtaatttgtgtccacgccttctggttgcttatttagtcactcatttttgacacagacggtatcccacacctcaagtggtatggtgttgagggggagtacaatgttatggtgatcgatcttcttggcccaagcttggaagatttgtttaattcctgcaacaggaaattttctatgaaaacggtgcttatgcttgctgatcaactgctattggttgggagttacatgttcagaagtttcatgagcattctgcca

SEQ ID NO: 16376 - DNA, 1654 bp, Zea Mays
tgcttgttgaacagcatgcggcacatggggcgacaatgccttcatcaagtttgatactgcaggaccttactcaaacagtatggaaaagtattaggcctagatcctaaaaggattccacagaattgggcagccactcaatttgctgaagcattgggcagagcatgggccgagtataacaatgacagtgctgttgttttgatggttgtccaacctgaagaaagaaatatgtacgaccagtactgtcttgtcaatcatctgaaggaatcatatggtgtggcaactataaggaaaacattggcacaagtagaggctcaagggcaggttcttacagatggaacacttgtggtagatggtcggacagtggctgttgtgtatttcagagccgggtatgcaccaactgattacccttcggaagcggagtggagagcgaggcttctgatggaacaatcatctgcagtgaagtgcccttcgatagcctaccatttggtaggaacaaaaaagatccagcaagaactagcaaaacctaatgttcttgaaagatttcttgacaacaaggacgacattgccaaactacgcaagagtttcgcagggttgtggagcttggataatgaagagattgtgagatctgcaatacagaaacctaacctgtttgtcctgaagcctcagcgagaaggcggagggaacaacatatatggtcaggatttgcaggacacactgatcaaactccagaaggaacagggggaggcgcttgcggcgtacatactgatgcagaggatttttccaaaagcatctcttactcctctagtcaggggcggtgattgctttgaggaccttacaatctcggagctgggaatatacggagcctacctgcggaacagagacaaggtgatcttgaataaccagtctggctacttgatgcgcaccaaagtttcttcttcaaacgagggcggcgttgctgcagggtttgccgttttggacagcgttctcctgactgatgagtgagacagcagcgaggtggcagagctatgggtgacacctgacctgcattagtgacagtgcccacagtcaactcaaacgatgacaatatcaactgcaatcgtaggggaaactatgaaattgcttacagaattgcggacagtcggagaagatggcagtgttacgttatgatatagtttcatgtttgtatgctggttgaaaatgtagggaaactcttgttttcactagaaaggaacccctggaggggggagtaacggtgtagaaggtttatgttgtcacagttggcatgcattcatcatataggaatagctaggagatggcaccgttatgccaacacagttataacaaatatcaattgtaaattttatgattggttatcgactaagcaaaacaattttataagaaattgttgtgcggcaatatcgtttgactaaatcttagtcagatgctcgaatattgctatggtttgtaaatataatatatcatatttatagattttgttgtaataaaacataaaaatatgtgttctattagttatgtgggtgtggaagtagggttaacagctaagattagtctgcatttggaggattgtgtaaagtaggaggcatagaactgtagataatatattttttatatattaattgaaatatgatgtgat

SEQ ID NO: 16377 - DNA, 1095 bp, Zea Mays
aacaaatagagagcctataccctgcaagatggtcatattaatagcagataaccatgcatcagggcatgtatgcccgggcaaggttaaccataaaccctgacaaggtttaccggctggctatgacaaaactcaatacatctgctgcaatccttgaagttatgggtgcgcccctaactggtactgatgtcagagcatatgttatgtctggaggaggcccgaaactgaaggacttcaaatttaagcttggcagcaaacggtgcttcctcattttccccatcaaaggatcagaaagaaggggtcttgtaagtgttgagttcaagaagaaaaagggacagtatgacatgaaactactagctgttgacataccaatggcatcaggtcctgaccagcggctgttcgtcgtcggtgatgaacaagagtacaaggtgggcgggggcttgatatctgagctgcgagacccgatcgtaaaagctatggctgcagaaaaggagtttgattatcttgatgaaagagaggacgaggaagatgagcggagggagcgtgaggaggcggagcaagaggaagcggaagcattgaggcgcgaggaggaaaggttgcgtcagcaggctgaagaacggaggcggcgggaggaggctgagagcctggagaaagcttcgtgacatgatttaactgcatcgattttccaccttgtgcattgttttatacttctctccccctcccggagtgtagcagtccgcgtttccacagcaagagaagattgcttctgagttcggttgagttccagacttccaggtggtcgattcggcgtcaccagtctcaagttgttgaggagaaaggaataattttgcatgttccgcaacagaacacttcggcgaaacaatgtaatttagtggttggtcagttgttaaagccttttttttttttgctgaatgtctgcggtcatggaattgagatgagtaaagttgagtttgtagttaggttttgattaacccaaaaagatttataaaagtttaattcatcatctctctccttagttatagccacgcattgtaatcttttcaattgatatcaaagcctcatgttcgttggtttatc

SEQ ID NO: 16378 - DNA, 425 bp, Zea Mays
tttccttgccgccagccagcccattaaccctcgttcctgtcgcgcagccacgacctccacttccacatctcccccggcgtcggcgcggtcagttgaaccatggcggactccaaggccacctcggcggtcaccctccgcacccgcaagttcatgaccaaccgcctcctggcccgcaagcaattcgtgcttgaggtgatccaccccggccgcgccaacgtctccaaggcggagttgaaggagaggcttgccaaggcgtacgaggtgaaggaccccaacaccatctttgtcttcaagttccgcacccacttcggaggaggaaagtccactggtttcggcctcatctacgacaacctcgaggctgccaagaagttcgagccgaaataccgcctcatcaggtaaaacaaatcagaggctagaggagcagg

SEQ ID NO: 16379 - DNA, 145 bp, Zea Mays
gtttctatttgaaaggtagtggtgaagtggtgatttgctttaatagtgtcgtatttatgtcgttaatcggctaagtgccatagtcgaatattgatcaattaaatcgatagaattggataaatgtgatagtcgcggtgattatctc

SEQ ID NO: 16380 - DNA, 635 bp, Zea Mays
tgcagttttgaaacggcttggatagcattgtgcaacagagatgactacgagtatacaacctccacagatccccgtatttctgggaccggccaaatgagtttgaacccgagaggttttccgtcccgaagaaggacgagagcatagaaggctggtctggttttgaccctgaccggagtcctggcgcaatgtaccccaacgagatcatagcggacttcgctttcctccccttcggcggagggcctcgcaagtgcgtgggggaccagttcgcgctcctggagtcgacggtggctctggccctgctgctgcggaagttcgacgtggagctgagagggtcgcccgacgaagtggagatggtgacaggcgccacgatccacacgaagaacgggctgtggtgcaggctgaggagaaggacttgacgggccaacattagctttgcagtttgcactgagtgagaagtagctctcgtgcttgactcctgtgatgtgctttaggcgagctaaactgcatcgcagacagaccagtggatgggaaccgtgtacactgaaaacatatcttgtaggcttgtagcgtaacaggtgcaaccacaacaatatattatttatctatctatctaattgagcttgacattccggtgc

SEQ ID NO: 16381 - DNA, 1066 bp, Zea Mays
gatttggtgtgatgttgttagtgggctgctggctacctcctccactagaatcttgctgaatggtgttcctggggagatcattgcgcaccaaaggggtctaagactgcagatcaattttttgcatttaaggttcctatgcgagatggagaattaaatagtctatgccgtggtcttgacaaggcattccaagtttatacacagctggttactgcacccctagttgataaagaagatttagctccgcctattcctgttcttactcgatataaaaaggagcttggaatcaaggcttttgtaaaaaaagaggtccaagaagttagaacagttgatgagaggaaagctagcgaaattactcagcttacaatgccaaagctttgtgttcgtcttaacagtctatattacggtatcagccagttgagtaagttggaggacagcattaatgagaggtgggctcggaagaaaagtgaaaacactaacatcagacgaaaaagtgaaaagtcaaagagtgccgtccctaatcagaagaatcaatttgatggcagcagaaaagaaatcaatactgctattgatcggacaaaggttatattctgggacctgcagcagccatttgttgagaatttatacagaaatggtgttgctcaagctcgattggacaccataactgaagtgcttgatttggtccttaatcaactttgtgatgtcattgtggaacaactgagggatcgtgtggttacagggcttctgcaagcatgcctggatggcttccttcgtgtgatactggatggaggttctacacgtgtcttctctccaaatgatgcagctttattggaggaagatcttgaaaccctgaaggaattttttgtttctggtggagatggactgcctcgtggaactgttgaaaacttagtctcgcgtgtacgtcctgtaataaatctgatcaagcaagagacccgcgtgctcattgatgacctacgagaagttactcaaggtggcaagagcaaatttggagcggactccaaaaccctccttagggtcctgtgtcacagaaatgattcagaggcatcac

SEQ ID NO: 16382 - DNA, 772 bp, Zea Mays
ggagatcatgtcaaaaatagaggatgcatgtgggccacttggtttcaacgtgcggaaacaaaattacaagatgaaattgaaaggtgacaaatccggaagaaaaggccacttatctgttgcaactgaggtttttgaggttgctccttcacttcacatggttgagcttcgtaaaaccggaggagacacattggaattccacaatttctacaagaatttctcatcagagctgaaagatatcgtgtggaaagctgaatctgatgcaagtatgaaacagacgaagtgacacccagggaatctgtgtaacttatgatgtcacattgtgagatagaccaccacctcgggtgataccgcttgtttggtactgtatgttttttttactggtaccacattggcaatcaatctcgtgtacagagctccttctgaatgagcgcagctgtacacgagacatgaagaggccctccctgagatgctccaaacgttgcaatggaactaaaaatttgtataaatgggtccttggcgtcctaccaatcgggcctgctgcaggggcaaccactagcggaggagcggcaggtccccttctctattgtatagagcaccgactttctgtagtttctactgttgtcacttttacaaaaacaaattttttttctaatcgaccacggtcaagcttcccatcctgtctccctcgcattcccttataatgtgtttggttggatgtacatgaagggatggaatgaggcaggcacagtttatatagtgtttaaaagagtta

SEQ ID NO: 16383 - DNA, 3491 bp, Zea Mays
cgactacccttgtgcccgactgcccgtctcggctctcaaaacaaaccccggctcgcctcgcggaatccacgagtccgccacgccagtgcgcctccaatttctccgcagtccgcagttccgcacccgtacctccccaaccccccagctcaccaccccgagatctcccccgaccggcctcgagatccctgcggccatgtcgtcgtcggcagccatggaagcaatcgacgagctcgtccagctctccgagtccatgcggcaggccgcctcgctccttgcggacgatgacccgtccgacgagaccgcctcgcgccgcccctccacctttctcaacgccgtcgcgctcggcaacgtcggagctggcaagtcggctgtgctgaacagcctcatcggccaccctgtgctgcccacgggggaaaacggcgcgacgcgggcgccgatagtcgtcgacctggcgagggatccagggctcagcagcaagtccatcgtcctacagatcgacagcaagtcccagcaggtgtcggcaagtgcactccggcattcactgcaggataggcttagcaaaggggcatccagtggatctgggagaagccgaagcgatgagatttaccttaagttgcggacaagtacagctcctccgttgaaattgattgatttacctggcatagaccaacgagttatggatgattcaacaatcagtgaatatgctgggcacaatgatgcactattgattgttgtgataccagcaatgcaagcggctgatgttgcatcttctcgagctcttagactagcaaaggacattgatccagatggaactagaacaataggtgtcttaagcaaaatcgatcaggcagctgcagatgcaaaaaccgtttcttgtgttcagtccattttgtccaataagggtgccccacgagcagcagctgatattgagtgggttgctctaattgggcagtctgtctcaattgcatctgctcaatcaggatcagttgggtctgataattcactggaaacagcttggcgagctgaggctgagacccttaaatctatcctaactggtgcacctcagagtaagctgggaagaattgctctcgtggataccatcgctaagcagatacgtaaacggatgaaagttcgtctgccaaatttgttgaccggacttcagggtaaatcccagatagtgcaagatgaacttgcaaggctaggagaacagatggtacaaagtgctgaaggaacaagagcagttgctctggagctatgtcgagaatttgaagataaatttcttgctcacattacttctggtgaggggtccggttggaaaatagttgcaagttttgagggcaagttcccagataggatcaaacaacttccattggacaggcattttgatttgaacaacgtgaagaggattgtgttggaagcggatggctatcaaccctatttgatatctccagagaagggtttacgttccttaataaaaggagttcttgaaatggccaaggagccatcacgactctgtgttgaagaggtacaccgagttttgttagacatagtaaatgctgctgcaaatgctacaccaggactaggaagataccctccattcaagcgggaggtcattgcaattgcatctaatgcattagatgctttcaaaagtgatgcaaaaaagatggtggttgcacttgttgatatggagcgagcttttgttcctccacaacacttcatccgattagtacagaggagaatggaaagacagcgccgtgaggatgagttgaaaaataacagatcatctaagaaaggacaagatgcagagctatccaagatgaaccgggcttcaagccctcaaactggatccgatgaagctggtggtaacctgaaatcaatgaaggataaatccaataagcaagataatgatacaaaagagggaccaaatttgcaggttgctgggcctggcggcgaaataactgcaggttaccttttgaagaaaagtgcaaaaaataatgaatggagtaaaaggtggtttgttctaaacgagaagagtgggaagcttggatacactaagaagcaagaggagagacattttcgaggtgtcattgtcctggaggaatgtaacctggaagagatagaggaggaagagatatcgaagagttctaaggattcgaagaaggcaaatggacaagagaaaggcccaagtcttgtttttaagattactaacagggtttcctacaaaactgtcttaaaagctcacagtgccgttatattgaaggctgagagtatggctgacaaaattgaatggatcaagaagataaaaggtgttattcaaagcagagggggctctgttaagggtcccactgaagatggtcctatgagacaaagccgttcagatggatcccttgatacaatggctcggaggcctgctgatcctgaagaagaacttcgatggatgtctcaagaagtccgtggttatgttgaagctgttttgaacagtttggctgcaaatgttccaaaggctattgtactttgccaagtggagaaatcaaaagaagatatgctaaacaaactgtacaactcaataagtgcacaaagcaatgcaaagatcgaagagctactccaagaggaccacaatgctaaacgtaggcgggaaaaataccaaaaacaatcatccctcttgtcaaagctcactcgccaactcagcattcatgacaatagagcagcttcatatgggaacgatagttctggagctgagggtagcccccggtctcctggccactctggtgaggattggaagtctgccttcgactcagcaacaaatggctctgttgaccggtccagttcacagcatgagacaaggtcaaaaagtgctgacagtcgaggccggcgccatgaaaacggggatgccaactctggcagccgacgcacacctaaccggttgccaccggcaccaccaaatggggggagatactaagtatgttgattgatcattacctgtgaccaatcatcatcatatgctcttgccaggttctcatcctctactgatactggttattggtggaagaaaacatatgggaccggagaacggaaagcttactggaagatttggatggacggtgtgtatcaagagaaccaaagttgtttatagaaaattagaatcatataggtcattgatgattgtcatttcccgatcgttttggtgtatttgatcttttggatcctcattgccagtgggattttgttgccacggatcagttaattttggttttgtacgcttcttctgtaagtctccccatcaaactggcaaatgtattctttacacacagtcatgtatcgttgttcttcccattcttttagactgaaccacatgttcagtggttgtgccatactgctgtatgattatattgtacaattcattattgggctggagtacacacatgcttgttgatacggcccacatgttcatattgggctctatgtgggtaatggggcatctgaactgtggc

SEQ ID NO: 16384 - DNA, 2164 bp, Zea Mays
tttattctactgcatcatcagcaacacgccatgatatatttgtccacgagctaataacaccagcgtcgcctagaaacgggctcacgcaggcgtcgtgcctccgccgtttggccatctctatatacagcggaggatcaggcaataatcgcaaatcccacaccaaccagagccaccctgccgtcgtaggcgcacgcgccgtagataggaagcttattaagctagcgcgtgtcgctgcgccatcctgccatggaggatcaggcgctggcgccgctgctgcagccgctcccgctcggcgaaacgggggccatcaaggggcgcgcgaggcgggcggcgctggagtggtgggtggagtcgaagaagctatggcacatcgtgggcccggccatcttccaacggatcgcgctgtacggggtcaacgtcgtcacgcagtccttcatcggccacctcggcgacctcgagctcgccgccttctccattgctgccaccgtcgtcgggggcttcaacttcggtttcctgctgggaatggcgagcgcgctggagacgctgtgcgggcaggcgttcggcgccaagaagcaccacatgctgggggtgtacctgcagcgctcctggatcgtgctcctcatcttcgccgccgcgctgacgccgacgtacatcttcatggaggacctgctgctgctgatcgggcagtccccggagctgtcgcggttggcggggcagatgagcgtgtggctgctcccgcagcacttcgccatggcgatgctgctcccgctcacgcggttcctgcagagccagctgaagaactgggtgaccgcgatcaccgcggccgtcgcgctcgccatccacgtcgtcgccacctacgtgctagtgcgtctcctcgacttcggcatcgtcggggccgtcgcctctgcggacatggcgtggtggttggtcgtgctgggccagtacgtctacgtcgtcggcggctggtgcccgctgtcgtggaaggggttcaccatggaggcgttcgccgacttctgggagttcatcaagctctcctcggcctccggagtgatgctctgcttggagaactggtactaccgagtgttggtgttgctgacagggtacctggacaacgctgaaatcgctgtggatgcactctccatatgtcagacgatcaacggatgggagatgatgatcccgttcggcttcttagcagcaaccggggtgcgagtcgcaaatgagctcggcgcagggagcggcaaaggtgcgcgcttcgccatcgtggtgtccatcacgacgtccgtggtgatcggcctcgtcttctggtgcctcatcctctacttcgacgacaagatcgcgcttctcttcacgtccagcgcggtcgtgctcgacgccgtgcaccacctgtccgtgctgctcgcattcaccatcctgctcaacagtgtgcagcccgtcctctcaggggtggccgttggttcaggatggcaagcactggtcgcctacgtcaacgtcggcagctactacctcatcggagttcccttgggtatcatactcggttggccgctgcacttgggagtagggggaatctggtccgggatgattggagggaccgccgttcaaacgctcatactggcatacctcactgccaaatgtgattggcacgaagaggcgaagttagctagtatgagaatgaagaagtgggccgacgagtcgaaataaacccactccactgctgcgctttgtttgttagccaggcacacaggggaacggaacccctgaagctaagataacttctgatacagcgctatgcatattccggccttcagacgccgttccctgcagcttgctacagtaaaatgaagccccaggtttctgacgatggtgtacggaaagctcccatagtggaattgcgtaccgcgcgtgtcaaaatattgttccactatagctaatatgggacaggacattcatcgtttttttttcttctcatcatcgtattgttccactataggcatgcctggctctcactaggtcaacaaggctacacttgtcctaattgagtacatacgacacaaaatatttggttgtcgtaaggataattttaaagtacagtttcggtgtcaaaatattgttctactatagctaatatgtaacaggtcattcatcgccttttttcttgtcatcgtcg

SEQ ID NO: 16385 - DNA, 1423 bp, Zea Mays
gatgcatcgctgcgtcagccgttgagcttttcttgtacccaggattagcattgaagggttatccaatattcagtgaaaactagctactgaagaataggagtagcaatacctttgatgccccataaccccattcattagtttctgcaatgtctttgtcttctatttgctgtgcgaagttccatctactaaggaactctataggagacacttgcagtgtcagatggcttaaataccatagcagattgatatatgaaactttcctctcaagcagaatacatcaaagtaggcctcctagtacaacagtgctagcaagaagcacaagaaaaggaagtaagcagtcatttagcaatggccgccatttgcacagtaaatcggttgaatcatcaattgaagtgttcaagcagtcagagcttgagcagcttaaatcacttcattgctacaatgttgaggaagagttttctgaagtcaagaccgaatggcctgcaactatccttgtttttgatattgaaactactggcttctcacgtcgtgatgacagaattattgagtttgctgtccgtgatcttatggggggaaagaatagcacttttcagacactcataaatcctgagaaagatgtgaaaaatacatatgttcatggtattaacaacagtatgctctgcaggcctgatgttccaagatttggagagattattcccattctgctacaatatgtgtggagtcgtcaaatggacggtaaaccagttctctgggttgctcataatgggcgttcctttgacgtaccctttctcatgtttgagtttcgacggtgtaaagtagaaatgcctggtgattggctctttgtggatactcttcctatcgcaaaacaattggtcgattctaatgggtcaaaactcagttctgtgtcattgaagttcctgagggaacgctacaaaatcccactcacagggagcgcgcatcgtgccatgcaggatgtgacaaccctctcttacgtgcttcagaaattgacctttgagctgaaactaactgttcctcagctgctcgagaagtctttccgagcatcggatcttccagctaatcgtcctgcaaagtgactgtatctgcctcacctgaatatcgcctgaagcactaaattattatcaccgccgttttcgaatatttgtcgtctgcaagtttatttttgaactaaaacacgacaaaaaaagagggagtacattgttgttgtattattacagagatgttatttggagatcccagctctgatttcttctatgttctttctaacaacctaataaagccagcctgattgccactgatacatcagtagcacagtaatccgtattactgatactctgacattgtaggcttgtatacattactaaatcatcaattcaacatatatttacttgactgcgaacttatg

SEQ ID NO: 16386 - DNA, 4207 bp, Zea Mays
aaatcgttaaaagttattcgatatacattttcacagttccatctaaaagtcactaaaaacaggtctagtggtgctttcaattttgcactgcgagaaagtcagttttttgaaaaaagctgctttcttgatccagtcctttgatttagcttttgacttttaggggataaaagtcaaaaccaaaagtcaaaccaaacacactcttaatctttgtgagtacgaatgatctatatctatatgatataggtacgctcaggagtgacagacgagagactattttttttggtgtgtgtatgatatgcgatatagccggtggcggtggggttgccatctctatctcggcgtgcagtcagtcagtcacagactccagcgagcgagggaccaaaaccctagctgaaccctcccggcccgcgcagcaactgcgtccatggaggtggacccctcgccgtcgtcgcgctcgcccaggccgccgcctccgccgctggcggcgatgccgagctacttcgacccggagtcgtccggccgtcgggaggagtaccgccgctacaggaagaggttgtcttcttcaaatgtctctcctctgctgggaagatcactctccaagacctctggaccaaggctgttatatgatggagaaagcatcccaagacagcctaatgccggtttactccttgaagacataaagcaggaagctgccgattattccaacgtagaaagcttggatggattgagactgttcggttcgccgaaaaggacatctctcgatggcggttctgcatcaggcgcagcttacagttcgggcaggcaagcagtgaggcagacgctgaagccagtcaaactggaggacgatatgtatgtgccacatgaaggagaaacgccttctacaatgtttgcaactctccttgattctgggatccaaggtttgatgcacttccctgatgtaattcaacaatttgagaggacatgtcgaaatgcttcggagtcaatcagatctgctgcaactggaaagcttcgtgtggtggaagagaaacttatgcagcaaaatgctcaacttttactggacgaagctgcttcctggtcacttctttggcacatatatggcaaagaacatgaggagctttctggagagctgttggtgccgccaattacatctcatcaggaggcttgccgctttgttgcagcagacattacagcacaactgtgtctgcggatcatactttggcttgaaggtcttgcttctgaagctcttgatttggagaagaaggtgagaggacctcatgttggttcgtacctaccaagttctggtgtttggcaccgtacacagaggtacctaaaaaggaacaatgctgattctactatagtgaagcatgtggattttgatgctccaactcgtgaaggggcccaacttcttcctgatgacaagaagcaagatgaattgcttctagaagatatatggactcttttaagagcaggaagattagaagaggcatctgacttgtgccgttctgctggccaggcatggagagttgccactctttgtccttttggcggcataaatatgttcccttccctgaatgcattgcacaaaaatggaaagtacagaacactacaagccatggaattagaaagtggtgttgggcggcagtggcgtctttggaaatgggcatcatattgtgcttcagagaaaatcgctgagcaagatggaggccgttatgagatggctgtatatgctttacaatgcagtaacttaaagcgtgtcttgccaatctgtactgactgggagtcagcttgttgggcaatggcaagatcctggctagatgttcaagtggatctagaattatctcagtaccaaacaagtagaccagaaaagcaacttgatgacgacatgaatggagcccaaagttcagttggtccagaaagttggccataccatgttcttgatcagcaacctcatgatttaactgctcttctgcagaaactccactcaagtgaccttgttcatgaaactgtctctcgagcatgccgagagcagcatcgacaaattcagatgaatctcatgagtggaaatatatctcatcttcttgaccttctatggtcatggttatcacctgctgaagagaaccataataatactgcaaggccccttgatgaccctgagatgatacggttcggggcgcatattgttcttgtgctgaggcaccttttcagtgatgggatggatgatgagttagatgaaaaactggttactgtcggtgatctcatcatcaacatgtacgtgaggtatttgttctcagaggatcaagaggagttggttggaatatatgcctcacagcttcaacatgacctttgcattactttgtttgtagaaatgatggaactaaggttaaatagcagtttgcatactatgtacaagctcttcctttctgctgtggagtatctgccattctcatctgataatgtatccaaggcttgttttgaagagatcatcgagagggtgctttcaagatctcggcaaacaaaacccactaagtatgatggggatttctctgatgttgcgcatcaacatcacctgcaatcacttcaaaaggctatggttattcagtggctttgcttcacaccaccatcctcgattccagactttcaaatgatcagttggaagcttctgatacgggcattgacacatagcaatacactgttcagggagttttctctgatatcaatgaggagagtccctgagctaccagcagggccacacaagttgcttgccattttagctgaaccgttaaagcaaaaagaaaatttaatttcacgggaagatccggaggtatctgataacttgccggagtttgaagattggcatgaatattactcccttgacgcgacttaccgcagttggcttaaaattgagatgatgaatgccgctgtttctcctgagatgctttcggcagaggaaaagggtcaagctgttgctgcagctaaagaaacactgaacttggcatgttcgttactacgcacaaaatcaggggatggaagaccatggctgtatgctgtcgagagcagtccatttgaatcccccgatgttattttccttgagctgcatgcttctgcaatgctctgcctaccttctggagaatgtatgttaccagatgcaacatcatgcacagctttgacaagtgcactatattcaactgtcagtgaagatgatgtgctgcatcgcctgttgaaggtggatgtccaggtctcttctagagacccctgctgtattgaagtcgctcttcgctgcttagcagcagaaggtgatggatatgggcttcatgaagccaacgatggaggtcttcttgctgcagtcatggctgctggctttaaaggtgaactcagtcggttccaacctggagtttcgatggcaatttcacggcttgatgcttggtattctgaccggagtggttccgtggagagcaccgctgcttacataattcgagggctgtgtcggaggtgctgccttcctgaaacaattctaagatctatgcaggcatgtatcgcactctccgcggctggtgatgatctagattactctctagataaatgtgacgaacttgttgagttagttggttcagccgagtctggaatgatgcatttgttcagccagcagcagttgcaggagttcctgattttcgagagggaatatctcatatgtacaatggagtttgaggaggaccggttgccttgtgatggctaagctttttccccacttgctgactaatccatgagacatgaccggcatgtgcattttgtggcgccgtgacccaagaacctgctgtgatgtatcgctacaccatttcaaagcgaaaagatggaatttagtgcgtaacgtggttctgcccgtttgtgcacgagaattggcccgttttggagagtcaatataagattattcaagtcgaaatccaagatttttgttcatgataaaaacaatgttcggcaagcctttttgtcccgcccgtgctacgcgcactccgcctcggctgcttttgcatcgatccgatctgccgtccctggacacgctgcagctgacaagggtcaccggcagcatcctctcaagtcaactcccagaacgacttcgtttcctgacttctgagcactgcctggacgcagtatgacaagccgacaacgaccaggtggctaaacaagttccaattcctactcaaagcctcat

SEQ ID NO: 16387 - DNA, 836 bp, Zea Mays
cccaatcatttttaggagactggtctttcggcgctcaggttctaattgatgacaaccccagatatgctctagagtgtgctaatgatggcatgagggtccttctgttcgattacgaaagctcgtatccttggtgcaaaactggagccgatgaactgcatccgctggtgacaaaggttcacaactgggaagaagtcgaggagaaacttctctcttgggtagtacctgatagctgacactcttctgtcttgtgagaagcactgcttgagaccagcaaatgattccttttgcctggtttctaaaggaacctgatagggtgaaagactgcaatgttcctagagcttgattttcaatacagatgtcgatagcctctccaagagtcattctaaaacccactctaaatcatcatccgaagagtcatttgcataaatttgactccaactccaacagtttttctatatcctgggatatttttcattaaactctctattcacaataattagttaggatatggagagtcttggggatgttgtcaacgtaagctaggatattcagcttcattaccgcagcctggttgaggcatattcgactgtacttggtcagtctgagctgtaggcgcttctgctctcacacatcagaatcttgttttatccttttgccgcagccgggtgtactatgtatatatcgacgctgccatatggctaagatggtatttgaattgttctaatacagaaaactcgtgtgtgtgtgggtccttggaccaactgatttggagcattttcattattgaggttaagcacaaactcgatgagagttcagtctttatatttgcatttccg

SEQ ID NO: 16388 - DNA, 1379 bp, Zea Mays
atatattgcagattattctttttgcagagagagaatcaaaatcactttgcgtgcagcatcgattgggtcggaaatcgagggtttggtaagcgagatcgccgccggtgacagactgacagggacgagatggacgccggcggaggcggcgtcttggccgccgtgctctgcatgctgctggtcttcgccatcttccttctcctcctctggcgccgccgctccgatgccgccaccgccgataaccaccgcgtcccgccccagcccctccaggaggatcaggtgctgcacggtcgcgcggcggcgcgacggatgcgtcggaggcctggggctgccggagcaggctcctctactgcgtcaactagccgcaatgctgtagaggacgacgcggagagtgacgatgaggaggtccccgaaggtcgcaacgtacccagatcctccaaaaaggagaagaaaaggcaagagcgagagatgcagcgtcaggccgaagaacctgcacgggattcatggaggagtaaacaagaccgatacgacgaaatgaggaggaagaaggatgaggagcgtgaggcacaagagaggcaattggaagaagaagctagggcacgaaaagcaaaggaggaggctgctgctgctttagagtttgagaaatggaaaggggccttctctgttgatgctgaaggtacaacagagagtgagacacaagacgatggtcagggtttgctccacaactttgtggaatacatcaagaagcagaagtgtgttcccctagaggacctagctgcagagttcaggatgcgaacccaggactgtatcaatcggattgttactctggaaagcatggataggttatctggggtgatggatgaccgtgggaagttcatctacatctccactgaagagatgaaggcagttgcagagtacattaggaagcaagggagagtgagcatatcacatctggccaacaactcaaaccagttcatcgatctggagccgaaggcccagtacgaggtggagagccagcaggatgacagtgcagaagcaggcacagaagcatgagaattccttgtgacctggcaccatgtcgtgctcaatgatgttttgtagtgtgatgacttaacatggtttgagttgggcactggccatataatatatgcagtagtcggtataaacatacttgttctgacatgctagataccattaccccatgcagagaactcaggcttttgttctatcatcatgattgaaaatcatcggttgaccttggtggtgttggggaggagggaggtggtgtttgagtctagcagcaagagatttggcaatgattctgtagatgacaaagactttgctcggagacaaggcagacttgtagtcagacgagcaagcca

SEQ ID NO: 16389 - DNA, 702 bp, Zea Mays
caacgggtttcataactgaccatgagagggcattggaagaactttttagtgaaaatgcagaaggatctcacaagtataatgcttgtctgaacacaatggctactcgtatatccacagtatttgcatcaatgagggaattccctcgtgtacactaccgtattgccaagacgattgatgcttctacaatgacaacactacgagacttagtccccacaaagcttgctgccagtgtatggaattgtcttgcgaaatataaaacgacaatacctgaatttcctcaaacagaaacttgtgagctacttatagtagaccgttcaatagatcagattgcaccaattattcatgaatggacttatgatgctatgtgtcatgatctgctttgtatggatggcaacaagtatgttcatgaggttccaactaaaaatgggtcggcaactgaaaaaaaggaggtcctgttggaggatcatgaccctgtctggcttgagcttaggcatgcacatatagcagatgcaagtgagaggctacatgataagatgaccaacttcatttcaaagaacaaagctgcacaattgcatcaagcacgaaccgatggagaattatcgacaagagatttacaaaaaatggttcaggctcttccacagtacagtgatcaaattgataagctttccctgcatgttgaggacctgctcgcctgggatccgc

SEQ ID NO: 16390 - DNA, 1030 bp, Zea Mays
attgtaagaatccatcgattgctcgagagagggatatctgtttccgcatcggcagcgttctctgcagcggcgatgccgctcctcgagattcttgagcttgggattgtatcgcactcagtgatcatcgggctatctttgggcgtctcacagaatccttgcaccatcaaacctctaggtgctgctctctccttccaccagttttttgagggctttgcattgggcggctgcatttccgagttcaagagtttctctgcactccttatggctttcttcttcgctatcacaacacctgctgggattaccgtggggtctggtatcgcgtcgttctacaatcccaacagccctagggcacttgtggtagagggaattctggattccatttcggctggtattctgatctacatggccttggtggacctcatcgcagctgattttctcagcaagaggatgagctgtaacttgaggcttcaagtcggctcatacattgccttgttccttggtgccatggccatggcatctctagccatctgggcttagcaagtagaatggaagtaaggcaaagatttgagagtgctgcctaattgcctttgatagcaggaggttctctccagcagctagttggttgcaattcttgatgagaatgggaggcattttttattttcttatattcttctgtttgtctattggttctcttcatgttggtggtggacagtaagatttagttcttgtgccctgtttggtagagctgttgttgttggaaaagtaacttatctaagaagctagtgaaaaaaacttttgtttatcgcatgcttttagtttattctgagaagaagctgaattgataaattgctgcagaagcctactatttgatatagcttctgcttaaatatgtgaaattgtgccaaacggggccattgtactagattagaagagagatgaacataggttcttgactcccttcagtattcatagatgtatattgaatagaaaatgcttattagtgctttgtcttacaagaatttttcgcaag

SEQ ID NO: 16391 - DNA, 219 bp, Zea Mays
tctccaccttgtttggctgccttcttcttctccctccctccctccctgtacgagctgagcagcaacgtgactagttttaatgtagaacaaacatcacagcgagggaaaaaaaaactcttccctcactcagagattcgccacaagaccacaacattttttagttgtttcacttactactgagcaaacatcacagtttttttttttgttgctattttcctt

SEQ ID NO: 16392 - DNA, 2986 bp, Zea Mays
gtttttggcggcgtgtgtattattcaaaatatccccgtcctcccgttccgtccccaaaaccctagggcgccgccgcctctggagcaagctcagggcaaagaccaagatgaaatcgatcctggtttacaccacctgaacaccgcccctcatacttgtcgacggtctacctgatggcagcaggttccggcggtggaggttttctgggcgacgtcaacgacccatggctgaagccgcggctgctccgcgcggtggtcaccgggcgccttccgcagcctggcgccgccgccgagctctcgccgacggaggtcgcctccatcctcgaggtggtacgcactcacggcctactcacggaggatctcccgggccgcggcgcgctggtgaacccgaagctcgccgaggcgtggcgcgccgccgtggacgcctgggttgagcgtgtcgtggcgctggtggagagcgactcgacatacagttgttggttgggtacttgctttctcggtgtgactttccaagagtgcagaaatgatcgatttgcagaatcacactccatttggtttgagaagattctgagtaatttgcagcaatcgtctagctttcaacttgttattgttatttcctgtacttccatgtctgatttatttgtaagattggctaagttttcgaacttaaagaaagagggatcatcctttgctggaagggttgttgaaccagtgctgcggcttttaaatcaaaatggtctagtagctgacgaagcaattgatttgctgaggacagttattaaattgtacccatcctctgtaaaccggcactacaataaagttgaatctgctattgcagcaaagattatgagcaatgtaaaaccatctgagaaatttgcgagaaccttagcattgttaccttctgtccgagtgtccgaggacagttggtcactgatgattcggaggatactgattgtggtaaacaatcttttgaatgatgctttcattgggcttgaagaagaaaagaaaggccatgatattatgctgctgctagttccacctggaactgatcctctaccaacattgggagatgaagtaatgcctggaggcaatgtgcatatcatgaagaaatttcgtgtctttactgttcctaccatttcagctcttacgctttgctgcagcgtgatgctgactagttattatccagttcaggtcaatgttccaattcatgctttgatagctttgatgcgaagagtgctgttagttgatggatcattgcataacaagctgttcccttctacaacttcattgcatcaagagcttatttgttttgatcttccatcgttacattcaactttcttggatttgctgaatgcaactattaaaggcatgcgaagccaactcttacctcatggtgctagtatcatacggcttataacagagtacttcaaaatagcaaagctgcctactttgaggacaaaaacttatagcattttgcagctgttgctgacctccatgggtgttgggacgtctctgcacctgcttgaggcaacagtccgcaatgcagttgctgatctgaatgatgatggtgaaattaacatgactatgatcaacacaaattcatcgcaattgaccaatgaatcatcatcaaaagtttattcgaagaagaggaagcaagaaccacagatgcaaaactcaaccatctcaggttcagagaaagtagcaatcagcccaaggaaaagaaaaggttcttccataccaattacatcaaagggagtggcccctgaaagtacaggagatgttacactatcaactccacattctgtcaaaatagctgcgcttgaaacattggaagttcttctgaatgtgggaggttcattgcggatggatcgctggaggtcagaagtggacatgctcttaattaacgtggctagaagtgcttgcggcatgggagggagttatgagcaaaagccatccacatttggggagccaaacatatcggacttccaacttgcttcgcttaagggcctgctggcatcttttctttcttctcatgcccgtcctccttatttagccaacggaattgaactcttcagaaaagggaagctagagataggcactaaggttgcagagttttgttcacatgctttgcttgctttggatgtccttgtccaccctcgagccctttctctggaaagaacagttcctgcaagctctgggttcaactacactgcacagaaaaaaacagtttttggtgctggtacacaccagatctcaccatttggggaccagcctcaagcaatggaggtcgaagacatgtacgatgactggctaatatccaacaacaatgaaccaccagaggttccagtgaacggtagtgatgctgtggtaagtaaaggtgtgctggtggaggatggaaagcagctcaatcccatagcagaagatccaaaagtcgacccacccagaatcacagacgcagcacaagatgcaccagcatccaccaagactgatgtcaaggtggtcgatgcagctgcagccacagctgccaagccaaacacagcggagaatccttcgagttccaatgctgtcccctctccagtgcgcacaacagattctgattcacgtaagcatgcgtcatttcccgagcaggatagtcctcatgagaacaaaagcgcagccgtccatccaggtgaagcttctgcgactccaggtgttggttcaagccaccaccgccatgaagcacctgaggcccgttcagccagcttcacggaattgtttggttctgagtctggcatcgaatcagagtccgaagacttgatgccagatatcgtcgacggggaccctgactctgactaggtttgccgtcgtcatttgtgacatggcaatggaaattttgtgatgttcctgttttgttttgagcaaattgtacgacattgccggctgacagatgatgcagtatttgattgatagatatagatggagctaaattttgtgatgttcctgttttgttt

SEQ ID NO: 16393 - DNA, 1820 bp, Zea Mays
acaacactcgtttgcctctcatctcgcttcgcttccattccatcgcgccagtcgccagactcacctgggagagtggggggaaatatcaattagaaacaacgaggaattagcaaagaaagaagaataactcccataagaaaaatcgccaaatacgccattcatcttcttcgcccgggtttcagaacgtacggcagtttagccaggatggtggcgatcgagaaccagagccaggccctggcggcggcgtgggcggacgtggccgactgccgcgcgctggaggtcgtgccgctcaagggggccatgaccaacgaggtctaccaggcgcgctggctcactgcaggccctgccggccagaaggaggagcccagggcggagagggaggtgaggaaggtgctcgtgcggatttacggcgacggcgtcgacctcttcttcgaccgcgaggacgaggtgcgcaccttcgagtgcatgtcacgccatggccagggtccccgcctcctcggccgctttccgaacggccgcgtcgaggagttcatccacgcaaggacattgtcagctgccgaccttcgcgatcctgaaatttcagctctggtggcttccaagctgagggagttccacaaccttgacatgcctggtcccaaatctgtgctcatttgggacagacttaggaactggctcagaactgccaagagcttgtgtccacctgaagaagccaaggaatttcggttggacagtctggagaaccagattactgcattggagaacgagtgttcaggtgattaccagtggattggtttctgtcacaatgatcttcagtatggcaatatcatgattgatgaagagaccaacgtgctgaccatcattgattatgagtatgcaagcttcaacccagttgcatatgacattgctaaccatttctgtgagatggcagcagactatcattcatcaaagcctcatatactggactacagcagatatccagatgttgatgagcagaagcgttttgttaagacctacctgaacatttctggtgaggaacctgatgcggaagttgtggagaacctgctccaaagcattgagaagcacacgctcgccagccatctagtatggggcctctggggaataatttcggaccatgttaacgacattgacttcgactacaaggagtatgcgaggcagagattcgagcagtactggcacaagtctgcgatcttaacatcttgaacatgtgtataaacacccgtacgtggtctcaggaactccctgagggcctgtggctgcacacacgaaattgtgcagtgccactgacacatagataagctgtgaaagaagaaatactgacgacgacgacgaataatcccgttttgggctcgggaggttatttctccgcaactcgatgagcttcaggcttcagcttcaggaaggaaggaaggagctatggggatttggctgcccgcttatgctgtaccaatgcaattaaaagataaagatccggtccggtgttgcgtgtgctatgtttagttttggctagcaccgccgagagccgtggtcctgttgtggtgtttctagtttctgtatgcttgatgttgttagtgtgctggataatttggttttgtgcttggggagtccttagctttgggacaacgcatacattgtatactgggtagatgtataaacataaaacagctatgggaatttggttctctacctttatttctctctcgaacaggctgtatttcgttaagaaggtaaatttgggtttgtatttgttattatcagcttgttatacatgtgtcagatcaaatgcatttcttttggtaccc

SEQ ID NO: 16394 - DNA, 1416 bp, Zea Mays
ctctagaaagcgacaccaaagtcttctccctctccctcccgcggttccgcccgccacgcctcctctattccaggagtcttctagaggtgaagagggaccacaggtccacagccgcggcagcaccgccacctacgccggcagaatccttgatcgagacaggagcggacgtggcctagggtttctgagccaggccggcgccatggtgggctgctctaggggctccctccccacctggatgaccgccgccgccgcgcgggtcgacctctctggcggcgtaacgccttcgcaccagggctcgccctctccacctcactcctcctcgggtcccgctccggccgcgggggcggaccagcagcttgggttgttcgagcgcgcgctctccgccgccggcgccgccttcgtctcagctatcatcgtcaaccctctcgatgttgccaagacgaggctgcaggctcaggccgcaggggtgctgtaccaccagcctgcccagatggcggcgctcggccccgatgcaatcctgtctgaattcagatgttctccttcatgcacacgtggtctcttactaggaagtgagccagtttgtcctcctgattgcttccagtacaagggaacacttgatgtattcttgaaagtggttagacaggagggtttcagtagactatggagaggaacaaatgcaggcttagcattagctgtacccactgttgggatatacttgccttgttatgatatattccgcaacggcattgaggatttcacaagaagtaatgctcctggcttgacaccatatgccccactagtagcaggatcagttgcacgttcgttagcatgcattgcttgttctccaattgagttggcaaggacgcgtatgcaggcatataaagagtttcgtcctggattaaagcctcctggaatgtggaaaaccttggttggtgttctcccaccacttgcaggttctagtcagaatgtacaaaattatcgtgttctgtggactggggtgggtgcacaactggctcgagatgttcctttctccgctatatgctggtcaactcttgagcctattcgaagacaactgcttggtcttcttggagaagacggcaatgcagccagtgtattgggtgcaaattttgctgctggttttgtagcaggcagtcttgctgctggtgctacatgcccgttggatgttgcaaaaacaaggagacagatagagaaggatactgaaaaggcaatgaggatgactacaaggcaaacgttaactgagatatggaggtctggaggcttgaaagggctgttcaccggcgtcggcccacgtgttgcacgtgctggtccatcagttggtatcgtcgtttccttctacgagggagcaggcgtagtgagcagtgtgttgtgtgcacaatgtacaacctgcaggcaaat

SEQ ID NO: 16395 - DNA, 2927 bp, Zea Mays
tcttcctcggctcctccaccccggtcctctcctgccgcgtcgcgttcgcccctcgcagcgggcaactcccaccgccgccgcttcgcatccgcccatctgcttccatcgtctcacggaggtcgctcacttcgccgccgcccgccccgcctctcccggtgccacggggccctcggccgcgccgtggcgcttaaaccctagatctgtgcctccgcgctggccgcggccgcgtcccgacgccggcacgccgccgatcgccgcacgtcgctcgatcccaggttttgccgctcgagtttagataagttccttcaatgcatcgtgttgggagtgctggtaacacagctggctcgactcgaccgagaaaagagaagcgcttcacatatgtactcaatgatgctgatgataaaaagcattgtgcggggatcaattgcttggcttatctagatggttccatatttagtacaagtgatcatctttttagcgggagccgtgatggtaccttgaaaagatgggaattaaataatggggatgcaagcttctcaggaactttcgagtctcatgttgattgggttaatgatgccattatagttggagacaagcttgtttcctgctcctcagacactacaataaaggtgtggaattgcttctctgatggtgcctgtaccaggactctccgccggcattctgattacgtgatttgtcttgctgctgctgagaataatccaaatctgtggatgcaaaagaggatgaggttcctaatggaaactccgggcctgctttgacaacactgtgcagcataaattctagtagcaatattgcttcctctaatggtcaatcacatgggtacagtccaatagctgccaaaggtcacaaagattcagtttacgcactggcgatgaatgatacaggaacccttcttctctctggtggcactgagaaggttgtccgagtgtgggatccgaggacaggatcgaaaaacatgaaattgagagggcacactgacaatatcagagccttgcttgttgattctacagggaggtattgcctatcgggatcatctgattcaatgataagactatgggatctaggacagcagcgttgtgttcattcttatgctgtgcatactgattctgtttgggcacttgcaagcactcctgcatttggtcatgtctacagtggtggaagagatcaatctgtatacctaacagatttgtccacaagagagagtcttttactctgcacaaatgaataccctgttctacagttgtctctgcaagatgacacaatatgggtggcaacaactgattcttctgtttatggatggccagctgaagggcgcacaccccaaaaagtcttcgaaaagggtgcctcattcttagctgggaatttgtcattctcaagggcaagagcatctttagaaggatcggcacctgtccctgtatacaaagagccatcttttgttatcccaggagttccagcaataattcaacatgaaataatgaataatagaagacatgtactgacaaaggataccactggttcagtcaaattgtgggagatcactcggggtgctgttattgaagattttggcaaggtttctttcgaagacaagaaaaaagagttgtttgagatggtaagcatacctgcttggttcaccatggatgctcgattagggtgcttgtctgtccacctggatactccacaatgcttttctgcagaaatatatgcggttgacctaaatgttgctggagcacaagaagatctcaagattaatttggctcaagagacccttcgtggtttgctaattcattggagtaaaagaaagcagaaatctagttcacacagcttgtgtaatggtgatagttcaatagggaaagatgttccgtcgaaagactcgccccggtcaagacctgaggtcgacgatgccactcaaaaccatgcaactcatgtgcttccatcatttgagttttctacagtttcacctccatcaattatcacggaaggttctagtggagggccatggagaaagagaattaccgatttggatgtaactgagggtgatcttccatggtggtgtgtggactgcattactctcaatcgatatccaaaggagaatacaaaatgcgggttttatttacaccctgctgaaggctcgcctgcaccaaacataactcaagggaagcttagtgctccacggatattgcgaattcacaaggtagctaactatgtggttgagaaactcgttcttgacaaaccattggatggaggctctgatgcgtttgttatgggattgagttctgctcaatcacagctctcagttctagatagttcttcgcggcttggactaaagccatggcaaaaaacaaagccatgtattgagatattgtgcaataaccaggttctatcaccagagatgagtttggctactgtgcgaacatatatatggaaaaagccagaagatttgattcttcattacagagtggtccaaccgagatgatcacggcttcagatcacatggttctcagcatgcctgcaccataaacggtgtggttgaagacacccttggcttagcgaggaaaccgtcagaaatattttgctcttgggctccggtagcctttctcctagaatcccgacttcgtttgcttctttgtaaagttccttcctgatcttgccctggtagtaagatgtatcatagcacaggtataaggccctctgcttgtacatgtagaagatttgggtgcttaataaaggtcaaatggatttttttcgtttttctttgataaagtttgtaagaaaacgggctggttctcggctcagaccgtgacgttccgacgtcgattattggatttaaccctgtcgcatcctcttggttctgttagcgtaagaggtggacgggatgtcgggagcaataaagctgtttttttatatat

SEQ ID NO: 16396 - DNA, 2738 bp, Zea Mays
catgactgttcttcacttcacatgtctatgatcattcttcactgtaatgcatacaacaaagggaagacacttgttttcagcaaggtacccttacctgattatcgagcagatctggacgacaggcatggatcaacacaaaaggagattaagatgtctaatcagacagaggcgcgagtcgaagaccttttgtccaggtcaaagtggaacaacaattctgcaagcacatcaactgtctcaacgagacaaattttccctggcgcatcctcgtctgtagttgaaccagcagcaccaattgataaagaaaagctcagttcccagcttagggagttgcagaattcaaggaagacgacagcaagtgctagatcaatgcaatcttttagggagaaattacctgcattcagcatgagagaggggtttctgaaagcagtggcagccaatcaggttctggtcatttctggcgagacaggctgcggcaaaacaactcagcttccacagttcattctagaagaagaaataaacagcctccgcggtgctgattgcaacataatttgtactcagccccgccgtatatctgccatttcagtagcagcaagagtatctgctgagagaggtgaagaactcggcgaggctgttggataccagattcgccttgaatcaaaacggtctgcacaaacacggttgctgttctgcactactggagttttgcttagaagactggttcaagagcctgacttaattggggtgagtcatttactagttgacgaaattcatgaacgcggcatgaatgaagattttctcatcataatactgcgtgaccttctaccaagacgtccagatcttcgccttgtactgatgagtgcaactataaatgctgaactattttccatgtactttggagatgctccagtgatgcacatcccggggttcacttttcctgttgctgagttgtttctggaagatgttctagaaaagacacgttacaggatcaattccgaacgtgataattttgcaggtagttcaaggagaaagaggttttcatcagttaagagtgatccactatctgatgtttttgaggacattgacattactaaggagtatggaaattacagcagttcaacaaggcagtcccttgaagcttggtctgctgctgaactagatttgagccttaaaaattgttttggcaaccaacattgcggagagtagtatcactatagatgatgttgtctatgtgattgattgtggtaaggccaaggagacaagctatgatgccttgaataagctcgcatgccttcttccgtcatggatatcaaaagcttctgctcatcagaggagaggtcgtgcaggccgcgttcagccaggtttttgctatcggctctatccaaagatcattcacgatgcaatgccacagtttcagttgcctgaaattctcaggactcctttgcaagagctatgccttaccatcaaaagcttacagcttggagcagtatcctcctttttagccaagtcactgcagccaccagatccactttctgttaagaatgctattgagcttcttaaaaccattggcgcactggatgatatggaggagctcacttctcttgggcgacatctctgtactctcccactggacccaaacatcgggaaaatgctgcttatgggatctgtattccagtgcctggatccagtattgacaattgctgctgctctcgcatatcgaaatccatttgtgctcccaatagatagaaaagaagaagctgatgctgtcaaaagatcatttgctggtgactcgtgcagtgatcacattgctcttgttaaggcgtttgtagcatggaaggatgctaaaaggagtggtagagaacgcactttctgttgggaaagttttctgtcccctatgaccctgaagatgatggacgacatgcgaaatcaattttttgatctactatctgatattgggtttgttagcaagacagcaggagtgaaggcatataaccgctatggtaatgatctggagatggtttgcgctgtcttgtgcgctgggctgtacccaaatgttgtgcaatgcaaaaggcgaggcaagaggactgctttctacaccaaagatgtgggaaaagtggacattcatccatcatcagtcaatgcattcgtaaaccaattcccgttacctttcttggtttacagtgagaaggtgaagactgctagcatttatgtaagggactcgacaaatatatcagactatgcccttctactctttggtggttcgcttagtccgagcaaaactggagaaggcattgagatgcttgggggttatcttcatttctcggctccaaagcgtaccatagagttgattcagaaattaagaggtgaattggacaaactccttcagaaaaagattgaggaacctggactcgacatcttttcgcaaggaaagggtgttgtggcggcagctgtagaactgctacacagtcaaaatttcgaccattagatgccaaatattacatgttatcaggacaagtttcacactagacgaaagcaaaatcagcgtattcttttgtaaatctcacctctgcgtgttagcatatttctgttgctttttttagaaaccagaatttgagcccagcaacaaccacaacgatatcgttgcggagaaaggacttatacaaggtgattctctgtctccgatcctctttaatatcgttgcggacatgttggctattttaattgagagagcaaagaataat

SEQ ID NO: 16397 - DNA, 1085 bp, Zea Mays
tgcgacgcctccaagcgccacaggtgttgaagcattgccatctatgctgcatcggaactattcattaatgcgagagttggataaaagtttgcatggtgtgcaactagaaaatgagcagcgctgtcaacaagaaatagaggacattaagcatggacttgaatctggaagtattacatatgacccagcaaaattgaaattttccgaagaagcaatggaggagcagaaacattgtgttagaattgctgacgagaaggtggctttagccactcagacttatgacttagttgatgctcacatccaacagctagatcagtttatgaggaagcttgaagaaatccggcaaggaaaagaggcagctgctgctgttactgcagggactgctgttgctactactgccactccaaccgtgaatgctggagcgacaactgctgatgctaatccgaagagtggacgatctggcgaaagaggcagagggggtcggaagaaggccaaggtacccacggagcagtcagtgccagtgccagtgccactgccacctattgacttagagttgcctgtggatcctaacgaaccgacatactgcctctgcaaccaagtcagctatggtgagatggtggcatgcgacaatcctaattgcaaaatcgagtggtatcactatggctgtgtgggcgtcaaggagcaacccaagggaaagtggtattgcccaaactgcatcggattccagaagaagcgaaaaggcaagtgatatgcagtccacaggctgctgtgctagtgtgtccttgcttgttaattgtgttgctgatgttgggtaacaaatgtagtagtagttgctgcctgtgacagtgcataccgttgtagatccagtgttctgtacatgttactcctccttcggtgctcgtagtttagggccatcaaccatttgttaacttcatggcctttttggcgattcatgccccttgtatgggtttcgcaatatcatgtctccttttcctggtatcacaatattatgcaatacagccggtttgtaacttttccctctttgaaaaaagaatatctaattagaattcctaaaatttgattgtctt

SEQ ID NO: 16398 - DNA, 1129 bp, Zea Mays
cgccgctactgctagcgctagacaggtggttcagagacgccgtctcggtaaagcagcgggaagactcgcacgcgtacaactcccaacggctaacgtccaccccaatccaattagccagcccacctctgctctgcgggcgcttcagatggaagcactagccattggatccgcgcctcgccgtccgggcgcaagatgaaggagaggaggcccctgtacatgctgaagggtccgcttgaggctgctccccccgctagggacttcgttggggcgctcaaggcgtcctacgatcgaactggcttgcctgctctgattgcggaggtcaagaaggcttcaccaagccggggtgttatcagggagaattttgatccggttcagatcgctcaggcatatgagaaaaacggagcagcatgccttagtgttcttacagatgaaaagtactttcagggaagtttttacaacttggaggctatacgcaatgctggagtccaggttcatgacgaaagagaaatggaccgtgttttagggattgatggtgtacagctcatcggcatcaataaccgtaatctcgagacatttgaagttgatattacaaacacaaaaaagcttctggaaggtgaacgaggacaggttatagctcaaaaggatgtaattgttgtaggagaatctgcgctgttcactcctgatgatatctcgttcgttcaaaacgctggggtcaaagcggttctcgtcggggaatccctcatcaagcaggaggatccagggaaagcaatcgctgggcttttcggcaaagatatctcgcatgctggtgctacctagagacgacgcagaagagcaacagaataccagaaacgctactccgggttgcatcattttgtgtaggggagaaaatcgagcgttgcaatcagaaatccaccctttcgcagagttttgatcggtcgttttgtttacctgacctgccaacttccccatgctgctatttttttgtgaccgagccatctcaataattacagattttagtgcacaagatgtatatgttcaaaaagttggatgtagtttcaagcagcttgatttttgcctatctaggcttcatctgcactattttttctaatataaaactagtaagaaaaaa

SEQ ID NO: 16399 - DNA, 138 bp, Zea Mays
aagaacaagtggtacaagaggagcctcacagcaaggagttcgacttgatctaggtggtgtcccccagttgacatattggcgccaaggatggattttagttcgatttatattttattttgtaagacttcacgatgtaat

SEQ ID NO: 16400 - DNA, 1542 bp, Zea Mays
ctgaaatgtaggggtttttttcaagcttgttgaatatgttcaaaattcacaactgctcgaactcggagagcgtgattatgctgcacgcgttgatttaacagctaaggtttatggtctacataaagcagaacagtatatcgagaaaattcctgcatctcataggagtgaggttgtgtatagaacacttctggcgaattgtgttgctgaaggcaatgtaaaaaaatcggagcaagtttttaataggatgaaggatcttggattcccagttacaacattttcttccaatcagcttctgctactctacaaaagattggacaagaaaaagattgctgatgttctcacaatgatggaaaaggaggatgtgaaaccatctatctttacttacaaggtccttgtagacgccaagggaatggttggagatgtagaagctatggagaaagtggttgaatcaatggtgaaagatggcattgagccagatctcacgtttaatgctacaattgccagacagtacatatttaatggtcagcgtgataaagcagagacacttttggagtcaatggagggtgatgatatccagaaaaaccgtgctgcttgcaagtttctattacctttatatgcttttctgggcaatggtgatgctgtggaaagaatttggaaggtgtgtgaggataatactcgtatagatgagtgcttgtctgctatagatgccttcggtaagcttggtaatgttgaaaaggcagagaaggtttttgaggatatgtttgtgaaatggaaaaacctctcttccaaatactacaccgctttgctaaaggtgtatgctaatcagaacctcttagacaagggtgaggaactagcaaagcggatggatgaggagggtgccaagtttgggaccccaactttgaatgcacttgtgaagctatatgctgacgctggagaggtggagaaagctgagtccctattgcacaagctatctctgaagaacaacgtcaagcccagttacagctcatacatgacactgcttgatagctactcgaagaaaggagacgtccacaactcggagaaagtgttcaacaagttgagacagataggctacactgggaggatcaggatgtaccagtttctgctccattcttatctacatgctaaggcccctgcgtatggattcaaagagaggatgaaggctgacaacattttccccaacagtgccgtggcaactctgattgccgctactgatccgttcgtcaagaagaaatcagtatcggacttgctcgattagattatggagtagtgtgaggtactgaggtccatcatgttgctatgcgcatgtgctgtttcgataagactgagtagtgtgagaatatatggtgagataataacgtcttagtcttgtaatgaactaccattgactttgcatttagactcatgcgctttgctgaacttgtgagtcatagaaacaggataaagtgcactagagaacttgtgctaattcttgatataatattttttgttatccatttcatttatccagtagaatcaagatga

SEQ ID NO: 16401 - DNA, 2071 bp, Zea Mays
gtgcatgaagggatgcagcgggttaatttaagatatatgtaaaagtgcagacctggatcaacaaaaaagataaagatgagtttgttggtgttggtgctcgatttggccccaagatagagtcaaaggaaaagcatgccaactggacaaacttgctgttagcagacccttctgattgctgcacccctccaagagagaaggttgctggagatattttgttagtggagaggggaaactgtaagttcactacaaaagctaaggtggctgaatctgctggtgcttctgcgattataattatcaatgataagcacgagttatacaagatggtatgtgagaccaatgaaacaaatttagatattggcatacatgctgttcttctgccaaaagatgcaggctcttctttacaaaggtctctctctagtggtgaagtcttagtggagctgtactctccagatcgtcctctggttgatactgcagaggtgtttctgtggcttatggcagttggtaccattctttgtgcatcatactggtcagcatggagtgcccgagaagcagatattgaacaagagaagcttctgaaggatggtcgtgaagtagcaccaaactttgagcctggaggttctagtggtatggtagatatcaacatggtatccgcaatactgtttgtggtgattgcatcatgcttcttgataacactctacaagctgatgtcccattggtttgtggagcttctggtggttatcttttgcataggtggtgtggagggtctgcaaacatgcttggtggccttactgtcaatgtcaaggcggtttaaacctgctgcagaatcgtatgtgaaagtgccattttttggagctgtttcataccttacattggcagtttgtccgttttgcattctgtttgctgttctgtggggtgtttatcgtcggttgccttatgcttggattgggcaagatattcttggtattaccttgatcgttacagtcatccaaattgttagaatacctaaccttaaggtgggttcagccctcctgggttgtgccttcttatatgacatcttctgggtttttatctccaagatgttgttccatgaaagtgtgatgattgtggttgcacgtggtgacaagactgatgaggatggtgtacccatgctgttaaagattcctcggatgtttgatccatggggtggatacagcatcataggctttggtgatatccttcttcctgggctgttggttgcttttgcattaaggtatgattgggctgccaagaagaccttgcaatctggctactttttgtggtcaatggtggcatatggttccggtctcctaattacatacgttgccttgaaccttatggatggccatggccagccggctctcctttacatcgtgcctttcacaatcggcaccttcttagcactgggcatgaagagaggcgagctcagaaacctgtggacaaaaggacagcccgagagagtgtgcacgcacatgcacccatcccccaaggattcgcctgttgcggtcagctcgctgtcgtagacaaggctaacgaccttacctgatgttgcctggccccggagaatgttgctgatgaccaaaaaaagtttccagggttaatgaaggagtctactgatttgtaatgaaccttacatagggataagccaagatcccctgatcgtgatcctcgttgtacagtaggtggtgtatttgtatagtgagtgatgactattgagatgtgcggctgacactggataaaaaaggcgcaggagcttgatgtgggagcagcactgcatctgcatcatgtggctggtgtatggttttgaatgatctctgccgcctcattcttgttcttgacatggacctgttcctggtcttatgaggcgcacacgtggcaagacgctgctggttttgtcggtgaagcgatgtgacgcagtgtatatgtgtgtgtattatcggccatccgtgaccagttagttccttaatattgtaatactagtcgaatgcccgtgcgttgcaatgagaatatataatatcagtataatacgataacttatatacaaaatgtgtgttat

SEQ ID NO: 16402 - DNA, 75 bp, Zea Mays
aaagaacacgaaggttggcgcagagccgaagctgtgtagaagagcttcgggataacggcggaaaaggaaaccgac

SEQ ID NO: 16403 - DNA, 1322 bp, Zea Mays
tgctgatccagcgatccgcccgagctcaaaagcctgaagctgaagcaaagcaaaagcaacgaggagtggagaaaaaaaaaaaagaggcgccgcagcgaggtcgaggtgattattatttaggcacaaggggcgctgtccggaaattccccaaatcgacctgggctggacccagccgcgccccgtctgcctcctgcttctctctccgcttccgcttcctgcgcctccaggctccacttctccgctcggcagtcggcactggaaggacagcatgtcggtctcggcgtcgtcaccggcggcggcggcgggcgatgagaagcaggaggcggcgcccgtcaggcgctgcaagggcgtcaacgacctcgacaaggtcgttctccgcgaggtccggggcagctccgcagaggtgtacttgtatggtgggcatgtgacatcatggaaagatgagcatggagatgaattactttttgttagcaataaggctattttcaagcctccaaaagctatacgtggaggaataccaatatgctttccgcagttctccaactttgggaatctggaaccacatggatttgcaaggaataggacatggagtgttgatgatgatcctccaccatttccagtgccaacctccaatagcgcttatattgacttgatcctcaaacctactgaagatgatttgaagatctggcctcatagtttttgaataccgcctgagggttgcacttagtcctggtggtgatttgatgctaacttcacgtataagaaacactaatgcagacgggaagccattctctttcacttttgcataccacacatacttcaagatttctgatatcagtgaggtgcgagtagaaggattggaaactctggattacctagacaacttacaagatagagctcgttccactgaacaaggcgatgcaattgtttttgaatccgaactggacagaatatatctgggcacaccatcgaaaattgccattattgatcatgagaagaaaagaacatttgttgtgaggaaaggaggccttcctgatgctgttgtttggaacccctgggataaaaaagcaaaggctatgtcagattttggggatgatgaatataaacgaatggtatgcgtggaggcggctgctattgaaaagactgtcactctgaagcctggtgaagagtggactggaaagttggaactttctgctgtgccatctagctattacagtggtcagctagaccctgaccgtgtgattcaggattccactgtcccggaggactccatcagctagtccttattctatttttgcaggtttatgtttccaacgatgcag

SEQ ID NO: 16404 - DNA, 941 bp, Zea Mays
atgaaaaatgaaatatgatccatattggtttgcatccttcgattaccgggttctcagcgatgtgcttactacgcacaccatggcttttgcaagtttgggccgacatgcaagtttgatcacccgatgggtactccaaactacagtcttccagcaccatcacttactgatgtgccagtcgctccatatcctcacactttctctgttactcctattgctccatatctgctgccccctgatccgcggccgcaatacactctagccaaggatccctctgcttatccaccacaagcgcccggaactacgtacggacctgttggggcgatatcaaaggtttatgcccgccacacgcttatccgatccccgacttctggagctgctggcatgcaagcgtcgtaatgagacaagagttgagagcactagtcccctctctgtcatgaagatagatcttgggcaaaccttctcaggatttttctgccataggtggaatggggtctcggattcttttttttttgctccaattcgacttcccatcaactgtgaataacggccgcagctgacatagaaaggtctcaataaatggaaagatagggattggcaagctcattcacttgccatttttctgtccatctctgaaacgagaggaggtaattctgactgtagtcggattcagagctccgttattatctcgtgtaacgtgcacaattgcaggggattcgaatgggaaagctgatgggttccatagctctagcccaaatcttttgtttatctcgtcatcttattacatatatgatatgatgtgtataccccgtcggaacagcaacatgtatatctatctatatatattactctaaactcatgttactgtttattgggcgtgaattattcgactgattgcccatcctagattgaatactgttagcacgaatctggttcttattagg

SEQ ID NO: 16405 - DNA, 975 bp, Zea Mays
attcaagaagccttatatcatacaatgtctctatgtgagcaggaacacatacattcatactggagttacagaatggcaattcaagaaaactgtcaatgtggtttgctactaccgttacttaagatttttcccgagcgggaagtttctctataagatctctccagataaagttaaagacgctgttaagtgcatgcatttccgggcatcaaaggctgattgtgtatttaaaggtgactacgtgctgtcagaggatggccagatagaaatggctctcctgtacccagggcatcggtacacgcttgtcaggatgcaccttaggcttaggggcaccacagttggtgcaaataacaggttggatgtactgaagattctaaccaccggagtgaatgcaactgagctgcaaaactggaaaggaagcatactagaactcgttgagggctgggaggaggatgagacgcatgacccggatgtgcctgccgtttcccacagcaggggtttgtcaccctttgtgtttgttccgtttgaggaggctgatacttcggtgttaaacctccccgtggagaagatggactactacgtccctgggtgagctcttcatgacgacgatggccattggagaatgagatgatgggtggtcatgttacaggttaaaatgatgatggccaacgatctccttccctctcagatcccttgctagagcaaatgtgtaaatacagtgttgttttgtttacacttttcggttggtcgcatgctgttgtatgacattatgtttgttgatacctggaaacaggttttattattgttggtgcttgaaaatggtgtgggaggaaactcactatcaaaaaaagtagagctaccctcctgaagtaatgtgggtctgtattattatagaaacaagcagtctatcgttgcgaactttttagtctgtatgtattttcgtattgtacagttaaaccttggcaccgtgcttcgttt

SEQ ID NO: 16406 - DNA, 8793 bp, Zea Mays
cttcaacaaccattcataagactcgatcttctcatttagtacctacactcgccttgtggcatgtaaacaatgtattcttcgctctctggctgactgaacggtttgatcggagaagatgagttttatcagaataatctcgaggagctgtgggcacttctaaattttttgttgcccaatatttttaattcgtcagaggacttctctcagtggtttaacaaaccatttgaaagtaatggtgataattcacctgatgaggccttactttcagaggaggagaacttgttgatcataaatcgtcttcaccaggttcttcggccctttgtactcagaagacttaagcataaggtcgaaaatgagcttcctgaaaaaattgaaagacttgtaagatgtgaggcatctgcttatcagaaacttctcatgacaagggtggaagaaaatcttggtggaattggagccgttaaggttcgctccgttcacaactctgtcatggaattgaggaacatatgcaaccatccatacttgagccagcttcatgttgaagagattgagggctacctacctaaacattacctaccatctattttgaggctctgcggaaaacttgagatgttggacagattgctgcctaaactcaaagctacgggccatagggttctacttttttctacaatgacaagattgcttgatgtaatggaggattacttggtttggaaaaagtataaatatcttcgattggatgggcacacttctggccatgaaagaggagctcttatcgataaatttaacgatcctaattctcaagcattcatttttcttcttagtatacgagctggaggtgttggggtcaatctccaagctgccgatacagttatcatatttgatactgattggaatcctcaggttgatctgcaagcacaggctagggcccacaggattggtcaaaagaaggaggttcttgttttacgtttagaaacggtccgaactgttgaagagcaagtcagggcttcagcagaacacaaattaggtgttgctaatcagagtataactgctggtttttttgacaataacacaagtgctgaagatcgaagagagtatcttgaatcactcctacgtgagtctaaaaaggaagaagcagctccagtgttagatgatgatgctctgaatgacattctagctcggagcgaagctgagattgacatattcgaatctattgacaagcaaaggagagaagaagaaatggcagcttggcaaaaggtggttcaggatggttcaactagtgggctagaccctggagtattgccttctcgtcttgtaactgatgatgatctgaagcccttctgccatgctatgaaactttatgagccatcaaatgtgaaaacagtaaatgtgaatgtgaggaagaagggtgaacttgggggccttgatacacagcactatggaaggggtaaacgagcccgtgaggttcgctcttatgaagaccaatggactgaagaagaatttgaaaaactttgtcaagctgattctcctgaatcatcccaacctggtggcatgtcgaaggatttggatattcttaataaaggcattaagactgaaattcttgtggagagttcaaaagaaccagaacaaacgaagatggaggcatccccaactgtcggtgactctccaccagccaaacggcggagaggtagacctaaaaggtcagatgtttttgtatctcctactgctggtctgactgatgctgtcaaacaagacacaggaaccacacaggacggtagttctgctacaccagcaagtaccatccactctgatgcaccagctactgcaatcaattcagctgtttcagatgttaatatacattctattccaccagctgataccaagaaacaagagttcagtactgataccaaggtttccagttctgtttctgttttggaaggatctgtgccgaatgaaattggtacaccattacagagtgttcataatgtagcagtttctgcaccaccgcatcaatcagctaggggcaggaaatgccaagcaggagaaacacctcgtaggcgaggccgaaaaccaaaatctctatcttcatctggtgtagatgatgttagtcttaacccaaccttttcaactgttagtggtgtagcagacactagttatgttccttcatattctcaggtctcatcacaaggcactgctgtggcactggcaggaatccagaaggattttgtgacagttaagttggatacattgttaccagatagtggtaagggtgctcctcctgttaatgagggagataaaggtgctactgttacaacacctgtggcaaaagatatatgtgctgggactgtgacaacatcagacaacactgtcaccctgacaccaaatactcttaaggaaaacattggattagttcaagtggcatctgcaccttctatgctcgtggcttctgaagaactaatgaaaatagcacatgttgcggtggccgataagcctgttgagaagcaaactgcttcacgtcgccgcagaaagaaaacatctagtagcgaggatactggagtcagcactagacaaagatcagctatgaaaagatcttactacaacacctctgttgccgttgatgatattggttctgctgtgatcccaaatgaaaaatcaggaataacgaaggaaagagatgtcagttcaattcaaagtacatccaatgaactaccaaatattaactcaccattgtatgagaagtctggatatgattctcaaccaagcacacctatagctgtccccatcaatgaagacactcttcctagtggttttgacacctgtactaattctatgataactcttgccacatctgccaactctgctgaagatgataaaccagttgatttgcaccttaatgcacctgtttctgttgattcccaaaaccaagaacaacacatgacagggaaggaccatttggcagtgtgttctagaatctttgctactcagttacagacggacactgcaaatcctgctattgatcataaaccaggaactgcccagtttgaaccatctgcttccttgccccagaattcaggcaaggatgctactgcactaccttctgaggttgacagtgctgctccaaatagggcatcaagcaggaggaggaaagggtcaactcgagaaccacgcaccagaagtaattctgcatcagctgcaagtgaacgtcgtgcccgacttactggattgaagcaggcagaggacataaagaagttagagatgtcagcaacgccgaccacaacagtgtgtatttcatcggtagagcaacagggagctgcttctttaagtgcgaagattaccaatgcttctgtttctgaaggacagaagaatcctggaaattatatgccttctgccatttcaattcccgtggggagccatgttctgggcctgggcgcaacaagtattgaagaaacaactgccactatgataactcaggctcctgcagtttcaaaatcagaacgaagaaaacttccaggaggcagtcaacaaggtattcagtttgagagttcagcatcaaaaacaaagatggtatcagctgtggaaccagcacctgcaaatgttgaatgcatgcaaggtactgaagttaatagttcagaacagacaatagtttctgctactgaaccagcacctgcaaatgatgaacacatgcaagagcaaccaacaaatatcgtttcatctgtggaatcagaaccttcaaatgatgaagagcacacaaagcatgaagtgtttcttgcgactactggtgataatatgcttgcttctagtgcaggaactgaaatattgcgggatacagttgagcatgctgcttgccagccagaagcagtatgcacagatggaactgcaaggcagtctgaattgtcgcaacttgatagaaaagcctttcatgatgcctcatataaatacactcatgggtccactaaagatgatggtatcttgcccagtgaaggtacttctgttgatgttactggttctaagcaggatgatgtgaacattgttggcacacaaactgatgatgtttctcggggttctagtcattttccagttattttacaatcaactgagtcagatcggcctccaggtcaagtgaagaatttggagagtaggatggagcaggtgaaaacagaagaagctttggttaacagttctggtggcaatcaaactcacagtctgggcgatgaaccttctcataatacatcattagcaagaaattctccctcagaacactcgaatgagcgttgctctgatcaagtaattggtgaaaatttcaaaagtaaagaaaatattgttgaagtccattctggcattaatactgatggccccgatgaagctctgaatgcattgcacacccaatctaaggaggccagcatgacagatattggtgtacctactgatggtgatagatgtgaaggtaaagggactagtgtcgaggtctgtgctgacatgaatactgatgggcctgtggctacccaggatgcttcgtccacgaaatctgataaagagtcctgcatgatggaatgtggtgtgtctaccgatggctgtcccacagtttgcaaaacacacaatgatctccagggtcatgtatcttgtgaagaaacctttgttaggactggtggtgatgacacaacccatatcaccaatgcaaattatggttctaataatgaaagtgaggccaccattgctagtcctgttgaaaccacacaaaaactgatggaagggagcactgttattgtgtcggagaattctgatttaaataagcaatgccacacattgcatactagaaatgatcctcctgcaaataccctgttgatagttgagtctaacaaagttacttgtgatgctgaaattgtttgtgctagcaggttagaatcttctggcattgaggctgaaacagtgggtatccaagagtcagctcttactgattttgagggaacaaaaggaactggggatttgggtgacagaactaacagtcaactgcatgatgatgttcatgggacatcatgttccacgatagctcttgtatctgagaaagaaccttccgaagatcttaccaccggtagccattcagaagcatctaatttacttgctgctgtagaacaaactcaagaaactactgttgagaaccaagagatcatagatgcagtagtgtttatggatgcctgcaaggcagaacctgttggtgattttactattgctaaaggagctgaacagactgtagaaatggttcattatgttgataagcaatctgctgtattagactatgttgagacacagacaaaacgaacttcggtttgtggttctacgctaaatgaatcccctcaggctgcagggttggaagaagactgctctgtactgaagcatggtgatcctacttcatctgagcttcttactgtagcacctaatccaatcggtgaaacttctgttattcaagtggaaccagaggcaagaaactcagatggatactgcacaacagaggctggcagtgctttatctgaaactgtcatgggattggagccaaataaagaaactgcggttccaatgcaagagaatattggagaagctaatgataattttaataattgcgaagcacacaataattcggagattcatgcatttgaagtgtcgatggaaacgcagtcatcagaagtcaaggaagtatcttctattcagtctggtgcagcaaatttgagcacacagacaactgcactgcctgatgtaacaggacaaaccagtatggcatcgactggagaactagtatctacaaatgaacacatacacatgcaaggcactgaaatcaattcagagcaacaaacaaagatggtttcacctgctgaatcagcacctgctaatgatgaacacgtgcaagacattgtgattcttagttcagaacagcaaacaaagatggttttagctgcagagattgacgcattatgcgtccaggagactgcaattattgatcttgggggagcaagaggaacagttgacctgaatgacataagaacacaggttcctgcattacctggaagggatgtgctagatgtggaggcacatattttggagcaaaaaaaaacatcttcaccaggtgatgaaattaagggttcagaacaagcaaaaatcgaatcgattgcagagatcgaaacagtgggcgtcaaggagaatgtcattgctgatcataaggaaacaggtaacaacagtggcgtaagtatacatgcgcctctattagttgaatctggacaaaaggcatcacctggagttgaattgcgtggtattgaggttgatgctcatgttttggaacaagcaaagatggtttcagctctagaaccagactctactccagaagtttgtgctgacaagttagaaccttctggtgctgatgatgttggaatgattgttgtccaggaggctgcttctgttgatgatcacaatagagcacaaggtggtgaggctcattgttcagaacaaataaagatggcttcaattgcacaagcggtgtctagcatggctttagtaggatattcttcttcagaagactcaatggtggatgctgctgcccgagtaactgatgctgattttgtggatagtaaagcagctggtgtttatcgccaagaaactatgcctactcaaaccacctctaccctcccagagaacatggattctcctgcaactgctgctaccatggttgaatcgaagtttgctgcctcgtctgagcacgttgcaggacccgagccaattgatgaaacttctgttatgcaagtggaactggcaacaagcacaggggatggatgtgcagcagatggtcacaatcttgtttcatctgaaactgttgttgaagtgaagcttgctcaagaaattgttgttcctagtccaggtggtagcatagaagctaataatacttctaccatcagcgaagtatacaaagatacccagtctcgtgcatctggtgaagcatgcaatgatggtcagtctcatggtgatgaaaatatgaaacttggtgaagcttacactgaactgcagctggcaccttcctctggtgaggaggccatgacatgtatgtgtagtgagctgcccagccaggaggtggaggctccaagcagtgaccctttggagaataatgaagaaacgaaaaatgaagctgctgctcaaggatcagtaaatgaggattctgctcctcgtgctgaaaatgcaaagattgatgaagctgacacagaacaggaactgcttccatctggtgaggccacggtagacgaatccagcgagctactcagccaagacgaaaaggtggctcgtaaagatgcaaagatggaagagtctgctgctgctgctgctgcacagagacagctaactactgaagttgctcatgcaagtgaaaacgcgaaacttggtgaagatggcacggagctgcaactgccaccaccttcaatggtagacatatctagggagcaactcagccaggaagtggaggttgcaagctctgggccttcaggaactgatgaaactgctgagatgaaacggctaaacactgaacattcacctggtgatgaaacttcaaaacttgttggaactgatctaggactgcaattgtcaccttctggtgatgccatggtagatatatctaataagccacccagctgccaagacgtaaaggaggccccgagcagtgacattttgggaaatgatgaaaattcagacaccgagaagactcctgctgccttgcatggacggctgaacaccgaacttgctcctagtggcagaaatacagaatttagtgaagctgacactggaaaacaagagacacccgtgtctgctgaggctatggtagaatcatcgagcgagcctcgcagccatgaggcaaaggaagctccaacccctgacctgtctggggatgatgaaaaagcgaagtcagcaagggctgctgttgttgcggaactttttggagatgcaacagaaggtggttcggatcagccattgccgtctcctagagaacaaggcaaggaagcagaggccgatggaggcttttagagtaaagttgcaaatattgtatcaagagatactagaatccgtgtaagtaagaactgctaatagtgcttttagttgtaactggtgtaagcttctactcagaatcaaaagcgacgtgctgagattacagcaacagtggcctacggcagtttactactgttttgtgcaatattgctgctgagttttgttgagacaggcaattgatctgtcatctgtctcgtcttgcatcgaagttggcagcaccatggtgaggtgctcccgccttaacctggaagcgctgacagagggaagaacaatactctctggtttcctaatgttttcctgttcactgttttgatttgatgctgcattgcagtagtgtgacttagtaacataatggtgcgtttggatagacggacataccgatccagaatcatctgaacctaaatattgagtacaagcttagattatctgtttggtctgctttatgtctgggtgcaatgctctctgatttctggacggagtggtaccgcaatccaaacagactttaatgtttgggtgcttcaggtcataatcaaccatctaatttactttgcaaatgaatgtttcaaactggactgctcaagcctaccaagtttaatggtccttcctagtattgaatccttttgagtctagcccgtttcctcatttgaattttcactgttagtgtgcctatacttgcctcacgtagaattttgaaagcttatggttgggtgcgttgtactcgac

SEQ ID NO: 16407 - DNA, 799 bp, Zea Mays
tgtagaagtagtgatgtattcagctcatagatactcaatgcttcattctgctggccatttgttggacatctgtgttcacaatgtaggcctctttcatctggagcctgggaaaggctatcattttcctgatggaccgtttgttgagtataagggaataattcctccagatcaaataccggttaagaaaaatgaactggaaagagaggccaatagactaatttcagaaggagcgaaggtcttagcttctgtttttccttatgaggaggcagccatattatgcggaggttctttgcctagctacatttcaaaggatagcaatcctcgcattgttaagtttggggataaccctggtggtccttgcggtggcactcatgttgccgacatttcaatcatcaacagcctaaaggtgacaaacataagagtcaagaaaggcctcactaaagtctcatacagcatcagcccatgatccttttccagcagccgcagcagacaacacctggaatttattggagcgagaattattaattgaatcagaaggctgtactttagtttcgtggcatcacatgtatacgtagggtggcaaataaacaatttctatgtagtaaagtctgccagttcctcatgtacttcaatagatgatttgtttctgtactgagtcgtagcagagccgttaaggttctgatgtagatgatgacacatgtaaaactgccacggcaccatcatacaacaacatgaaggagatttaaatttgttagagcaactccaatagttatgtaaattttagctctctaaatcacag

SEQ ID NO: 16408 - DNA, 2454 bp, Zea Mays
gttcgaaccctcttgtcatgtatggatcggaagtttctcttggcaacccctcaccatcgcacatctgcatgctagattttggcgatccattcagaaagcatcatatggtttgcagatacagaaacaagcctcagctcccatggtctgcaatatcttcgtcatctggtgtatttgtcatatgtatgcttgtggggtacatcgtgggtgccgcttggagtcgttatgataatgttaaggaagattgccggaaaatggaggagctgaaaaaacaggcagaagcagccgatgttgctaaatctcagttccttgcaactgtttctcatgagatcagaacgcccatgaatggagttctagggatgcttgatatgctgttagacactgacctaacgtcgacccagagggattttgcacaaacagctcaagtctgtggaaaggctttaatatcactaatcaatgaagtgcttgacagagcgaaaattgaagccggaaagttggatcttgagtctgtaccatttgacctgagatccatccttgatgatgtcatctcattattttcttcaaagtcaagagagaagggaattgagcttgctgtatatgtctctgaaagagttcctgaactcttgttgggtgatcctggaaggtttcggcagataattacaaatttagtgggcaactcaattaagttcacagaacggggacatatttttgtacaagttcatctggcagatcactcaaatcttgcaacagaacccaaagttgagtcagtggctaacgggatgaatggacataaagatgagaaaactgctgtagcaaccagtgtttctctcaacacactaagtggttttgaagctgctgatagccgaaatagttgggaaaacttcaagcttttgctttcttatgagaaaaatgagatgccctatgaaagtgtatctgataaagttactcttgtagtaagtgtggaagatacagggataggtataccattggatgcccaagccaaggtgttcactcctttcatgcaggccgatagttcgacttccaggacatatggtggtactggaattggattgagcatcagcaaatgtctcgttgaactaatgggtggtcagataaactttgttagccgaccacatgttgggagtacattcacatttactgcagctctccaaagatgtgacagaagcgctattggtgacagtaagcctgttatgttgcaccctcttccatccagtttcaaaggtttatctgcattattggttgatagaagaccagtaagagctactgtaactaagtatcacttgcaaaggctgggaattgcctgcgatgttgttgctaccattgaattggctcttggtgtgctgtccgggagaaatggcagttctctaaccagcacgaagcaaccatgcatgttattgattgagagtgattcatggggcttcaagattgatgtacctttacgatctcgactcctggagatgaagcagaatggtccacctggattgcccaaaactatccttctcgcagctgcagaatcgggcaaactcaaagcacactatgcagttgattctgtgatcacgaagcctctgaaagcaagcggacttgccgcttgtctattccaaacacttggcatcacacagtcaagcaacgagagacgcgacaactcaggttcccttcatgggttgctccttggcaagaacatattggtggttgatgacaacaaggtaaatcttagagtggctgctggcacattaaagaaattcggagcgaaggtggagtgcgtggagagtgggaaagatgctctcgccagcctacaagttccacataagttccatctttgtctcatggacattcagatgcccgaaatggatgggttcgaggccaccaagcaaataagggcaatggaggcgaaggcaaatgagcaggcagtcgcctgtgatgattcagaaacggatggcgcgacaagggcggcgagatggcacctgcctgtccttgcaatgaccgccgatgtcatccaggccacccatgaggagtgcacgaagtacgggatggatgggtacgtcacgaagcccttcgaggagaagcagctcttccaggcgctgcagaagttcttggaccctggcatgtccagctaacacccaagtgctgcgttcgttgcaagtgaggcaccattctcctccgttctgtagttcgctaaccatagacgcaatctgattatctgaccccgaagaaagatcgtaaatggcgggctgctcgtcgaccatgccagcggggaacagcaggcagcacgcagcaggggcctttgctgcctgcctgtgcagtgcaggcgccgtgtaaatgtattgtattagcagggatcctgtttatagcgctagtatggacctgcgcgacaatgttggaggagctgcctgcggctgatgcacgtcgagcataattttagcgagagagagagagaga

SEQ ID NO: 16409 - DNA, 1503 bp, Zea Mays
aaactctgctgcacccacaagcattattattggggagtctctttgtgtcggcgtgctcatgcaacatgtagctattctttggatgacaagttacagggagagctagatgatacacagggagaacagagaaagctagaaacagttggtgcgtttcagaaaataccaatggtgatgcctgcaactgatatactaatgtcagcacaaaggaaatctagaaacgtgccaccaacaaagggtatagcaaatattgctaagcgtgaaaggaacaaaggtgcgaaacagcttgatgccttaatgaaagaactttctgtaccgctgagaacatacacagaaaacttcccaaagaggagagatttgcatccttatgagaggtctctcattgagttgacttttggcgagggttattatgagcaggttctaggacgtgtagatactctcaggaaaaggattacttctgttggaaagcaacatgcttcagtctgtgctaagtcaacaacaaaacgtgaagcagaggagcgcctcactgagggcagaaagaaactcgaagaggctttccagcatgggaagcacgccattgatgatttagtaaatgtagcaaaggctttgcgttctatgcctgttgttgatctacatattccaacactatgtctagttggatcacccaatgtagggaagtcatctttagtccggatattatcatctggaaaacctgaggtctgcagctacccattcacaacaagagggattctaatgggtcacattgtatctaatcaggaacgttttcaggttacggacactccaggactcctgacaaggcatgatgatgacagaaataacatagagcgattgacactagctgtcctttcttatctacctatcgctgtcctgtatgtgcatgatctatccgaagactgtgggacctcagtggccgatcagtacatcacgtacaagcatattaaggacagattcggtgaccgcctatggcttgatgttatttccaaatgcgatcttttgggaaagaaagagcccataagttttcacgatgctgatgaagatgtagcacggtacagaagattggggccagaaggcgccctccaagtatctgtgcagaccgaaatcggcgtcaaacagcttaaggaaagagtgcatgagctgctgacctctcagatggctcggatcaaatctagcaaggcggagcatgaaacacatgaagtagggactagtgttgtttactgaagtttgacaataataaggattcgaatatcatgctgggtgtccgcgtaaacattcaatgtcgatgatggtaacacattccatcagttgtccttttgtccatttggaaagggtggtcaaaattgcccattatgcgttctttagtagggtaccaccacctgtccgaaaaaaaaaagattatcgttcgtcttctccatggtagaaagattgtcgatagagctcgggaaaagattattgaaacaaaaaatcatttaaatgatcaagatgtct

SEQ ID NO: 16410 - DNA, 2462 bp, Zea Mays
cgcgcgctccctaccgcttgtccgtttcttcctctcccgaagtagcaacgtgaatcgggccaggcttgcggatgccggggtgcggagtagcggggagagggggcgtgggggtgtcgtcggccgcacgccccactccgcgccgcccctgcctctggatgcctatcgctcgcggctacgggaggcaacctgagctgaaatattgcacatcatcacaaagcaagtctgtgttactaggagcaggatttggtcgacatgttactaggagcaatccttatctgctccaaaattccagtagcactacaatggcaagactgcaaaagtctgggcagtttcagcaacttgtcttggacccttcaagaaactatttgactaagacattctacaatgcaaacatgaagaggagagttctgtcgagggttgagtgttttgtgtcttcagatccaataaacaatggttggttgaaaccaaggaggtctgagaatttcactagcttggagagcgcatgtgtccagcgagaatacaaactaccagtcagaacacgtgctgactgtaaagcagagcagtatgaaataacaggatcacctttgagcccttctgatgctgatgctgttatgattggagacacaaatgagatttctccctggtggcaggagttcccaaagcgctggatgattgttctcttgtgcttctttgcgttccttctttgcaatatggaccgtgtcaatatgagcattgcaatccttccaatgtcgtcagagttcagctggagcccagcaaccgtcggtctaatccaatcatctttcttttggggttaccttcttacacagatacttggaggtatttgggctgataggtttggtggtaagctagtactagggtttggggttatatggtggtcaattgcgacagttcttacgccccttgcagccaagattggacttccatgcttactcaccatgcgtgccttcatggggataggcgagggcgttgccatgcctgctatgaacaacatcctttccaaatggatcccagtttcagagagaagcagatctcttgccttggtgtacagtggaatgtaccttgggtcagtcaccggcctggctttgtcacctctgttgattagcagatttggctggccttctgtcttttatgcatttggatcccttggaagcgtttggtttgcactgtggcaaagcaaagcacacagctctccagatgatgatccagagctaagtaaagctgaaaagaggcatatactgggtggcagccccttaaaagagcctgtcacttccataccatggaggttgattctatcaaaggctccagtgtgggctctcataatatcacatttttgccataactggggaacatttattctgttaacatggatgcccacatactacaatcaggttctgaagttcaatctaaccgagtccgggcttctctgtgtcttgccatggctgacaatggctgtcttcgcgaatattggtggatggattgctgatactcttgttcaaagagggatctcagttacaaacgttcgtaagatcatgcaatcaattggtttccttggaccagccttgttcttaacactgctgagcaaagttcgtactccagccatggctgtattatgtatggcatgcagtcagggtagcgatgctttttcacagtctggcctgtattcaaatcaccaagacattggaccacgttatgcgggggtacttctcggattgtcaaacactgctggcgtgcttgcaggagtttttggtactgcagccactggctacattcttcagaaaggttcttgggatagtgtgtttaaggtgtctgttgtgctgtacatagtaggaacggtggtgtggaatgtctttgcaactggagagaaagttctcgaataagctgtggacattcctatatgccaatatacgaaaattgtatgattttggtatacaaaggtaaatttaagaagagatacagctggaagaaaactccattttgtgcaagagatataccttcatctaatgtttgggctatcggaagaatgaaatcaaattagagtatcgtgtgaggtcaagaaggtactcatggaactggagaaacttcttgtacagaaagcaactgcaccaatggcacgtcagattttgcagctgtttcttgagaagtacaggcttctaccaagatcatcaatccacatatttttgttttgtttttaaaatacatggtagttaaatcgtgtttcaacttgcccttgattaaggcgctacagctactgccaactaaatgtagtattatgtgagctctttttcatcgagaattcctaattgtacctgcttcagataccttaaacgtctctgttccttgcgtcgttgctattatcgttttgtgtatgctgcataatgatattgcatggtgatggtgtcatttttttggcatcccggtgcctgaagaagagtagatttaat

SEQ ID NO: 16411 - DNA, 1681 bp, Zea Mays
tgtttgttgttgtcccacatcactatttatactggtaccattggccatgtggctcatggaaagtccactgttgttaaagctatatctggtgttcagactgttcggttcaagaatgagctggaacgtaacattactataaagctgggttacgctaatgcaaaaatctacaaatgtgaggatgacagatgtccgcgaccaatgtgctacaaggcctatggaagcggaaaagaagatagccctctatgtgatgtgcctggatttgaaaacactagaatgaaactcctgagacatgtttcttttgttgattgcccgggacacgacattctcatggctacaatgcttaatggagctgctatcatggatggagctcttcttttgatcgcagcaaatgaaagttgtccacagccccagacatcagagcatcttgctgctgttgaaatcatgcgtcttcaacatatcatcattctgcagaacaagatcgatcttatccaggaaagcgcagcgatgaatcagcatgaagcaatccaaaaattcatccagggaacaatagctgaaggtgcacctgtggtgcctatatccgcccagctgaaatacaacattgatgttatctgtgaataccttgtgaagaaaatccccatccctgaaaggaactttacctcacctcccaacatgattgttattcgctcctttgatgttaacaagcctggttcagaggtcgatgaaatcaggggtggtgtagctggtggtagtattctcaggggagtcctgagggtgaaccagaagattgaagttcgccctggcattgtcatgaaagatgagactggaaacatcaagtgcaccccaatctactcaaggattgtctcactgtacgctgagcagaatgaactccaatttgctgtcccaggagggcttattggtgtgggaacaaccatggacccaactctaacacgtgctgacagactggttggccaggttcttggtgaagtaggttcactacctgatgtttacgtagagcttgagatcaatttcttcctactccggaggctgttgggtgtcgaagctcaccaagggtgagatcctcatgcttaacatagggtccatgtccacaggcgcccgtgtgctcgctgttaagaacgatcttgccaagctacagctcaccgcgcctgtctgcacgagccgaggagagaaggttgctctgagccgtcgcgttgagaagcattggcgcctcatcggatggggccagatccaggcaggtacaacacttgaagtaccagcgtgcccggtgtaaagcgtcatactcagacgtgagctgaagttgtgtgcaaaagagaaaaaaaaatgagtttgttgttagtcctgtccctgcgttactgcagatccaaagtcctgggtcactctaattttattttgtttcgttcaattttggaggccgtttgcattatgattcctgtgaacattaccaggtcggaaaccagtattgtgaacattatgagtacggcatatggatcagcatttgccaatttcttctttcgcaccaaaatttagacttgccttcatatggtttgtgcctcaagaagtggctgtatgcctgtatatataagactgtctgcaactctctaaatttccctcctatagcgcactatacagccaccttattcaggttctattctctatttttttc

SEQ ID NO: 16412 - DNA, 2130 bp, Zea Mays
cccccgggacatcgcctctccatatatacgacacccccgctcccccctgcaatgcacacaacaccagtaagcaagcaccgccagcacgcacaagcaggcaaagctctcgaccatcgctctgagggattaatggcggcgggaggaggaggcggcggcatcgccgacgagaaggcccctgctgctgaggcgttcggcgggcacctggaggcggcggagatgacggaggcggaggaggaacacagcggcgtcaagtcccggctgtcgggtctgctgtggcacggcgggtcggcgtacgacgcgtggttcagctgcgcgtcgaaccaggtggcgcagctcttctacggcctgctgggcagctggacggcgtacctgatcagcatcctgtacctggagtaccgcacccgtcgggagcgcgagaaggccgcggacttccggaaccacgtgatccagtggttcgaggtgctggacgggctgctgggccggcactggcgcaacgccgggctggccttcaactgcaccttcctcctcttcggctccgtcatccagctcatcggctgcgccagcaacatctactacgtcaacgaccggctggacaagcggacgtggacctacgtcttcggcgcctgctgcgccaccaccgtcttcatcccctccttccacaactaccgcgtctggtccttcctgggcctcgtcatgaccacctacaccgcctggtacatggccgtcgcctcgctcgtccacggacaggtcgagggcgtccagcattcggggcccacaaggatcgtactctacttcaccggggcgaccaacatactctacacgttcgggggacacgcggtcacagtggagatcatgcacgcgatgtggcgtcctcagaagttcaaggccatctacctgctggcgacgctgtacgtgctgacgctgaccctcccttccgccgccgcctcctactgggcgttcggcgacgagctgctgacgcactccaacgcgctggcgctgctcccgcggacgcccttccgcgacgccgccgtggtgctcatgctcatccaccagttcatcaccttcggcttcgcctgcaccccgctctacttcgtctgggagaagctcatcggcctccacgactgccgtagcctctgcaagcgcgccgccgccaggctccccgtcgtcgtccccatctggttcctcgccatcatcttccccttcttcgggcccatcaactccgccgtcggctcgctcctcgtcagcttcaccgtctatatcatcccggcgctcgcgcacatggtcaccttcaggtcgccgcagtcgagggagaacgccgtggagcggccgccgaggttcgccggagggtggacaggcgcttacgtcatcaactccttcgtggtggcgtgggtgctggtggtcggcttcggcttcggaggctgggccagcataactaacttcgtgcagcaggtcaacaccttcggcctcttcgccaagtgctaccagtgcccgccgcatctcactgctgccccgccggcggccttcatgccgccgccgccaccaatggccgcggcgccctccatgccaccggcggcgacggcgttcaatgccaccggcctcttcttccctccgctgccagccccggctccggctccgtcgccgatgatcaacttcttcctccgccaccaccaccgtgggcaccacggccgccacggcctgtgacgtcgtcgtcgacgcgctgtgcattgcatgcatggtcgctagcgctgcgcctctgtcacgtacggccgattactccctgtcgagtttgctccacagtagttttagctagttatatatcttggtcatcagcacgcagcaaaggtgcaagttaattagctactagcctgattagtaaaagttgtgtgtcgtcaaatgccctgttgtacgttcatcagataaaagagatcgaggtacacgtggatgagagtctggacgtacgtacggtcataaggctaggtaactctgcctacatgatcgtcaggatacgtttggagtcccttgtcctgtaccgtgtccttgtgtgtagctgctttcgagaaagaagctgagcagaaaaagaaaaaaaaaagagaatggaatgttgttacgttttcctctcacgcagtcata

SEQ ID NO: 16413 - DNA, 196 bp, Zea Mays
agattgcaatctgttcccgagcttcgaggaatcgacggtcaagcgttggcgaccgagtgatcaagttcttcgagttctacgagattgaagaccctgagcatctgtttggtgaaggcaagtgtcctctaacctattatgtcccatttactttataattcatcaacccgcataccatgatcaacctaaggattgacta

SEQ ID NO: 16414 - DNA, 7129 bp, Zea Mays
tggaggaataatcatccacaactgcagctttctcactatgattggtctactgaaagttctacttgaggctgctaaacaaccatcacctgcacggatagacggggtggtctctttgctgtggcatgtcatgaaaggaacttccacaaagctacactcaaaagctgggcagggtcttctactgttcatgccgtcatgacagggctgattcaaagattatgcgatgaagtggatccaaaagaattaccattgatgtatacttgtttatgtgaagaaatcaactgctgtcttgaggatggctgtttggagcatttgaagtgcttgattgtttttcttgcatttgctttacaaaagaagcaaaacaatgcattcgataaggtgaagatgattaaacttgttgaggatgttccaaccattttgggcaatttgtccatcatatcacctttctatgccccagtgttcaaacttaaaaatccgagggtgattgtctttataaagaaacttttggtaaaaggtccccaagttgcacaacattttgaaagtcaaatattaagtgcaatggataatttcattgtaagttcacccgaggatgtcatatttatccttttaaatttctttaaaggatcaaagaagcaaatatttctttgtagcactgatggaaatcatctggattcagtggagaaaacttgcaagttctttgaatcaaaattttctttgtggatagagttattagatgatacagccggcactggtaatcgatctagtaaccaggtcagtgagaaggaagctgctatactgtggggatcttttttctgctaccctaacatgaaaggtgtacatcaagatagtttgtcactgctgaggaagttaatcatcaactttgatcggttgcttgaagtgggagaagggaacatgaatggtcttccaatgactacctggagaggtctacttggtgcagcattgtcatcgtaccacaaactactgttggtcaacaccagcagaaattcagaatttagttttttcttatcgcttgccaagagtcacagtacatgcccacaagtactgtctgctgtagctgaatatttggattccctgcaaggagtatcatccatggaagtgacaaaagaatttgatccacaaaatctcttggagctgttctccatctttgctttcaatttgagcagtccaaccaaggatgttcggattttaacattgaggattctatcatattttgtgaagatggatcaacgtctaatcacagatgaggagcgaccacacaagaggcagagaacagaagtttctggagaggaagctgttgctaaatacgctaatgttgtggatattcttttgattattgagtcaatgccaatttcagtatctactagccgtaaaattgctatcttcatttctcggatacaaatgagtttatcttccaagatggttcatgatgattacatacctcctctcttacatggtattattggcatattgtacaatagatttagtgatctatggccacaaacactggattgccttgctgttctcattagaaaacacaaggagcttgtttggggtcagtttgttccgttcattgcaattcaccaatcaaaaggactgactgtgaaaaatcaggagaagctggaagctgcaacccaaccacagtctatttttgactgcttcaacttgtatcttgctatggactttgattgcacaccagctgtgaccgtggctaccttattgcttcaatcgctccaaaggattcctgatgttgctgaatcccgctctcgacaacttataccgctatttctcaactttatgggctatgatgatagcagcatctttagtgctgattcatatatgcctgaaaaatgtaaaggcaaacaatggaaagcgattctaaaagaatggttaaacttattgaggttaatgcacaatgcaagatcgttatatcagggcaattttctccaggaagtactaactaaaagggttcttgatgacagtgatcctgaaatacaagcaaaagcattggattgccttttgaactggaaggatgaattcttgatcccgtacagtcagaaccttaaaaatctgattgatgtaaagactcttcgtgaagagctgaccacatgggcagtttcacatgactccttgtcaattctgaaagaccatagaagtcgtgtggttcctctggttatccgcgtgttggcaccgaaagtaaggaaactgaagctactaggttctcgaaagcacacaggtgccagtcatcgaaaggcaattcttcgtttccttttgcagtttgattcaaatgaacttgagctttttttttctttacttctgaggtccttgatccctggcagcctccagcttaaaatgtttggttctcagccagacaaccttcttggaagtttctctgacattgttggaacttcaacagaaatttgtgtagagaattttacatggaaaaaggcaaatggtttcattcatctggttgaagaaatttttggtacttttgatatgccacatataagcccatttcttaatgttttattaatcattgtcgctcgcttgctggagagttgcatgaggaatcttagaaatgagagtgatgggaaatatccttgcaaccaaacaaatgaccatggtaatggttgttccataaattctgaagtgggcaattctgtgaacgtggatgaatgctttaaagaaatgcatctagaaggccatatggaggagatctggtacatggcttgggcaacgtgaacttaggctgttcaaattattgctaaattacatcacagatccctcagctgctgataacttcatagaccttattcttccatttttcagcaagaaagatttgaactccgacgattgtttggaagcactatgtgttgtgaggggaataattcaaaatctgagatgcaaagtatctgaaaaagttctaaatgcactgaacccattacttgcaattgttggattggaactgcgactatgtatctgtgatatttatgctgggttgtcattgaatgatccttcgatgttgtttctggctgggttaataggagatctgaatgcagtttcagcttcagaacttggtgaactagattatgacacaagacttaacacctatgataaggttaggccacaattgtttcttggcttgacagaagagcatgtgggcgccatattatctcattgtgtgtatgatatgtcatctgaagaattaattttgcggcaaagtgcatctagggctctgcagtcgttcctggacttttccgcctcagttatgaataatgatgtgtccaaatactctattgatgataaatttagagagaataataccagaagcatttgcacgatgggctgtattcagaagatattggaaaaaacttatctgcacaatatgggagtagcaatgactaaagatgtatcaattcaaaaggaatggattattttacttagggagatggtctccaattttaatcatttagcatccttaagctcatttaggcctctctgtaaggtggatatagaagaggattttttccacaacataactcatttacaggctggtaaaagatcaaaagcactgttgctttttagacagggaatcaaggaaaacaacttttcagaggatatcactatgaaagtctttgttccactatttttcaatatgttttctgacgtaaaagctgggaaaggcgaacaagtcagagatatatgtttggatacactatctgctgttgctgccaaagtgcagtgggaacactatagaacaatattgaagagatgcttccgagaattaaaccttagacctgataagcagaagatcatattgaggctgatttgttccatattagatgcattccatttcatgaaacctgcaaatgatgcctcaggaaattctgatgctttgagtgaagatattgattcttcccttacattctctttggtcacagtctcttctgataagcaacagtacatgcaaaaggtagtgtttccacaggttcaaaagttgttaggatcagatccagagaaagtcaacgtcaacataaacctggtagcactgaaaatacttaagttgctaccggtggattattttgagtcccaactttcaagcatcattcatcgaatctgtaacttcctcaagaatcgtcttgaaagcatacgtgatgaagctaggtctgctttagctgcttctgttaaggaactggggattgggtatttgcagtttgtggtcaagatattaagagctatacttaaaagaggttttgagttacatgttctgggctacacacttcattatttgttgtcaaaaaacattactgctgatatgtatggtaggcttgactactgtttagaagatttgttggcagtggttgacagtgatttacttggagatgttgcagaacaaaaggaagttgaaaaacttgcctccaaaatgaaagagacaaagaagagaatgtcgtttgagactcttaagctgattgctcaaagtattacattcaagaccgatttactgaagaagataatctcacctgtttctttacatcttcagaagcaacttactccaaagttgaaaaccagacttgagatgatgctacacaacatagccttagggattgagtgcaactcatctactgaaacatcaaacttgtttatcttcgtatattgtcttattgaggatactattacaggaagcagatctgaatgcaaagagaatacacaatctagtcctgatcaagacagtactgtaagaaagaccttcctgggactaggtgagagtggatcacagaattcttatatacttaccaagtttgcacttgacttacttcgtaatcgtctgaagagcatcaagcttgacaaggaagatgaacaactcgtgaagatgttggatccttttgttgaccttctgcgaaagtgtatgagttcgaaacatgcaagtgtcctctcagccacatttagatgttttgccttgttggtgaaacttccgttgccatctctgagggacaatgcaattactataaaaaatgtacttatggagattttacagagagctggaaactccaatggtcatttagtcacatcttgttttaagctacttgctgatctacttagaggattcaggatttcactttcagataatgagcttcagatgcttgttcatacccctatgtttgtagatcttcagacaaacccttcccctgttgccttatcgcttctcaaaacaatagtcaggctaaaattggtttctcacgaaatttatgatatagttgttaagataggagagttgatggtaacaacattaactgaatctatacagcagcaatgcattcaaattatgctacaattttttctgaactatccactttctgagaagcgcttacagcaacatattgactttttcctggcaaacttaagttatgaacatccttcaggaagagaagcagtgcttgaaatgctccatgacattcttaccagatttccccagaggattattgatgagcagggtcaaaccttttttcttcatcttgtagttgctctagccaatgaacagcatcagaatgtgtcttcaatgatccttagagctattcaaaagctgttaggacgcattggtggtcagggaaagagttacatttatgagtattcactttcgtggtacactggtgagaagaaaagtttgtggagtgcttcagctcaggttattggtttacttgttggcgatcacacattacaaatgggcaagcaccttaaaagtattctggctgttgttaagaaaataatggaatcatctattattgcttctggagctatacaattaggcttatctgatgaagctgccctgccattgtggaaagagacttactactctgttgccatgatggagaggttacttcttcgctttccggagttgtattttgagaaaaacatggaggacatatggataatattatgcaagttgttgatccatcctcattcgatgttgcgtagtatttcaagctctctggtagcatcatattttgctacagtggagaagaggaaacatgaacagaaattggatgccccatcatggttgcttgttcaaccgagcaggctattcataatagctgtttccttgttgaaacaattgaggagtgagctgagtgatactacggcaaataatctgattgtacagaatgttgcatactcagtctgcaacttgcatatgttgattaggcaatcgacctccacacatcagttttggtctagcattagttctgatcgtggtgctttccttgagggttttgaattgcttggttcaagaaaagcaaaaaatatatttctcctttgtacttcaacatctagtgatgtatctggatctagcctcgacaccaacgaagagcctacatctttgttagtttcgtcaatcctaaagaagatgggaagaattgcaatgcaaatgcaggatacacagataaagaacgtgttcaattgcttcaatatgatttcatcagctcttggtcctgatgaatcactaacctatgctgatcacctcttggccccattgtataaagtttctgaaggatttgctgggaaagttgttagtgatgaagtgaagcaactggcccagggggtccagaacaagttacgtgacctgattggttccgagaaatttgttgaagtctacaagagcgttcggatgggcctgaaacagaagcgggacggtagaaagcaggcacagaagattgttgcagccgtggacccagaacgcaatgccaagcgaaagcagcgaatggcagccaagcaccgggaacacaagaggcgaaagataatggcgatgaagattggcaggtggatgagatagcttggtatttaggctctgcggaattcggtgaatcatataattgtagaggataatttttcgtgctacaagtgctggcataaaattatgtttctgttttatatgctgtctcactgacttactgcccgacgtaattttattgttgagttaccgaaccataccgtaagtaaaaattaagaggcataagcaatgaagacatagaattgattgaattatatttttttggggtggatggataagtaacaatatattattaaatgtgcaattaagagttttctggctgaggtttgc

SEQ ID NO: 16415 - DNA, 2685 bp, Zea Mays
ttctatttcacagtccatgtagaacaggactggtgctagagtggattgatctaacaatcaacaagcaagcttgtccagtctcataagtaacagctacctggtgtagaagggttgctgctatctgcctgtcttcaccttatgaaggaaacaagagaggagcaagaaaggccggattctggcagcttcctctagtacattggctgcaatttctctttcagtttctaccatgcctcgcaacttggaatgcccagtgcagacccagatggcagtctcagccttggaccgaactcttagcagtgagtatcctactaaaagcaaaagcgagaccaaggttggtggatggaaacgtgtttttgtccaaaccgatgttggttgtgtcctggctattcaattgaattgtggtgacaatgcacatacggtcaaaagaaagctgcaggtggccctaaattttcccactgatgagagtgttctgaaaaatgatctcagcaccattagaaatgatttccctttgcttctcaccaagactttcatgcatcgaagttcctccacaccatgcttgtctcctagtggcaaggatctccaacagcaaaaagataggggctgtccaattgaactgttagtatgcccgagccgctgttctcgaacaaggcagctcgtgaaggatgttgctagggcaatcaagaaaggtgtggatccagtacctatcaaaagtgggcttggtggtgcttactatttcaggaacagcaaaggtgagaatgcagcaattgtgaagccaaatgatgaagagccttttgctcccaacaacccaaaaggttttatagggaaatcccttgggcagccaggcctcaaaagatcagttcgaattggcgagacctgttttagagaggttgcggcgtaccttctggactatgataactctgctaatgttcctccgacgttacttgttaagatttctcatcctgtgtttcatatgaatgaagacatcaattttgctaacaaaaatattgctgatggtagcattcaagctgttagcaagactgcatcatttcagcagtttattcctcacgattttgatgccagtgatcatggcacctcaagctttcctgtttctgctgtccataggatcggtattcttgacatcaggatcttcaacactgatagacatgctggcaatcttctggtaaggaagcaaaccggagcaggaaaatttgggaatcatactgaacttattcctattgatcatggtctctgccttccagagtgtttagaggatccttattttgaatggatccactggcctcaggcatcagtcccattctctgaggatgagctcgagtacatagcaaatcttgatccagtaaaagatgctgacatgctgcggatggagttgcctatgatccgtgaagcatgcctgagagtactaatactctcaaccatatttctgaaagaagccacagcatttggtatgtgccttgcagagattggggagatgatgagcagggaatttactgggatggaagatcagccaagtgagctagagtttgtctgcatggaggcaaggaggctggcagcagagcaagaagacagttccacagaacttgactctgtttgagtttaagacaagaaactccagaaaccaactgtccaaattagatgaagccaatgaagaagaggaagaagaggaagatgatactgaggaggtagaaagtgatgctggaaaattagcatgtcctaggcctgttaataagtggcttgctaacatttcaaagctgtcgacctcactgaagggtgtcaatctaacaaacaaaacccagcgtcaactgtatgctggtcctaagtttgtggatcctgtgaagagcaacagcaatgacagcggctctcagcattgtaactggggaagtgcaaacgacatgctcccttcaagtgtgagcttcgtcaagctggctgacatgaaacctgagacgtggtgcctgttcctcgagaagttccatgagctccttcctgagacattccgctcacgcaagtgcattgtcaaagagcaaagggcgaagcagaggcttggcacttcttgccagttttgagttggcacaggagtagagaggtgagcacctgctcggccgttgctgtggctttcatgcaggtgttgagctctgcagttatcgaataaagccatttttcacaggattgtgatttgcaacaggatttgagtgagtgggggcctgaacctgatgtccatgctgatatgatggcctcgctttgtaaatacattttccccctttttcttagctaggctctgctagacatgagttgcttgaaagaagttgggattcaatgtctgcctgtttctggccgcccgactcttccactcatgatatgcactcaaaagtttcattcgaatgaacattcagcagaaagtttctcgtgtcgtaactaacattgtggcagataaacgctaaagatattacaatcgttttgttgtgttgcgattgacatgttcagcaagtcttgtaatttagtcgtttctgcagacctgcagtgactgaattcgttttgttattcacatggcaatggtaaaaatccagtgtctttactcacactgagctactactgtcgaattcagtgtctgtactcacatggccatggtaaaaatgcagtttataaagtctttttttatcaaatgctaca

SEQ ID NO: 16416 - DNA, 146 bp, Zea Mays
gcctgtaataaacactacgttagtgtttgttagacgacgtccacttggtgaccatccattgtcttggcactcgttcagcttatctaacttcaggttcgtccatcagcaccatcttatggtcaactcagttctggttctccgcatca

SEQ ID NO: 16417 - DNA, 1999 bp, Zea Mays
gctatcccccaccgcccaccggccgccccctctgctgctgccagcaagacgagccttcgaaccttccagttccatccatcgccgccctcctcctgaggagcatccgaaacaagagcagcggcagccgccaacgcccgcgcccgccatcccgacgatgcgccgacccacactctcgctcgcgctcgggctcgggctcgggctctccctcgtcgccctcttcgcggcccggggcgcccacgcctcaatccacgagtacggcggcggcgacttcgcgccgcgggccaactccttcttcttccacggtgggagcgaggggctctacgcgtctgaccactcgtccaactcctccgcatccttcatcagatttgacaccgttgtatttcgtcgcaccctggagtcagcatctaggcatgaggagatgcaacaaaagacaggattggtggaggctataattgttgagatacaggatagaggcaaaattggaggttcatatctgcactctgatgcaatatgttgcacacctgagcttgataaggagaaatcttgtagagtaggtgaggtgatcatacgtccaaatcctgagaaccccgactggcctaagaggatccagacattctttgatggtaaaaatgaagaaaccactatggtaactcaaattgtgtcgataaacaaaactgggatgtattacctctattttatgttctgtgatcctcaacttaagggattgaagattacaggaagaactgtttggagaaatccacagggttaccttcctggtaaaatggctccaatgatgacattttatggtttcatgtcacttgcatatcttgtacttggacttctatggttcattcagtttgtgcgatgctggaaggacattttgcagctgcattaccatataacagctgttattgctcttggcatgtgtgaaatggctttttggtattttgagtatgctaactttaattcaactggaacaagacctatgggcattaccttgtgggcagttacatttacagctgtgaagaagactgtttctcggcttcttctattagtagtttcaatgggctatggtgttgttctacccacattgggtggcataacatcaagagttgctgctcttggtttcatctattttgttgcttcagaagctcttgaacttgttgaaaatctgggaaatatcaatgacttctctggaaagacaaggctattcctagtgttgcctgtcgctgtacttgatgctacctttatcatctggatattttcatccctctctagaactttggagaagctgcagctgcggagaagcatggcaaaacttgaattatatagaaagtttacaaattctctggctgtgtcagtgcttatctcaatcgcttggattggctacgagctatatttcaatgcaactgacccgttgagtgaactttggcaacgggcttggatcatcccctccttttggaatgtcctttcctatgccctcctcggcatcatatgcatcctttggtctccatctcgcaatccaacagggtttgcatattcagaggatgcaggtgagggagctgatgaggaagggctctctctagtaggcagtgcggtgaaaggaaccggagatatggtaaacatgcatatctttccggaggataagcgtgcatgataagttttggcctgaatgcagctgtactcctggcagaatgctatgtgaagtacctttttcctctggattcacgacttagctgacatcttctaaagattgcgtaagattccagatgtacaggtggtgacttgtgttgaacgatttgaccaagagatgtttacttcagttgtggctacccaatacaaaaaggtcggcaaaataaactatcactgagagcataagagggtttgtctttgtaatccttgtgatggtgacgtagctcgtaggtgattgaaatgtatcattcccagagctgagatgtactcactccgttccaaattaaaattcgtttttctttttatt

SEQ ID NO: 16418 - DNA, 493 bp, Zea Mays
tacatggttgcagtccattgatgttccgtcagtgtattgctatctggggcaacttttcttgattggactattttagaaatttggaagatgaataacaccgggaaatcatttgaggatgcgatggagaaggtcggaaagacgcaggaggtagatagagcttgaatctttttcatggtacattagtgtatatatatatacactaatgtacaaacctatgtgcatatcgatcgttgtccacatcctcctgatgttactttgtaatatgtatagatctgaacagttttttctatcacgactcacgagcttgtgcttgatccatagaacccctgctgtcgccgtcgtagaaactgaaccatgtaggttcttcgacagcgaaagctcaggttatgctctgattcttttgctgacgaaacgaagtaactgttgaataaattgctgtaattcaagtacgcttcgaggccagctacatggtcgcaggaataaaataataaaa

SEQ ID NO: 16419 - DNA, 1609 bp, Zea Mays
tgcctaatatgcggtttcttaataatatggttcagcacagtcacatgcttgggagtccctagtgccatcaagaaagaggagctgtgtcacccgtccgaagccttcacctgttgaaaagcttgcaaaagagctgaactatatcatgcatgaagagaagttatattacctttcagaatcatcagaggaagacctactataccatagtgaaactcctatcggttcctttgaaataggctctggaagtgtgcttctaagacatccaaactcgaaatcactggaggaagaatcaaaaacaagctcaattcctgcagataataaatcatatattacaagtgaatcctattcagactctgcctcatttgtcgttcacagtggaaacaaggcagcaattaacttaaatcttccaactgcaaggccgaagaagtcgccgctgcatatggaagacaatgctagaagggataaacttcattatgagaatcagcatgtcctggagagtgttgattcgcctttagtttcagtagatttagaggatgttataaactatactaacttcatgaaatatctaactaaagaggatcgacgtcagttgctcaaatttcttcctcctgtggactccttaacacctcctgaaagccttagaagcatgttcagttgtatccaattctctgatgctattgacagctaccagatgctgcttcgagagggaattctcgacccatccttatgtggtgatgaggaatggaagaaagtgaagacgcttgccttaactaatttaacaaaatgcagttggctggagtgctataaacagaaaaagggagctaaagaaaccgggggagtggggggcatcagtggaccggaaggctttaccaagtctactatgaaaccactcaaaagaccccgtgacacccactttcagagtgacgcagaactagatggtaccatgaggagtcctctaagagttctaaaatccggggctttggctcttcagtttgaaagttcatctttgccaaaatctggctatgccaccgaagattcaacctgcactggaggagcacctaatctattcatgttacccctagaaaagctaccattactggtcccttctcagtatgccgtctctgatcaagacttgctgctggaaatacctctcaacgcacgacacccagaggcagaacttctctgtcaaccatctcagctgatgagctctataaccagcagctccacctctatgggtggggttgctgaaggagaagggtacctgaagcaaccatagtcttaggtcacatcagcaagcagcttaggaacagccagtagttgcagtttactttaacctcctggatcgtgtcgcctctctgtgccgatcaccaatgggccttaagtgtccttatttacataacaatgtgcttcgtatgccaacttggcgaattgtcggttcagctaatatttgtagcatgcttttggatcggctttctgctggttttctgtaacatatggcgcatggagaaagcattaacttatctctgtatggaaaaaaaatatcaccatattgtaggaaaatgaaaaaagaggataatggagagttgtttatgtgatattgttgtttgctatg

SEQ ID NO: 16420 - DNA, 1268 bp, Zea Mays
cgtgtgccggcgccaaacgcaatccgctgctgaaaaaaaaaagagagaagggaatcccaccgctctccccacctcactgctgccgggccccagccgccgcgcacgcccaaaacacacactgacgcgtgggcccactgccttttcccttgttgcctctctcctttgtgcgtcttcttcctccctcgcgcaccgcaggcaaggcacacaagagaaaagcagagggggccagatgaggagggacctcgcatcctccttcgctaccgccgcatcctcttcctcggcagccgacgcgctccggggctggtgggatgacgtcaacgagtcgccccagtgccaggacgcggccttcttctccctcgccgccgcctacgccctcgtctccgccgtcgcactgattcagctcgtcaggatccagcgccgggtgcccgagttcggatggaccacgcagaaggtcttccacctcatgaacttccttgtcaacggggtccgtgctctggtattcggcttccatgtccacgtcttcctcctccgcgcaaaagctaggagtctcccaacagacaagctgaggcctgcatacattgccgttaacaccatcatatacgttgttcaggtttgcatatggatataccttgggataaatgataatgctgtggtcgagctagccagcaaaatattcatcgtagctgtctccttcgttgcgcttcttggcttttcagtatatggtggaaggttatttgtcttgctgagacgtttccctattgaatctaaggggcggcaaaagaagctttatgaggttgggactgtgacagcaatttgtgttacctgcttcctgataagatgtgttgtggttgcattatctgcgtttgatgccgatgtatctctcgaggttttggaccatccagtcctagatttcttctattatatgcttgcggagatactgccttctgcgctagttctcttcgtccttcggaagcttcctcccaagcgggtttcggcacaataccaccctattaactagagagttttgtttttttttaatgatgttacatgctaagaactccggataatctgaaactactggaaacctacagccggctgtagttggatgcttttgcttgtgctgttatgtttatggaagcatcagtgttggcgatgaatataatgacgatcattctatatggggaagtggtgctaatgaatgaatactccttttatatatggttgcatctcatgttgttatttggtcggtttgtgcactgcatgacatg

SEQ ID NO: 16421 - DNA, 143 bp, Zea Mays
tggtagggttgtgccaagcccaagcaatagtgcaacgctagagcgacataggaaccttagtagcaagctacataatagattctccctataaaaaataaatttaatatcattgtgggtacataacccacatatcagatattaaa

SEQ ID NO: 16422 - DNA, 4280 bp, Zea Mays
accacggcatccaccattccagctccaggccaggagaaaacgttccgggactgggactgcgttcaccttgctttttcttcccacgctcaccccgcaccgcgtgccctctctggctctctccctctcgtggggacgactgggcgaccgccgccgccgccgccttacgccaggtgcccaggtcttagtcggccccttcgccggcgacgaggacctaccagctgtgaataaggttgtctggaacggccgtgggctctgcggatggcaggttctgtggtaacggatgattcagctgctagcacaactggaatgagggatgatgaaaacagtctctctggcgagtccttctctgagtggaggtcctgtgatagggcagacagcgataccccttcaacatccccacccttctgggatagcgatggtgatgatgatgatcctggcccaaagccttcagaattgtttggacatcacacttggaggattgaaaacttctcaaaggagaagaaaagagaaatgaaaagtgagccatttgaagctggtggttacaaatggtatattcttgtataccctcaaggatgtgatgtctctaatcatctttcattattcctttgcgttgctaatcatgacaaacttctcccaggatggagtcattttgcacagttcactatagctgtagccaatatagatcctaaaaagatgaagtactcaggttttggaagaaggaacatgattggggatggaaaaagtttatggagctgtcaaagattcaggatggttttcttgttgacgatgttcttgaaatcatagctcaagttcaggtcatcagggagaaagtggatagaccttttcgttgccttgatcgtccttatcggagagaattaatccgcatctatatgacaaatgtggaacaaatctaccgacgtttcgttgaggagcgaagaagtaaattaagcaagctcattgaggacaaaatgaaatggtccagtttccgtgctttctggtcagcaattgacccaaacaccaggcatcacatgtccagggaaaagactgagactatattgaaaattttagtgaagcaattctttgtagagaaagaagttacttccacattagtgatggactctttgtatacaagtctgaaggcacttgaataccggatgaagagcaagaaatgcaaaacaaaattagcagatttggaagaactacctgcgcctatggtccatgttgacatggacatgtttgttttggctgatgatgttatagctttgcttgagagggcagccttagaacccttgccttgtcaacctgtagcccccaaggatgacaaaacttcccaaagccgcatgaaggatggaagttctggcgaggtttacaaagtttctatggagcgtgaggaaagacgcctaactgagcttgctcagaagatactagagacatttgtgctatctcatatatttagcggaattgaagttgcataccaagaagctgttgctttgaaaaggcaagaagagcttattcgtgaagaggaggaggaggctggacttcttgaacatcagatgaaggggaagcgtggtggtggtgcaaatgaaaaggacaagcgtgccaagaaaaagcagaccaagcaaaagaagaacaaccgtaaggctaaagacaaggaaagagatgtgaaatgtgaggttaaaattctggaaaggcttcatgatgaaactgttattgataacagtgatggcttaccagctaaggtggaagtgatagccaaggttgatgccttggaagaaggttcttcagatgggtcagacatgccaaatagaggaaaaaatcagtgtaacaagggcttaagcattagtcttgccaaagaaggtgatggtcttccctccacctctagtgttacaggtggttcaggccgcaatagttctggctgctgcacagctccaaaactggatcaggatactgttctgcttaccttgagagataaacttcgtaagctagggcagcgtctgcaagagaaaaacattgaggggcagaaacttctcaaagctcattttgaagctagggacacaaaagtgaaggtagaagaatcttctgactcatctaattctttggataggccacctgatgttccagagagctcgatgcattcttcagaagatacagttgatcttaaagttaatggaacaccaaataaggatgcctctgtggtcaaccctgtcctggaggaatctgtttcaggcataccagtcactgcaaagaatgaatccttgccttctgccagaacaaaagaaggcccagtttcaaacaaagataacgcatcaagtttgaaaatgaaaaccatggcatcttgcttgaaattgcatccagctgatgtggataaagatgccccttttccttctaaatcaccacgaatcaatagggctgctccagttccctcgaagttaccttcggctgataaagctactccagttcttccaaaatcatctctgtcagtaaacaaagcagctctggtccgtcccaaatctccagcagttgacaaagcaactccagtttgtcctgaatctccagcagttgacaaagtaactccagttcgtcccagatctccagcagttgacaaagcaactccagttcgttctcaatctccagcagttgacaaagctactcatgtttgccctcaatctccatcagttgacaaggcaactccatccattgacaaagcaactccagttcgcccaaaatctccagccatagataaagtaactccaattcctcccaaatctccaccagttgacaaagcctctccagcaccaccaaaatcactatcaggtgctaaagatgtgcctgttccttcaaggtcgctgcaaattgataggttcattccagcccccccaagattatcgcaagttgataaagctgctctgccttcttcagaacagccacatatatctccagctactaattctgaagcccaaggggcaactacttctaggaaggtcacagccagctcagttttggaggttgctgcagcatcgaggccttcaagtgctcctgtgttacccacaccaagatcaactgcaccagttgcttcacatattcaaacttccacgttgctttcccgctcgatgagtgaggcagctgggagaaggtcagtaaatgatccttccttttctgccccatcttatactccccagacctaccgaaatgcaataattggtaagactggtctggctactacctctgcaaaccttgcatatcagtcctattctctgggtcaagatactgctccttcacagcctctatcagcatatgcatcaagcacagcagtcatgatgcctcctgctggaagatctgatcaatcatcagctaggcatggattcaagtctgggtctggtaagctagaagcacatgacagctggcagcagtggaaaggtgataataatgttgatatgcatctctggagggatcacactacctatcaacaaatgaccaggggtcaagcgtatgaccaatctcggagggacgatacttatcagcaaacatgcagcagaggaacagaaaagttcagcaggcacgcaggactgcaagctaggcagttccaaaccgagacacccgccagccatgtctggcaccaacaacaggggcaagtggcagaagagtttccacaccttgacatcataaacgatttgcttgaggaggaccagatcaacggcagtataccagagtcatttcatcaagattacaatgtgtttggcctgccattttcaccaagaggaaacgtgtcagatatgggaatggcttctgttagaagtcctgctcggttcaattcaaccaagtatgagtatgacggtggattctcgggggcttatgacataaatgcggtcaatgggttgagggaacggcagtttccctcgttggatagttactctaatggcctgtctgacgtgagtgcatcaaagccttggctgaatggctctcccagtccatcggtgatgagccttggggttaacacaaatggataccacccccaggttgcggactaccccagtctgggaaatggggtgaacggagtctccttgtggcgccgccatgctaacgggcgctggtaatgcgaggtgcctgtatacaatcatacagatggaataatgtttgttgtaacaaatggtttcgggcctgagctgatgtgccatgtaattaaaagttttaagttttaaaagggaaagaaagcgatacatgctgcaaaatctgccccgtgatttggttaatttgattgcttttctggttaaactctgttc

SEQ ID NO: 16423 - DNA, 600 bp, Zea Mays
cccaaaactgatgttctgcttttcgacaccagtggggtacaatatatgcaacatctgctttgatttcaaagttgacagaagagagaaactctgccattcagcagaacaataagcttcgagaggaactggaccttacgaggagggaagccaacaagcagaatggtggattctcctttgtggtcgtggtggccattgctctcctgggaatgctactgggatatatcatgaagagatagatgggctcataatgactcggcctcatgttagaccgttttcctcacagtattgaatattgtctaatgcacttatcacatgcacactgctactccatagcatattcatctggtgtcttacgtgatctgtttcgtgcttgggattgggatgactagtcaccagtcgcaacacaggctgtcaaacaatggtctgtgtgcttaatcttgttttagctgttatgttagtgtgtgcaactaaaactgggtaattaatgatgtcgttttggtcgaccgtttgtgtaacagcgaagtcaacttgctgtgggacagcttttgtttcatgactagaacttgccattgccgccaattaggcatgccgcaatttgtt

SEQ ID NO: 16424 - DNA, 912 bp, Zea Mays
ccaacatcctcaaagggggacgttattctatccacgctcaatgcacgtgacgacaagatgcggcagtggttttcttctcattgttaccgctaatcacgtggacaggtgattggggcggttcttggagtaaagctcattcaagtaactttccctaatgtgggtaaaggagcccgcttaagtgttggtgctcatcatggtgcgttagctgaaggcttagcaactttcatggttgttatggtatcggtgaccctgaaaaagaaggagatgaaaagtttctttatgaagacatggatcacaagcatttggaagaacacaattcatctccttagctcggatataactggagggattatgaaccctgcatctgcttttgcttgggcgtatgctcgaggagatcatacaacatttgaccacctactggtatattggctggcgcccctgcaagcaaccctgctgggagtatgggcggtgaccttcttcactaaaccgaagaagatcaaggagcaaaaggtagatgaaaacaagataaagaaggaatagactattcttgaattagagctagagcttcataccatcttcttagtcagataacttgtggctacacacaaggcgaaatgtttcgaagctaatctaagaaatggcaacctatcatggtcagcttctgtgaagtctccttgatgtgtattccttgtatctggcttagcttagattgtgcagaagcttgtaagcaactgctccaggcttccattcaagacattgtcgtattggaaacagtatatatggaagctaaagcttctcagagttgactcacaacctacactaatgttccacagcattgttgaaagtatcttgagttccattatctatgataatgggaaattgcaggtctcatctagtttccaggaaaacgaa

SEQ ID NO: 16425 - DNA, 2836 bp, Zea Mays
cagagaagtcaagttccagttacattcttacgtgggttcagtcttgtccatggctgaaggttctgagagatggccgatggggcgagcaagaggctgcaatcttggttcctggtgacatcatcagcatcaagcttggcgatatcgtccctgccgacgctcgtctcctcgagggtgatgcactcaaggttgaccagtctgcgcttactggagaatccctcccggttaccaagggcccaggggacgaagtcttctcgggttccacttgtaagcagggtgagatcgaggccgtggtcattgccaccggagtgcacaccttcttcggcaaggccgctcatcttgtggacagcaccaaccaggtcggacacttccagcaggtgctgacagcaatcggtaacttctgcatctgctccattggggtcggcatcctcgtcgagatcatcgtcatgttcccaatccagcaccggaagtaccgcagcggaatcgagaacctgttggtcctcttgatcggtggtatcccaatcgccatgcctaccgtgctttcagttaccatggccattggttcgcacaagctgtcacagcagggtgccatcactaagaggatgactgccattgaggagatggctggtatggacgtgctttgcagtgacaaaaccggcacactcaccctcaacaagcttagcgtcgataagaacctcgtcgaggtgttctgcaaaggcgtcgacaaagaccatgtgttgctgttggctgcaagggcttcaaggactgagaaccaggacgctatcgatgccgccatggttggcatgcttgctgatcctaaggaggccagggctggtataagggaaatccacttcttgcccttcaaccctgttgataagaggactgctctgacgtacattgatgccgatggcaactggcaccgtgtcagcaagggtgctcctgaacagattcttgacctgtgccactgcaaggaggatctgaggcggaaggtgcactctattatcgacaagtatgccgagcgtggtcttcgttcgcttgctgttgccagacaggaagtacctgagaaaaacaaggagtcccctggtggaccatggcagttcgttggtctgttgcccctgtttgatccgcctaggcatgacagcgctgagacaattcgcaaggctcttgttcttggtgttaacgtcaagatgatcacgggtgatcagcttgctattggtaaggagactggaaggaggcttggcatgggtaccaacatgtatccatcctctgcgctgctcggccaaaacaaggatgctacgcttgaagcgcttcctgtagatgagctcattgagaaggccgatggttttgccggagtcttccctgaacacaagtacgagatcgtgaagagactgcaggagaagaagcacatcgttggtatgactggagatggtgtcaacgatgccccggctcttaagaaggctgacatcggtattgctgttgcggatgctactgacgctgcgaggagtgcttccgatattgtccttactgagccaggtcttagcgtcattatcagcgccgtcctcaccagcagatgcatcttccagaggatgaagaactacaccatctatgcagtttccatcacaatccgtatagtgctcggatttatgctcattgcgttgatctggcaatacgatttctctcccttcatggttcttatcattgccattctcaatgacggtactatcatgaccatctctaaggacagagttaagccatctccgttgcccgacagttggaagctgaaggagatctttgctacgggcatcgtgcttggaagctaccttgctctgatgactgtcattttcttctgggctatgcacaagaccgacttcttctcggacaaattcggtgtgaggtcgatcagggacagcgagcatgagatgatgtccgccctgtacctccaagtcagtatcgtgagccaggctctgatcttcgtcacccgttcccgtagctggtccttcgtggagcgccctggtctgctcctggtcaccgcgttcctgctcgctcaacttgttgccaccttcctcgctgtctacgccaactggggcttcgccaggatcaagggtatcggctggggctgggcaggtgtggtctggctctacagcatcgtcttctacttccccctggacctgctcaagttcttcatccgcttcgtgctcagcggcagggcatgggacaacctcctcgagaacaagaccgccttcaccaccaagaaggactacgggcgggaagagagggaggcgcagtgggccaccgcgcagaggacgctgcacgggctccagccgccggaggcttcctccaacacgctgttcaacgacaagagcagctaccgcgagctgtccgagatcgccgagcaggccaagagacgagctgagatcgcgaggctgagggagctcaacaccctcaagggccacgtggagtcggtggtcaagctcaagggcctggacatcgacaccatccagcagaactacacggtgtgagagcccctctgctgcgatgtcgacgacaacacctttgctgcccgacgggagccatctgattacagataaaaattttcctagctgtaaagctctctataccaccagatactgccatatgatggtatggttgggtacccgtctttctagggagtttcttttctctctctcttttcttattgttatgtttttcaatagtggagtgtgcgcgtgttgtaatcgtttttacctgcgttttcctctaactagccggtgatctcgcgggaagcgaggtgaagaaataatgcaactaaaattctctgccaaaagcattgttccttctc

SEQ ID NO: 16426 - DNA, 1818 bp, Zea Mays
ccatgccaaacagggccttaatgctatatatgataaagatgctgatcaattgagcagtgggagtgatagtggtggaagcagaagtcgtggtatgcagaactctgaacttgctggaggtcttgaaatatttgttgatgacttgcctcaagattgtgtcaaggaagacattgctatggccttttctcaatcaggggaggtcaaatctgttaggataattaaaaattcatcaactggaaagaaccaagacattgcatttgtttgttacacaagtattgaagctgcaaagaaggttcttgctgaatttaaggagggaattgaggtaaaaggaaaaatggtcagggtatctgcttgtcaagataataataccctttacctggggaacatttgcaagggttggaccagagatcaggtgttgaacaccctaaaaagtattggaattcaagagtgtgagataagctttcccagttacaagggaggaagccgagggtttgcttttcttaagttcacctcacattactatgctagagcagcacttcgtcgcttaatgaaatccgatgctatttttggtactgatagaagcgctaaagtatccttttatcgaacccccacaaaatcatccaagagacttatacaggaagggtgcgttagcttgtgtgacaggaataaacaaagcaaatattgttgatggaagcttcaagttgtgtgcatatcttgcttggccaaaaagtgcttcaaaggtcaatagtgctgcaccttcaaatgctgccaccgcaaccgagaaggacaaaacccacacagagaagattcttgtagacatcgatttgcaacataaattccagaaaggcgacaagagcaaacttacatctcagacaaaggaggcaattatgaagaagaaaaaatcaagtaaattaccaaatgacaatgatacaaaactaacctcacaaggtgctgccgaagtaccacaaacctccaaatcttctgaaggcaagaggaaagttggaaaaaacaaacatgcctctgtataccaaaaaccattgaagaaagcaataaataatcgtaacgttgatgagagccagctaactcatcggagtgctgcagtactgcaaacgtctaacacttccaaagggaaaaggaaagccagtaatttgggtggaagttcaagatctaaatcatatgcctctgatctggaacctcatgctggattcatttcgcctgcgattcgagataatggcagtgatgcatataatcgacagagaactgcacggtatgatatccatcctatagatgtccatccttatgctagagcgccaccatcagcctactctggttacaaaagccatgctggctatgaggctgcaaatacatatgaatacgcagggaaccgggcgcctacacctccaagtggatcttacatccctcgaagaggacattactaacaaaaaatggagtgctggctctgtgcatccattcgatcgcatggtaacaaggaatcaaggatctccgtatttagatgtttcatacatgttatgtagacgttaaaaagtaacttgtttaaggaaaataagaaccctctgcagctttccctttgactgaagtgcagcccggcacaccggttgcttgttgaagaatgctttttttattattattgtagttaagagtccagacgtcgttattaccacttatcttcgtattggaaaaaaaatgtctttttcttagtccagcaatccactaatagcttctatgtttttttgtgctcagcaatatcttatttgcttttttaagacaaacatgccgtgcgtctcaacaggagaaaaaaat

SEQ ID NO: 16427 - DNA, 4639 bp, Zea Mays
ccatcgcatccaagaattgaccgactcccagtgacgccctgtgtgctggcttggctctgcctctgtgtgttggcctgttgggtagagagagactggtgaccgaagaagcaaggaaggcagctgtgctgtgcagtgagaggtccgtgcaggcaaagcctagctgcagttgcttgcttgccatccacaccacacacccacagcaaagccacgaaccaactcatcgggcgcggagaccaccgcggggggaaaagcgagggaggggggagaggactgaagagaaatcatggagccgatttgctgtggagattcgggcgcgtgatccggtcggatcttgctttcccggggggcgatcgaggccacgccgctgctgccgcggtgccctccctctgcctctgggctctgcgtgtgacgtgccgtgccatggcgctcgccctcgcctatatccccagcctccctcgccccgccgctggccgccgcattcagtaaaaagccacctaccctaccctcctgcgctggtactacttactacctagccaggccaaggagcccaacgagggggaacgctgcggtaggcgcgcgctgctcgtcccaccccacgccgccatgacggtgccagatgccgagtcgcgcttccatgtcctcgcggtggacgacagcctcgtcgacaggaaactcatcgagatgctgctcaagacctcgtcctaccaagtgaccacggtggattccgggagcaaggcgctggagctgctggggctgagggacgcgtcgtcgccgtctccgtcctcgcctgaccaccaggagatcgacgtgaatctcatcatcactgactactgcatgccaggcatgacaggatacgatctgctcaagagagtgaaggggtcctcctcgctcaaggacattcctgtggtgatcatgtcgtctgagaatgtgcctgcccggatcagcaggacatgtgtctttgacagatcgttacaggaggaaagaggtgcccctgtttgtccacaatggctttagctcatgccagcgccatgtttcctccctcgagcccctcacataaaacttgggaggacccgtcattcttcaagtggagaaagcgtgaggcgcatgtaccactgcgctcacaggacacgctggaagcggctctgaagtattggcatgaacggaggaatgtgaactatcacaatgctgacactgctgtctggaacgatgacgctgttcgcggtgctctggaaagtgctgccttttggtccaagggcttaccgtacgccaaatctctaagcggatactggaaattccttctgtcgccttcagcggaaagtattccggagagattctattatgctcattttgatgattcaaactggtcgggtttgccagttccctcaaattggcaaatgcatgggtttgaccgtccaatctacacaaatgtcacatatcctttcccattgaacccaccatttgtgccggctgataatcccacaggttgttacaggacagtctttcacatcccaaaagagtggaaaggtcggaggatcttgctgcactttgaagctgttgattctgcattctttgcttgggtaaatggagtactagttgggtatagccaggatagcagacttcctgctgagtttgaaattactgattgctgccatccttgtgattcggacaaggaaaatgttcttgctgttcaagttatgaggtggagtgatggctcttatcttgaagatcaggatcactggaggttgtctggtattcacagggatgtgctcctactatcaaagccacagatttttatcacagattacttcttcaaagcaaccttggatgaaaatttcagtttagccgatattgaggttgaggtggagattgactcacacaagcaagaccaggagcacgtcccaactttgtctattgaagcaacactcattgataactctggactatctaacagtatagatgctgatctttcatccgctaatgcagtcaatttgaaaccgaagccaaaacgaactcgaagcccttgtcttggttttcatggttatgtacttggtggaaaaatagaaaatccaaaactttggtctagtgagcatcctaacttatacacgcttgttgttctccttaaagatgccaatgggaagcttattgactgtgaatcatgccaagtgggcattcgtaatgtggtcatggcacacaagcaaatgctcgtcaatggatgtcctgttgtgctaagaggtgtcaacagacatgagcaccatccacgccttggaaagacaaatttagaagcatgcatgatcaaggacctgattttgatgaggcaaaacaatatcaatgctgttagaaatagccattacccacagcacccaaggtggtatgagttatgtgacatttttggtctttatgtcatagatgaagccaacattgagacacatggttttgatgaatctaacactttcaaacatcctacacttgaacctatttgggcaaatgcaatgcttgatcgtgttgttagcatggtggagagagataagaatcatgcatgcattattgtttggtctctaggaaatgaatcttcatatggacctaatcatgcttccatgtctggttggattcgtgaaagggatccaacaagactcctccattatgagggaggtggttccagaacatcatccacagatattgtgtgccccatgtatatgcgtgtctgggatgttgttaagatagcaaaagatccatctgaaacaaggcctctaattctttgcgaatattcacatgctatgggaaacagtaatgggaatattgatgcgtattggatggccatagacaacacttttggactccaaggaggttttatatgggactgggctgatcagggtttactgaaggaggactcagatgggtctaaattttgggcatatggcggcgactttggagatactccaaatgactccaatttttgcctcaatggcattgtgtggcctgatcggacgattcacccagctcttcatgaagtaaaataccttcaccagcctatcaaaatatcatcagcagataatatgcttaagaagctttggacttcagttgggttcttcatggagatggttgtgtcttgggctctggtccattgaatattccaactttggcaccacaaactagtcagctcatcaacatggaatcatcaccttggtttgccctttggagtgcctgtgcagcaaaagaagtatttttgtctgtgaatgtgaaacaaaggcatgaaacacgatgggctaaagctggtcatctcttggcttcagcacaactgtgtttgcctcagaaaaatggctttgtccccagcgtgatagcattgtccagtagccctttggtctgtgaacgcattggtgataatgtaaccatctgcaagaataatgcctggaaaattaaagtaaacagtcagttgggaacaatcgacagctggaaggtcaacgacgttgagcttatgagcaaggggatactcccatgcttttggcgcgcaccaactgacaacgacaaaggaggtttcttcaccaagccatatgactcgcgatggagagaagccttcctcgacaatgtctcgttccacagcagccagttctctgtcaaggagttgccggacaacaccgtggagttctccaccctctactacggtgttcccgggcacctacccaagcctgacgacgaagcctccgagtccattctcttccgggtgaagatggtatgccggatccacgggtcaggcgacgtggttctcgactacgaggtaaaccccaggagcgacctccctccccttccccgggtgggcgtcgtgttcagcgccgggaggtccctgagccacgtcacgtggtacgggcgcgggcccttcgagtgctacccggaccgcaaggcggcggcgcacgtcggcgtgtacgagagcagcgtggaggagctgcacgtgccgtacattgcccccgtggagtgcggcgggcgggcggacgtcaggtgggtggcactccgcgacgccggcgggctcggcctgtacgcgtcggcgcacggcggctccccgccgatgcagatgagcgcgagctactacggcgccgcggagctggacagggcaacgcacgtccacaggctggtgaagggggacgacatcgaggtgcatcttgaccacaggcacatggggctgggcggcgacgacagctggtcgccgtgcgtgcacgagcagtacctgctgccgccgacgcggtacgccttctccctgcggctctgccccctgctgccgtcgtcgtcgtgccatgacatctacaggtctcagctccccagctgatggtgccgtgtgccggagacccgtcgacgtcgagccttgggaaacaacaatgaacgcaatggcctggccagtgaatgaaagtatataatattgtaataaagcagagacgtattagctcctgcaacggcctcgcgatcgcctggatatgtctatgctgagggggtgtttagttaactaataacctaactacatatggcgccaagttactaaaacttaataaataactattactaactaataaatagtaactgaattcctaacttaataaatacttcctccgtttataaatatatgacaccgttgattttttaaaaacaacttaga

SEQ ID NO: 16428 - DNA, 671 bp, Zea Mays
aaagctaattcctcagccatttggttacatacaaggtttttggaggacccgaaggccctcactatgccccattatgacttagttggggggagaaaggctgtccatgaagtatacccatgtataataaagttcctgtttcaacatgacgaagtgtcttcatgagtctttgccattcatgtctgtaattacaatgttcaagaccacgtcgaaatacatagtaaaattcccagactggaactaaagtcccataggccatatcattagaagcacaggggagactaatcttgctggttgctggcacctcgccgaccccgtatgaaaccttaagaaccgattgtagctgtagttgcacggcggctctcagcggcaacggttgtggacaagaactcgtgtctatgttgcagttccacaaccaaagacaggcgcactgcacagatctccaccagactagacaactttcatggcgttgtttctgaaagtattatatcgtataaattaaataaaatacgagtcaagttaggatttatggcttttccttcgtagtataaaacggcttaggctttttaggtgctttttcggaagttgtttttttttaaaaaaaacgttgtttagtagagctcttgtttttttattgggaaaaggtagagccgaagcgctgtcaaacagctggc

SEQ ID NO: 16429 - DNA, 111 bp, Zea Mays
caacggatatctcggctctcgcatcgatgaagaacgtagcaaaatgcgatacttggtgtgaattgcagaatcccgtgaaccattgagtttttgaacgcaagttgcgcccga

SEQ ID NO: 16430 - DNA, 2740 bp, Zea Mays
gggatgtcattcaaatttgtatggattgcctgcagaaaggttgtggattagtgtttttgaagatgacaatgaagcattcaacatctggcacaatgaggttggtgtgccaaaggagcggatacagaggatgggtgcagaagataacttttggactagtggcgcaactggaccttgtggaccttgctctgaaatttattatgatttctatcctgagagaggatcatcagatgtggatttgggcgatgatagccgattcattgaattctataatcttgtctttatgcaatataacaaaaaagacgatggatctctagaaccgttgaaacaaatgaacattgatacaggaatgggccttgagcgtatggcacgcattcttcaaaaggttccaaacaactatgagacagacttgattttcccaattatagaaaaggcagctagcatggcgatggtgtcctatgcaaaagctgatgatgccacaaagacaaatctcaagataattggagatcacatgagagcagttgtttatctcatatcagatggggtaattccctcaaatatcgggagaggatatgttgttcgaaggctaataagaagagtagttcggatgggtagattgataggaataagaggtgacgggcatggaaactctgaaggtgcatttttaccttcactagctgaggtagtgatcagccttagcactgagatagattcagatgttgaatcacgacggagatcgatccttggagaacttcaaagggaagagatgcgatttgttcagactttggaaagaggagaaaagttattagctgaacttctggatgaagctttattaaatgctggtaataatggaaacaagccttccttatctggaaaaaatgttttccttttgtacgatacatatggtttcccagtagagattacagctgaaatagccagtgaacaaggcgttactgttgatattgagggatttgatattgaaatggaaaaccagaggaaacaatctcaagctgctcataatgtagtcagactttctgtaggaaatgagaccgagatagtaaagaacatcccggatactgaatttttgggatatgattctctctctgcttctgctgtcattaaaggtctcctagttaatggaaacccagttaatgaagtttctcaaggttctgaagtagaaatattattagaccggacaccgttctatgctgaatcgggtggtcaagttggagataatggtttcttatatgtgaatggaggggaagatagaagacaaacaacagttatagaaatcaatgacgtccaaaagtctctgggaaatatatttgtgcacaaaggcatgattaagcaggggtctgtagaggttggcaaggaagtagatgcttctgttgatgcaaaattgaggcagggggctaaggctcatcacactgcaacacatctactacaatctgctcttaaaagcgtagttggttcagaaacttcacaggctggttcccttgtggcgtttgaccatctccgatttgacttcaatttccatcgcccactttctgaagaggaattaacaacaattgaagcacttataaaccaatggattggcaatgcagcacatgttgagacaaaagtcatggctttgcaagatgcaaaaaatgctggtgcgattgcaatgtttggagaaaaatacggtgaacaggtcagagtcgtagaggttcccgggatctcattggaactctgtggtgggactcacgtcagtaatactgctgagattcgtggtttcaagataatttcagaacaaggaatagcttctgggatcagaaggatagaagcagttgcaggtgacgcttttgttgactatgtgtgtgctcgggacaattacatgcggcgcttatgcttatcccttaaggttaaggctgaagatgtgaacagtagagtagaaacaattcttgaagagctaagagcaaccagaaacgtagcatcatctctacgcagcaaaattgcagtgctaaaagcagcttctcttgcaagtagagctacaactgtggagccccagaatgtcaggattgtggtcgagaacatgggtgatgtcgacgcagatgggctgaaaagcgccgcggagtatctcatagataccctcaaagaccctgctgcggtgattttaggatcaagcccaggggatggtaaagtcagcctggttgctgccttcagccctgcaatcgtcgaaatggggctgcaggccgggaagttcgtgagtggcatagccaaactctgcggcggaggcggtggaggcaagcccaatttcgcccaagctggggggcggaagccggagaacttgcccgacgcccttgagaaagcccgagctgaaattgtggcacgggtatcaggttcgagctgattctccgctgcctcacacctgatactggaagtatagggataggattcatatgaaatgtatatgtaattgtcattggcattctaagcgaaaacacttgtatttctccctaccttgccgtgtacgctttctgcagatgacggagcaaattttgtagcttgtaattgtaactagtggccgaacagaacggggaaaagatcaaatcttcacacagcaaaactactgctcatgtttaatctaatcttaaaaacataagaaattatttgtcacatgatcaactaatagtctaatacctagactagaccaaatacatctgatcaagtcagccagccacgtgcgtccaagcaaagattgagc

SEQ ID NO: 16431 - DNA, 5857 bp, Zea Mays
ctcacatcctatatcctctccagtctccaccctcgcggcgcgccccctcaagttctcattccttctcctcgctcgctcgcctcctcctctcctctcctctcctctgcggtgggaactgcggcggcggcttaaaccctcgcgccggcggcttccggcgctccatcagcgccgcgctcgaaggccgcccgtcgctggtcgagcgcgcgaggcagcaggcaccggctaggcaggcagccaataatggcccccaaggccgggcgtggcaagggcaggggcggcggcggcagaggcggcgacaggaggaagaaggaagagaaagtggtgcccagcgtggtggacgtcacggtcgtcaccccctacgaatcccaggtgacactcaaggggatatcgacggaccgtgtgctggacgtgcggaggctgctggggtcgaacgtggaaacgtgccacctgacaaactattcactctcccatgtggcgcgcgggcaccggctggaggacggcgtggaggtcgtggcgctcaagccctgcgctctccggatcgtcgaagaggagtacgcgacggcggagcaggcggaggcgcacgtgcgccgcctgctggacatcctcgcctgcaccaccgcgttcgccaagccccgggacggcgccgccaagcacaggccgtccaagcacggccgtcccgcgtcgcccggggcccatggcgccgtcagcggcgaggccgccgcgccgccgccgatatcggaggcgcacgacatggccgccatccggccgccgccgaagctgggggagttctacgacttcctctccttcgcgcatctcaccccgcccgtccaccttatcaggaggaaggaggcgagcggcgcttctcgggaaggcgtctacttcgaaatcgaggtgaaggtttgcaacgggaagcttctgcacgtagttgcttcacgaaagggtttctacttggcagggaagccacaaaacgtaagccactccctggtggacctgctgcaacagctcagcaacgcgtttgctaacgcatatgaggcgttgatgaaagcttttgtggaccacaataagtttgggaatttgccatatgggttccgtgcaaacacgtggcttattcctccaatatatgttgatcccgccacaaagtgcccagcactgccagttgaggatgagaattggggtggaaatgggggtggctgtggtcgtgatggaagatatgatcgcagatgctggtcaaaagagttctctgttctgtctagaatgccatgcaaatctgacgaagaacgggtgatcagagaccggaaagcttttcttttacacaatctgtttgtagatacagcaatttttagagctgcatcaacaatacggcgactcattgatcagtctatgaactcaattggttcccgtggtactactcatggttcaaacgtatttgaggaacatatcggcgacatgaatataactgtgaagaaagatgaggctgatgctagttcaaaggtggacgacaaggttgatggtgttgccttctgtaaaacaggtgctatggatattgcacaaaagaatcttctgaaaggtttaacttctgatgaaaatgttcttattaaggattcttccacactcggagtggtgattgtcaagcattgtggatatacagcaactgtgaaggtttctggacgtgcaaaggacagtaatgatgttaaacaaacacatgacgtctctgataattttgatggaatgctgaacattgatgtgcctgaccatccagatggaggttctaatgccttgaatgtcaacagtctaaggataccactccaaagtgttacgcatccagaaactgttgttggtaagcagaaccctagcccaaagtctcatgcttataaccccgcaaggaaactggcatgcaaaatacttgaggacagcttggtaaagcttgatagcatgcctagcataaattctagaattatcagatgggaacttgggtcctcctggctacaacagttacagaaaaaggattctccggcatctgagaatgttaagcggaatgcaacaaaggctgataaagaatcagctgtcaaaggtcttggaaagcattttgaacaattaaagaaaattaaaaagaaagaatgcaacattgacggttccagttctgagaaggaagaatgtaacagtaactgctcgtcaatgaatgaggatgctttctttcgcttgaagagtttgggagctggccttcatgaaaagtccctcgaagagctcacaaagatggcccataatttctatgatgagactgcactcccaaagctggtggctgatttcgcgtcccttgagctttctcctgtggatggaagaaccatgaccgatttcatgcatacaaggggacttaatatgtcctctttaggtcgtgtggtagagctagcagagaagctcccacacatccagtctatatgcattcatgaaatggttattagatcctttaagcacatcgtccgagctgttattgctgctgttgatgacatgcaaaatatttctgcagctatagctgaaactctaaacatattacttggatctcccagacttgaaaatggtgctgacacagatgcccatattgacaataatttgcgtttgaaatgggtagagagcttcctttcaaaaaagattctgctggaaactgaaagatgaatttgcacacttacggaaatttatcattctgagaggtctctgcagtaaggttggactggagctagttgcaagagattatgatatgaatagccctaacccatttgacaaatctgacattgtcagcattgttcctgtatgcaagcatgtggtctactcatctattgatggtcgaaacttactggaatcatcgaagatggcattggataaaggaaaattagatgatgctgtgagctatggaacaaaggcattgtccaaaattatagctgtttgtggtccataccatcgactgacggctaatgcatacagccttcttgctgtggtgctttatcatactggagattttaatcaggcaactgtatatcaacagaaggcacttgatatcaatgaaagggagcttggtcttgatcatccggaaactatgaagagttatggggatttatctgtcttctattatcgccttcaacacattgaaatggctctaaagtatgtcaaccgtgcactatatctgcttcagttctcgtgtgggctttcacacccgaattcagctgccacctacataaatgtggctatgatggaagaaggcatgggaaatgttcatgttgctcttcgatacttgcatgaagccctgaagtgcaacaagaggttgctaggagctgatcacatccagactgctgcaagctaccatgccatagccatagccctttcaatgatggacgcgtactccctaagcgtgcaacatgaacaaacaaccttgcagatacttcaggagaaactagggcaagatgacctccgaactcaggatgctgctgcatggctagaatattttgagtcaaaagcattagaacaacaagaggcggctcgaagaggcatgccaaaacctgattcatctattgcaagtaaaggacatcttagtgtatcagatcttcttgacttcataagcccagaccaggaaagaaaagaaagggatatgcaaaggaaatgcaggcgtgcaaagaataatatcagagctcatcatggtgaatcagttgaagagaaggagaattttcagcttgtttcaggatctcctcttgaagcaagcaaagacagttttcaagaagaaaaactggatgtgcatcctcctgctgtattagaagaaaattatgctgcccatgatgagcataagcaatgtgatgttttatcaccagaagaatattctgatgaagggtggcaagcagctagtatgagaggaagatctgcaaatgtaaggaagaaaagcagtcgcaggaaaccggctcttatgaaattaatggttgatcattttgaaggtagtcatacaggttctgtgtataggactggtttacaacctcaaacaaaaggagacaaagaagattctgtaagtgctcctagccagctttcatttggaagttttttgaaaaccgacaagttgaatggggattccagcattgctgaagataagacgtgcaatggtagcgctaaccaagaacaacggacaaagctaacaggaattaacaggccaaccagtatcgcttccaaattcatatcatacaaagatgtggctgtttcgccccctggcacagtattgaaacccattttggagaagaaggaagcaaaggagaaagatagtggacgtgatattgacctagcactgtcatccgaggaagaagataaaaagtttacagaaaaagagaaagaaaagccaagtgaggacagtagcaaagagattctttcaattcagcgagatttagagagtcatgcagaaatacctcctgacagcaacagtgatgaaggcccatctgcagctagtaaagcgtctggaagcaaactgtcagcttcagctcctccattcaatccaggatcagtgttatcaatgtcccagccatacagcacggtggcagtatatgatgccagtgctatccttcaggcaataccaagtcaagcaatggagattctcccttctgccattgacactagagtgcctcgtggtcctcggtccaccttgtactatcgtactgggcattccttccaaaggaaacaaggttacacgcacagccagagcactattgtaaggggtagctactcccccacaaccatgaatccacatgctgctgaatttgtgcctggaaaaacttcgcaacaatctgatgtggctgacagagaacccagtcctgctaatcctgtggccaattctgatctggatgttgtatcgcagaccacagatgaagcgagggccgaaacgcctgccacagaaaaggcaggtcaggttgagaaagtcgtttcaggtaaaggaaaggaaaacagggggaaagacatcgtgagaaactcatacaaaacagaacttgcaaggcaaattttactcagtttcattgtgaagtcggtgcacgacagtttaggtccctcccgggctgaaccagagaggaagccaagtggatcagatgaagctagtaatgaacagaccagcgtcttaggcaagaacgcttctggttctggtcgcaaagatccagataaacaagagaaagcgacggaggttactaagggcctgaaggatacagagggattcactgtcgtttcaaaacgccgaaggcgtccccagccgttcatgaaccccataaatggcctatattctcagccgtctatttgcacctctgtcagttaaggtcattgcgttttcgaagacctgcaatattttgagagatggacctttgccttcgcctttgcctttgcttagaggattggtagcagagattttccctatccaagtgagctgtgagcagcgagcatttagttaaactgtacaaaaggtttccgggataccctttttgtaataaaagaaactgatgtattccgcagtagctgtagcgctggatataatgttcctttgtatgttatatatgacagaatcataggaaatagcagatgttaagttaatccgatattcagtggagcgcccttgtgctttatgatgttcctcatgttgtgagccccagttaatcattgcaatttgcaaatatgctgccagactgccagagcagaagaaactgaatcttctaggcgccaagagttcgaaatcttattcatggaggcatgtctttggataccttgccagcgggtgagcagcacttcactgagaagcaattgcagctgcagacccaccagatcaccagaccaccggggcccggacaggcgtgaa

SEQ ID NO: 16432 - DNA, 1093 bp, Zea Mays
tgaacaaaccaacaatttcacacattctaaaaggtttatttcccaattgaacaagacgttggaaaggaggcaacaaggctcagagctattacagatctttttagcaacattattgaagaaccatgctttgatcagctaagaaccaaggagcaacttggttatactgtggactctagcccaaggatgacttaccggatgctggcctattgttttcgagttatgtcctccaaatacagtcctatttatctgcaaagtcggattgataacttcattgatggtctatctgctctgctggacgagctcaatgaagagacttttgagcaccatagaagtggtttaatagctgataaactggaaaaggaaccttcacttagctaccaaactagtgattattggtctcagatcgctgataaaaggtacatgtttgatatgtcaaaactggaagctgaagagcttaagacagttcagaaggctgatgttatagcttggtacaacacatacataagatcatcgtccccaaagcgaagacgtctagcaattcatgtgtatggttgcaactcagatattgctgaggctgctaaactccaggagcaatcttggactataattgatgacgttgaatcattgaaggcttcgtctcaattttattcaagcctttgttgagggaagttgggcatgatctgtcagtgtgtgcaaagcgcgtaacttggacattgccgaggcccgctaaggtgcaagaatttcgtggatcataatagatgatttaggccccttctgcagatcaaccgccatgttatctatggccggcttgaaattgaacagcatcgttgcacctgaccaacatcatcaacgagtatagtgctagttgggtaagaaaaataggattttgtcagtgcattatgtgattttcataacaaacacacatggctttattgttactttgcgccaagaaatgttgatcttccaatatggcgtagtaattgatggatgagtttttgaggaaacataattttgtacttggagatgtaaaatgtttctggaatctttactgaacaattttggaagtcttgtcttattatatactttaccctcc

SEQ ID NO: 16433 - DNA, 3604 bp, Zea Mays
agtactgccagaatttgtcacgcttttgcctcacccttcgaagcgagtacgtcgtccctgaggaagtcaaggctgcagggtttcagatctgtgccgacgagctggggtctattgttgagggtcatgatagtaagaagctcatcacccaaggtggagttgatggaattgcggaaaaacttgcaacttcgaagacggatgggctaagcacagccgatgatagtattaagcgcaggcaagacatatatggagtaaacaggttcacagaaagtgaggtccgtagtttctgggtgtttgtatgggaagcgcttcaagatacaactcttataattcttgctgtctgtgcgttcgtatcgctggttgttggcattgtggtggaagggtggccaaaaggtgctcatgatggtcttggaattgttgcaagtatcctcttggttgtgtttgtcactgcaacaagtgactaccggcagtcactgcagttcaaggacctggacaaggagaaaaagaaaatccatgtacaggttacaaggaatggttttaggcaaaggctatcgatatatgatcttcttcctggtgatgttgtccatttagcaattggggatcaggtccctgcagatgggctcttcatttatggattctctctgttgatcaatgagtccagcctaactggtgaaagtgaacctgttgctgtaaatgaagataaccctttccttttgtctgggaccaaagtacaagatggctcctgcaagatgctggtaacaactgttggcatgcgcacccaatggggaaaactgatggccactctcagtgaaggcggcgatgatgaaaccccactgcaagtcaaacttaatggagttgcaactattattggccagattggattattttttgctgttataactttcattgtcctgtcgcaagggctattcagcaagaaataccatgagcagatgcttttaagctggtcaggagatgatgcattggagctgctggagcattttgctattgcagttactattgttgttgttgctgttcccgagggattgccgttagcagtcacgctgagtcttgcatttgccatgaagaaaatgatgaatgacaaggcacttgttcgccacttagctgcatgtgagactatgggttcggctactaccatctgcagtgacaagacaggaacactgacaactaatcatatggccgttgttaaggcctgcatctgtggaaacatcaaggaagttaatggttctcagaatgcatccaagttacgctctgagcttccagagattgttattaaaactcttttggagtctatatttaacaatacaggtggtgaggttgtaattaaccaggatggtaaatatcagatcctgggtacccccacggagacagctttactagagtttgcattgtcactaggcggagattttaaggcaaaacgtgatgaaactaagattgtgaaagtggagcctttcaattcaacaaaaaagaggatgagtgtcattcttgagcttccaggaggaggatgccgtgcacactgtaaaggtgcttcagagatagtcttggctgcctgtgataaattcgtagatgagacaggtggtgttcatcctctggataaaataactgctgacaagctcaatggtattattgatagttttgctggtgaagctcttagaacattatgccttgcttataaggatatggaagaaggtttttccaacgcagaccatataccgctacaagggtacacatgcattggaattataggtataaaagatcctgtccgcccaggggtgaaggagtctgttgctacttgccgggctgctggaattatggtgagaatggtcacaggagataacataaatacagcgaaggcaattgctcgtgaatgtggtatacttactgaagatggcatagctattgaaggaccagagttcagagagaaaagcctagctgaactccttgaactggttccaaaaatacaggtaatggcccgatcatcaccacttgacaagcatacacttgtaaagcatttgcgcacaacattcaatgatgttgttgctgttactggtgatggaacaaatgatgctcctgcattgcatgaagcagatattggacttgcaatgggcattgctgggactgaggtgtgaatgcttattgttaaggagaccaaatcaagtttattcagtaaagggcagatatgccatggtggcatgtactattgttctaaatagtacatgcaattatgatatgtccatcgtattgaacctgagtattgctaattttgtaccataacctgctatcatagccatgccatccagtggagctaatataatctttttcaggtggcaaaagagagcgctgatgttataattctggacgacaacttctccacgattgtaactgttgccaagtggggacgatctgtttacatcaatattcaaaagtttgtgcagtttcagctgactgtcaatgtagtggcactgctagtgaacttctcttcagcctgctttacaggaaatgcaccactaacagctgttcagcttctttgggttaacatgatcatggacacccttggcgcgcttgccttagccacggagccacctaatgatgacttgatgaagagagagccagtaggaaggacagggaaattcattacaaatgtgatgtggaggaacattcttggtcagtctttctaccagttctttgtgatgtggtatctccaaacgcaagggaaaaatttctttgggcttgaaggctctggtactgatattgttctgaatacgataattttcaactcattcgtcttctgtcaggtgttcaatgaaataagctctcgggagatggagaagatcaacgtgctcaagggcatgacaaggaactacgtgttcatggctgtcctcagcagcacggtgatcttccagttcatcatggtgcagtttctaggagagttcgccaacacgacgcccctgaccatacaccagtggctagccagcgtgctcctcggtctggccgggatgcccatcgctgccgccgtcaagctgatcccagtcggctcgtcatgataccattgaagattgctgctgcctgggatgggaagcacggcatgaaaagcgtcaggctgtccaagctgcatggtattcggtggagctgagctctctctctgtctctctgtgtgcgtaaacttttggaatgcacggagggcaggctagggaaatggagcagccgctgcagtttgagaagttttgtagcctggaaatgtggctagattgcctcggacctgtaagaaacatcgtgtttgttggcgccgggaaaaaagcagctagctgtggtggtggtgcagcagagttgttagattgacttcgaaatggaatttagactgcaggatatttatggtggatgaatggacggaaaacatggttcgttggttatttttactcttgcttattagagctctggtttggtctttttaccttagtagttgaaaaagagtaaaatttagcatcgggtcgtcgaagccaaagttgtcttgaaggcgtcatttatgtctacaaaaaaaacgtaaaatgtatttttgggctccttaagatcgcctcttgttccactcgag

SEQ ID NO: 16434 - DNA, 1407 bp, Zea Mays
gcaagttgcagcagcagagagagcgctcgcgccgcatctaatctagactagtactgtagacgtcacgtgaggcggcagcatggcgcggtagagttcgggagaggctgacggaccgggcagtggaaccgacggccgacgcgcgcgtcgtcctcacctcacgtgtgtcaccgccaccgccgctcacagccacacacaaccggacgacgacccgagcggattgctttgctattcttcgccgtctcaaaattaggagccggatccacgaagggaggagaaaagggctccttttttatgctgtcactgcggtcgcgggtgacgctttcccaggctctcccaccgtcgtagacgtcgccttcgccctccacacgcacacccatccgctcccctcgcgtcgccttctatcttcgagggagagccggagagccttcgccgctctctcactcgctctgttttgtacctcgctctgatctctccccccgcccgtcgctgattccctgcccgtttgtcgccattgccgccggtcgtgccgtgtcaaggacatggcgacctcgggaaagaaacacctgaattcagtgaccttgctgttcaaactaccgtattacacgcaatggggccagagcttgctgattgccgggtcggaaccagcactcgggtcgtggaatgtcaagcaaggagtatctctcagtccagtccatcaggacagtgagctaatctggtgtgggagcgtgtctgttgttgccggctttacctctgagtacaagtactatgtggtggatgacaagaagaatgtgttgagatgggaggctggggagaaaaggaaactagtcctgccggagggcgtgaaggaaggagacgtaattgaaatccgtgactggtggcaggatgcttctgaagctctattcttcagaagtgcattcaagaatgtcattttcaatgctactgaaggtgttaaaaaggaatcacagtcagtgtccctcaacaaaagtttggatcctgaagatatcgttgtccagttcgtgattagctgtcctcggctcgtatctggatctactgtcatcgtcactggaagtaaccctcaattaggaagatggcaaactcaagatggtctcaagctgagctatgttggagattccttgtggaaagcaagctgtgctttacggaagtctgagttccctataaaatacaaatattgtcaaatcagtcaagcaggaaactctacattggagcttggcccaaacagggaggttaatgttgatttatcatcacccaagcaatccagatatattgtgttatctgatggtgctcttaggaaccatggaactccacacttcggataacaaaccagagaatcagtatgcatcaatgcatcatacacagccaaattgtgtataatacttcatctgcatc

SEQ ID NO: 16435 - DNA, 4604 bp, Zea Mays
gctgccagactgcaacagccaccggcggtcggcacgacagcacggtccttccattgttgctcccagctccaacgcagcattactcatctccattctccagtccgataatccactcattacctcatcatcgtttccaaaagcaaagctttccacgcagattccaccattaaattgggcgaacttttttgaattaaaaactcaaatcctggaaaacgagatgcggtaggctggtagtaggaggactaatcatgtgggcgacgctacataaacccgtcgcgcacgccaacttgcgtctcctcctcacagtctccgccttctccggaccactccacttaggcaccgccagcgctgtcgcggcggcggttacgacccgacgctcgagttctagcaggggcgtcgcggccaccgcgatgccttcgtcgtctccgcctccgctgccaccagccgaggagacgaccgcctctgctgccgctctcgcccctgagggtggattctccctcaccgagccctcgttcctcgagtccctcatgccgaagaaggagatcggcgtcgaccgcttcctcgccgctcaccctgagtatgacgggcgcagcgcactcatcgctatcttcgattctggagtcgatccagctgctgctgggttacagactacttcagatggaaagcctaaaatccttgatgtacttgattgcactggtagtggtgatgttgacacgtccaaagtggtgaaagctgatgctgatggtgctattgttggtgcttcaggtgcccgtttggttataaacccctcatggaaaaacccttctcaagagtggcatgttggctgtaaattaatatatgaactgtttactgacacacttacatctcgattgaagaaagaaagaaagaagaaatgggacgaggaaaaccaggaatcaatttccgatgctctgaagcagctgaatgaatttgaaaagaagcatcctaagcctgatgacaccatgctgaagaaggcacatgaagacatgcaaagcagacttgattacctgaggaaacaagctgaaggttatgacgataaggggcctgtaattgacattgttacatggaatgatggtgatgtgtggagggttgctgtcgatacccagacccttgagggtaacaatgatggtggaaaactagcagattttgttcctctgacaaactacaggcttgaacgcaaatatgcaattttcagcaaattggatgcttgctcttttgtagcaaatgtttataatgatgggaaccttgtcagtatagtaactgactgctctccccatgctactcatgtcgcgggcattgcagctgcatttcatccagatgaacctctgctgaatggagttgcacctggagcacaattgatttcctgtaagattggagacactcgcttaggatctatggagacagggacggggctggtgagggccttgatagctgcagtagagcacaaatgtgatctgattaacatgagctatggagagcctacccttcttcctgactatggcagattcattgatctttctaatgaggttgtggacaaacatcgcattatatttattagtagcgccggaaacaatggaccggctttgaacactgtgggtgctccaggtgggactagtacaagcattattggtgttggtgcttatgtttcaccagccatggctgctggagctcactgtgttgtacaaccacctgcaaagggaatggagtacacatggtctagccgcgggcctactgctgatggggatcttggcgtttccattagtgcacctggtggtgcagttgctcctgtaccaacttggacgcttcaatctcgcatgctcatgaatggcacttccatgtcatctccttctgcctgtggtggggtagctcttcttgttagtggcatgaaggctgaaggcattccattaagcccttattctgtaagaaaagcaatagagaatacagccgcatctataagtaatgcacctgaggagaaactgaccacaggaaatgggcttttgcaagttgatagggcttttgaatatgcacagcaggctaagaagttgccacttgtttcttatagaatctcaatcaatcaagtgggaaagtcagttccaaaactaagaggaatatacctccgcgggggcaatgcatgctgccaaacaagtgagtggactgtgcaacttgacccaaaatttcatgagggcgcgagtaacttggagcaactggttccttttgaggagtgcctgcaactgcattctactgatacctctgtggttcaaattcctgagtatatactggtgacaaacaatggacgcagtttcaacattgttgtcaatcctgctaatatcagcagtggccttcactattttgaagtttatggcatagattacaaagcaccatggcgtgggcctattttccgtgtgccaattactgtaataaagcctattgctctattgggagagccaccactattgtcaatttcaaaccttcgttttcaatctggtcatattgaaaggaggttcataaatgtaccttttggagcttcatgggcggaagttactatgcgaacatcagcttttgatactcctagaagattctttttggacactgttcagatctgtccactgaagcgacctgttaaatgggaggctgttgttactttctcttctccatcttcaaagaatttcagttttcctgtagaaggtggcttaactttggagttgtccatagcccagttctggtctagtggaattgctagccatgaacctacctgtgttgattttgagattgtgctgcatggaatatccattgatcagaaagtaagtacccttgatggtgagtcacccttgcttatagttgctagatcacttctagcgtcagagaagcttgttcctgttggcaccctgaacaagatcaggataccttatcgacccgtggagtgtaatctttcttcacttcccactgaccgtgataaattgccctctggcaagcaaattattgccctgaccttaacttacaagttcaaattagaagacaatgctgaaataaagccccatgtgccactgcttaacaacagaatatatgacaataaatttgagtctcagttttatagaatatcagattcaaacaagcgtatttactcgtccggagacgtttaccctagttatgtcagactttccaaaggagaatacacgttgcaactgtacataaggcatgagaatgtgcaattcttagagaaactcaaggaactggttctgtttattgagaggaaactagacaaaaaggatttcgttccattgatgttctactcccaacctgatggtcctatagttggaagtggcaccttcaaatccactgttctagttccaggcgaacctgaagcattctatgtgggtcctccgtctagtgaaaaactcccaaagaatgctccacctggggctgttttggttgggtccataacctatggtactgtaagcacatttaacaagaaagatgaacaaaaccaccgtgctccagtatcttatagtatctcatataccattttgccatcaaaggttgatgataaagaaaagggggttttagttggtacaaagagcatacctgaacagttagatgaggaggttcgagacaccaagataaagtttctttccagcgttaagcaactaactgaggaggacaagtctgcctggtcagaacttgtggtttctctgaagtcagaatatccgaagtacacacctttgctttctaagattttgcaatgtgtcctccagaaaggaactgatggtgataagattagccatgaaaaagaggttattgctgcagccgatgaggttgtgggcagtattgataaagaggaactggctaagtatttatctctaaattcagatcctgaagatgaagaagcacagaaattcaagaaaaaaatagaagaaacgcgagatcagttggctgatgcactatatcaaaagtgtcttgcattggctgagattgaatcactgaagtctgatgagtcaattgaggtatctgctaaagatatttttgaggagaattacaaagaattgattaaatgggttgatgtcaaatctgcaaaatatggcacttcgactgttttgcgtgaaaaacgctgtggaagacctggtacagcattgaagattctaaatgatttgattcaaaatgaatctgaaccaaagaaaaagctttatgatttgaagatccagttgattgaggagatgggatggaaccatgtctcaacctacgaaaaacagtggatgcaagtccgctttcccccatgtctgccaccattttgattgtgaactcatttttacaatggctctatcatcctgggttcagtagttgtcattttcattgctgggtgcgtcagttcattatttcgatggcaaacagccaactaggcaagctactggatttgtgcgtttggggacacagttattccatagttattttgtggtacaatatcaggggagtcctttctccaaggagataagacggaacagagatattttgatggacttgaaggagattttatcctcttcaatccttataatgtctatcaaaccaaataaggtttataatccttgtcaaac

SEQ ID NO: 16436 - DNA, 2458 bp, Zea Mays
caggagcagcaacagcagcaacgccaactccaacaagagcagcaccaacggcagctacagcagcaacggcaagcccagcttttgcaacggcagcagcagcagcagcagcaacagcaacaacaaatgatccttgagcaattgttgcagcaacagctgcagggttcaaattttggcccaacaagtatggttgatcaagtcttacttcgtgaacatgtattaaatgaactgcaccagcagcctcaccatttgcaaaggcagcatgatgcagctattgaacagctcattcaagcaaaatttggtcatgggcttcatagggagcaccataatgatatgttggatgttctctcgcgttcaaatcagagacagatgcttcctttagagcagcaacttcttttaggccttcaacacgagcagcaacttaagtctcaacaattggcaaatgctctgcggcaacattcaggccaggaagaagaaaggcacttaagtggggtctggccaatggatgctgctgcccagtttatccgctcaggaaccagtccaaatcagatacacagtcgtttcgatctccttgagaaccttcagagatcgtcatcgtttgatcatcatgaacatctagaccgcagcttatccttacacgaacagttgcatatgggaggtcaaggtattcgctccctagagcggactggttctttgcctggtggtggtcctggaccaaacccagatgtcataaatgccctaacacgtcatcatggacttagtcagttggaaacacatggtgatgtataccctttagttcaaatgcctatgcttccttcaggtgttcatccccagcaacttaggcatcaggatcagcttcctggttctcacataggaaggcttgaaaggcactggtcggatgccaatggacagttacaaaacagtctaatggaatcttcacacatcaaccagttgcagattgaagcggagaaggagaggaggaatgtggaaatgaacctttctgttgacaatccacatgcatggggagcccttatgaataaagataggaatacagagcaagatttgactgatatgattcataaaaaacttgtccttcaatcacagcagtcccggggttttcctgatgtttctgttccggcatcatttcgacgtaaagatcactttgtgcaacctgttgtggagagccctctgagatcagtggacatgtcgtttgaggagtctctttctgaaaggtcactttatgcaaaatcagggcagttggcacaagaaggatcatctaatcttggtactttacccaacagtattgagaacactggaaaatttaaccttagatcaggatctggatcaatgcttgagcagaagcattttcttggaattgacgatgttcaaagtgactttctagagaccacaggtggtagaacatcagctaatcaactggttgggagtgtcaatgaattaacaaggggtaaaaggcagggttctagtgcgagtttggctggggatgatcctaatttggctgatgaaggtgttagtaaatggtctgattctggcatgtccaaaggaagctctcactccttactaaagcgctctacaaaccaacatactactacatctcagtctgttcccacagatctgtcagcaatcaggctgaagaaagcaggacttgcgtcctctgatgagaataagatggaagcaggatttgcctcagtagcccagggtatggaaggctgcgttcctagcaacaaagagacgggggcgtatggcatgccatcagccaccaacaatccagatgcctctggtcagtccttcagcgaagcgttgaagagctcgaggaagcctccgttgcagtacgatgcctccgaatctgcagactgtggcccaggtggtaagggcgcgaaaaagaaaacgaagaaaggaaagcagattgacccttctcttcttgggttcaaggtccacagtaaccggatcatgatgggcgagattgttcgagatgattagagtgtacatacgcggtaggaggtggccttagaagaatcaagattggctccaagccaaaccctaacctctgtacatgcccagccctggtgcccgctcacctcggcagaaattttgtgactgcatcttctcttagcctcttgctagctgtagtattgcccgatttctcagatttagaaaaaggagcctttcttatcggtgccccacagaagtgtcatagttttgttgatctgtgaagatatcgtagcactggagcatggaacgtttggtgtgctgttgtttcgctctgttttaataggggtaagggtctcacatgtaggagaggcctcctgctgctttggttggcattggacattgttcaactatcagatgtagaatgtcatcgcgatgtacaaacgtaataaacaaacttaggacgatcagtatcaactatatacaggcaaagagaaaaaaaacagtatcaact

SEQ ID NO: 16437 - DNA, 2688 bp, Zea Mays
acgggtgaaaatagaaaaatcaggtgccggagactaccgaacgtgtgctcgcttccttcagccgtcgtcgtcctcgtctcctcgatgataagaaggggaggtggatcactcgaacctaataagtgagcttccaggccggggagagggactggccggcggaccgccgatggaaaactttggaggctcctaacttccaagataccaactagctcccagcctcccaccgtcttctttccacccttggctgatgctagggagatgggatttttggagctctaagacaaatagttctgctccttgcgccctgcgtgttcttgatctggcctctaagtttgttggctgttttctcgtgtttgaggtgatatctcgattctaaaaagctaccagatttcttctccctgtttgtatggacaaatttgggaatgaaccctagtctgtgtgcaaagcagccaaattggtgttcttgcggatcaaagctaaagctgcagcagttggtgaggatacaagagatgcagggagaaacaagagaagggcttgttagattctgcagagacactcttattggttgatattttttccatcaactccggccagatttgcggaacctcgcaattttaggagccatttgatcttggacatggagaagcaacccagcgtgcgacatggtgccctagagaaactgaagagcttccgggggatggagaagcagagaagcttcaagttcttgtccatggagaagcagcagagcttcaaaaggaacaaggacagccctgggaagcggggtgacaccgcgctccacctcgcggcgagagctggcagtgtcgcacatgttcagaagatccttgcggagtgtgatccagaactggtggtggagttagctggccgcacgaatcaagacggcgagactgcgttgtatgtgtctgctgagaaagggcatgttgaggttgtgtgtgagattttgaaggcttcggatgtgcagtcagccgggatcaaggccagtaacagcttcgatgcattccatattgcggcaaagcagggccatttggatgtcttgaaggagctgttacaggcctttccctcattagcaatgacaacaaattctgtaaatgccacagctttggacactgctgcaactcagggccacgttgacattgttaatcttctgctagaaacagatgcaagccttgctaggattgcaagaaataatggcaagacagttttgcattcagcagcaagaatgggccatgtggaggtggtcactgcactgttaaataaggacccggggattgggtttagaacagataagaagggacaaacagctctacacatggcttcgaaaggccaaaatgcagaaattctgcttgagttgttgaagcctgatatctcagttatccatgtggaggacagcaaggggaatagaccattgcatgttgcaactcggaagggaaacaccattatggttcagaccctaatatcagttgaggggattgaaatcaatgcggttaatagagctggagagactgcttttgctattgcagataaacaaggtaatgaagagctcgtcaacatcctgagagaggtcggtggaggaactgcaaaagagcaagtaaatcctcctaatccagcaaagcagcttaagcagacagtcagcgatatcaggcatgatgttcaatcacagatgaagcaaacacgccagaccaagatgcaattccaaaaaatcaagaagaggattcagaagctccacattggtgggctaaacaatgccatcaactccaacactgttgttgcggtgcttattgccaccgttgcctttgctgccatattccaactccccggtaattttctggaggacatgactcaagcacctgacccagacatgaccttggggcaagcattgatagccagtgatccagcctttataatcttcttggttttcgatgctttggctctctttatctcgcttgctgtcgtagtagtccagacatctctaattgttgttgaacagaaggccaagaagaagatggtctttgtgataaacaagttgatgtggctcgcatgcctctgcatctcggcagccttcatagcgctaacctacgttgtcgtgggtcgagacgacgagtggctggcctggtgtactatggcaattggcactgttaccatggtggccactgtcggttccatgtgctactgcgttgtcgctcacaggatggaagagaagagcttgaggaagatcaggaggacctccatgagccagtcatggtccatatcaattgactcggaagcagagctgatgaacagtgagtacaagaagatgtatgccctttaggatgatgtctgttcttgtcggctgagtcttgtatatattggtacccatttgcctgagaccagtccatggcattgagtgggattgactcaatcagaactatatttagtcctagaacatggcacctgtatgtaactgtagtcttgcagcctccagacatgaacataggggtgaagtctaggtgataggtgtagtcactttttttgttggcaaaatacaaatattgccaagcatgatgtccctatatcatgttttgtgtgggtgtggatggcagtgaaaaatgaaaatcattagattgtatctgtatggtagaatagtatggaataagttgtctttatgtcaaaatttgtgtggtcaaaaaaaac

SEQ ID NO: 16438 - DNA, 1350 bp, Zea Mays
tacacctgcacgtttttctctccgctcgtgcatgttcgagtgtctttgaagcctgaactttttgaaggattgaggtttgacttcacaaaaggattgaatcagaagttttctcttagccacagcatttttatgggctccttagaagttccagcccaggcatctgaaactattaaagttccaactgcacattatgaatttggcgccaattttttagatccaaagttaatgctcattggaagggtgatgacagatggaaggcttaatgctcgtgtgaaatgtgatttgacagacaatctgacgttgaaagtaaatgcacagcttacccaagaggcacattactcacaagggatgtttaacttcgactacaagggaagtgactatcgagcacaattccaaattgggaacaatgcattctatggtgcaaattatattcagagtgttactccgaacctatcaatgggaactgaaatgttctggcttggtcaccaaaggaagtctggaattggttttgcctctcgctataacacagacaaaatggtgggcactctacaggtcgcaagcactggaatagttgccttaagttatgtccagaagatttccgagaaggtttcccttgcgtctgacttcatgtataaccatatgtcaagagatgtaactgccagctttggttatgattacttgcttaggcagtgccgcctaagaggcaaaatagactcgaatggtgttgttgccgcatacttggaagagaggttgaacatgggtgtcaacttccttctatctgctgagattgaccattgtaagaagaactacaagtttggttttggaatgaccgtaggagagtaattctgccaaaacaattgctgtgagcgcacatgagatacttatgcagtcggcttcgcgcgtatgttgacttgttaaagatatttcaggtctcagttttgactgatcaggttttgccattgcgccgtggaaaaacacaggccgttgctgctttacagggttttgtatttcagtgttttttcagctacttgagcatgggggccatgattctttgttcatcttggatgtaactagctgattggtgttccaacaatgttgtattggcggaacaatttttacctttttaaatcactaccaatccacctcactaggccttttctgtaacatcatacacgagccgtacgatttcaaagcatatcaccatttagcacttgacatatttgatgctgtcatgtgcttttgttcatccattgcaagtaagaaagttcaaatcgttttttacacaagttcttgctgcataaatgagaatgtggaatcattatactagaaagaattagcgcgtgtttggtg

SEQ ID NO: 16439 - DNA, 2605 bp, Zea Mays
tttagaggtgtggagtaactaaatagagtggaggcgaaggtcgagaaggctttcagagaaggtacagcgcggcaaaatgcacatagtgtttttgtgtcccttgctctaaaactgttagaagaacgagttcatgttgcttgcaaggaaataattacattggaaaaacagaccaagctacttgaggaagaagagaaagaaaaacgtgaagaagaagagcgcagggataggaggagaacaaaagaaagagaaaagaagaatagaagaaaagagaggctgaaaggaaaagacaaagataaagaaaaaatattggttcggtcaaaaaaaccaggtctttcaacattttctccgagcagccaagcagcaccaagtagtaatgagtctcaggatgttctagacttgagatattcagatagcgaagaggaagacaatgttgtggtcagggaacactatcctgattcttcagctgatcaatcttcaagcaaggatactgatgaacgaagcaatgagcatgaatgcagtgcaacagcagaatttgttccctcagattgtgatggctcattcttatgtgatgagtctaattcatcaagaaacttgagatttagatgggacttcccagaaaaagatgtcagttattggtatgaagattgtcgtgttgattctggagatactcaattgcagtctagggagaggatcagaaataacactagaagttacaacactgtatttaatacaaataaccgaacaagagacaagtacaacccctgcagctgtggccatcaagaagacttcagatatttttccacagcaactagatcaagtagggagacaaagatttccaggaaaacagtggctgagaaacccaggttgcaataccgcaggtgctatcctccagaaagcttcgctgtgtcaaatggacgtgttggtggtacaccaaacaagaacacaggtccaaagcaagtatgggagccaatggatgcaagaaagaagatagggaatgggagaggatcagaaataacaccagaaactactggtgctgctgatggttcagatcaagtggaatgctcaaaggacattagtgaatgtgagaagcttgaggtagtgtgtgaaacacttgctgaaacttgttgtgagatatctgcagaagcctgtaagtcagatcaaccatgtagacaaggtgagaaaaatcagtctgcttgcagcgatggatctaaatgcgtagataagccaaattgctgcttgacaaaggacactgttaggacaacaaatttaaccagttcagacagcttttcgtgtctaagtgagggagatagagacagcagcatgagtagcatgacctcactgagtgctcagaatgtagaatcttcatctacatctgattcagatgagtattcagacaggaacgatagcagcccaggcgatccaccagtgaagaatgtttctcgttcattacttgagatgtgtgcaggaaatggtttcagggagtaccaaccgaaaggcttgaaccctcctaatggcaaccaatttggatttatggtggcacctttacaggaccagatgttgcaccaacagaagatccatgcaccgccgtactcgtcaccatttgtggggttccacaatcaccccttggcagttccaacaaatgggtacttgccatatcctcagccaggtcacttctaccctggccttatgacccctgttggatgtggagtcgctggcagccaatgcgttgactttccaatgcagtacagcaataacattcatccttactcgggccccgaatttggttttctgcctgcaaaaccagttcacaagaccccagtgagcttccatgctgtgccagtgccaccactggccccgctgtgtagaagcgaggtgccagtggtgataaatcaagagaggcagcagggctctgcaccccctaaattcaaacaggcagtgctggtccctgagaacggctgttcagcagaagacaacaccttcaaacagaaaggtgatgacacagacagcacacccttctccttgttccagttcaacctgcctattgcccctcccaccctggcaacatccaaagaagagcaaagtggagcgatgccgtcaatggcactgccaccagctcagataactcgagcccagctgtgctccagggaggagaccaatgtcaaggagtacaaccttttctctgggtgtaacggagtgatgtttcagctcaactagaggcgaagaaaagtgagcagctattcaatatacatacatggtgaacgatttgtattctagtaaaacagaataaagtaggtcgaggtttttactgtgttgccctcgaatatttatttcttttttaattttgatttgttgtgcttcccctccctgtttttttgtgtgtatggaaaactgaaaagacagtgagtggtatagattctgcagttttgacacgagtctagtgtcactttttaccccccggatggttgtcatcttccaactaggctcgttcggtgtagctctgtcaattcattttggactgactgaatctgtagcagtttttactacagatacagtaccaagccgtttgttttaattaagggtcctagacatctccggttgctccccc

SEQ ID NO: 16440 - DNA, 1766 bp, Zea Mays
ttagtgttagctatgacttggaagcatgtgactctgctttggatctgaagagtttgatctggtccaaggttgataccaaatttcaagcagaacctgctgactccactataaccacacaaattgctccatgtgctggtcattctttgatttcttggggtaacaaatttttatctattgctgggcatacaaaagatccatctgaaggcattacagtgaaggaatttgatccgcatacttgtacctggtcaattgtcaagacttatgggaaaccaccggtgtctcgtggaggtcaaacagtgactcttgttggaacgacactagttttgtttggtggtgaagatgcaaaacggtgtctcttgaatgacttgcacatccttgatcttgaaaccatgacatgggatgatgtggatgcaataggcaaccctccttctccaaggtcagatcatgctgctgcttgccatgctgaccgctatcttttaatttttggtggggggtctcatgcaacatgtttcaatgacctacatgtccttgatttgcagacgatggaatggtcaagacccaaacaacaaggcctgactccaagcccaagagctggacatgcaggtgcaactgtcggtgagaactggtacatagttgggggtggcaataataaaagtggtgtttctgaaacactagtgctcaatatgtcaactctgacatggtcagttgttagcactgtggaaggacgtgttcctcttgccagtgaggtatatctcttgagcggttgagcagcattccagttgttaagatgattttacttggctgctaatatttgaaacttggtatttctagggcatgactttagtgcatagcaattacaatggttatgattatctcgtctcttttggaggatacaatggacgatacagcaacgaggtttacactcttaaactcagcctcaaatcagattcacagccaattgtagaagaagaaactgtctcagatactatatctagggtcagagaacctgagaccgaaatttctcaagatgggaggatacgcgagattgccatggacagtgccgattcagacctgaataacagaaatgatgaagcaagtgaacagcttgtagcagatcttaaagctcagaaagaggaactagaagcaacaattaacagggaacagctgcaaactgtgcaacttaaagaagacattgctcaagcagagaccagaaatgcagagctgacaaaggaacttcaagctgtccgtggccaacttgcttctgagcaatcaagatgtttcaaacttgaggttgacgttgcggaacttcgacaaaagcttcagagtatggacgccctggaaaaggaggtcgagctgcttcggcgacagaaagccgcttcggagcaagcggcgctggacgcaaagcagaggcaaggttcgggtggtatgtggggttggctcgctggaagcccgccaccatcacagtagttcgtacaggccgtggttcatatattttacttgtaacattacatatcatttgacatttgtctacattttttttttgtcacatggcattcgtgtttcgttttgaccacacaaagaacaacgtgctctggcgagagttatattgtgctcatagagaatcgttaggttgccccctcacaatcactcaaatgtatcattaggttttaacaatgtactgatcatgtatgaacttccatttgacgttgtgctggttgcctataggtagtttatttttcaaggttgccttgtttttttttcgtgaa

SEQ ID NO: 16441 - DNA, 311 bp, Zea Mays
attaaaaaccatatacgaggccacccagggtacggcggcgctcggttccgtggcggggagtgttttccaggcggcggcgcggtagcgtgaaaccgggcgaccgagcaagcgacggccatggcgttctggcagacgcgcgattttctcttctgtggcatatgcggcaccctcctcaccttcgactccgtccgctccgcctcctgccctctatgcggcttcaagcgcgatgccaaagaaattgaagggaaagaaatacagtacacgatgaccgccgaggctcaggcactaccgcaccattgagcagaggcggc

SEQ ID NO: 16442 - DNA, 2601 bp, Zea Mays
tggatagggaggaagagagtgggggttgcgcggacaaatttgagaaattatttttaatccatctcttctcggccgcagcccacatataaagcaaggcgagggcgaggtagggaggatcttggaatttggccgccgtctgcgttgcttgggtggggaaggagcaggcggccaggcgcagagccgcaaaagcagacgcgaaaaagcccaggcccgagccgaagcggggaggcgacaccgctgcacctgcactaccgctcgcacggtcagcgatttgccgcctcgcgggagccagctttggcgtcggcgtcggcgtcatcgtcggcggggagttcccggagagggattccggtgaggatgagcagcggcggcggtggagggggagccaggggaccgtcggggcccgtgccggcgtccgcgaggaagctcgtgcaggggctcaaggagatcgtgaaccgccccgacgcggagatctacgcagcgctgcgggagtgcaacatggacccggacgaggcggtcagccgcctcctctcccaagatacttttcaagaggtaaagagcaagcgtgataggaaaaaagaggttaaagaaactccagagccaagatctcgaggagcaagtaactccagtcgatccagtagaggtggtgtggaccgtgctggacgaggcaattcagttcagtctggatcgagtggcactgattatatggcttcaaggtcatcaatattgggacctgctgtggcagctaccaatgccatgcagaagccaacagttcctagtttgtccacaaacaaagatgtggttcctaatggatcagttggagcacaacaatcatcatctggttttcagcacaattggtttggggtgccaggtcagatgtcaatggctgatatagtgaaaatgggaagacctcaagtgaggtcttctggcaagcctatggctgcaggagacacatcatatgctggtcaaaccccatctttatctagctctataaaccagaactcaaaacaatcggcaagcacagccctaccaactacttttgaccagggctttcctgctctcccagaccctattccacacacagtgaattctagtcatggttcagctgggaacaaccatacacatgagaatgattggtttcctcaggacgacctgccatctggagttcagcccacatgcattgaggcgtctggtgaccagtcgctatttgtggcatcactggaccaatctatgttggttgccgatgcttcttactcacaagaaatttctcatgcagaagagaacaactccactgcagttgaagcaacactgtcttccgaaagacacttggaaattgtggaggatgacaatcatttcaacgacgggttattgcagaactcaagcgcttaccaggctcaagtgcattcctatgttgataatgaagttgggatttccaatgttgatgcagaatcagcttcgatgaacttccagcatttaagcctgcagaatgaagatatagctgcaaccaagtctgctgaggataaccctgcggttatactccctgatcatctacaagctgcaaatgcagattgtgctcatttgagctttggtagttttgaatctggtgccttctctggcttgctttcatcaaaggtcccaaaaggcagtttggaggacgacgaggtgctcattccagatgaatcccgatcagttaatcgaatagatgttaggaatcaagattactatgatgacgatgctctaaattcttcagaaaatgtggatgttgagacaagaattggtaatatggataacattgatggaccttcagtttcagaatctgatgcactgaggcagggtgccatagatgtgcctggtcttcaatatgacctgccatcagtttcaagtcatgcatattcaaacacaacacagccaagtacaatggaagaaccacaaggaaacacacaagcacaacccctttcccatttttctggcttactgcaagcaaatactctacccaataacttgttggggtcaaatcttacccctcttcgggagtttgacttctcccagttccttcagacacagtcagctacaaaatataacccatctgttgcacctaataatctgccaccaatctccatgcaagagacttcaaaacagggaggcttccccaatactcagtctacgcaacatgttcccagtacaagcatttcgtcgggtcttcctctcccacaacaattgcctgtatactctcagccaactctgccccttgggccttttaccagcctggttggctatccatatttgcctcagaactattacctaccttcagcgccattccagcaagcgtactcaagtaatgggcctttccatcaatctgctgctcctgccgtgcctggagctggtatgaagtatccgatgccacaatacaagagcagccctcctgcttcgaccctaccacaaccatcatcactctctggttacggagggttcggaagtgcaaataatatccctggaaatttcagccaaaatcagggtgctcccgctgcacctacaactttgggatttgatgaagctttaggcacacaattcaaacaccccaatcattatgcagcactacagcag

SEQ ID NO: 16443 - DNA, 3048 bp, Zea Mays
gaatcttacaaaaaatctaagacttctgccattgtgctcatttttcttcgctggcatttggtgcaggaggacggctactgtggccacacgtcatgtcctgtcggatctgagccttccgaatctctgcccagcgacgccgggtgctctgttcctgctgctaacaccatctgctcgcttgttcacagcgttatggcgtcgcaggtccatgtcgtcggacaagggaccgtaggccgtgctgcgttcagtggcaaccaccaatggatcgtccgcggtaccgccaatggtcacgggctctcctccgaggttgctgcggagatgaacaatcagttcagagttggcattcagacaattgcgatcattcctgtgctgccacggggtgtcctgcagttaggctctgctggtttggttatggaaaacataaattttgtgatgtttgcaaagaagttgtgttctcagctaaacaaccgttcaagcatggctgcatctgcttcggctaaaaacgctttaagtcagcatggccagtcacgtcctgatactgcaactgtgtcaactaggacaccaccaaatgcattgctgaatgcatctttgcttaaggttgcacaacagagtggtcaccctgttagagagcacgttgtctatgctgagcctgaccttaggtttagacaacaagcatccttctgcgagaaccaatttggaagtaatttacagagtgttgttatgaactcaagtttgacctccccaagcttggcatcagttaaaaagcagccactcttgatgaacagcattgggcagttacagttcagtaattatgtgcattcatcggcagatttggcaagagatgtcatattaaaatcccttgtgcgccaggactcttctgtctgcgaaactacaaacatgaatatgcatcgtggaagatatatggtatccaatgatataaatggttctggggattttgattttctccctgtaggtgccaaagcaagcagagccaacttatcaaccagtgtgtcgagtcaaatattggaccacacaacaagaacactgcagcaaaaacagtctcttgtcccattcaaagtcacccaatcttctgaattcaataagaaaatggagaaccctgaaaatggatcatttcaaaccccttcagttccaacttctgaatctggtggtcaggtttctaacagtttcaacatggaccaagagaatcaattgattatgtcaaacaatgtacggcaagttcaaaagattaatagatttagtgatccaagtgctaatgtaagcactcagagaatgaagaacagggatgtatgcgagtcgggaatgcccattgagagaggttcctcgttgctagtggagcctggtgcagataatgacttgtttgatatgcttggttctgaatttcatcagttctcccacaacgttgggtctgatttggtcacctggagtggtacagagtctcagaattcagatagagatggccctgaatcatcaatatatctcaatagctcaccccttttcagttcgttagacaacgagcttcactattctggtatcttatcactaactgatactgatcaactattggatgctgtcatctcaaatgtcaatccaagtagtaaacagtgtcctgatgatagtgcttcttgcaagactgcattgacggatgttcctagcacatctcatcttggttcaatagacttgaagagatgtgagtcctccggcgttccttcagtgctaattaagcacgaattggcacagcttgttaagcaaccatgtatttttgacaaatctgagaactgtctttcccaaaataatggaatgcacaagtctcagatacgcctttggattgagagtggtcagaacatgaaatgtgaaagtacttcagcttctaacagcaaaggtcttgatacgccaagcaaggcgaatcgcaagagatctcgacccggtgaaagtgctaagccacgacctaaggaccggcagctgatacaggaccgtattaaagagcttcgtgagcttgtaccgaatggggcaaagcattgatggtttgttggagaagacggttaagcacatgcttttcttacaaagtgtgacgaagaatgcagacaagctcaaggactctaccgagtctaagatacttggtagtgaaaatggccccctttggaaagactacttcgaaggtggggctacctgggcttttgatgtcggctctcagtctatgacatgtccaatcattgttgaggatcttgaccgacctcgtcagatgcttgtggagatgctttgcgaggatagaggaatcttcttggagatagctgatttcatcaaaggactaggactgactatcttgaggggtgtgatggaaatgcgcaaaagtaaaatctgggcacggttcactgttgaggcgaaccgggacgtaaccagaatggagatctttctatcgcttgtgcgcttattggagccaaactgtgacggcagtgcagcggcggagaacgctagcaacatgaacatgcctcttggcttggtgcaccaacctgtcatcccagcaacaggcagcatccaatgagactagaggaaaccctgaagcatcttcccaagtgctaagagcaggagctcaactaacttctgcagtgactagcatcgccaatatgccagtgcatcgcctgcttttcctgagacatcttaatccgtgcaaatgtgacatccttcatgagaccaggtcgcagaaatggaagaaggaaaacaacgccaagagtgattgttaggcagtgttttgtttgtatgatcttagtttgtttgttagttagcgctgtttggtcgtatattagcggatttttttggtactgttattcagaatggaaattcttgggttggtttatttcacaccaaaaaagagagatggaataccacctttgttataaatcttctcacatcagaaccagttagcatgactagtggaaaaacacctgagcagatttgtcattgctccgaacagatactgctggcaacattcagaggtactagatcactggattctagctgaggccaccaacaaac

SEQ ID NO: 16444 - DNA, 1264 bp, Zea Mays
ccactggatgggcaagcaagttttcaaggactagtgttataggaaatggcatcatactatgctgtcaaatctgcttgtatgtccaaggtggtatgggttcagtgtcatcagctataagcaaagcagctcttgaagcaggagtgcagattgtaacaaatgccgaggtttcccaagtaatggttaatgaaactagtggaatggtagaaggggtagctttggttgatggaacagaggtgcactcgccagttgttctctcaaatgccacaccatacaaaacatttgtggacctagtaccttctagtgttcttccggaggacttcctctgtgcaattaaggcagcagattacagctctgcaacaacaaagattaatgtggctgtcgacagactgccacagttccagtgttgcaacaccaatcttgaaggtggcccagagcacatgggcacaatacacattgggtccgaaagcatggaggaaattgacgttgcatacagggaagcagcagacggcatctcgtccaaaagacctgttatagaaatgacaattccttctgttttggataagaccatctctccgccaggtcagcatgttattaatctctttgttcagtacacaccctacaaactttcagaaggcagctggcaggattctaatgtcagaaaagcctttgctgagcgatgcttctctttgattgatgagtacgcgccaggcttcagctcatcggtggtaggctacgatatgctgactccgcctgatcttgaaagagagttcggcctaacagggggaaacattttccacggcgcaatgggcttggattctctcttcctcatgaggcctgccaagggatggtcggattacagaactcctgtgaaggggctgtacctctgcgggagtggcgcacacccaggtggcggggtgatgggcgcgccaggacgcaacgccgccgccgttgttttggaggaccacgtgaagacaaagtaggtgtagtgtagctcgctggaaaccaagatggcatttttatcatcaggagaaaatctttgatgccatggtgctgttttagtgcctttcttttcttttcctttttggagaattattgtcgcaatccatagtcggagaacttatatcatgtgaagactcgtgtaacaaatcctcactaacatttctgtccctgtccggcgggaaattggaactgtggtaaaatgtggacccatctctttgaaccacaaaggccctatgggcttattttgtgatgaaacaaccaatgg

SEQ ID NO: 16445 - DNA, 717 bp, Zea Mays
ttttttgtttctgcattctgcgaagggaagcaagttttttcttaaagaacggtgcgtgatgagcttaaaaaagagacattgcaacttgcaagggaaaatttagaaaaggagcagcggattttggaacttaggaatcagtgcacaataattagaaccacggaactggctgctgctcaagaccgcctaactgatttggagaggcaaaaggatgatattatgaggtcctattcccctgccgcactgctcaacaagctccaaacatcaatggcaaagttggatgaggagtccgaggagctgcaccagaagttcctggagaaggacatcgaccttccaacctttgtgcagaagtacaagaagctccgcacggcttaccacaagcaggcgttgctccatctcgccggccagacatcactccgctgacatccggccaggcgtcatggcaactttgttgtatttctgctcgcctgttcttgttctacactatgcttggccctgttttacgagtgcagcctcttgtagggatttgccgaacatcagcggatattgcatgtatagttttatgtcttgcaaaaacgtcttatgtactctgtcctggtgtagtggtgtttacgtatctagtgtccaagttgggattcatttgtggtaactaaacactttgcctattttgttcaattcgatgataataaagcttttgtacgtttgtgtacacatccgttc

SEQ ID NO: 16446 - DNA, 754 bp, Zea Mays
tggagatgcatcagggaggagcttgctagaagggtcgaagaagctataagaaaaaatgtcgaggaacgtctgaaatctgaagaggtgaaacgtgacatagaacaccgaattgaggagggtattagaaagttatttgatgaggttgacgctcagctacaaaaagagaaagcagtggccctttatgaggccaggcagaaagcagagcaagaaagaagagagagggaggagttggatagaatgctcgaagagaacaggcgtaaagtggaggaagcacaaagaaaggaagctcttgagcagcagcagaaagagttggaacgatatttggagctggaaaggatacaaaggcaaagagaggaagcgttgcgcagaaagaaaatggaggaggaagaagagagagccaacaagctgagattgctggggaaaaaccggggttgagaactgtcatctttatatacacagcggtctatgtgccgtggttgcccccatttgacttgttagttgttgccttaccagtgcgagaacttttgtttgatgtacgaacatgaaaatggtcatgtatgacatctatgaatggaacctgtagcttattctttgagtacgttttaagacaggttatttggattcctcaatgttttgctctgccatgcttaagaattttttaaatgcctagtctggtgcacaagggagcaatagtaatgaatgagctcatgcccaacttcatctgtttgctcaagagagaagaggagcatgtgaa

SEQ ID NO: 16447 - DNA, 466 bp, Zea Mays
tttggatatcgttgacaaggttgtattggaaaatcaagtatattagtcgactggagtatctctggggggatataaaaaagagagaggttgaaattccagattttgttattgaacatgataaggttcttgagcaccggccactgactgattatggcatagaaccagatcccctacatcttgctgatgtacctgctgtgggatactcgcttggaagatatgaagataaatggactccagaagatcgatggtattcaaggaattacatgtgaaattttctgttgtagcttaaaagatgattgtatagtaacacggtactatgagatttgtattagattgctatgaaaaccttgtcaaggtcctgtatttccaactaaatttatacctgtttgaagatttttgagcagacgctatatgctgtctgtggttaacccgccgtataaaactgtggccgatgtgtctgcttatg

SEQ ID NO: 16448 - DNA, 459 bp, Zea Mays
cagctatgttccttgttatcaagttaggaattgatgaggaacttgtggaactattggggcactattcaccaatcccagtcacttatgctgggggtgtgtcaacaatggacgacctagagaggataaagaaagcaggcaaaagtcgggtagatgtaacaattgggagtgctctagatatatttggaggagatttgccttacaaagatgttgtcctttggcacaggaagcaaagtatggttggtcaagtgtgaagaaacacaagggttggcgctaactcaaaaggtggtcaatttgtgagtaatgtactgttcttgacagtttctgacctcgatttgtctattgtaactgaataggctgaattgatgctgatagatacattttgcctgctacaacactgacattctgatttttaagttcctcgtttgagaaaataataatattgatgcaaattttggctct

SEQ ID NO: 16449 - DNA, 1767 bp, Zea Mays
cactgatgttccacaatctctctcgcctgtcttcactgccatccccactgaagcggttggtagggggcctgaagggagaaagatattcaaggtccagtgacatatcaaagctcttcaccaatagtctaactgttcctcttccagaggtgcttgaggagcatgatctttcttgtgtggagcttttggatgtgaagttggatggtattgttttaacaaaacaaaaagcggagaaggccgttggttgggctagaaaccactatctgtcatcaacaactcttccttctatcaaaggtgacaggttaatcattccccgtgagagtctggatatatcaatcgagaggctgaaggaacagggtataacagctaagaaatcctctcaaaatctgaaggttttggctaaagatgagtatgagcgcaatttcatttctgctgttgtgcctccgaatgaaattggagtgaaatttgacgacatcggtgcacttgaggacgtgaagagaacattggatgagcttgttacacttccaatgaggagacctgaacttttttcgcgtggaaatttgttaaggccctgtaaaggtgttttgctttttgggcctcctgggacaggaaaaacactcttggcaaaagcccttgcaacagaagctggagcaaattttatcagtataactggttctacactcacatcaaagtggtttggagacgcagagaagctcacaaaggcccttttctcctttgcgactcgactagctcctgttatcatatttgtggacgaggttgacagcttacttggtgcaagaggtggtgcatttgagcatgaagcaacaagaaggatgcgcaatgaattcatggcagcttgggatggtctcaggtccaaagagaaccaacggatccttattcttggtgcaacaaatcgtccatttgatctggatgatgctgtgatacggcgtttacctagacggatatatgttgaccttccggatgcgcagaaccgaatgaaaattctaaagattttacttgcgaaggaaaaactagaatctgattttaagttcgatgagcttgcaaatgccacagaaggctattcagggagcgacctaaagaacctatgtgtagctgcagcatataggccagtccatgaactactagaagaagagaaaaagggacgtgtgagtaacgaaaacagttatctgagacccctttgcttggatgattttatccaagcaaaagctaaggttagctcgtctgtttcttatgatgcaacaagtatgaatgaattgagaaaatggaacgagcagtatggggaaggtggcagcaggactaaatcaccatttgggtttggcaactgacactacagtagagatttaccaatactgtatctttgtaacatttaggctgcctcttgttggtagattagggagtcagttccatttttttaccatgagcttatttgaacaacctcgtaatcacctcgtgcaaacaaaaaagaatctagttaaacgccaattttgcctactagttaatggtcggaaataccagtgtagaatcagaaatcggctacacactacaaaataatgtatctgagctactctgggtaagcattaagctttaacaagatgtaaacggcttaagaattttcagttaattcatactagttctcagcatggaattcagtagaactaatttagtattgatagctagtcgatggctggaatcttcaggatgtctcctattgcccagaaactttgttcgtatcaaaagaatggaagagaa

SEQ ID NO: 16450 - DNA, 1137 bp, Zea Mays
gtattcgcttttacttccaattgaaggttgatggcatgggtcagggtggatttagcagtcatgcttggatctggtgacccagagcttgaagattggatgagatctacagagtcgatcttcaaggataaatttcgtggatgggttggatttagtgttccagtttcccaccgaataactgccggctgcgatatattgttaatgccatccagattcgaaccttgtggtctcaatcagctatatgctatgcagtatggcacagttcctgttgtccatgcaactgggggccttagagataccgtggagaacttcaaccctttcggtgagaatggagagcagggtacagggtgggcattcgcacccctaaccacagaaaacatgttgtggacattgcgaactgcaatatctacatacagggaacacaagtcctcctgggaagggctaatgaagcgaggcatgtcaaaagacttcacgtgggaccatgccgctgaacaatacgaacaaatcttccagtgggccttcatcgatcgaccctatgtcatgtaaaaaaggaccaaagtggtggttccttgaagatcatcagttcatcatcctatagtaagctgaatgatgaaagaaaacccctgtacattacatggaaggcagaccggctattggctccattgctccaatgtctgctttggctgccttgcctcgatggaccggatgcagtgaggaatccagccgaacgacagttttgaaggataggaaggggagctggaagcagtcacgcaggcagcctcgccgtgattcatatggaacaagctggagtcagtttctgctgtgccactcactgtttaccttaagattattacctgtgttgttgtcctttgctcgttagggctgataacataatgactcattagaaaatcatgcctcgtttttattaactgaagtggacacttcgcattcttgcccgtttaccagagatggccactgctgatggtgcattttgacaggagtgcatcacctggacctttggtccaaccgaacaattaatcatcaacaaacaattaatccgcaacagccgactggaccggtggaaccggcctaccagatcgcagaacggatcctgattaatcggtttattgaattcgtgcg

SEQ ID NO: 16451 - DNA, 1753 bp, Zea Mays
aagaactcaatctgcaaacgactggctcacaggtcacctcgcccgccgcaccaagaacttgcgcagttaacttcacagccgctcaattttacagcgcagagcaggaagcatcagctgcacgcctctcgccttgcttgccgccttcgctcctctcttccctagctcgtgctagcccttcttggcaagaaacggtttgctatggccgttcttgcgctcaggcttggtttcgtggctccgcctcatcctaggaccagcagcggcaggttcgccttctcccccccgtcctcccgcgccgtcgccaacgcgggggtagctgcaggaccctcgcgcccgatcaccgtcgacggggacccgcccaccgtcgtctccgcgcccggccgccgcattgtcgccattggcgatgcccacggtgacctctcccagacgagagccgcgctggtgctcgccggcgtcctgagcacggaatcagagggccacgtgtggacaggcggacgcacgatacttgttcaagttggtgacatccttgatcgtggtgaagatgaaattgccatactctcactgttgagctcactcaacatgcaagccaaatctcaaggcggtgctgtattccaggttaacggaaaccacgaaactatgaatgtggaaggtgatttccggtactgtgatccgggaggctttgatgagtgcatgcgcttccttgactacttggatgaatgtgatggcaactgggataacgcatttctcaactgggtaaatgtctgtgaaagacggaagaaagagtatgtagctttgcctaatggtgactggggtccttggaatttcgtcaagaagcagaaaggctttgctgcaagatcatctcttctcaagcgaggtggtccgctagctcatgaattggctcggcatcctgttgtcctcaagatcaatgactggattttttgtcatggtggccttcttcctcaccatgttgaatatgggattgagcgtatgaacagggaggtatcaatgtggatgaaatgttcaggcgaagacagtggtgacgagacagacatccccttcatagctactagaggttatgacagcgtcgtgtggagtcgaatgtactcgcaagaccctgccgaaagaacacgacgcgctttgatgctatcttctattgctgctgaacaaacgctagaagctgtaggagccaaagggatggttgtagggcacacaccacagacgcatggggtgacctgtaaatgtgatggcaaagtctggtgcgtggatgtgggcatgtcctgtggtgttctttgctcaaggccagaggtcctagaaatagtcaatgacagaccaagggttttgaaggagcggagagaattatatgatgagatggaagtgttggactatttgtaaaaccttgagaaacttatgtacataatagaaaacattaattgtcctgagaatcatcgtttcagacaatttgagtgggaatactgtacgcaacatgctacagagagagagatataatcagaaggaaggttttttcactatggttaccgtttgtctgaaaccagatgcaaacatagatcaaaagcccaaaggcgctttatttgccatggtagaccaaagttttagtggtgcttatttgtatcagcattcaaacattgactctagccttattaagagctgtgggcatcaggaaccgtgcaagttgtagaatgagatggagaacaaatgaatatgctgagctctcatgtaaattaggtatcttcctttc

SEQ ID NO: 16452 - DNA, 1138 bp, Zea Mays
cattgtttcagacggatcctctgtgattgaattcaaaaggagaataatttttttgagagaaattgacaaaattaaaaaggataagattaccaagctcgttgttcttcccctttaccctcagtactccatatcaacaagtgggtcaagcattcgtgttctccaagacattgtcaaggaagattcatatttttctggtttgccaatttccattattgaatcatggtaccaacgagatggctatgtgaaatcaatgtctgacctaattgaaaaggagctctccgccttctccaatcctgaagaggttatgatattcttcagtgcacatggtgtgccacttacctatgttgaggatgctggagatccttacagagatcagatggaggattgtattgctttgatcatgggggagttaagatcaagaggaatcttaaatagtcacactttggcgtaccagagtcgggtggggccagttcaatggctgaagccatatactgatgaagttttagtagaacttggtcaaaagggtgtgaagagcctcctggctgttccagtaagctttgtgagtgagcacatcgagacattggaagaaattgacatggagtacaaggagttggctctggaatcaggcatcaagaactggggtcgggttcctgctcttggatgcacttcaacattcatctccgaccttgcagatgctgtcgtcgaagccctgccctctgcttcagcgctcgcgaccagaaagcctgacgacatcgattccagcatggacctgacgcattacctcaccaagatgctgtttggctcaatcttggcatttgtcctgctgctatcaccaaggctagtttccgccttccggagcaccatgctttaagtttttctccaaagcactaaatttgagattgagaatgagatatttcattttggacctttttttcctccttaatagaatgatgtgcagttcttctgctcgttccagagaaaaaaataactgctaggaactcacaaggtagtaggggattgcaaaagggatgtgaacagctgttttgatcgaagttgtctataaataccgtgctcacggactctgtattttaatggtttcttgtgctcgactaattttgttgttcttgtccaaggtttt

SEQ ID NO: 16453 - DNA, 1952 bp, Zea Mays
tcgcccaccggcctctttccgtctcggcatcagctcagatccgcgacgcacttcgccaccggccactccagtccccgctcccactcggccacttccccatccccgatggccggcggccgcgcattccggccgtccgccccgcgccgcgcggcgttcgcggctctgctcacgctcctcctcctcgcgggactctctttcctcctctcttccacgcccacctcgtcggcccgttcctcgtccccgccgtccgcgcgcctcgccgccgtccgccgccacgcggccgaccacgcggccgtccttgccgcgtacgccgcgcacgcacggaagctcaaggaggactccgcagcgcagtcgctctcgttctcgtccctctcctccgacctctccgcgctctccgcccgccttgcctcccacctctcctcctcactccccgaggacgcgctcaggcccctcgaaaaggaggcccgcgagcgcatcaagttcgcgcgcggcctcgccgctgacgccaaggagggcttcgacactcagtccaagatccacaagctctccgacaccgtcttcgccgtcggcgagcagctctctcgcgcgcgccgcgcggggcgcatgtcctcccgcatcgctgcggactccacccccaagtcgctccactgcctcgccatgcgcctcctcgaggcccgcctcgccaaccccaccgcattcgcagacgatcccgacccgtcccccgagttcgatgaccccgcgttgtaccattacgccatcttttccgacaacgtgctcgccatctccgtcgtggtggcctcggctgcacgcgccgcggccgacccctcgcgccacgtcttccatgtggtcaccgcgcccatgtacctgcctgcattccgggtctggttcgcgcggcgcccgccgccgcttggcgtgcacgtccagctccttgctcactccgactttccgttcctcaatgccaccaactcgcccgtggtcaggcagatcgacgccggcaacagggacgtcgagttgctggattacctgaggttctacctcccagatatgttcccgtcgctgcggagggtagtgcttttggaggacgatgtggtggtacagaaggatttggcagcgctttggcaggtcgacttggacgggaaggtgaatggcgccgtggagacgtgcttcggggggtttcggaggtacaggaagtatctcaactttacgcagcccattgtgcgggatcgattcaagcccaatgcctgtgcatgggcatatggcgtaaatgtgttcgaccttgagacatggcggcgggatggttgcacagaattgttccatcagtatatggaaatgatgaggatggcgagctgtgggatcctacatccattctaacagctgggctgatgtccttttacggcaataccaagccactggataagtcatggcatgtaatgggtcttggctataatccaagcatcagccctgaggcaatccgtagtgctgcagtggtacactttgatgggaacatgaagccctggcttgatgtcgctatgaaccaatacaaggccctgtggacaaagtatgtggacaccgaaatggagttcctaacacgctgtaactttggcctttgaatagattctagagagcctctaagaaaaccactggctggtgctactttttcttacgggacaagagagcctcaacgctctgcgcaagtggacttatctgtagcagagttgttactctgtagtgaacatctttgtgcttgggcaacaatgctcttgtagatctggtagcttgtttgtgatagtatttgatctgtcagctaaatttgctggattattgtgcacagagaatgagtcattgggaggaaactgtagatgaacattcttgtattgttgaataacaagtgtatctccaattgtatgtataaggaaaagaaaaggttgctgggatcaggttggaattctatt

SEQ ID NO: 16454 - DNA, 3710 bp, Zea Mays
cccacctcactctcacctgtctcgtcgtcatttcctcctaaaatccccaagcctccaatccactgaactaaaccctagacatggcgggtagagactactgccggttgccggtgcgcccgcgcgacttctgaggccccgcccccgtcccggcgtcgccggaactggctccactgtcgcccccatcactgggactgggagagtgggagttcagagccgcagacgctggggcgccgggtcaccggaaggccgggaaggaaggtgtggccgcaagacgcaggcaggaggcatcgactcgactcaccatgtctcagtcaccgggaggacgggaaggcatatattacagcaggcagaggaaacctgagcgcaatggcagtgtatttacacctatagctgcaatgtattccagtggtcatgcactccctgttgcaaataggagccacggtttggtatttggcagtctgagcaaggactgggacgacattcgccagcgcaaggatcagttggtcaacttccttgctagtcttgaacgagcctctggagattctgcggcagctggcaaaatcgaagatagcaaattggccagtcctgtggagccaactgaacaaaaagagaaggctgccataatcgttcttgattcagacgatgaggacggaaatggttcaggaaacagtaagttggcatctgagactaacaaagaactcggaacatctggattgattaataatatcgcagaaaggatgacgtttaatgggagccaagcatttggaaccgtgcatacttatggagataagaacacacagattgttccgtatggtcaatgttctgctttagtgaatcagtttcctttgcaaaccagttggcaaccatctattcagtttgagagagtcgtgctgcagaaaaggcctgaggagcagcgaatgcaagatcttgtggctgctagcatagccgagaagagagcagaaacacaagtgttcctttcacttcccacagagaaaaagcgaaggagatcagaccccagtctgcatgccagtgacgatactgctactgtccctaaacaaagaaaaagtaaaggtgccacagttgtagcagcagctaatttgtcattggtttcacaacaaactgctacatcaccagaacctgacatggttatagaggaagaggagaaacataaaaatgaaagtgatggtcttgacgattattggaaagattttgcattggctgttgaaagcacaaagcttgacgaagttgatgaggcggcaattgaaaaggaagataatggaaagatggaggacatcgattgcaatcatgacatccggattcatgaagatttgggtcatgtatgccgtgtgtgtggtatgattgtgagaagagctgattcaataattgattatcagtggaaaaaggcttcaaggagaagaacgaatggctatggaggacattcaaaagatgctgatgagatagattgtggtactgttaaactgtctgaagatttcatagtcgcagatattgctattcatcctagacatgctcggataatgaaaccacatcagttggaaggtttcaactttttggttaagaatttgattggagacaagcctggaggttgcattctagctcatgccccaggtacagggaaaacatttatgcttataagcttcattcagagcttcatggcaaggtatccatctgcaaggcctcttgttgtgctgcccaaagggattctaggtatatggaagacagaaattaaacgatggcaagtgcaggatataccagtgtacgatttttactctgtcaaggctgaaaaaagagtagaacagttgcaaatcctcaaatcttgggaagacaagatgagtatactatttcttggatacaagcagttctccacaatcgtcactgatgatgggggcagcaatgtcacagctgcatgtcgagacaggctgcttaaggttcccaaccttctgatacttgacgaaggacatacacctagaaatcgggagactaatgtactcgaatcactaaatagagtggaaacaccacgcaaagtggttctttcgggtacacttttccagaatcatgttgaagaagtgtttaatatcttgaatctcgttcgcccaaagtttctcaggatggaatcatcccgtcctactgccagacgtataatgagtcaagttgaaatagttggtagaagttcgaaagggcttgctgatggcgcattcactaaggcagttgaagaaaccttattgaatgatgagaacttcaagagaaaagctcatgttattagaggtcttagagaactaacaaaggatgttcttcactattataagggtgatatcttagatgaactacctggcttagtagacttcagtgtgtttttgaagctcacacccaaacagaaagacattatttataagttggaagcacatgatcggttcaaaagaaatgcagtagggagtgcactgtacattcatccatgtctttcagaactttcagaggttaatgctgagcatagggctaacacctttagagatgatttagttgatagtctggtagattctatcactgtgagagatggcgtgaaggccaattttttcatgaatatcctgtcacttgctaattctgcaggagagaaagtgctagctttcagtcaatatatatctcccatgattttctttgaaaggctgctggtgaagaagaaaggctggcatgtggggaaagagatctttatgatctctggtgatactagccaagaagacagagaattggcaacggaccattttaacaactctgctgacgcaaaaattatgtttggttctatcaaggcatgtggggagggtatctccctcgttggtgcgtcgagagttgtcattctggacgtacacctgaacccatctgtcacccgtcaagcgattgggcgtgcattcaggcccggacagcagaagaaggtgtttgtgtacaggcttgtagctgccgattctgacgaggtaaaggtccatgagacagcattcaagaaagaagtcataccgaagctgtggttcgaatggagcgagcactgtactacggaagacttcaaacttggtcaaattgatattgatgactctggtgacgaactgttggatactaaagcaatccgcaaggatatcaaagcgctgtatagaaggtaacaagctttgtggccactggacaccatgtacatattgcagtgctgaccgtcgagctgatccttaaactgaagaaagaggtgacgggtgttgcggtggctacattgcgcggtcattcccagctatatccgtggaatggcggcttcttttgttcgtagtatgtgccaacttggggcagcagtcagctgatccccagacacatttctagactcttttttaggctcaagtttctgagaattaacctgctatggcgtttagccttaagtaaatatttcgttcgcaacaataataacccagtaaacctaatttgttcttgtgcgtttgtggtggtggttcttgaaatttacctggcgccttcttcctgggctagatgctatgcaggtgtcacaggttggtttgttggcatgtagaatcgggaaatgctaatctcgaaagctcgtagtttccttttcccccccgggtgacatgtttattcacctcttactagttaccacgtccatttccaactataagatatgatactttggcttttgaagatacattacttttatt

SEQ ID NO: 16455 - DNA, 1800 bp, Zea Mays
ggctcttccgatgattcagccatcacaatggcatcctcctcttccttggcctccgccaaagccctagcacgctcccacgcgtccctcctcgcgccccaaacccagagaacaggtacccggtgtctcgctttctttctcgcaggattctctcgcccggtccctcagtccggtccgtgtctcgcggctccgtgcgaccgtgccgggcaattcaagctgctccccttcgacgatccgtcttccgccgtcactctgccgatggcttctgcacttcagcgcctgtatgtatctactgaatatgagcttggactttgattctcgtgccgtgatgcagtggtcgcgccagcgccgtcgcgctcgcgccgcgcctccgtcaggatgcgcgcctctgctgccgcgccggcggagccgaagaagaccgtctgggtgtggaccgagagccggcaggtgatgacggcggccgtggagagggggtggagcactttcctcttcggatccaaagacctcggcaaggactggtcatgtcagagctcacaacagtgcttcccttcattcgctgttccagcatctagatagatgtcgagatagcctggatccctggttcaaactgttgcgatttacaaatcccaaaagcaaactcagactctgctgatttcatgactcattggtgttctcatttgatttttcagcaaccgctcgcataaatgctctcttcattgacggtccagggattttcgatgaggagaaccagaaggttgctgtaatttcacaagtctcttcgcccggtgaacttgaccttgtacaaccggacaacgccgaagccgagaacattgtcatagactttcgaggtggctggcaggttatacgggcagaaaatatagttgctgcattccaaggatgtaaaggaaatgtattggctgtatcaacgaacacaactgaggcgcaagtttttcttgaggccttggagcaagggcttgatggagttgtacttaaagtagatgacatggatgatatcattaagctcaaggattattttgatcgaaggaacgaggcaaagagtcaattaccattgacaaaggctactgtaacaaaggtcgaggttgttggtatgggtgatcgtgtttgtgtggatctttgcagtatcatgcgacctggcgaaggccttctggttggatcgtatgccagaggaatgtttcttgttcattctgaatgcttggagactaattacattgcaagcaggcctttcagagtcaatgcggggcctgtacatgcatatgtcaccgttcctggtggcaagacaagctacctctcagagttggggtcaggaaaggaagtcatcgtgatcaatcagagtgggctatggcgtactgcaattgtcggtcgtgtgaagatcgaatcaaggcctctgatccttgtagaagcgaaggataactctggagacgagacgtatagcatttttctacaaaacgcagaaacagttgcacttattacccctaacacaggatcaagtggaaggaccgccattcccgtgacttcgctgaaagtcggtgatgaagttctggtgaggaaacagggcgccgcccgtcacactgggatagagattcaggagtttattgttgagagatgaaaatggaaacgctgaatgcaccagtttcacgtcgttttgaacaaaaaaatgatgtatgattgcaacattcatctgttctgttggttaagattgtgagattccattgcagcatacaattgtgagattccattgcaacgtacaataatagatcaagacattgatgccaaaaaaaaaaa

SEQ ID NO: 16456 - DNA, 1785 bp, Zea Mays
ctctctcttcgcctagcgtgtatgtagccaagctacgctagcgtctgaagcggtggaaggaaagacgaacgaagctacagctgccgaggtccccgttcccgcccaccgaggcgtcgcgcatgcggccacccgcacccaggcactggcccgggggagcgaggcgtggaggcggagcaatggcgggcggtctggaccgatccgtgcaactgtaggcgcggcgcggggggtgttggctggtgcgtgatgggatctgggagcagcaaggcaaccacctcctccacgtcgcccacggcggcggaggcgggcggcgagggtaagaggccaaatggtagcgagaaggcgaggagggggaggagcctgctgccgctgccgagttcctcctgcttccgtggctccacgacgccttgcgattgcgacgtttccgcagtggcggtggacgtcgagtgtaacaagggaggggagactgcaagcctaccttcactcactcacactacaaaatctgatgaagatgttcttgcaacgcctaagtctcatcccggtgaagagataacactaccttcatcagatagggaaagagatcaagatgatggcgtgctacagaatgctgctgccactaacactttaacagcagccagtcaattgacagatccttctgggaggtcaaggccacgttttggtgtcaactttgggttgagtagagctgtcagcttgggatcatcagtagcctgctctattctgtcatctggcctcccgacttctgctaacccaggtgaaggtcggggtgatgtggatgactcttctgatacagtcatctcccagcagggtagtgcaccaactgctgggattgattcgactctagacatgcttagagatagtgtcacggcacaagctagagcagctcgtcaggctagaagaaatctgcaagaatctgaagatgctatcttgaggaactcctacagaaggatgggatctcaggaaccttttgaaggcagtgttcggtttagccgaacattaagtgttgggcggcttcgggacagagtcctcaaacggcctccattctcagatgggttattcacccctgcccttctttacgatagggcggtatggttgtctggaaatgctagtgctaggcaagattcagcagtaatgcaaaggactaattcagacaggagttcagaatcgcgctctgatccttcaaccaatggtctgtacaacttgagctctgagaggcaggccagtaatagtgacctactggagcgtagatcagtttttcttgagaggaggcggaggatacggtctcaggtcagagctctgcaaaggttgggcagcaggtttgaaaatttatctggtcatgagaggtcctgcatactatctggtcagcatagaacaggaacttgcaactgcagaacaggtagtcgacaaggcaatcctgatgaagaaactagcacaagggctagcatatcaagaattgttatgttagcagaagcactatttgaggttctggatgaaattcaccaccaatctgctgcgttatcgtcatcaagaccagcgttttcttcaattggatctgttcctgctccaagggagattgttgagcgtcttcctgcaaaagtgtataggagaccattgaaataccacagtgaggaagctgcacaatgctatatttgccttgttgaatatgaagagggagattgtcttcgtatacttccatgccatcatgaatttcatctaacatgtgtagataaatggttaaaggagattcacaggttggtggtactagactgc

SEQ ID NO: 16457 - DNA, 1904 bp, Zea Mays
ggaaaaaattgctgcgtgcgccccgccgcctacacacgcctagcccgctccccaagaaagagcccccgcacacaggctgggaggggagcgaaagcgaaacgtattaaactcgcgtacatcatcaaccgcatgcgctgatgcgcactgccactgccccggagaaattcaaatcccaagccccacaagcaaattaccccagcatcaaatcagcggccggccggccggcagctctcggtcgatccactgcggtttccagtcccgaataatcccaattcccaatcgattcgaagcttccttccttcgaggagagggggaggtggaaggcgcgggggaagctctgcttagggttcggaggtggccggcgccgccgcggggcggggacggcagggggatggatccggagcagacgttcctgcgggtgcacgcgcgcttatcggggacgctttcccagctgctcacgccgcggatccgcctcgtcctcgagtacctctacctcgccggcgccgtcgcgctcttctgcctgctcgtcgtcatgcacacgaacttcgtgcagcagcctggttgctcaagtgaattttctggaattgaatttggagaagcacaacttgtccaaatcaagattatcagtgggggattatggtccagcagaggtgcttcttacatcatggatctccagaacctgggacgttcagctgagaaaattttagaggttaatggtgataagttcaacattttggcatctaaattttggtcaacctgggttggccctggagctaggaggagcttaccagatttgaaggcagccggagagggttctgtacaccaccctttatctgctaaggagtcatttaaagcagcagtgacatttttgttcagaaaatggtaccttcgtgctgtttcattctggaagaacataaagcaactttcagaaaataccctccagttaatggtcagatcaaattggaacgatttcctacatattattaaggatcttcaactaccaagcatggatcatcttatttcgacaatagtgcaatggtttgagaggagaagtaaagcatttgagcctacttatttatatggcgtggaaaagggttatttcttgctttctgaaggtgctaaaactcgtcatggtgtccgaacaatcaatatcacaatttctgctcgaaatccttgctttggaaacaggtggcagcaacttttgataaacagcattgttggatatgatactatacttacaaacagcttggtgaattctcctggtcatggctatttatacaactttcagacgaaggagctctatgatcttagttatgggcatgaaccaccagaaggtcctacaagatttggagattactttgtgacaaaatgtggtgtccttctaatgtcactctttgtctttttcacaaccaccatgtctgtttcatttactttgagagaaacacaatcccgcatgcttagattcacagtgcagcttcaacaccatgcacgccaccacctgccaacctttcagttgatattcgtgcatgtcatcgaatcattggtttttgtgccgattatgattgggattctcttttttctatttgagttctatgatgatcaattgcttgcgtttcttgttttgactcttgtatggttatgcgagctattcacgatgatcagtgtgcggacatccatatcgatgcagttctttccacgcttcttcttgctgtattttttggttttccatatctacttcttctcatatacctatggcttctcatatctggctttctctgctacggcagcattcatgcagcacctgattttatatttttggaaccgttttgagtgaccttataggtctgggcacgggaatttttaaggagtgaaaaaggtttggtgcgcagaaaacaaaaaggaga

SEQ ID NO: 16458 - DNA, 1688 bp, Zea Mays
taaatatataaattttaaaactgattcaataaagttcaaaatgagagatttaacgacttttcgccatcagttattagagcgcacgtgcagatccacccgggcgtggcttacccagcaatggcgaccatcggccttgtcccctcgacagtcgtcgcatccaccgccattcgcgccccggcccccgcagcgctgacccgtgccagcaaccgccagcccccgcacgcccgccgcctgctggacctcggccgccgcgcgccggcgatggacgccctccgcgtgtcgggtgccgccgagcccctcctccgccccgccgccgccggggggcaccccaggctccgcgtgcggacccgtgcgcagcagggcgatggcggcgccgcggcggagggggacgccgcgttctcgtgggcgcccgtcgtcctcccgtttttattccctgcattgggtggtctccttttcggctatgatattggcgcaacctctggagcaaccatctctgtgcaatctcctgatctcagtggcactgattggttcagcttgtcatctttgcaactagggcttgtggccagtggttcactttatggtgctcttggcggctctcttcttgcataccgcattgcagattttctaggaaggaggatagaattggtcacagcagctgcattatatatccttggtgctttagtcactggatttgcccctaattttgtagcactaatcataggtcgtgtcctgtatgggattggtattggtttggcaatgcatggtgcccctctttatattgcggagacttctccttcacaaatacgtggaacattgatatctttgaaggagctgtttattgtgttagggatactgttaggataccttgtaggaagtcttgaaattgacaatgtaggaggatggcggtacatgtttggttttagtgctccgcttgcagctattatggctattggtatgtggactttaccatcttcaccaagatggctacttctcagggcagttcaaggaaaggcttctttggaggataataaaaagaaggcaattcaagcccttagaacattgaggggccgcacagcaagtgaaaaggttttggcagatgatgttgacgatacaattgtctctattaaggctgcctacgcaggacaggaagctgaaggaaacgtttgggatgtatttgaaggagctagcttgaaggccttcactattggcggaggtctggttctgtttcagcagataacaggtcaaccgagtgttctatattatgctgcttcaatacttcagactgctggattctcagctgcatcagatgctgccaaagtagcaatcttgattgggttgttcaagttgctaatgacaggtgttgcggtatttaaagttgacgatgttggaaggcgcccattattgataggaggtgttggtggaattgctttgtcactcttcctactggcagcttactacaagatcctgaacaacttcccctttgttgctgtcggcgcgttacttctatatgtcggtgcttaccaggtctcatttggtccaattagttggctaatggtatctgagatctttccactccggacaagagggcgtgggatcagcctcgcagtactaacaaatttcggctcgaacgctctggtgacatttgcgttttcacccttgaagctatattcttgtggttttgttttgtc

SEQ ID NO: 16459 - DNA, 840 bp, Zea Mays
cggaatgccaatatggcaataccgagcagaagataagaacaaggcgtccaaggggtgcctcataaccgcgcttgacaagatggccgatgctgcaagccttccatattacagtgctgtgaaagaggtggatgctgtcgtggaagagtcgatcaagacagcgggcgtcgaagaaggaaaggcagtggatgaagcggagttcaagaagtcgctcacagaaatccttagggctatcatgctgaggctgaacgacagccccgtcttcgtctctaccgacgtcgtcgtgcacgagcctttgtccgggacatcatcgtcggtgaactgaagggaaacgtacgacggaaacgtactgggaaaacggaacgggccagggtcattactgttggtatttgagcagtgcctgcgtagttgctttttgtctgatctcgcacagggactgcttttttgactgatctcacactgtgctctgctagcttgtcgcaagtttgcaacatgacaagatgtcaagatgaaggccatcatctggttttgttaacccgattgacatataagtttggaataaggcgttcaagccatacataattacatatcatcgacggcaacctaatagctattctaaattttgttttgctggagctcggagaaatatgttactcgatgcatgcaaaatacacagtcattcaatcagatgttatacactcgagcctaaaggtaaccaagtgaaagtttgcaggatatcctacacaacagtgggcatactatcaagggcctcaaatatgttacattgtagtagactgttttataatctagaattaggattttattattgaagcggtatatttt

SEQ ID NO: 16460 - DNA, 2169 bp, Zea Mays
gcatctccggcaaagagtagcgagagggcttcttcttcctccaagcccccactccccgaccgttcaatacacgggaagcacaagcacatgcaggggaaggaggctaagaatggcaggcgcctttctaataataaagcgagtgccactcccaaaataaaactcactcctgtctaaccctgccagcggtccggggcctcctcccctattcggacaggaaaggggcagatgacgatccatagaaaccgattcatggattgcagacacccacaggaatcatccatcattcggagctaatcattcatcgggcctttcggctctttctgctcgcgcacaatcttggctagctcgtcctttccggcgacacccgcgctacgttcgaggccgcgaaagctgccgcacactttacagatcgctcgatgaacgccggtgcgcagcttgagcggcggagctcggtgcggcggtcgcagagcatggtgcaggaggaggacaggggccagccgcccgacgaggagctcatgtcccggagccagggctccagcacggagccgtcgggcggggcgctcaggaccggcggcgccgtgcccgacaaggacagcgcgacgcccaagccgcgcctcgccgaacagagcgcgggaccttccgagatggacctgatgaaggagaagttcgccaagctgctgctcggggaggacatgtccgggtccgggaaaggggtgccctcggcgctcgccctctccaacgccgtcaccaacctcgcagcttctgtgttcggcgagcaacggaagctggagcccatggccccggacagaaaggggaggtggaagagagaagtgggctggcttctgtccgtcgctgaccacatcgtcgagttcgtcgccaagaaacaagtcctggacaacggcaccgaaatggaggtgatgggcacgcagcagagacgggatctccaggccaacattccagcattgcgtaaactggacacgatgcttctcgactacctggataacttcaaggaacgcaacgagttctggtacgtgaagcgcgactcgtgctcagagagcgagaacgaggagaggtccgacgagaaatggtggatcccgatcgtcaaggtgccccccggcgggctttccaagacctctagaggctggctcctgcaccagaaggagctggtgaaccaggtgctcaaggcggccatggccatcaatgccaactgcctcatggagatgagcatcccggacacgtatatagacacgctccctaagaacgggagagccagcctcggggacgcgctgtaccgaatcatcacagatgtggagttcgacccggacgacttcctgtcgacggtggacctgacgtcggagcacaagatcctggacctcaaggaccggatcgaggcatcggtcatcatctggaacaggaaggtgcacaacaaggacggcaagtcctcttggggctccgccgtcagccaggagaagagggagcagttcgaggagcgggcgcagacactgctgctcatcatcaagcacaggttccccggaatcccccagtccacgctcgacatcgcaaagatccaagagaacagggacgtcgggtttgcgctgcttgagagctactccagggtcctggagagcctggcgttcaacgtcatgtcccggatagaggacgtcatccaggccgacaacctggctagggagaaggccaagaagaacgcgccgcccgcagcagaccccgccgccggacgccgcggcccgcaggaggccggtggcgacgacgacgaccagagcaagacgaccctgctggacttcatggggtggactggggactccgagggcaagaacgacgacgcatctcccccgccgccacccgagctgccggcgcaggacgacggcaggctgatgaagctgccaaacatcatgaccaacctcaagcagacgtacatggataagctggacttcctcagcgggaacagaagcccctcaggtcgccattagagacgcgacacgacacgagatttttgcatgtatcgtgtgaggtagtgtacatatatatttttggattgtgtcaaactgggctctctcttgagtagcccgtgccgtgtcacttcctgattttgcagacacgtgacattctcttctcatgtacgagtacgattccaagggattggccattgta

SEQ ID NO: 16461 - DNA, 1578 bp, Zea Mays
tagggaactgggacagtagcgtttgcttaaaaagatcttgggagttgagaagactgcttcacaacaagaaataaagaaggcatatcacaaattggctctgcgcctccatccagataagaatcctggggatgaggaagccaaagagaagtttcagcagctgcagaaggttatatccattcttggagatgcagagaaaagagctttatatgatgagactggcattactgatgatgatgcactggtgggagaagctgcaaatgatcttcaggagtacttcagaacaatgtacaagaaggtcactgaggctgacattgaagaatttgaagctaaatacagagggtcagattctgagaaaacggacttgaaggaactctacacaaaatataagggcaacatgaacaggcttttctgcacaatgatttgctcagaaccaaagcttgattcccaccgcttcaaggatataatcgatggggcgattgctgaaggtgagctgaagtcaactaaggcgtatgagaaatggtctaaaaagatttcggagatggagccaccaacaaatccattagagaggagagcgaagagtaggaagaaaagtgaggagaacgatctgatcctggccatctcacagcgcagggctgagcggaaaaaccagttcaactccatcctctcgaacatcatgtccaagtgtgattccaaggcaagcagttctgagcccacagaagaggagtttgagctggcgcgacagaggctggagagcaaaatggccaagaggcgcaaatgatgcctgctgccagccttctttccctatgcgtctatgccgaacatcgtcttaagctttgggtgtgatctgattttaccagcacgcaagtgatggttgtgagagctagcttgagcgtgtcaggatctgtatcatatctcgtgtcctctgggacagtaggtcgtgtggttatcgccttgccgagagggaagctttctctgaacttcaataccatggatacgtgggtaatggctatgcagttgtagtttagtgtgtgtgtggttatatatataatgtaatcgtgccagcagctatccgattatgttctttgaagaaagctgtagtgccctccaggcctcgaggatgcaagtgttgaagggcggacaacaggcgggctgtggcttataatccagtcctcacgaggtgtaattgccattaatgtcgaggtttacaacagcatcaagtcctgcaagtaccgatgcaaataccatcaccatgtttatcatttacaagtgtaagagctttccatttgaataacgctctagagtcagagactcgccgctgttggctttttgactagagcaaaaacggtgctcaaggcaatggccatcgttgctgctgaaatcgcagaaagtgaagctggcatatgattagagatgtcaatgggaaattttccaccctttatagtatcctatcatgtttgatctatctcaatatctatcatggttgtaaaactcattccatacctcgtctgggttttggatttctgttgtagacttgttctcaaatattatgagttaaaaacaaggcaacataaacgttaa

SEQ ID NO: 16462 - DNA, 1291 bp, Zea Mays
gacccttcgtcccgcatcgtttcctcctcctttttccccgttcgtcccctggattggcgtctacccggcgcgacccggaccgaatcctaagtccgcctgccgccgccgccgccggctcccgttggaaacgcgtctcatggacagagcagttcttcacgccggtcacaagagtctcctgcggccgcggcagcgaagcaagctgcagagtgggaggatgttcggtgctcggtctgcatggaccacccgcacaacgctgtcctgctggtctgctcgtcgcacgagaagggctgccgccccttcatgtgcgacaccagctcgcggcactccaattgctatgaccagtaccggaaggcctccaaggactcctccaaggattcagggacagagtgcagcgagtgccagcagcaggtccagctctcgtgcccgctgtgccgtgggccagtcagcgactgcatcaaggactacgacgcacggaggtacatgaacaccaaggtccggtcctgcaccatggagtcgtgcgagttcaggggtgcctaccaggagctgaggaagcatgctagggtggagcacccagcggcgaggccgatggaggtagaccctgaacggcagcgggattggcgccggatggagcagcagcgggaccttggagacttgatgagcatgctgcgttcagggttcaacgccaacgttgaggacaacagcggcgaacttggagccaccgaagaaggggaagaggaagccgcaaggactccggcctccataacaatggtcttcatcatgccgtctagaggctcaatcatgcagtacttaacagaacgtagcagggcgatcattctggtcagccggaggcgagcaagcagtggcagtggtgatgctgaggccacagcaccagacagcgaggaaggtgatgaccctatgttgccatcggcagaggcgtctgctggttcgcagcgttcttccgaagaagaggctgacggtgaccacgcccaatgacagaagtcagctagcaggaggtgtgccatggcccatggcatcttcttggcctgaagatcccgacctgcttggtatgtgatgctgtatgctgggaagaaaacatggatgcaggtgccatcaagcaatggaaaggaaaaaaaaacaattgagtggttgcatctatcttgtctgaatggatttctttttccatgcgttgtaattctctctcatatattatcatatgaaatagattcggccgtatttgcactgcataatataatctttatatggcggctaggagtgaccgtactgatgctga

SEQ ID NO: 16463 - DNA, 1142 bp, Zea Mays
tcagagtggcctaggcgctagccgataagccccgcccaccgcgcgcgcgccgcggcaccataccgggatgggcgccatgggcatcgtcgtcagagcatgcgcgcctcccgctcccgccgccgcggccgcgccggcaccctccggctccagggacgccggtcaggcccagcggaggagcaagccctcgaggaccggccgtgtgcgcgtgctcggcggcactggccgtgtcggaggatccacggccaccgcactctccaaactctgccccaagctcggcatcctcgtcggtggcaggaaccgggagaaaggcgagtccattgcagccaagcttgggggccagcctgagttcgtccaggtcgacacccgcaacgcaggcatgttggaggaagcgctgcaggtggtagctgttcgcggagttgccaaaccggaggcagctgcgacgccggcgaggcgctcgcgccccatccctctggcttccgtggccgtgtggagtctggttgccactggcgccgcaaatgctgccgagctatgggaccccttggccctgcacggatcatcaggactcgtcttggctgaccttggtattggagattggtttgggggtttgctgttttcagctgggcagcaggctaatgaggctgtccaagatcagttgtctgctcttagtttctctagcctagcagttatttttggtgctggacttgtaactagtttatctccttgtacactaagtgttctaccactaactctaggatatataggtgcatttggctcagggaaaggccgatccgaggttgttgggaattcaattgcattttcactaggactagcaacaaccttagccattcttggtgttgctgcttcttttgctggaaaggcttatggtcaggtaggacaagggctcccagtggctgcttccggtttggccattatcatgggattgaaccttctggaggtacttgaattgcaacttccctcatttttcagcgattttgaccctcgagctgctgcagctaacctcccttcaggtgtacaagcataccttgctggtcttacatttgcattggcagcatcaccttgcagcacacctgttcttgctacccttctgggatatgtcgccacttcaagacttcttatttcag

SEQ ID NO: 16464 - DNA, 1853 bp, Zea Mays
gctaggtctttctaaggtccactgacaaaaccctggctcgttccccgctctacgggcctaaacctcacctcgccggcggccaaaaatcgaagcaccgaaccagcggctgcggcggcggcggtgcggcaagtgttgaccatggcggagctaaagcggttgtcggagagccgtgacctgacgcggattgagcgcatcggcgcgcactcccacatccgggggctagggttggactcgtccatggaggcgcgcgatacctcggagggcatggtcgggcagctccacgcgcgccgcgcctcggggctcatactccagctcatccgccagggcaagatcgccggccgcgctgtgctccttgcgggccagcccggcactggcaagaccgcgctcgccatgggtatcgccaagtcgcttggtgcggagacgcccttcgcctccgtcgctgcctcggagctcttctcgctcgacctctccaagacggaggcgctgacgcaggccttccgccgcgccataggcgtccgcatcaaggaggaggccgagatcattgagggcgaggtcgtggagatctcaatcgaccgccctttgtcggcctctggcgttggcggcagctcagttgctccttctggtgcaactgccgctggtaagtcaggggcggctcacgctgaagaccacggacatggagactgtgtacgagctcgggggaaagatgattgaggctcttgtgaaggagaaggtgcagagtggagatgtaattgcgcttgacatggcctccgggaaggtcaccaagcttggccgctccattgggaggtcgcgggattatgatgccgtaggtccacacaccaagtttgtcaagtgtcctgatggtgagctccagaagcgcaaggaggtcgtgcactgtgttaccttacatgagattgatgtcatcaatagcaggacacagggttttcttgcactgttcactggtgacactggtgaaattcgtgcagaggttcgggagcagattgacacaaaagttgcagagtggagagaggaaggaaaagctgatattgtccctggtgttctgttcatcgatgaagtccacatgctagacatcgagtgcttctccttcctgaaccgcgcgttggaaaacgacatggcgccgatcttagtaatcgcaacgaaccgagggatcacgtctatccgcgggacaaactaccgctcgccgcatgggatcccgccagacttccttgaccggctactgattatcacgacgcatccctacacggaggatgagatccggaagatcctggatatccggtgcgacgaggaagacgtggagatgtccgcggacgccaaggttctgctcaccaagatcggaagaccaacggccgcacgatcctgtgactgtgaggttttctcccccccttttttctctctctgtaatgcctcggcttgcctgcccattctttcagtcgcagctgtgcttttggtggagctagtagaagaagctcggtcggtaacatgcggacctgtacatagctagctcgatgcatctcatcccggttctggaaaaaaaaaactccgcccccgaattgaagctgttattattatagccacaattcgatcccggcaggatggaacctgacctccgatgccccgtcgctttcagatccggtgaggcaacagggttagtagccgtcgtcgtgtgcggtggtaactcggtactgctttcggaaagatccgagattaggacagcgatggaaaggcgttttcactgttactgtcgatgccgctgctaggtcggcacgggttactttactttacctaacctgccgccggtctgcaagcttcatcgggagtactttggagaagctata

SEQ ID NO: 16465 - DNA, 1125 bp, Zea Mays
actgtgcgaccaaacacttgagacaaatctctgcatgacattcattgacaagtttcggtacaatgcaaagagagcatcacttgttcaatcaagaatcaaggcattggagcgaatggaacatgttgatgcagttgtcagcgatccagactataaatttgaatttccaaccccagatgaccgccctgggccaccaatcatcagcttcagtgatgcctcatttggttaccctggagggcctaccttgtttaaaaatttgaattttggtatcgacctggacagccgcatagcaatggttggtcctaatggcattggcaagtccactatactgaaactaatttctggggatctgcagccaacttctggaacagtatttcgctctcccaaggttcgcatggctgtattcaatcagcatcatgttgatggccttgatttgacggtgaatccccttttgtacatgatgaagtgctatccgggtgtgccggagcagaagttgagggcacatctgggttcgtttggtgtttcgggaagccttgccctccaatctatgtacactttatcaggtggtcagaagagtagggttgcattcgcgaaaataaccttcaagaagccgcacatcattctccttgacgagccttctaaccatcttgatctggacgctgttgaggcgctcatccagggtttactcatttttcagggaggggtgctgatggtgagtcacgatgagcatcttatcactggaagcgtggacgagctttgggtggtgtcggaaggcagggtgaccccgttctcgggcactttcaaggactacaagaagatgctcaagtaacaaaaacatgtattatcgaccatagcctatatatctatatgcttgctattatgttgtattaccgtataaattttgggagtaaagcatcgaaattattataacacatacctaatgccgaaaggagaagatttctcacatttttagttcgacccatccgtccatcccataggatcctatttcgttcagcttttttctaattagattttatgagaatttgaatatcgcggagattacacgtggaggaaaataacgatgtccatagggtttaagatctagaaaatgatggatttctattcgac

SEQ ID NO: 16466 - DNA, 2503 bp, Zea Mays
gaccgccttatcgtcaccatcttcttcggtccggtcccagccaaaccttcctcttcttcggtctcctcgtcgccatctcgtttgtggccgccaccgcgccccatccctaccctacccgggacatacatttgctatttaaaagcctagcgacagagccgagtgtgcctctgcttcctcctccctccccccctcgtctgccctcgagatcccacaccgcgcgcgtgccacgttgtcttcgtcctctgcgcgccttcggtcaccccgccgcctgtactgtacatgcggtagtacggcgcaggaacaagaaggatttgccagcatgagcggggagctgcaggtgcatgcatctatcgttgggttcttggcttggttggggggtgaactgagtctggatgcgccgaacgggatgttgggggaggcgagagtgagagcacggtcgctcgcttgaggtgcggcgccgtctgccgtgcggtgtcgtggcggtctagtagaggaagctaggaagaggatgatgggagctctgcagctgcagagcaatggcgacggcgctgctgagggactcttaccggacccgggctacgtcgaggttgatcctaccgggaggtatggcaggtacaacgagattctcggcaaggggtcctcaaagactgtgtaccgggccttcgacgagcaccggggcatggaggtggcgtggaaccaggtgcagctgcacgacttcctgcgcggcccggcggagctggagcgcctctacggcgagatccacctgctcaagtccctccgccaccgcgccgtcatgcggctccacgcgtcctgggccgacgccgccgcgccccgcctcgccgtcaacttcgtcaccgagctcttcacctccggcacgctgcgccagtaccgcctccggcacccgcgggccggcgccgccgcggtccggcgctggtgccggcagatcctcgacggcctcgcctacctccacgcgcgcggcgtcatccaccgcgacctcaagtgcgacaacatcttcgtcaacggcagccagggccaggtcaagatcggcgacttcggcctcgccaccgtggcccgccgccgcggctcgccgcacgcggcgcgctgcgtcgtgggcacgccggagttcatggcgcccgaggtgtacgcggagggctacgacgagcgcgccgacgtctactcgttcggcatgtgcgtcctcgagatggtcacgctcgagtacccctacagcgagtgcgtgcaccccgtgcacatctacaagaaagtcacctccgggataaagccggcggctctgtacaaggtgaaagaccccgcggtgaggcggttcatcgacaggtgcctggcgccggcgtcgcggcggccgagcgcggccgagctgctcagcgacccgttcctgcagctggaagacggctgcggcctcggctacggagacgacgcggactacagcgccatgtacaactacctgcaccagcccgcgtgcctggaccaccaccaccatgccggcagcattggctccacggcgagcaacggggtggtgtccaatggcggcggcggcggcggcggcagatgggacgacgagtccgaggacgaggacgacgatggcagcatgttccaaggcatcgaccagctgttcaacgagcacgaagacgacgagctgcacgttgctggtgtcgacatcaccatcaagggcaagaggatgcaggacggacgcatcttcctccggctgcgtatcgccgacaaagatggcacagggagggtccggaacatctacttccccttcgacgcggacgcggacacggcgctgagcgtggccaccgagatggttgcggagctggacatcaccgaccacgaggtgacccacatcgccgagatgatcgacggcgaggtgggcgcgctgctgccgcactggaggccgggtcctggcatggacgacgacgacggcggcggcgccggtccggacacgtcgggcgctaccgaccgctgcaagaactgccggtccagcgcgtcctccgccgggtcgctggacgactacatgtcggcggcggcggcggcgcggcgcggctgccggtgcgcggagctgcacggccggttcgaggagatcacgttccaggccgacgaagagcaggtgcggttccagggctctgggtgcagctccgacgacggaggcgggcaggctgagcagtgcgccggggacggaggcagtactgtaactgaacgttcagaccagccatgacctggttcctcgcaggagcaactcctgttttaaaaatctgaaaatgtcaccagtgcagccgcacagctgcttgtaagtgaacttttttgtggctctggttgagcatacgatcgttaagacggatatagtttgaagtttcaacaggcaggtgctttccctgatctttgttgttgtttttttttccactctaaaactgttttgtagaactcacacagaatgacagaatagtgtattataaatagataaccaaagacagttggatattcgagatca

SEQ ID NO: 16467 - DNA, 4111 bp, Zea Mays
ataccatacgttggcgtagttttgcagcaactccccgcgtcccaacccagctctgcccctctctctcttaaaccccccaaaaccaaaaattaaaatccgccttctttcttctcccccgactccctcttccggtaagaatccggcccgccgccgccgccgctagcgtcgccgcgctcgctgcttctagggctgcgccttctcgcgcctccggtgccttccctgctccccacgatcccctgcctccacaagcttccttcacctgctcactccaaccgctgccgccatggcggagaagctcagggatctaagccagccggtagacgtgacgctcctcgatgctactgtcgctgccttctacggcaccggatctaaagaggagaggagcgccgctgatcagatactacgtgacctacaaaacaacccagacatgtggctacaagttgtacacattctgcagaattcccagaacctcaacaccaagttctttgcattgcaaatacttgaaagtgttatcaagtacaggtggaatgcattgcccgtcgatcaacgtgatggcataaagaattacatatctgatgttattgtgcagctttccagcaatgaagttacctttcggcaggagaggctttatgtcaataaactcaatattattttggtgcaggtactgaaacatgagtggcctgccagatggtcatccttcatacctgatcttgttgcagctgcaaagagtagtgaaactctatgtgaaaattgcatggctatattgaagcttctaagcgaagaaatttttgacttctcaagaggtgaaatgacacaacaaaagatcaaagaactgaagtcgtcacttaacagtgagttccggctcattcacgagctatgtttatatgtcctatctgcaacgcaaaggccagagctcatccgtgctacattggcgacactccatgctttcttatcatggatccctgttggattcatctttgagtcaccgttgctggagacattactgaagttcttccctatggctgcttatcggaatcttacacttcaatgcctaacagaggttgcagcacttcagtttggtgatttttataatgtgcagtatgtgaagacatatacatttttcattattcagttgcaggctattcttcctcctgaaaaaatcccggacgtatatgctaatggttccactgaagagcaggcgtttatacaaaatcttgcactcttcttcacatcattttttaagaatcacatgcgtatactggaaacaactcaagaaaatattgctgctttgcttatgggtctcgagtaccttattggaatttcatatgttgacgatacagaggtttttaaggtgtccttggattactggaatgtatttgtattagagctatttgaagcacacaatcaaatggaacctgcagtaactgtaagcatgatggggcttcaggcgcagatggttcctggaatggtagatgggggcacagctgttaaacagaggagacagctttactctggcccactctcgaaactacggatgctgatgatttgccgtatggcaaagcctgaggaagtacttattgttgaagacgaaaacggcaatattgtacgcgagacaatgaaagacaacgacgttcttgttcagtacaagatcatgagggaaacactgatctatttatcccatcttgatcacgaggacacagaacaacagatgttgaagaaactaagcaagcaattaaatggagaagactggagttggaataaccttaatactctctgttgggctattggatcaatatcaggttctatggtagaggagcaggagaatagatttctggttatggttattcgtgatttgctaaacctctgtgaaatcacaaagggaaaggacaataaagctgtgattgcaagtaacattatgtatgttgttggtcagtatccaagatttctcagggctcattggaagtttttgaaaactgtggtcaacaaattgtttgagttcatgcatgagatgcatcctggagttcaggatatggcatgtgataccttcctgaaaattgttcaaaaatgcaagcgcaagtttgtgacacaacaggtgggcgagaatgaaccatttgtttctgaacttctgtccaaccttgctacaaccatcgccgatcttgagccacatcagattcatacgttttacgaatcagttggccatatgatccaagctgaatctgacaacactaatagggatgaatacctcaagagattgatgagccttcctaaccagaagtgggcagaaataatcggacaggcaagccaaagtattgatatcctgaagaaccaagatgttatccgatcagttctcaacattctacagacaaacacaagtgttgcgagctcacttgggccacacttcttcccacagatttcactaattttcttggacatgctaacagtctacagaatgtacagcgagcttgtatcaagcacgattgctgaaggaggaccctttgcctcaaggacgtcatttgtaaaactcttgagatctgtcaagagggaaaccctaaagttgatcgagacttttgtggacaaggcggaagatttgccacatataggaaagcagtttgtaccaccaatgatggatcctgttcttggtgattatgctagaaatgtacccgatgcaagggagtctgaagttctgtccttgtttgcaacaatcattaacaagtacaaaggggaaatgcttgaggatgtgcctcgtatatttgaggctgttttccagtgcacccttgagatgattactaagaactttgaagattatcctgagcaccgcctcaaatttttttctttgcttcgtgcaattggcacccattgcttccaagcattaatccagctttcaagtcagcaattgaagcttgtgatcgattcaattaattgggcgttcagacatacagagagaaatattgcagagactggccttagcctgttgttggagatcttgaaaaaattccaggcttcaggattccaaaaccaattctacaaaacctactttttgacaattgagcaagagatttttgcagtcctcacagacacattccacaaacctggtttcaagcttcatgtttcggtgctgcaacacttgttttgtgcggttgatggtctaacggagcctctatgggacgcgtcttctgtaccttaccaatatacggataatgctatgtttgttcgagattacaccataaagctcttagggacatcatttcctaacatgacagtaaccgaggtgacaaagtttgtagatggtcttcttagttcaaaacttgatcttccaagcttcaaaaaccatattagagacttcctggtgcagtccaaggagttctcagttcaggataacaaggatctatacgcggaagaggctgctgcccaaagagagagggagcgccaacgtatgcttgccattccggggctcattgcccctagcgagttgcaagacgagatggtagattcgtagtgttccttgttgattcagctctctaatgtagcttcctgtttgttggtccggcatcggaatacctctggagccctcgacgtccaagttttcttccagggtggtgaaagaaggtgcctgctgtaattttatttttggttacctccacatgatgctgattccaagatttgtggtagtagacagtcagttttgccgcatgactgctgctgggggtctctcagcagctgtggttgcctggatgtgttagcagcggctcttgtgctcggtgtactttgctaacattgatttgctgtctcatcaacaagggtaggtttggcttggctgtgtatggagaaaaaactatgttcttttgttagcactctggtgcggagattacatatataaatgtagtaatttgttctgtgctgattatgtatacgaggaatcagtttccttgttggattcagagcagctttagctactggttggcaagtgggagagagacgatggatgggaccacccctgcccgtctgtctttgacgtccacacgcgtagtggtatttgacaagcaagataaagaggggagcgcatggtttatttattttcatgtacacaactaactgctgatgcgtaataatt

SEQ ID NO: 16468 - DNA, 208 bp, Zea Mays
ccggggcttgcctttaatttaacacttagatagtgtttgctggggtgggtactcgcttggcgagcatccactggataagtccatcatctcttcagatcgtccaccaactgcatcttgtggttggcaccacatcacttgctcgatcatcatctctcggtcctaaatgagatgcaagatgcatatgtatgaatatgatgaaatgtatcac

SEQ ID NO: 16469 - DNA, 111 bp, Zea Mays
ttgcaggtcaacgcagttggagaggaaatgggaataaggtttctagggcttggcttatgagcaccgagtgatataccaataatggcaaaaataactctctcctttaacctt

SEQ ID NO: 16470 - DNA, 1496 bp, Zea Mays
cctgggttcgacgcagcctctctgcaaaatgcaggggttttgcgtgcacatcacgatgaagtgtggtttattcaattctcaaataatggaaagtatttagcctcagcgtcaaatgataaatctgcaattatatgggaggttgatgaggatggagagctattactgaggcatacattgagtggccatcaaaagtcagtgatgatggttgcatggagccctgatgattgtcagctcctcacatgtgggcaggaagaaaccatccgacgctgggatgttaaatctggcaaatgtcttcatgtttacgagaagtctgccactggtttgatatcatgtgcttggttcccagatggaaagcaattatctggtttagctgatcaaaacttttgcatttgggatttagatggtaaggaagtagattgctggaaagggcagggatcaacaggaacatctgattttgctgtagcaaaagatggaaaccttataataagcatgagcaagcagaacacaattcttctatttgatagggagacaaaacaggagagaataattgaagagggtagtacaattacttcattttgtctatcagaagacggtgatttcctgcttgtaaatcttgtaagcgaagagattcatttgtggaacataagaaatgatcctgttcgtgtcaaccggtacaatggtcataagcgcacccggtttgtgataaggtcttgttttggcggatttgagcaggcgttcattgctagtgggagtgaagattcacaggtctacatatggcatagagccactggcgatctcattgagactcttgctggtcactcgggcacagtcaactgcgtcagttggaatcctgcgaatccccacatgctcgcctcagcgagcgacgatcacacagttcgtatatggggggcaaagaagtccagtcttaagcgcaaggatgttgggagcagcaattgcaacagtaacggttctcgctcgaatggcaatgcacataacaacgttttcgttcaaaagtgcaacgggaacaacaccaaatgatttgccagggcaatgtatccccatggatggttgactggcgtctgtaaatccccctgtcctttacttccctcgtggaagaagaatcgccaccgccatagttaagacaacaacaacaaagctgcagcacaaagtgtggggaacctgctaggtttcgtgcgctatctttcccttgttccttcatgactgtcatcacatgtatttcttaattcaagctgggatggaattatggtattactttgcatctttgatatcttgatttgccctctctgattgattgtaactgcattttggtggtgatggttgttaactcctcttattgcattttgccttgagaagaaacaaatgttggcctaggatgctccgtctaaagaacgggacggaacatcttatcacaaatttaagtagattcatggatcatttatttccaatgaattaagtggtctgtttgattgtcatat

SEQ ID NO: 16471 - DNA, 499 bp, Zea Mays
aaaccagaaagcatctcccagagacgaagataacctgataaagcttcaacagtttgggcaacttcaggcagtagaccttgagtccattgagccttcacttagagctggtacaacggctgatatttctttgagaaaagataagcctgaaacattcgataacagagatgccataaaggaggccattccaagttatgatgatccatatatcaaagtgccaagagtgctgaacaaagaatgatctgtagcatgtatatcagaattgttagaatattaatactctacaatgcagcatggttaaacataatgataaaatttgcagaaagattgaacgagtcaccagcaagcttaattgattttgtgcatttcaatttgataatgctgtgattgaacagagcaatcagcaaccttgcattgggacaggataacaggaaagatttgggagatctgcttcaggggaaaccttgttttttaatgcaattattttttgctctctcacaag

SEQ ID NO: 16472 - DNA, 3872 bp, Zea Mays
gcttcaaaactgagctatttcccagaagtaaaacttggtgttaacattcctgcccatggagaaagccacaatttgctaaatgcggacgacaataaaaatgattatgagtggttattaactcctccagaaactccgctttttcgatctttggatgatgaagaaaaccaatccatcactcaggtttctaggggcagagctcagagcaagcctgtacaaacttcaaggtcatccacgatggataatagtcaaagagctagtagaagcagtgcaagcccaagcaggcttagcccatctccacgctctatgggaaggacaagatcatctagttcagcttctcgctctagcccaccacttgctgttcaaacacaaatgccatcacaaagatcgtcagcccctccgattgctaagacattaacacctcctcgaaggtctccaagtcctgtctcaagaaggatgagtactggttcaagtcgcccaactttgaatgaaacaagaggagcttcaccagtgaaacctaatcacagatcttcacaaaagctgcatggatggcaatcaaacgttcctggtttcccttacgatgcgccttcgaaccttcgcacatctctaactgatcgtccagtatgccggtcaaggggtggatcaccttcatcttttagtggactagaaaaaggttcaagatctagaagacagtcaatgtctcctaccccacctagaagagccagttcatctcacagcattgaacgggaccgaatgagctcttacagcaaagcttctgcaacatcatctggtgaggatgatctggattctatgcagtctgtaccaattagctactccagtagcccagttgtgaaaaagagcttggttgtaatgaaaaccagaaccatggcaccatcaaagaatctgtccaaaaatttcacacctagttctgtcccaaagcggacatttgactctgcactttggttgatggatcaccgcaaagctccacaagataggttccgaccacttctatcaggtgcccctgccagcacatttggttctgggaatggaaatgatgtgcacaaacctatgttttcacacaattcctctttgacaactagcagcaatgcaagctcttatcatggtgccacttttggctcttatatgcatggcagccaagaacaacatgatttggttggtgaatgggaagcagatgatagttctcggggtcatgaggatatatttatgtttgataaattggatgagctcaataaagaagacattcattacaagagcacgggatctacggataattcactggtcatagtaaaacatctagtaagtagcagacatgacttggaaggaagcagtagacctaatcagtccttatgccattctgctgatagttctcaggttggcaatagtaaaaatgctaattgctctagatgtgggaagttttttgatgcgatggatgtggatgaagagggtgtctattgtgatgtatgtgcttcaatgattggaaatatcttaaccagtcctattgtacaacctataggagaagaaaaccagcaatttgataaaactacaaatttgaaacattgcatcgcatctgaccctcctatacccacaggttgtataggctatagcaaagaagtatctcttgatcatcaacttgtgaacagtgaatcgtacactgattgcctggaccaggtccctccaattcattcaatggggcacacacctcaggaaatgctactggggcgggaggaaaagattgacgcagagcatagaaagaaacatgttggggactcattaggaaatacaaatgatattgtcttccatcaatctaatgtgactgaatgtgaacaaatagaaccaacatctgtggggcatgaccttttcatcagagaccaaatggataaccataatcatggatcgtcccaatataatgaaactatctctgaaactgtgaccagtgacagttctcatcaaccaggatcaactacatatcaaaaccctaaacttgaaactactgagggtactgggatatcagtactattagtccctaagtcaaacagcaataaatggcctattgtagaagggagggccctggctgctacaaatatgttgtgttcagaaccctattatgcaagagatggtgtcagtatgatgaagcgtagctttggactggacagcacttcagctgcttcttccagtgatcttggatcttcaaggcaatcaatcatatgttttgagcgccttaggagtggtaagaggggtgacttcgagaagtctcagataagcagcactatgagtcgtcaaagcattgcttctgtgtcagatatgtcaatctgtagctcttcagcttcactttgccctcagattggtgctgtaggtgattcctgtttcccaattgacactttagaaagcagcacttcaagaacattgatctcttctgaagaaaatgatgctttttgtaaggatgctttgccaagtgatatggaatgtttgtctccacaggttattgctgatgatgacagtcatgttgacttgaaaattcagagctatttaagtgaggtaggagatacaacagttgagaatcatagtgctggcagaatgcctgacatggatcataccagtacaaatatgtattctttagatactgaaatgccaagtgatacccgagagtcatcaggcctagaggaaagttgcctgcctgaaactgaagaggatgcttacgccatcaatcagtgcaataaaggtagtgctcgagaacattcaagtgatgagaacaactttgatgatattcaaatgcagtctgaaatagttcagggtttagctgaggaaaacagattggacgattgttgcatgtctgccatctctgaggaggatgtgttgatttctggacgagaagccgacataagggaacttccgaatgatgaagaattttgtgcggaggtagaaggatcaaggaaacaaatccaaagatgctttacattggaagaagctgctgatacaattctcttctgtagttctattgtccacgaccttgcatacaaggctgcgactattgcattggaaaatgagaaggaatcagagtttgttgaccctattcgcccaactgttagaatagttggaggatctttctctaaggatgagagtttaccaaagctgactcacagacgaactccaaatcgtaaggtcaaaaggaaaagattggaaggtgaaacaactacaacggaaactacagagaaagatgctgttgcgaaagactcctcccctgtatgttccgcatcaggtattacaaggaattccgataatatgaaacctccaaagctggagtccaagtgcaactgtataatcatgtaagtaacttcacgtccaaggtcgaaggagttgtgatattggttgggacgaaaatccatgctttctggtttcatgtcacatgcaacttgaagcatgcctacctgcttggttaacccgctgtcagcagcaacgatggagttcaaggcagtggatcttccactagattattttgcagaggtgcatttgctgtgttttttaggtgacagaatgcactgcgagctattcttttgtaaagtcttttcttctctgttgtggaaattttctgcttgtcgtgaggtctattgcggtttgtccaaagtgtgaaagactactagagttgtgctgatagcgtatttacttgcaatgcacgtggctacttgtgaaaatgatggtcgtatactcctatgcacacggcccggatctcacttttttgattccacgatgcatctcttcattgtggagttgtgggtgttggttcttttgccccacaccaaatatggtggcgttctcagctctccgagttcattctttgagatttattttaacctgga

SEQ ID NO: 16473 - DNA, 931 bp, Zea Mays
agctgaagatgtccagaagagcaggatcttctatatcctatggtccccatcctccgccaaggtgaagagcaagatgctttatgcaagctcaaaccaaaaattcaagagtgggctcaatggcattcaggtggaactgcaggctactgatgcaagtgaaatcagccttgatgagatcaaggatcgggctcgctaggcatcatgatcatgcatcatggactcggcctactactgtggatttgtatgccattatagacttggtgctgtgaaagactgcttgatgatttgcgggtttgttgctgtgtaaaaaaaggtcccatggctcccagaagaccatgaaggttcggatctatcatgtaattccttgttatctgccaattatgtatggactatggacatgtgttgcgctgttcaacttactactacaaataagtaatcgatatgttcccttcccatgtctcggtgacaattgtctggagaagcttaggggtcgtttgtttgggattatgtctggagaaacttattttaaactaagtgtgagttcaagttaagttagattatataatctaggcagattataattccaagcgaacaggtccttagtgtttttggaaaatcctaggtgttcttttggctacattgttgtgtgtgcagatcccttgttggtctgtaagcgtggggaagtaagaatcgtccgtttctactgaagacctgctcgagttaggcaccgaggatgccggtaaccaaacagagcaatagtgtctctgtgggcacagtggagtgtgaatctgtgtgatgcaaatccgtcatttgtttagcaaaatttccagcgttgcatgatgcagtttctttaacacggacttaagggaagggaaaaaaatgttgagccaggagatccttcaatgtgttagactgacgtgatagccaactaaac

SEQ ID NO: 16474 - DNA, 2370 bp, Zea Mays
ttcaggatgcactttctacccttttctctctgtacattcgtgatcttggccctgctgttgaatttggagatgcacactggcttggaagacagggtattgcattagcgctccactctaccgctgatgttttggccgctaaagatcttcctgttgtcatgacatttctcatctcacgtgccttggctgatccaaatgttgatgttcgtggtagaatgattaatgctgggatccttattattgataggcatggaaaggaaaatgttcctttgctatttcctatttttgagagctacttgaataaaagggcatcagacgaggaaacatatgatcttgtgagggaaggtgttgttattttcactggtgctctggccaaacatctatcaaaggatgatcccaaagttcatagtgtcattgagaagttgttagatgtccttaacaccccatcggaggcagttcaacgtgctgtctcagattgtttgtccccacttatggtatccaaacaggaagagggtcaaactcttgtttctagactcttggatcggatgatgaaatgtgaaaaatatggtgagcgacgtggtgcagcttttggccttgctggtgtggttaaaggatttggaatttcttccttgaaaaaatatggcattgctgcaacattgcagaaaaatttggaagacagaatgtctgcgaaatctcgtgaaggagctttacttgggtttgagtgcctgtgtgagaagctcggcaaactatttgagcctgcgtgaagctgccgagtgtgctgctcgggcaatgatgtctcagctcactggtcctggtgtgaagcttgtccttccttcacttcttaagggtctagaagataaagcatggcgtactaagcaaagcagcgttcaacttcttggtgccatggcatattgcgctcctcaacagctatctcagtgtcttccaaagattgttccaaagttaacagaggtactaacagacacacatcctaaagtccaagcgtctggacagacagctctccaggaggttggaagtgtcataaagaatcctgaaatttctgcactagtccctattcttctgtcagctctgatggatccaaatgcccacactaaacactctcttgacatccttcttcagactacttttattaactccatagacgcaccatcgcttgcactgcttgtgcctattgtgcatagaggactgagggagagaggtgttgagactaaaaagaaagctgctcaaatagttggaaacatgtcttctttagttacagaaccaaaggatatgatcccatacattagtttgctcctaccagaagttaagaaggttctagtggatcctatacctgaagtgagggcagtggctgctcgagctctggggtctcttataagtggaatgggtgaagaaatcttcccagatcttgtgccatggttattagatactctgaaatcagataatagtaatgttgaacgatctggtgcggcccagggattgagtgaggttttagctgctcttggccaagattattttgaccatattcttcctgacatcatccggaactgttcccaccaaaaggcttccgttcgtgatggacatcttacacttttccggtatttgccaaggtccttgggtggtgttttccagaattatctgcaggctgttcttcctgctatattagatgggcttgctgatgagaacgaatctgttcgtgatgctgcactttctgctggtcatgtctttgtggagcattatgcaactacgtcattacctctgttgcttcctgctattgaggatgggatcttcagtgataattggcgtatccgacaaagttccgttgaacttcttggggatctcttatttaaggtcgctggaacttctgggaaggcaatccttgaaggtggaagtgatgatgaaggtgctagtacagaggctcaggggcgtgctattattgaagtacttggaagggagaaacgcaatgaagttcttgccgccatttatatggttcgttctgatgtcagcttgactgtccggcaggctgcgttacatgtctggaagacgattgtagcaaatactccaagaactctgaaagagataatgccagtacttatggacacacttatttcgtctcttgcatcatcttcctccgaaagacgtcaggttgctggaagatcacttggtgagcttgtaaggaagcttggtgaaagagttttgccctcaattattccaatcctgtcacagggactcaaagacccaagtgctagcagaagacaaggagtttgcattggtttgagtgaggttatgggcagtgctggaaaacaccagctattaagttttatggatgaacttattcctaccattcgtactgctcta

SEQ ID NO: 16475 - DNA, 883 bp, Zea Mays
cgagccccgatgtcgatctggtggtcgctcacctggtgctcggcgagaggcttgaaccaaagcatgtcggcggttcgtgtttgtcgagccccgatgtcgatctggtggtcgccgattttcaagaatcaacgccttcagctcgtcggtctccttctaatttaatttgggattactgcgactcagccttgatctgtcgtggcccggctcactatcaacccattcagtctccaccgtggccaagcctttctgctcatgtcgttgtgtcgtttgccgtcgagtcgtcaaacacgtcatccctggctcgacccccacctcaccagctcgcttcaaacacgatcccgtcgtcaagcttcgcctcagccttagctcgtcgatcacgctcgccaggtgttcgattaaggacttcagctgaaggccaccgtcgttcaggcaactaccaaatcaagttgtgatgtggtacgttaattaatcgcgtgatgcggaagacaagccaagtcgaccccaagcgtggactactccgcaggatgaagctgatggacgaaccggaagatggataatctgaatgagtgccaagccaaaggatactcgccaagtggtcgcctaacaaacactaacctagtgttactcaggcaagccccggtgcatgcaaccccttttcttgtgtttttaaataattttcgcacactttaagtctagtgaaatgtgcattaggttcataggagttgcttggaacactttgatgcattgctttccttgatatccatacctttatagatacttccgtgaagtatcaaaaatatgatttacaaaaatgcttagccttgcttagatcttgtggatagaggttgtcctcagtctaacccgggagaggatggcttctacc

SEQ ID NO: 16476 - DNA, 2725 bp, Zea Mays
ggggcattcaatgcgattgagatggcgcaacgggagccgcggcaaggtcgggaaggcggcgcacctggaggaggcggtggtgtcgctcaagtcgacgacggacggggagaccgtgtaccgggtgagcttcgagtgggacgggtcgcagggcgtcccgggcgccgtcctggtcaggaacctgcagcacgccgagttcttcctcaagtcgctcaccctcgagggcgtccccggcaggggcaccgtcgtcttcgtcgccaactcgtggatctacccgcacaatctctactcccaggaacgcgtcttcttcgccaacgacacttatctgccaagcaaaatgcctgcggcattggtgccttaccggcaggacgagctcaagattctccgcggcgacgataatcctggaccatacaaggagcacgaccgcgtctaccgttacgactactacaacgacctcggtgagccagacaagggtgaagaccatgcccggcctgtcctcgggggcagccaagaacacccgtatccccgtcgctgcaggaccggccggcgtccaacagagacagaccccaactcggagagcaggctgtttctgctgaacctgaacatctacgtcccgcgcgacgagcggtttgggcatctcaagatgtcggacttcctcgggtactcactgaaggcgatcatcgaggctgtccttccgacgctggggacgttcgtcgacgatacgcccaaggagttcgattcgttcgaagacatccttgggctctacgagccgggtccagaggcgcccaacaacccactggtagcagaggtcaggaagagaatccccagcgagttcctcagaagcattctgcccaatggtagccatgaccaccccctgaagatgccccttccaaatatcatcagatcagatgtgttgaaaaaggctccagagtttaagtttggctggaggaccgacgaagagtttgcgagggagacgcttgcaggcgtgaacccagtgctcatcaaacgtctgacggagttcccagctaaaagtaccctggacccaagtcaatacggagaccatacgagcaagatcaccgaagctcacatccagcataacatggaaggcctgtcagtgcagaatgcactgaagaagaacaggctcttcatcctagaccaccatgaccatttcatgccgtacctcaacaagatcaacgagttggaggggaacttcatctacgccagcaggaccctactgttcctgaaggacgatggcacgctgaagcccctggccgtcgagctgagcctgccccaccctgatggccagcagcacggcgcggtcagcaaggtgtacaccccagctcactccggcgctgagggccacgtctggcaacttgccaaggcttatgcctgcgtgaacgactccgcctggcatcagctgatcagccactggctgaacacgcacgcggtgatcgagccgttcgtcatcgcaacgaaccggcagctgagcgtggtgcatccagtgcacaagctgctgagcccacactaccgtgacacgctgaacatcaacgccctggcacgccagacgctcatcaacgccgacggcatcttcgagcgcaccgtgttccctgcaaagtacgcgctggggatgtcctccgacgtgtacaagagctggaatttcaacgagcaggctctcccagcagacctcgtcaagagaggtgtggctgtgccggaccagtcgagcccctacggtgtccggttgctgatcaaggactacccttacgccgtggacgggctggtcatctggtgggcgatcgagcggtgggtcaaggagtacctggacgtctactaccccaacgacggcgagctccagcgcgacgtggagctgcaggcgtggtggaaggaggtgcgcgaggaggcgcacggcgacctcaaggaccgagactggtggcccaggatggacgccgtccagcggctggccagggcgtgcacgaccgtcatctgggtagcgtccgcgctgcacgcggccgtcaacttcgggcagtacccgtacgccgggtacctgccgaaccggccgaccgtgagccggcggccgatgccggagccgggcagcgacgactacaagaagctggaggcggggcagaaggaggcggacgcggtgttcatccgcaccatcaccagccagttccagaccatcctgggcatctcgctcatcgagatcctctccaagcactcctccgacgaggtgtacctcggccagcgcgacgagcctgagcgctggacgtcggacgccagggcgctggacgcgttcagaaggttcggaagccggctggtggagatcgagaagcggatcaggacgatgaacgacagcccgacgttgaagaaccggaaggggccggtggagatgccgtacatgctgctgtaccccaacacgtcggatgtcaccggcgagaagggcgaggggctcactgccatgggcattcccaacagcatctccatatgagcctcctcactgcctgagcggatggtttgtagatgttctgttacgctgtgtgtaatgtgtcgtttattcgttggttttgtcagtctcagggtagggaatggagatgttgattggatccatgatctgtagggttgagagaggagtcacgtctggagaatgttgtcaatgtgtgtttctttcttgttaagaataaaagttcgtcagctcatttatctctactacttattaaagaataaacaaaagaaa

SEQ ID NO: 16477 - DNA, 1308 bp, Zea Mays
gagcccaacaacccgccggcccttctcctcctctccggtttccgttttgattcctcccgattctctctcgcgtagtcgcgtaaatttcccagcccgaaaatggccatagccttgaggcactagtaggcacagtagcacccaaccgcggcccgctccagcagccccaccccatcgacgccgtcggcgagggcacccaggtccgcgtcgcaccacgtcagccacacacccaccaggccaccaccgccctcagctccggtgtgcagagacgctggatggcctcgcaccagtagaatccgtccggcactttctgccctaccccaccccaatccacccatccggccgcgggtggatttgaccgatatcggcaggcggccgccggcgtctgcctcgattgatccgcctcgtctcagtcctaggtatggcggcggtggcggagggatcggcgtctgctgcggcgaaggaggtggagtaccaggcgggcgtgcagaagcttgtggacctgctctccaatcttaacccggccgccaaggagttcgttccttcctcggctccggccgcggctgcgtcgccgcccaagaaagcgttgtcggcggatgcgccggtcttcgattaccgctccaccgcaggcggcaacggggccaccgacgatcccttttacgttgggtttgggaaccagcagcgcaagagagggaatggatacatcaaccaaggaaggaggaggacaaatgataggttgaggcgtgcagacagagaggacagcgttaggcgaactgtttatgtctctgaacttgatcatactgtgacagaggagagacttgctgatatctttgctacctgtgggcatgttgttgattgcagaatttgtggtgatccccactcagttcttaggtttgcatttattgagttctctgatgaagagggtgcaagaactgcacttaacctcggaggcacaatttttggtttctaccctgttagagttttgccttcaaagacagctatcttacccgttaatccaaagtttcttcccaggacggacgatgagaaggaaatggtcatgcgaactgtctattgtacaaacatagataagatggttactcaattagatgtaaagaaattctttgaagaactttgcggtgaggtctctcggttgagacttctaggagacaatgtacattccacaaggattgcttttgttgagtttgttcatgctgagggtgccatcatggctctgaattgcagcgggatgattttgggaactctgcctgtcaggagtctaggagagtatttgctaacactgatggcattgtg

SEQ ID NO: 16478 - DNA, 809 bp, Zea Mays
ctgatgagcaccagccacacacctgctatgccaagaatcttgtggaggagaaagagaaaaaaataaaggagctacaggacaatgttgctgctgtcaattttactccatccagcaaactggggaaaatgctaatggctaaatgtagaacattgcaagaggaaaatgaagagattgggacgatggcatcagaaggaaaaatccatgagcttggaatgaaaattgcagttctgaagtctcagaacaatgagctcaggaatcaatttgatgttttgtacaaacacatggatggtgtaacaaatgatgtggagagatcaaacgaactggtgtccatcctgcaagaggagttagaagctaaggatctagagctgactagattgaaggaggtgcttgcccagaaaggagctactcaggacgcaccggtggagaccagtgacgacgctggaaacggtcaggaggcagattcagatacactgcaagtgaaggcggaaagctaagggagtttaggctttgaagtgtgtttgttgggacttgtgggaaaagtaatatcatgttatgcggtctcatagcatgtctaggttattatatagtaggggaatcactgcacaaaaacatcggcaaacttttatctatgatcgtacatatggctttacaaaagattattttgcattgtagacaacactattatagtgtggattttgaaattagatatataataataatatagatgagtaagctgtgagtaagaaagcctcaaactgattcgctacagatttgcgctggctgaaccagtaatgatctccaacaattca

SEQ ID NO: 16479 - DNA, 1521 bp, Zea Mays
tgttagatgagctcgcacagaaggagctgcagaaaataaacatgtataaagctccaagggataagcttgcctgcattctgaactgctgtaaagttataaataatttacttctaaatgcttccattgtgtccaatgaaaccccccctggagctgacgaattccttccagtccttatctacgtcaccataaaggctaatcctccgcagctccactcaaatctgttgtacatacaaagatatagacggcaaacaagattggtgtcagaggctcaatacttttttacaaacatattgtctgctgagtctttcatatggaacattgatggggaatcattatcgatgaatgaattggattttcaaaggagaatggattcagcaagggaacgcatgttggggttatcagctgactcagaataccaggataatcaagccaatcctgatgtccaagatcgtacgtcacaaagtcttggagctaacagaaattctgatgccagtttatctttgaaagaccacgtccaaggttcagggcaggatatgagaagggacagtgatgtgactgtgagtggtaaacaagctgagcaggtgcaatctatttctgaattagagaagaaaggaactgcggagctcctcaatgaggatgacttgaacaaaaaattccaggagtacccgtttctgtttgcccgtgctggtgatctgactattgctgatgtagagagcctattgaattcgtacaagcatctagtacttcggtatgtagcacttgcacaaggtatgggtgtcagtcctgaaaccactcttactcagaacgggcagacatctgatcttgtagtatctgaggagccagaaattttgaatagcgtggtaaaggacaacgagaacagtgcaataattaacaaaaatgttgatgatgttataagcttaaaccatcattcagaagcagttgacacagaagcatctgaacaaatgaaccagagaactgctgttgattccagtgatgatctggaggcattgggtcggcctgagaatgcatgacctgctggttaagccaagatgaaatggccatacatggcagaagtactctgaagtttgttcttatacctatagacgacaatgatcacaaaacagagtgcacatttccctgagtgatatgcagcagctcctcgaaccacaattttgtatgctggaggcttgagcgtcaacatagtggaaattaatctactctgccgaagctgttcttagatccaaatgttcattgcattgaagttcctggactcttggctctgttgtaggtccaatttgtggtgaacacaccctttcatgtttttatgtaactataatttccgtaagtgaagattagttcatataaaaaattatattcagagcaaagagtgaaaatgccatgagcgtatggtgccatagaaaaacctgttgcttcaggtttcggcagtcgctggccttcgagagagaatttatcacctgtacaaacgtgaattgtaagccagtttttttactttatccaagc

SEQ ID NO: 16480 - DNA, 1123 bp, Zea Mays
gttctggatatgttctggatatttcgatattggagggtgccattaacaaattgatgagtttgacctccctactgttaccaggggaccacagaagcattagctgggtgaactctttcaaaaggggcaggtgcgctagtttgaatggctgctacaaagcttcaggccttttggaaccaccctgctggccccaaaaccattcatttctgggcgccaacattcaaatggggtatcagcattgccaacatagccgactttgcaaagccgcctgaaaagatatcttaccctcagcaagttgctgttgcatgcactggaatcatttggtcaaggtacagcttggttatcacaccgaaaaactggaaccttttcagtgttaacgttgcaatggcgggtacaggcctgtatcagctttcacggaagattaggcaagattacttgtctggtgagaaggatgctgctccacaactgcaagaatagataatgacaacacacaaagaataactgattgagaagtctgcggcctagggatcttactcttgatttttctgggcaggcaaggatatgtctcgatccaggacgggtcatgtttgttttcttgttcttctgaaatcatgagcaggtcaatgtgaaaatctcctgccaaaaaaagaagcccatgaagtaatattttgtgcatttttgtgggaaaaaagtcatgccaggacatgattcgtatattgtccttttgttcactctatctcgtatttgtgaactctaaattgtttgccaatttgattgatcatagcccagtgttcagagatgtcagtgcccttcaccgtcctcattttgttatgatcgtggtgaagctgaattgttatccctggagaatgagggcattcaataaggagtgtttggtttaagaaaatcactccctccaagatagagggtgtatgtctattctttaagggagtgtttggtttgagaaatcatttcatgcaaaatgagttggtatatcataagtttattccctaaatttggttggatttggttgaatgactctatttcccatgttaatactaactaattaactataattaatgaggtggtaatgaatcaatttattacattccacaaaccaaacaaaaaa

SEQ ID NO: 16481 - DNA, 1100 bp, Zea Mays
catcgattaccttcagaaaaccgcgaccaattcaaggtgtctggaaagccaattaaatttgtaggacaaggagagcgtattgaagatcttgagcctttctacccagatcgtatggcacaacgtatcttgggaatgggagatgtactttcatttgttgaaaaagcacaagaagtgatgcgccaagaagatgctgatgaattacagaagaagatcttgagtgcaaaattcaactttaatgacttcctgaagcaaacacaaatgattgcaaaaatgggttcattcagtcgtttgattggcatgattccgggcatgaacaaggttactcctgcacaaatccgtgaagctgagaagaatctcaagtttatggaatcaatgatcaatgtgatgactcttgaggaaagggaacgaccagagcttcttgctgaatcacgcgagagaaggaaacgagtggccaaggactctggaaagactgaacagcaggtgagccaattggtcgcgcaactcttccaaatgcgtgcaaaaatgcagaaaatgatgggcgctatgcaaggaaaagagtcaccagacatggacgagctcatgggatcgatgaaagctgaggagcagtctgctgccggtactggacggcgtagaaggaagtatggcaacctgaggcagcggcaactggatgccatgcgtggtttccgcagacggtgagatgttcattgccgactagcactggcggtgcctgcacgaacgatggcatttagggacttgggctcggatatagaagtggaagaagatgaagtgcttttgggtgcaatggcaatcatctgggtacattgagttgagtttgcatattcatgtgcagtgtcctattttgtcatattagctgtattattatctttcttcggagcaagaactcgcaaaattgcgtcatctgaaccctgtccaccgtcgtggaaacgagtgcacttcggccatgctagcaaatacaaattcggatctggatcatacatgtggcacataactctgtggaagaattttgcgagaaaaaaaaatcaccaataagcatagctaactttgcttttagtttctcattctttttaattaagtgctca

SEQ ID NO: 16482 - DNA, 1592 bp, Zea Mays
gggaggcgcgcaagacgtaacccgggagcgggcggcgtacaacgagggaatttttttaaccaagccagaaatttgcccccgactgggatcgaatctaggacctgaaagtgctactcagaagccttaaccattatgctagaggtcctttcgcaagaaaagcaggtgccaatcattgggctggtgatgaacgacagaggttttatttctcgggttctttgcccaaaatatggtggattccttacttttgggtcactcaagaaaggaaaagagtctgcacctgcacagccaactgctgcagacttgataaatctgtacaatattaggcagatagggccagacactaaggtctttggtataattggtaaaccagttggccatagcaaaagcccaattttgcataatgaagctttcagatctgtgggtttcaacgctgtgtatgtgccatttttggtggatgacttggctaaatttcttgatacatactcttcaccagactttgctggcttcagttgcacaattccacacaaagaagctgctgttaggtgctgtgacgaggtcgatcccgttgccagggacattggagctgttaacacaattgttagaagacctgatggaaagcttgttggctataatactgactatgttggtgctatatctgctattgaggatggaataaaagcatcagaatcagaaccaacagatccagacaaatcaccactggctggaaggctttttgttgttataggggctggtggtgcgggaaaagcactagcatatggggcaaaagagaaaggagcaagagttgtaattgcaaaccgtacctttgcacgagcacaagaacttgccaacttaattggtgggcctgcattgactcttgcggatttggaaaactaccatccagaggaagggatgattcttgcaaatacaacagccattggaatgcatccaaatgtgaatgaaactcctctatctaagcaagcactcagatcttatgctgttgtgtttgatgcggtctacacaccaaaagagaccagacttctccgagaagctgcagaatgtggagccacagttgttagtggtctggagatgtttatacgccaagctatgggccagtttgagcatttcacgggcatgccagctccagatagcttgatgcgtgatattgttctgacaaagacatagtgagtggacgattacaaattccgagcaattgcaagttcattggacaatcctaacaccatgaagcctcgtctgtgagagattcatccatgcccacaaacttccttgtttttcctttttagattcggattcagtgatcagtttgcctctcagccattgtaaattaatttgatgttccgagctgaaacattttggtgtgccttatttgtatcagcatgaacagcagtcatcgtgggtttgaatcagtctcttagcatttgcgttccaagacttgtctcgatttgtcccttttctaggtatcactaaggacttatttagttgtgtctggatcaaaacgatcaaaacgcggattgaatttccttctatttaattttgatttagaccccgttcggcaagctaagattcaagtcaga

SEQ ID NO: 16483 - DNA, 2617 bp, Zea Mays
ggagaagaaaaaaatagcggtagcgctcggatcccttcttcctccagatcacaccaccgtcgcctccgcctgcaaatccattcctagactcgagctgttgctgcgagcgagctcgggttggggctcaggtctctagggtttcgcctccctgctcctggtgctcatcgccttggaccttggtctgtcgggttagggttgtcgcggctgcgggagccgtgggtcggcgggtgcggccgatgcggcgatcgccggagatagggaggctgtagcggcggcggggcaggggatctcctgggtggattctccggcgatggccgcagacgcactatccatcatcccgggcgccgtgcttcggaacctttctgacaagctctacgagaagaggaaaaacgccgcgctcgagattgaggggattgtgaagcagcttgcaatggctggggagcatgagaggatatcagcagttatctcgctgctcaccaacgatttcacatactcgccacaaacgaaccatcggaagggtgggttgattggtcttgcagcagttactgttggactcaccagtgaggcagctcagcatcttgagcaaatcgtgcctcctgtgcttaattctttcctggaccaagatagcagagtgcgttactatgcttgtgaagcgctatacaacatagcaaaggttgtaagaggggatttcatcatctacttcaacaaaatttttgatgctttatgcaagctttctgcagattccgatgctaatgttcaaagtgcagctcaccttcttgacaggcttgtcaaggatatcgtaaccgagagtgaccagttcaggtttattcaatatgctgagtgattccagccatgagataaggcagcaagctgatgcagcactttctgagtttctgcaggagataaagaactcaccaatcaacgagtttgtgaagcttggtggggaacaacttgttccttactatgcagatatactgggtgctatcttaccatgcatatctgacgaggaggagaaaatccgagtggttgcacgtgaaacaaatgaggaactacgtgctataaaagctgatccaactgagggatttgatattggagcaatcctttcaatcgcaaaaagagaattaaacagtgagcatgaggccacacgaactgaagcattgcattggttcttcactttgctggatcaatatcgtgctgagttcttggcgtacctgaacgatatttttgatccactccttaatgcactttctgatccttcagacgtggttgtcctattagtattggaagttcatgcacgtatagctgaagagtctcaccacttccatcatcttgtatcctacctaatctgcaccttccacaacaaccattttctactggagaagcgtggtgctttgatagtccgtcgcctctgcgttcttctgggtgctgaaaaagtatatcgtgagttctccactattcttgagagtgaagttgaccttgattttgcatccgtcatggttcaggctttgaatttgattttgctcacatcaactgaacttggtgagctccgctctcttcttaagaagtcgttagtggattcctgtggcaaggacttgtttcagtcattatatgcttcgtggcgccactctccgatggctacaataagtttgtgtttacttgctcaggcatacagtcatgcgagctgtgttattcagtcgctgggagaagaagacataaatgtgaaatttttggttcagttagataaattgatccgtctcttagagactccagtatttgcttacttgcgtttgcagcttcttgagcctggaaagcacacctggcttctgaaaactctttatggtctcctgatgctgttgcctcagcaaagtgcggccttcaagatcttgaggactcgactgaaaactgtgccattcagtgaaaatattaagcgcacatcttcagcaaatccatactcccagattctgcaagtgacagaagatggcaatagaaaccaagatacacagaactatagtgcaatcaatttcccgtcccttctccagcaatttgagcacatgcagctgcagcaccgtaaccatttgaaggatcaactgcaatcccgcaaatctgcttcagctctaacgttatctcaggagatacaaagatacgaagcagcacattcctcttcgctatcagagattaacaggcccccttcaagaacatccaaaggcattttatgatgcatttgattattgcgatgtatgatatgtttcccagaagcatcatcacaaatatgttggggctttggttagtctccttgatttttccaaaggaggttgcatagggtacatagagtgtaatattttttgtttcgttcctagattttgtcaagagatggcaattatttattggagaaagctcgtttctgccctctagtcattcttttcttagccgtttcactgctcatctggtttctgtaatttttcaattgaaggccaaatgagcaaagtagtaattggagatatgttactactgttctgcttatccatctctaataaattagcgttgcaatgtaaattcctgttgttggctcttattatatatttattatattctatatatgccttacctttaccccatt

SEQ ID NO: 16484 - DNA, 3703 bp, Zea Mays
cagcaatgatatgacatccctcgtgccattcgggcccgctcgccagtcacccgcgtctgagagaggagagaggagagagagagaccacctcctccgcttccgctctcctctctttctgactcttgactcgaccgctcctgttcgccgctccgccatcgccggcgaccactccggcgacgctgcgtctccggcgaccccaccgacgcctgtcccagcgaccccattcctccgatccccgcctcacgccctgcgctctcccggctagggttcgtgctcctgcccggatccaccccgcctcctcgcgcccccgttcgcgcgcgccgatcggcaggctgcgggccgccgccgctgcgcgagctagcgggcgtcggatccatcgatccgcgcggcctccgcggccgtcatggacgacttcgagggcctgctggcccgcgacttcggcctccgcccgcaggggaaggccgcgcccatgtcggccgcccgctcctcggggccctccggatctgcctgggccaataccagatccgccgccgccccctcctacgacgagctcttcgggtccgccccgccactgcccaaggccacgccgtcgccgtcgccgtcgctcgaccacatcttcgactcgttcaaggagcccgcttccaccgcgccgccgcctaagccgaagcactcgtccatgccggtgttcgacaagccggtctacgacgacgacatctttgtcggggtccctggggtcaagagctcctcggcgcgctacgacgatgtgttcgggggaagccatagccgcgaggcgcctccagcgttcgatgacctgctcggtggatttggtaagagctcacaggtgagggaagaggtggatgacaagaggaaacaagaggcagctatggggccagcggcgggtactgggtttgattatttgatcccaggctttggcgggaggagctccccgcggcaaagggatactgttggtgcaaaacaacagaagatttccatgtcaacatctaagcaaccagctagcttaagcgacccctttgttgttctcgaaacaacttcatcctcagcccatccattcgcagatcccttggatgaatttggtaaagctgcaaaatatcaagggaaaagccgtgaaagtactaacgttgggagcaatctgtttgaggattcaagcacttccatccaggctccaaaatctgaacctatttttacctcagaggtggacaatggcttgaaagataagaatgagtctagcagagcccgagacgcaaatcctgtacagagtttttctaaaggaaactcctcccaacaaccttctgtagaggattttgaaaatatcttttctaagccgcagtctgccagatatgctgatgtccatgttgacattggctcagataaatatagtgggaatggtataaacgaccagtcacctagatctgatgaatccgaagatgagatatggcttacagcttctgagattcccctcttcacacagccaactagtgccccaccaccttcaaggccaccaccacctcttgcagctaagcaaaaaaaacatggatcaaaatcaaaaagaaaagatgatgaacatctaaagcagtctaggaaaaacaatgatcatcaaagaagttcgtcaaatcatgctggtgtttctacagtagatgaactagaagattttgccatgggtaagcctcagagtgtgcatgctttaaatgcggaagaatttgagagaagtacagcagcagcagcatctgcagctgctatgaaagaggccatggataaagcagaggcaaagttcaaacatgcaaaggaggtacgagagagagagcgtgatgcgaagattagaaatagagaacaacgggaacaagatagtgtaacaaggtcgtatgcccaggatcgtgaggacaaagagagaaaggaaagactagaacaagaaagagagatgaagcaaaatgaggaaaaggaaagagagcaaagaagacttgaagaggaaagagaacttgagcgacataaagaaagagaaagagctaggcaagcagtggagagggctacaaaggaggcacgggaaagagcagctgttgaagctcgtgcaaaagcggagagagaggcacgccaacgttcagaacgtgctgctgtgcaaagagcccaacaggaagcacgtgagagggcagcagtggaggctaaagagcgagcagagagggctactgcagaagcaaaggaaagggctgctgctgaaggtaaggaaaaagctgctagtcaagccagggatagggctgcagcagaaagagctgctgtggagagagctcagcaagaagcgaggaagagagctgaacgagcagcagtggaaagggctgctgctgaggctcgggaaagacaggctgctgctgcaagagataaaacgagcaaaccagatgatctagagtccttctttggtatgggtgctcgagctaatagtgctccgaagcaaagggctccgactgtggactctatgtttcattctcaaacgcaaaatagagggagttccacttcgacatcaatgaaaaaggcatcatcaacaacaaatattgctgatgacttgtctgcgatatttggaggagctcctacatcagaagaatttcaagaagtagatggggagagcgaagaaagaagacgcgctaggatggaacggcatcaaagaactcgtgaacgagcggcaaaggctttggctgagaagaatgaacgcgacatgcagcaacaaagagagcaggctgaaagacataggcttgcggaaacactggactttgagattaagcgctgggctgctggaaaagaaggcaatttgcgtgcattgctatcaactttacaatatgttctttggccagaatgtgggtggcaacctgtatccctcactgatttgatcactgctgctgctgttaaaaaagtgtacagaaaagcaacactgtgtatccatcctgacaaggtgcagcaaaagggtgcaaatctccaacagaaatatatcgctgagaaggtttttgatctccttaaggaggcgtggaacaaactcaactctgaagagctcttctaaacagcctcacgactgaacatagggtcgcccctcagggtctgcacaaggtactctcggaagaaactcacaagctggagtggcttgaggttggtcggggggaaccatgaagcgaccaagcgaaacctgagctatggttgttgtaatcaccgatgtttgtttcactcccccaattttctttcccaactgtatgctgattcaatcacaactcacagagacatgtggcagctgcccaagctggacctcatccagtaggccagaaggtgtagtatttatcctgggctgtatgcaccgtcagagcgggggttttcttaggccagtgttgtggttatagattaggtacaggttttttttaagcatggagagacgttttactagataatgatgaatgttgcttgtctgatgccattggcatcgtggcaagttcggttgtcttgtttatagtcaatttctggaacatcacttgacctatactctgattcctgttttcttttactcttgtacaaagttgctggtcgattttgattgcttgtattgtaatcatgtttggacgtttacgggttcagtggaatagtttccgggttcgtcattttcatttggtacacaagatcaagcagcgaaccctatatatttgggttccatgatcat

SEQ ID NO: 16485 - DNA, 1873 bp, Zea Mays
caaagtatctttctgaaaagatatgattcctagcacgcatggatgaaccccttcttggcaatggtcttaagaccagcgggaaaagagagagcctggtagtggccgaggtcagaaaacagatgtaccttgctgggccactcatcgctgcatggatcctacagaacattgtccagatgatatctatcatgtttgtcggtcaccttggtgagcttgccctctccagtgcctccatcgccacctcctttgcaggcgttactggcttcagcttattgtctggcatggcgagcagcttggacacactgtgtgggcaatcgttcggggcaaagcagtactatcttcttggcatctacaagcagagggcaatccttgtgctcactctagtcagccttgtggttgcgattatctggtcatacactggacagatccttctactctttggtcaggatccagagattgcagctggggcagggagctatatccggtggatgattcctgcgctatttgtgtatggtccactacagtgccatgtccggtttctgcaaacgcagaacatagtcctcccagtgatgctgagctcaggtgccacagcactgaaccatctgctggtgtgctggctgctggtgtacaagattggtatgggcaacaagggtgctgccttggccaatgccatctcatactttaccaatgtatcaatcctggcaatttacgtcaggcttgcaccagcctgtagaaacacctggagagggttctcaaaggaggcttttcatgacataaccagcttcttgaggcttggtattccatctgcgctgatggtttgcttggagtggtggtcatttgagctcctggtacttctttctggacttctccccaatccaaagcttgagacatcggttttgtccatttccttaaacacaggctctttagcgtttatgatcccttttgggcttagcgcagccataagcacccgtgtttcaaatgaacttggtgctgggcgaccccatgctgcccatctggctacccgtgtggtcatggtgctggccatcgtggttggcgtattaatcggactagctatgattttggtgcgcaatatctgggggtatgcatacagtaatgagaaggaggtggtcaaatacatctccaaaatgatgccgatcctagccgtgtcattcttgttcgattgcgtgcagtgtgttctttcaggtgttgctaggggctgtggatggcaaaagattggggcttgtgttaatcttggtgcatactaccttataggaattccagctgccttctgtttcgcctttatgtaccatctaggtggaatgggactttggttgggaataatctgcgcactcgtcatacagatgctattgcttctcacaattaccttgtgcagcaactgggagaaagaagctttgaaggcaaaggacagagtatttagtacatccgtaccagctgacatgatgacatgatatttctgaagatatttttttgaaggaaatgcccatgaaactttgccaaggaacatactaagaattggttgttcagattcaaggcctttctccatgccatcagaatgatgcttgggtctagtaatagctcctgagcagtctgttttttacttttggtcaatactcaatacatggaagatgtttggtttgaagaaccacgccatcctagatgaggtggtatattataagttgatataacggctccatactagttattgaggaatgagacgatgattatctcatgtaataataatgcttttccccctctagttattgatgtaagacaattgaggcaaatgaacaaaatgtcacatttgattaaataagttgcattgtctatttgtgcagttgtttgggaaataattaaa

SEQ ID NO: 16486 - DNA, 1071 bp, Zea Mays
tgtagcttcagaaggggtacaatctgctgggcatgcggtggtattcttgaaattaactgttcaaaggatgtaaaggttcaaggcatcattggaccctgttcttccctggagaagaaaagtcctttgtcttccgacactgttattggtcaaggaaacactagcgcttggaagatgtgcggccttgacaggaagacatcactttgcttggtatatgatattgcaaaaaaagatggcccagattcaattgctcaatcagcaaacaatcagttctacttccagttcttaacctactatcagcataatgagggtcagatgagattaagatcgaccacaatctccagaagatgggtctctggtgacaaccatgtggaggaactagtagctggctttgatcaagaagctgcagctgcagtcatggcacgcttggtgtcatttaagatggaaactgaggttgattttgacccagtaaggtggcttgatcgagctttgatacgtttatgctcaaaatttggagattatcagaaggagacaccctcatcgttcagtttatccccacggctatcaatatttccccaatttatatttaatttgaggcgttctcagtttgttcaggtttttaataacagtcctgatgaaactgcgtattttaggatgatgttggacagagagaatgtaaccaatacagttgtgatgattcaaccttcacttatatcctattcatttcaatcagggccagagccagttctcttggatgcaactgcaattgcttctgacaagatccttttattggactcttattttactgttgtcatattccatggggtaaccattgcgcagtggcgaaatgctggctaccaagatcaagaaggtcacgaggtttttgctcagttgttaaaagctccacatgaggaagctaatttaataataaaggagcgatttcctgtaccccgtttggtagtctgtgatcaatatggatctcaggctcgatttttactggcgaagttaaatccatcagtgacatataactcggacaatccctcccctggtggagacgtcatattcacagatgat

SEQ ID NO: 16487 - DNA, 1294 bp, Zea Mays
tgacaacgtgtcaatttttttgggctctggaacttttcaggaaacaagaagtagattttctgattgcaactgatgtcgctgctcgtgggattgatattgttggtgttcagactgtaataaattttgcatgcccaagagatgtgaaaacttatcttcatcgtgttggccgcacagcacgggcaggaagagaaggctatgccgtaacatttgtaaccgatgatgatagatccctcttgaaagcaattgcaaagaaggctggttcacaactgaaaagccgcattgttgcagagaaacctgtggctgagtgtgcacaactgattgagcaactagaagatcagatttccatcatcattcgagaagaaaaggtggaaagagaagcgagaaaagctgaaatggaaattgcaaaggcagaaaatatgatagctcataaggatgagatatactcacggccaaagagaacctggtttgctactgaaagggaaaagaagcttttggtagcagctgctaaagaatctttgggtcaaggtaagagtacctctggaattattagtgctaagcaggctgaagacctccgtctgaaggagaaaaagagacgagagcatgagaaggacctaccaaggaagaaacgccgaagattagaggcccagcgagagatgctggaagatgaggatgaagatgacgaggaagcaaaggaaagtgatagagggaagaaactgaagaaaggccagtctctagtggatgctgcttaccgaaaggcaaagtcattgaaggcggctagcaaacggggtcctggtgcaagcaaaggaaagaaagagaagaatgcaagacaatattctgagaagactcctaacaggcatgaggagatgcgtgagctgttccagaatgatatgagtgaatggaaacagggacgctcctcaaagaaaaacaacaatttcgcgcacaaaaaatcaaaagcttttaatagcaaagcaagatacaagcgccgcaaatagaagactcggccatccccggatttatttacattctcgtctcagttttgactgactgaccctgaagaaatctctgggatccagatgtttccagttaccatgcgtttgcttgttgtaaacttcgtcatatcatgtattgaaacttaccgttttctgatgtctcattgatcttgggagagctatcctcagtttcgacatgtgccgttgctggtttcgtaggtcgtacttatctcaaaacttacttgccagacgttgttgtgtggaaacgtcgaccagcttgttatgttcctacgcctcgaatgcaa

SEQ ID NO: 16488 - DNA, 591 bp, Zea Mays
cacgaatctagaaacatgtcccttagtaaatgaaatcaccactcgaagaacaagaagtgctacgtctgcaacaaaccgacgctgggcatcttcaacgctgcacaggagatccgcaagaagatggcacaggacaagaagcagcagcagcaggagtaggagagctcaaaacacaccgttgctaatttagctgtgttgtacaacgatgattggtgcgataactagagtccggtatttttcgccatcagataaaagagaccaagttttgaacgatcacaatgaatgcattcagatccagtcactagatccctacccccagacaggccatggtgcctgttggttcctggcgatgggcaaagctccaaaggtacagtgctagactgccaatgtgtttgtttgttgcagggcacccgaagctcttatctttgatacagtagtagcaatcgtgtcgtgcagtctgactttgagaattcccgctaggctttcgagcgtgctggccttggtgcctctgctcacgcctttccccgtcttgtttgtgctcctcaagtgcctttattatcagtcaaggtgttaccaacacttgttatattatag

SEQ ID NO: 16489 - DNA, 2008 bp, Zea Mays
atggcgagtctgacctcatggacccacaccaaacgggatagtagaagcagctggagcacgtcacggcgccgcgctgggttggtgggggcgcaccgcagtccgcaccggacctcgagaggggaggagaggagatgggaggggtcaacgaggtgggagcagacaggaaggctcggggctccttcctcctataaacccaccgcacctgccttagaggctcccattttctcggccgggagccgcaattccatcctgctgctagagttacatactcacccaatagaacaattctatgcccggtgattgtacctcctgaagtagaagagcatactgaagcagaactcgagtggtgttggatcgaaatggaaggcgggatgtcaagtttggaagccgccatgaaagcttcttcatcgatggcaagcagcatggcaaggaatgctgaccctaaccaacagactctccgccccaatttagtggagcagttctattttccaagacctggtcaatctttgccaggcattcctccattttttgggcctccctctagtttgtatcttcctaatgacaatgaagctaaatttggcaacaactttgaatcaaatccttcacagaatacagattggaacccacaggcaatagtgagcaacctaaccttccttgagcagaagatcaagcaggtaaaggatattgtgcagtccatgagtaaccgagagaaccaagtagctggtggttcctgtgaggtagctgcaaagcagcagctcataaccgctgacctcactagcattataatccagctcatatctactgcgggttcgctgctcccttcaatgaagaacccacttcttagcagcaatccagcagtcaggcagcttggcaacactcttggttctcctacgggctttggcatgaatgctaatcagcgaccaagcgtagacagcaagaccgatattcctgacacaggaaaaacttctgattatgaggagctgatgaatacccttaatactagtcaagctgaaagagatgagctgatcaaatgcccaaatccctgtggtggggaagggtctgaactgactccgatggaggaccatgatgtgaaggagagtgacgatggtggtgagggagagaatctcccccctggttcatatgtaatcttgcaactggaaaaggaggagattttagcaccacatactcatttctgcttgatctgtggtaagggtttcaaaagagatgctaacctaaggatgcacatgaggggccatggagatgagtacaagactccagctgctcttgccaaacccacaaaagattatggtgcagatcatgcaccggttacaaggtactcatgcccatttgtgggttgcaaacggaacaaggagcacaggaagttccagcctctcaaaacaatcttgtgtgtgaagaaccattacaagagaagccactgtgacaagagctacacctgcagccgttgcaacaccaagaagttctctgtcatcgcggacttgaagactcatgagaagcactgtggtcgtgacaagtggctctgttcttgcggaacgaccttctccaggaaggacaagctttttggacatgttgcgcttttccaaggccacacacctgcgctccccgtggaagacggggatgtaccagaaggttcagagcagcctcaggacggcgaaccaacgaatgaaatggcgaggagcatggtgtatagcttcccgtgtagctcgtctgatggtttattgaacctcgacatgaaaatggctgatgacgtgcgtggttatctctcgccgctgagctttgataattgctttggcgcgtttgacgacttcactcgccctggatttgacatctctgagaaccccttctccttcccgccttcaggatcttgcagttatgggcagcagaacggtgatagctgatggatgccgccatcgatgatgactacaccgcggcactgtcaacctttatgtgatgaatgtggctgtgtcggccatggagcagatccccaagg

SEQ ID NO: 16490 - DNA, 394 bp, Zea Mays
taactgcgccaatctagctgctcgagctataaagaacgccccccgaggacctagtgtgctgcagccagcagatgcaacaaacaacccaagtctggttttttttttacccctggtgcagggctctctgggctcgagtgtagtcatctcctctgcacgctgtttcaacacaatgatcatggcatcagccttttacaagtttgggtaccagtcgtgtaaactgagtggtcctggtgcatgcaaacaacctacagccaccgccgctgctagcggcggcaacggtgtccatgccctagcgacaatcacgcgcaggaactgacgtacgtgtcttgcgttgagtgattgttgacgtatgcaacgcaactacatatatgccatgcatgctgagtcgtccaat

SEQ ID NO: 16491 - DNA, 419 bp, Zea Mays
gaaggctggacgcaggggggcatttccgggaacctcgccgcgggcggggctggaaagccgcggagcttttgatttaaccggccggttggtcagccagccagccagccagccactcagtactgcacactgccatcgctctcctacggtactgctgcctaccgcgcgtctcgtcccttcgctgccgctctatctatctcggccggagccatgggcggcggtggcgcggcgctgctgctgctggtgatgtgggcgggcgtggcgtcggcggccgtgtacgaggtgggcggcacgattgggtggaccgtcatgggcaaccccgactacgccgcctgggccagctccaagcagatcgtcatcggcgacactgttgggcattagcacgatggggtgcatagacgagattggtcatctaagctcag

SEQ ID NO: 16492 - DNA, 622 bp, Zea Mays
gccgcatcgagagtttttttttttgccgttctgcttttagggttagcggcccgccccggtgatcgcgggagaagggagcatctgtcgccggagtttggggttgctattttgaggctggaggtgtgcttaaactgggaacatccattaatgctgctttcaaaatggcattggaaacttgggcttcatgggtgaaagagagaattgatttaaggcgaacacatgtattcttccgtacatatgaaccgtctcattggagtggcttaaatcaaaaggtgtgtgaagtaacacaacaacctaccgctgaggccaatggaaatgacaggagagaatttggggatatacttgctggtgttgtggcaaatatgagtgtccctgtgacagtactaaatgtgactttgatgggggcctttagaagtgatgctcatattggactttggagtcatcctaataccatactagattgcagccactggtgccttccaggagttcctgatgcttggaatgagcttgtattttcgcaccttttgactaatggttggcgagtgccggctagctgactattgacatggactgcacatctccttggacataaagttttgtactccctccgtcccaaattaaa

SEQ ID NO: 16493 - DNA, 1184 bp, Zea Mays
atttgattgctgggtgttagatcacattggtgatgagggcttgaaggctgtgtccttttcttgtcctgatcttcaggagttgagggtatatccaagtgttgttgcaccaagaggtactgtgacggaggaagggttggtagccctatcttcgtgtcggaagttacagcatgtgctcttctcttgtgttcgaatgacaaacacggcgctgatgacaatagcaaggtactgcccacggctaacgtccttcagactatgcattcgcaagcccaggtcagcagacgccgtcacaggacagccactggacgaaggctttggggcgatagtgcggtcctgcagaggcctgaggcgtcttgccatgtccggcctcctcacggacagcgtgttcctgtacatcggcatgtacgcggagaagctggagatgctctcggtaacgttcgcgggggacaccgacgacggcatggtctatgtgctcaatggctgcaggaacctcaagaagctggtaatcaaggagagccccttcggtgacgccgctctcctcgcgggcgcgcacaggtacgagtcaatgcgcagtctctggatgtcgtcctgccagatcaccctgggtggctgcaaggcccttgcggccaccatgccaaacatcaatgtcgaggtcatcggtggggcgagctttggtgcgatggatggtggtgtcagcggtgcgaggaaggtggacatgctctacctctaccgtactctggctggacctagatgcgatacgccagggttcgtctcgatattgtgagctgtatctatggctactgttggtggcgttcagggaaacccgatgttcttaaccgtgcctgctgcgggctgtggctgtgctactgtctggtagtgtttcggaaacatgatgtttatttgcgtaaggtagtgtttggttctggaaccattttaagccttgttcagatattcatatacctcatggattggaagtgattagaaaaaaatatgaataattttgacttactatgtattgaaactcacttaatcccctctaatccatatgaaattgagatgaaaccgaacagacccttaatccatatgaaattgagatgaaaccgaacagacccttagatgaaatggctctgttttctagatcctaagaacagaatggcttagatgaaatggctctgttttctagaacc

SEQ ID NO: 16494 - DNA, 928 bp, Zea Mays
gttcatacttaatagcacacctagcaagggatgatggtgctaaccttggcagtgatccatcagtaccactgaaaggcattccatgcagcatttctgaagctgttgatgggattcctagttcaagtcggaaggcatggataccatttaccttagagggacttccagttttagacaaaacaactcttcctaccacaagcacagggagcccatctgtgcctagaaaatctggtgaagctgagtttcagacaattgataataagcctgccactgatgaactggatagcttgatcaggttaaagcaggctgaagcatatatgtaccaggaacgtgcaaatgatgcacggaatgaggttgacaatctgagacacattgttatggtaaaaaatgcacgaattgaggaagattatggcacccatatcgctgatcttgacataaatgagttacaagagcggcgcaagcgaaggattgaagaactccaagtaattgaaaggacacaccatgaatttctcagcatgaaaactaggatggtagctagcattggggagttattgtcaaaaatggaggcactgaaacaaaaccgaagcacatgaactgaggttactattgcagaaatcgaagttgctcaacttgtttaaggaagcctgcacatattgttcttacaggaatgcgcaaagcatcgacatgtgaggggtaaccgaatgtctcactggggatgagccaccccagggccccccacgagtagccgaaggaggagaggtgcagacggacgacgaccatgatggtcagaatgtaacataggtagatatagaggatgtttggtttccatgaccaaagtttagttcatgtaatattaaatatttgaatatcaattataactaataaatgtagacttaattatatttaataaatttgtctcgtctttatctgt

SEQ ID NO: 16495 - DNA, 3438 bp, Zea Mays
gtatatcactttcattgctacaagatggcagtagcagtaggacttcttcagtttttgtcagccgaaaagacacttactaaccactgggtggagtctttttgtgggcggcaagagactatttgctggtgattctgtcatttttgttagggacgaaaggcagcaacttctactgggaatcagacgggctagccggcaacccactaatatatcttcttcagtactttcaagtgacagtatgcacataggggtgcttgctgcagcagcccatgctgctgccaacaatagcccatttaccatattttacaatcctagggctagccctactgagtttgttatcccatttgccaaattccagaaggcactgtatagtaaccaaatatctttaggaatgcgattccggatgatgtttgagaccgaggaattagggatgagaaggtacatgggtacaataactgggataactgatctagatcctgtaagatggaaaaactcccagtggcgcaacttacaggttggttgggatgaatctgccgcaggggaaaggagaaacagagtttcaatgtgggagattgaaccaattgctgctcctttcttcatatgcccccagcctttctttggcgtaaagcgccctaggcaaatagatgacgagtcatcagagatggaaaaccttttcaagagggcaatgccttggcttggtgaggagatatgcataaaggacgctcagacccataacaccacaatgcctggtttgagcttggttcaatggatgaacatgaacaggccgcagagctccacattaaatacaggcatacagtcagagtatctgcgatctctaagtaaccctgccatgcaaaaccttggtgcggctgagctcgcaaggcagctatatgtccagaaccatctcctgcaacaaaacagtgtacagcttaatgcttccaagctccctcagcaagtgcaacctataaatgagcttgctaagggatcattgtcttgtaatcaacttgacgtcatcatcaatcaacaagaactgaagcaagaagttggcaatcagcagaggcaacagcagcccgttaaccaagcaattcctttaagtcaggctcaaaccaatcttgtccaggcccaggtaattatccagaatcagatgcaacagcagcagcaacaacagcagcagtctccaactaggtgccagaagggaaccagtgtgcaacagctgcttctttcacagcaacagcaggaccagaattttcagctgcagcaacaacagcagcttttacttcagcaactgcagcagcagaatcagcagcagcagcaacaacagcagaatcagcagcagctaaacaagttgccagctcaacttgtgaatctggctggtcaacaggctcagttgtctgaccaggaacttcagctgcagctattacagaaactacagcagcagtcacttgtatcacagccaacagttacactctcgccgttacaggtaatacaggaacaacagaagttacttttggacatgcagcagctatcaagctctcattcacttgcccagcagcggatcctgcctcaacaagatagcgatgtttcgctgcaagcatcacaggcgccaccaccaatgaagcaagaacagcagaagccttcacagaaacaatttgtgcttgcagatgtgtcagatgttgtctatccacagatttcatcaaccaacgttttgtccaaagctggaacccaactgatgactccaggtgctacacaatctgtactaacggaggaaattccttcttgctcaacatcaccttctacagccaccggaaatcatttggcatacccaatcattggcaggaacgagcattgcaaggtcaccattgagaaagttcctcaatcgtcttctctgatgtcaattccaacagctggtgaagctgtaacaactccaataatggcgaaggaattgtcaaagttgaaccataatctgaaggagaatgtaaccacatcaaagtcacccattgttgggactggacatgagaatcttttgaacattgtaccgtcaacagacaacctggaaacagcttcatcagcaacttctttatggcctacccaaacagatggacttttgcatcaaggttttcctactaacttcaatcaacaacaaatgttcaaagatgcacttccagatgtggaaattcaagaagtggatccgactaacaatgccttctttgggatcaacagtgatggtccattgggctttcctatggaaaccgaaggcttgttggtaagtgcaattaatcctgtgaagtgtcagcctaatttgtcaactgacgttgagatcaattaccgaatacaaaaggatgcccaacaagagatctcaacctccatggtttcacagtcattcggtcagtctgatatagcttttaactcaattgattctgcaatcaacgatggtgtcatgttgaatagaaattcttgcccccctgcacctccgcagagaatgcggacattcacaaaggtctacaagcgtggagctgtaggccgatccattgacataggcaggttctccggatatgaagaattgaagcatgctgtggcccgcatgtttggtatagagggccaacttgaggaccgacagagaataggatggaagttagtctacacggatcatgaggatgacgtcctacttcttggtgacgacccatgggaggagtttgtgaattgtgtgaagtgcattaggatcctatccccccaagaagtgcagcagatgagcttagatggtgatttggggaacaatgtcctctccaaccaggcttgcagcagctcagatggtgggaatgcctggaagcctcgccgcgaccagaaccctggtaacccttccatcgggttctacgaccaatttgagtgacctgatcacggaaattcgagatgagaattatagctgcaaaaagcaaccagtgtccagccatctacagaattatcgccacggaaagggtaagcagatgcaggatgccgtagacgtcttggcttttatagttgggagaggaaatgctcctcagattagggtatgttctagatatatgtgtagttttctttgttttgaaacaatgtaggcaagaagaatgaaacttacctagagctgttgctgagtcgaaacatcagacagatggttaggcaaaacctgaacttcagacagagtaggcagatctgaagataaagtattttgattgagagtattttgtaattctgtattgaactgccgctggggtttgcttgagacccatgcggcactatatgagtctctctcagttcagaaaatactgaagcagatctaagaggtcctactgattattactatatgtttgatgtgaatggccccatttacaaatggacagtctgtccgtctccacttgtaggtgtaatatgttcaacaacaaccaggttttataacactggcattac

SEQ ID NO: 16496 - DNA, 1163 bp, Zea Mays
gtgcgcatatggatcgagggctggtttgccatttgggcgaagttcgcgtgagccaaggtaccgcgtcgagttccatcctgttgattcgccattccatccagagaatggtcaggaatcggtaccaatggctagtcatgaggggaagcgttataagtgctttctaccagttgaagaaactaaaaccatgaagtcaatgctcccacaaaatgcaactaatattataatagaaagtgaaaggagaattaagccaaaggagccagatgagttacttgaggttctcaaggatcagtgtttctacaggcacgaaggttggtggtcgtatgaattctgttattatgggaaaatcagacaggtccatgtagaggacggtaaggttatccaagaatttgttctaggcgaattcgatgacgacgcgactgctgcataccatgaaaatagcacctctgagttagctgacgatgaccatcacgtgaaagatatatctaagaggtatcatgttcacttgtatacaaatgggactgtatgtgatctcacagatattccccgggagacagaggttagatttgtctgctcggagcctactgtgctgattagttcagtcaaggagatctcttcctgcaaatatgttgtaacaattcaaagcccgatgctttgcaaaaacccgttgttccagcaagaaaaacgaacccttcccatccattgcaatgaattacctgctaaagcagaatccggtgctgaggatggtttgcttccaaaagaagcgcagatttccatcatccccgatcaggatgagctgcatggttttccagcttatgctacttgatataatgatatgccttcaatatttatttctggtgtagaaaaagcacagttttggaggcccagtggcaactgagcaacgctatgtattactctctccgttcttttttatttgtcgtggtttagttcaaaaattacgacaaatattggagaacggacccatagatcctacagcagcggctccttgtaaagcaggttgagacgatcattctgcagtgctaattatttaggaggattacgaaggtagaaagtttctcagtattagtaaatgtaacaagtttgagacagtaacatttgcttgaaatgtctagtctataacaaggacaatactgcattcttgaaat

SEQ ID NO: 16497 - DNA, 141 bp, Zea Mays
atgatttccattcccctgctgccaattctctgaactgcttcgacccttcaactcaatctgcatgtacccaggattctttgcttgctcttctacttctgaaaattcgcaaaaatggatagataattccagttaattttaatc

SEQ ID NO: 16498 - DNA, 105 bp, Zea Mays
cttcgggtaaaaaattgtcggaagaggaaattgccgaagctaaacattacaccaaggaattaaagtacccaaaaggatccttggtgtacaatggcactgatgaag

SEQ ID NO: 16499 - DNA, 905 bp, Zea Mays
gaacaaataaaaatatataattaatttagtgcacacggagtggggaaacgaaaaggaaagctctctcattgccaaattgcccccgactcaagccccccgcgccgccggcgttggtggaatcgatcgacccggcctcgccggacaatccaccagcgttggtttcacctcaggtttttgtgcatggaagatgacaatgaggtcactggagagtcacctgtggctgatgaatgggatatgttgtccctgacttcatcaatatatgctagcccattattccgaagaggatttgatccaattaatttgcctggatatgggaatgtgattaatattcaggaaggcacacaaactggattagtcatgtcagatggcttcgtgttccctccaagtgagcatgaaaatttgccaatagaaccagagcatgaggatttgccaatagaaccagggcatgatgaatcaaatacaaacagcgttgaaaaggaaagtagttgtgctggaaataacgatgatgactggtgtcatgtttcacctgaagaaatcgatgacgtaagtaatgaaaatctagctgacaacagtgacttgcctactgccagtgaagctacggtaccagattcccagcctacagaaataaatgctaagcgagagaaagatcataggacatgcaaggctgatcatacttgtgaaagatggtggaaaaagaaaaccacgtatctatttcatcatataaaaggagtgactacactctgctcagttgtggcagctggtgctgttgttggttttgttgtaatgggtcagaggtggcagcaggaccattggcaccttcatcaatttaagttcagtgtcagcggtgagctcatccgcgacggtcatccccggcggatatggggcggcgtttctctccatctgtg

SEQ ID NO: 16500 - DNA, 1717 bp, Zea Mays
ttttatggccagaaaggaagggccctgattggattaccacagttgatgaagctaaggaattctacccgttatttggccttggggctaatattgcccttatcttttctgggcgcactgtgaagtatttctcaaatttgcgcaagacattgggtcctggaattgatggctgggaagtatctttgaaaggaatgatgagcatagtcgtacttcttggacttgtcataacttccatctattggggagtaaacaaatttgttttgaatgatccttcacttccaaagtctgatcgtaagaagaaaaaggaaaagcctaaacttggcatgaaagagagtctgaaggttctgctctcctcgaggtatgtgagggatctagctaccctagtggttgcttatggcattagtatcaatcttgtcgaagtcacatggaaatcaaaactcaaggcacagttccctagtccaaatgaatactcatctttcatgggtgatttctcaaccgcaactggaattgcaactttcacgatgatgctgttaggacgtattatactacggaaatttggctggggtgtggccgcaatgatcacccccaccgttctgttgctaactggtgttggattcttctctctgattttgtttggacagccgctgactcctatgcttgccactatgggtatgacccccctactggcagccgtttatgtgggcgccatgcagaatatatttagcaagagtgcaaagtacagtttatttgacccatgcaaggagatggcttatattcctttggatgaagatatgaaggtaaaaggaaaggcagccattgatgttgtttgcaacccactgggcaagtccggcggtgcacttatccaacaattcatgatcctgacgttcggatccctggcgaattcaactccataccttgggggcatactgctggtcatcgttctcgcgtggctaggcgcggcgagctcattggacaagcagttctcgagcttggctaaggaggacctgaagaaggataaggctgcccgagagaaagtagaaccctcgctgctcaaggcgcctgcagagggcagtgatgatgtactggcggagcagacaaatggatctgtgacgccccaagcaaccggaacggagagctcgccgtcgaactcatcccccattcaataatagctccagcatcataagttgtactagctaggagagttattacagcgagcagaaataattggtactccctccggttttttttatatatttggcgttggttagtgtaagggggtgtttggtttctagggactaatgtttagtccctagattttattccattttagttccaaaattgccaaatatagaaactaaaactttattttattttctatatttagcaatttatacactaaaaaggaataaaatgaagggactaaacattagtccctagaaaccaaacacccactaaatttgactagctagcgtcaaataaaaaaatggaaatggaggtaatattaaaataactcatggttttcaagtctgtaacggcgtgcagcttcaggctgctagtgatttttgtttgtaacatgagcaaattttgacggccggcggcgaacgtcgttctgggaatggccccgcccctttgtgccgatgtcaaatgcataaactgtgtgttttgagccgatatgaagcatggttctctctcaagagtgttagctgaatgttcagtagga

SEQ ID NO: 16501 - DNA, 1027 bp, Zea Mays
ctgctcaatgcttcacttggaactactccgtcgtctgtgacctgagtaacaatgaatcgattgagcgccttcgcagactgaaaggcattggagactccaagcctctcagcatcctgtgtcgctcattacgtgacatcgatacctacacaacaggatttcctcaaggcactaaccaagggcaagctaacatttttcgtgttgtcaagcgtgcaatacctgggccttacacatttattttacctgcaagcaagcagtttcctaaacaatgtataaagcatggttcttccacaaggtatgcaaaaaggaggcaggttggcgtccgaattccagatgatcccatctgccaggcaatattgcaaaatcttgatgaacctttgatatgcacaagtgtcaaatatctatcggaggatgaatggatacttgatccagtaatcattgcagatctttatgagccactggggcttgattttattgttgatggcggacctagaattgctgacccttctaccgtagtagatatgatgggagcaaaccctactgtaattcgtcagggaaagggtctaaagttggattggatggtagcaaaagatgaagaggaggacgaggcacagtcgatgttttctttcaaatcagcttgaaatttgcttcgcctgacctgtatgggctggcactttgctatggtcccccaaccgaagcgtcttctttcaactgcatataggatgtcagttgttagctgtaagcatagatgtcgaacacgaactgcgtgctgtaaatatgcaaggcgatgtaagcgaactggcagaatttgctcagtagcaacctttgctggaggtgatggaaagtttcctgctggttttcttgaactttgccgtgtacgcctaccagaatttccgtcctggaaggttccatattattccaattcatcctgcttctgtgatgcttttaattcgagaagcataactttttgggataattatgattatatccttcgctagacttgtaattattattttaccctctatttttt

SEQ ID NO: 16502 - DNA, 2222 bp, Zea Mays
cgggcagcagctaaagacagagaataaacaagacaagaatatgactgatgcagatttcttcaagagtaaagtcaagaaaaattggtcagattctgaatctgatgacgaaggttctgctcaccagtcaaataccaccactgatgatgaagactcgtcagatgaatcacaagattcagataaccagttggcagatactaagggcgatcctgacaagagaaacattgtggacaaggacactcttgtggagaatactgacttgcaagagccggaggatcttgacaacaaagagagtgaagatcttgatggcagaccaagaggaactgaaattcatgaagatcaagaaagggcagatgaaaacggtgctccaattactgatgaaaagaagttggccctggagactggtcgtctatatatctgcaaccttccatatgcaaccagcgaagatgatttagtggagctgtgccgccaatatggtgatgtggaacaggcacatattgttgtcaataaagccacaaagatctcaactggtagaggctatgtgctttttagccttccggactcagcagtcagggcacttgatgaactagataactcaagctttcagggacgagtgttacgtgttaaggctgctaaaccgctaaataagttggagtcttttcatgaaactgctgtggagaaagtaagtctcaagcagaaaaggttggaacaaaagaaagcttctgagatcagtggggatacaagagcatggaacagcttttatatgcgtcaagatactgttgttgaaaacattgcaaggaagaatggtatcagtaagagtgagttactcgatagagaagcagatgatcttgctgttcgtattgctcttggtgagacacacgtcattgcagagactaagaaatttctatcaaggtctggagttaatgttgctgcattggaagaacatgcttctaaacgaaatgagaagttcaaaagaagcaattatgtgatattagtaaagaacttgccatttaattctactgaggaagaactcgcgacactgtttcagaaacatggtagtttggataaaatcattctacctccaacgagagtgtttgccttggtagtctttgttgaagcaactgaagcccaatacgcattcaaaaaactactatatacacgatataaggatactcctctgtatttggagtgggcacctgaaaacatattgtctcctacctcagcaccggtggatgaggaagtaaaaaacgaagttggcgagcgtattcttactaaagctaatatagatcaaactgtagaaggagtaagcgctgaagagattgatccagatagagtggagtcacgatctgtgtttgtcaagaacttaaatttcaagacaacagatgaatcattgaagcagcatttcagtacaaagctaaagagtggcagtcttaaaagtgcaacggtgaagaagcatgttaagaagggcaagaatgtttcaatgggatttggttttgttgagtttgactctgttgaaactgctaccggtgtgtgcaaggatctacagggaacggttctggatggacatgctttgatcttgcaactgtgtcatgtgaagaaagatggtcaagcggcaaagaagaatggcaaggataaaagttcaacaaaactgctcgtgcgaaatgtagcatttgaagcaactgagaaggacttgaggcagttatttagtccgtttggccagatcaaaagcctcaggttgcctatgaagtttggtagccacagaggttttgcgtttgtggaatacgtcacaaaacaagaggcccagaacgctctacaagccctcgcaagcactcatctctatggtcgacacctggtgattgagcgagcaaaggaaggagagactctcgaagaactgcgggagagaactgccgcacagtttgtggacgaaagcagcggtttccagagcttgtccagtaagaggaaacggagcattctcgtggacgaaggctccgttaaagtttcaagaatagcagagtgattatcttgagcgagcacctgaaatttttgaccaatgttatgcaatagtaccagttcgttagggggggaaatgggttatcttaggttgtttaatgtttgtgtgctgttttagagctgaggaaaagaaatgctgaaaagaatctcacatcttaatgcaagagctgtctaaatgcaagcatatttctacagcctaagacaccaaaaagaaa

SEQ ID NO: 16503 - DNA, 1004 bp, Zea Mays
agcaccgtaacaggttcggccatcaagaagcctagggttcaggcctcctcttcagcacaatctactctaaaggtgaggaaggagagactgggtgacagaataactgccctacaccagatcgtttctccgtttggcaagactgacacggcgtccgtcctgcaagagaccattggctatatcagattcctactgggacaaattgaggctctcagctacccctacatgggccacggcaatgggacctccattcaaaatggaccaacaactggagaaaggaaccatgcagggctcctaccagatcaataccccggccagttgctgaaccataataacaacactggagcacggcagcctgcagcagtcggccagcctgatgagcagcagcagcagcagggtggtgctaataataatgacgagacgaagaaggacctgaggagccgggggctgtgcctcgtcccggtgtcatgcacgtcgcacttcggaggggacaacgccgctgactactgggctccggcgccgctcggtgggatcctccgctagagcgagcgcgccattgaagcatgcatatgcgttttctcgtttagatgtggcgagctagctgctgttcgttccgtacaagtatatgttcgtcaggctgctgcagggtagctagctagagagagctgtgtctaattaagaatcatcgcaagggtggcgtgcatgcatatatatgctgctggttgctgtgggaaacataccatcatgagcagtcattcttggtaggggagaagctgcgtgcgtcgtatacctgtaaggctgattgctcttgatgctatgcgagtaagtatgacgaccctttttgtgggcgcgcaaggcttcattaattattttgtatcttcaagggagggcgcttcaagtagaagatctagatcttctctggtcccctgtcgcaaatttatttcgttggtcatgtatatgtaattaaaatctagcaataagttattagtgaacatgtttatttactc

SEQ ID NO: 16504 - DNA, 1600 bp, Zea Mays
gactattagctgtcattcatcaaatgatggagcttgcggctgtgaacaaatcgaatcctgttcgtcccaatctggttaagccaaaggaaactttatgtgaagctaaactgagcttatctaatagcccagactctgtgttgaatcaatcaagcttgttaataagcagctctagtcctgatattggcgagaccagtgaccaagtgcaggtggattcttgtcaatacttgataagcagccatacgggtgattgtagggtctcatgtcctgacaacagttcgttggatacttctggtaaagctcatgatgaagagagattggatcaggccttaataaccaagcatgacagtgggatgatgccttctactagtaaccagacatcattagatgctactgtaggcactgagagcagtgctgaatatatgaagcaggatgtaagccattgcgatgacttcaatatcagagtcaatgaccaaagcttgaaccaggcgttaagaaatcagcatggtgatgctgtcccattacctgacatggtatcactagatgctaaggtggacaaggaaagtagttggtgtctggaaccattgattgcaaacttcgactgctgcattgacagcgttaatgtggatagcttgtgcactgatcagagattggctgatgttgcttcaggccccacagctgatgtgccatccgtgctgctggccaaggagaattctgatcctttgagtgcaaagctcgaaaatattgatgttgccaggataaaaggtttactgatgaagaggaagagccggagagagatccaaaaccaagccattgcttcagatggcctcagtgaagaagcctggattgagagagagctggagtctgggattgtcacaaaacaagaagccaattgtgccgccatctcagatgagctaagtgatgaagcctggattgagagagagctcgagtcagggattgtgaccggaccaacaaacgagcaggcgatcacttttgatggtttgagtgaaaatgattggatcgagagagagcttgagtctgggatcatcattgagccagcacctgctatcaagaagcggaagctggagtcaagctgttagctctttagctgctgcattcagaggccagattccaagcaggtgaataattacagatggaggtaccctgcgactagggcacatcgaagccaagagatgtcgcatagatgggaggatcaatattttccttttttttatttctttaaccaaacacctcggaatactttggcacgagggttgtgtgtacagtgggatcttcccagtttcttgaattcagaatcacacgaggtttgtgtgtacagtgggatcttcccagtttcttgaattcagaatcatatccactgtatctgttccttgtttgtgtaaatctagcatgcccgaagttcggctttaattagattgtaggtgtaactgtagcagggattgtctcgtgttaagcccgacgaaaaaatgattcagtgtaactgttactggtaaccaaagaaaattagttattcactatagacttattgttaacaaaagaaaagacagttactggtgtacgatgtttataaattgatggcgaa

SEQ ID NO: 16505 - DNA, 562 bp, Zea Mays
agaccaaccaatattctgaactaatacagggaaacatacctgcctgccctacaacatgctaaaaatatgggaatccccgttacaatccactgtggagaggtggcgaaccggaaggaaatccaagcagtgctggacttttgccctcagaggctgggtcatgtatgctgtctgaatgatgtagaatggaagaagctcaagtctctgatgattccgctgacctctacaatgcgaagcaccctttgtccctgtgcacggatgattccggcctgttttcgacaagcctctcaaatgagtattacctcgttgcaacaactttcggcctcagcaagttcgagctgttccagctggcccaggatgcagtgcagtttgtttttgctgatgatgtggtgaagaagtctctgaaggaggtgttcaagcatgctgaaaagaggctgctcatgtgggatgaacttgctgcaccaagctagttagaaggtcccgctcgcgcaaccattggacacacaacccagttgttgatatctacgcattaagctaagcacaccaccatcatgtgttggttacc

SEQ ID NO: 16506 - DNA, 1150 bp, Zea Mays
ggattattgtttggagattatttttcttcacttgcaaagtatatgaataagaacccgaaacagaaggaaccagcacctggccttgtatttttccacattccactaccagagttcagcagttttacggcatccaatttcacaggagtaaagcaggagggtatcagctcagcatcaattaactctgggttctttgcctccatggtggaggctggagatgtgagagctgcctttgtgggacatgatcacattaatgacttctgtgggaagctcagtggtattcagctctgctatgctggtggatttggttaccatgcctatgggaaagctgggtggtcaagaagagcgagggtactgtctgtgcaacttgagaaaacagacagcggtgaatggcgaggagtcaagtccatcaagacatggaagaggcttgatgataaacatctgagcacaattgactctgaggttctctggaacagaggctctaatgacaggaatggtgctccataagggatctctacatcggtgtgtattgttggatggccagtttactatagaatcagaaatatgcagaagtgtgtacatgggggagaaggtcaaatacagacacatacacgcaggtggtctcatagactcgtatatagtgtggtcaaaggaaaacgagaatgcaatgtcattgtagtctcatctctcgtgtattgttaaactcggtcggaaagagaaagactgtccttccaatattatattaaaaaaagaccgaaacatggtttctgtcaagaaaatccttgaaccctagtgcccattactagcaggctgtcaccatgtaacccaggagcaggcaaagcacaacaagtggatttttttaaccatgttagaaattcgtcctcgagggaatcgaatcgaagacctagaggggttactcggaagttttaaccattacactagaggccctttcacttatctcatgtattgttactagcaccgtctagctgcaactgaaacctcagagctgccacaatatcatttttcatatatactgaatgttcttatgcaaatttgcaatcaattaagaagctgataagtaaaaacaatcatataactcagactacagatctcctagctggcatggtgtgttcagatgatggtgctgaaatca

SEQ ID NO: 16507 - DNA, 1026 bp, Zea Mays
atacaacaaccaacgaaaagcgcacgcgcacgcgcatcccggcagtcagtagcgcagctgcctctcctctctttgccccccggagccggagcaagagcgccgccaacagctcgctaccggcgccgtgtcatggcgggggctggagacaaggtggactacgtcttcaaggtggtgctgatcggcgactcggcggttggcaagtcgcagatcctcgcccgcttcgcccgcaacgagttcagcctcgactccaaggccaccatcggcgtcgagttccagacccgcaccctcgtcatcgaccacaggagcgtcaaggcccagatctgggacaccgccggccaggagaggtacagagctgtgacaagtgcttattacagaggtgcactgggagctttgctggtctatgacattaccagacgccagagcttcgatcatataccccgctggctagatgaactccgagcccatgctgacaagaacattgtgataatgctggttggcaacaagagtgatctcgaggagcagcgagcggtgagcactgaagatgccaaggagtttgccgagaaggagaacctcttcttcctggagacctctgcgctccaggcaacaaacgtagagagtgcttttcaaactgtcttgacagagatattcaagatccacagcaagaagaacaaaggtccttgtcccaggtccggcgcaggaaatcccaaagagcaagtgctgcagttccatgtgatgcttctacgtttggtgctgggtgggttgaaaatatattcacgcaacattgtgttggttttaaatccctgctgaaatacttgggttttggcgggattgtattggaacaccggtgtattttagatatttgtcacaattgtgacatgagggaagggtgtgctgatgtattagttctcttgttctctaattgatacgttttatccctgctgcaagtatctgtagcaccgattgtttttgagatgcgaggtgtgaatttgccgtgtacaagaaataatccactcatctgatctgctg

SEQ ID NO: 16508 - DNA, 2463 bp, Zea Mays
cgaaaacttatttcgcaacgcctacgcttgacgaaattagttcggggaaaagaagtggacacattccctaccgggactcaaagctgacacgcattctacagctttctttgggtggaaatgcaagaacagcaatcatctgtaccatgagcccagccctgacacatgtagaacaatctagaaatactctattcttcgcaacctgtgcaaaggaagtcacaaatactgcgaaagttaatatggttatatcagataagcaattggtgaagcaccttcagacagaacttgctagactagaatcagagctgaggacccctgaccgtggctcctcttctgatatcctcataatggaaaaggacaggaagattagacagatggaaattgaaatagaggaactcaggaaacagcgagataatgcacagtcagagctcgaagaactgaggaagaagaaggttgatcaccagccagggtggaatccctttgactcgccacaaaaggcgcgaaagtgccttacattttcaggatcgctagagccaagtaacaaaaataagatgatgatgagctcgattaggcaatcatctactgctccatttatgttaaagcatgaaatccgcaagctggagcagctacaacaacagcttgaggttgaagcaaaccgcgccattgaagtacttcacaaagaagttgaatgccacaagcatggcaaccaggatgctgcggaaaccatcgctaaacttcaggcagaaatcagggagatgcaaactgttaggtctgagaacagagacatggagatgattacagatgaaggaaatggatccgatttgaaagatgagatttctagacttcatatgcaagacaatgatattgccaaacttgaggcgaagctggaaaatgtgcaacggtctattgacagattggtgatgtcacttccaaacgttgccatgccgtgtaatgagactaccccaaagtcaaacagatcaaagaagaagaagaggctgcttcttcctctgggtgtgagcaacaacatcaacagagcaaatcttctcagagcaccctgttctccccattcttctagtaggccttcggaatcagaagttgagaacagggcgccagagggtgacactatgtctgttgagggttcagaaaaggctactcccaccaagagtgaagatggagatatgtcatctcgtgatgaaacgccacgctacaggcgctccagttcagtcaatatgaaaaagatgcagaggatgttccaaaatgctgcggaagaaaacgttaggagcatcagggcttacgtgactgaactgaaggagcgagttgcaaaacttcagtaccagaagcagctgctagtctgccaggtcctggagctggaatctaacgagggcaagccgaatggagaggataattctgggcctctacaggatggtcctgattcatgggacagattattcaaagagcagatgcagtgcatcattcatctgtgggatcagtgtcaagtatcgatcatacacaggacccagttctacctgttattcaggggggacaaggctgatcagatatacatcgaggtcgaagtaagaagactcgtatggttgcagcagcactttgccgaggtcggtgatgcaagccctggtgctgttgaagaccctgcagtttcacttgtctccagtatgaaggcgctgaggaacgagcgagagttcctcgcgagaaggatgggatcaaggctgacggacgaagagcgtgagcggctcttcatcaagtggcaggtgcccctggacgcgaagcagcggaagctgcagctggtgaacaagctgtggacggaccccaacgaccaggcgcacatcgacgagagcgcggggctggtggcccggctggtgggcttctgcgagggcggcaacatcagcaaggagatgttcgagctcaacttcgccgtccccacgagcaggaggccgtggctggtgggctggcaacccatctcgaacatgatcagggagaagacccagcagctctggtgagaactgaacgcatcatggcgcagcgccgtgttgtacagatggaatggaacaagagacagacagtgcatttcggtttcagctctggaaattgctgatcaattaattgtggggggaagcgtctctacttccttcccggttgatcaaggcggacaagcggtcgtcggtctggtatccccttcctgtgtccctaaatgtagatggcgaattcgtggagtccgaagaatctgaatgatctcgcattctttacgtaatcccttgccaattttatggcaagttttgtttgctccatttgttttatggtatgatgatctggatctgatgagcccattcaaattcttttgccgagcccccctccctctttttctgctgtctgtctgtgcatcggaattgctggatctatcacgatcttgtttgtcaatcacatcgcaaatacacccaacttttgtttggc

SEQ ID NO: 16509 - DNA, 960 bp, Zea Mays
gttttggtgcacccctccatctcaaaattttaccatgtcctgaagggcatcattaaggcaaaatatggtcaagatgcatgcaatgtcggagatgaaggaggttttgctcctaatgttcaagacaacagagagggtcttgtcttgcttatggatgccattgagaaggcaggctacactggaatgatcaaaattggaatggatgttgcggcatcagagttccttacaaaggatgggaactatgatctaaactttaagaatcagcctaatgatggagtccatgttctttcagcccagcatctgggtgatctgtacagagattttgtcaaggatttccctattgtatcaattgaggacccttttgatcaggatgactggagttcatgggcatcattgcagtcctcagttggtatccaaattgtgggtgatgatttacttgtcacaaacccaaaacgaattgcagacgctattgacaggaaggcttgcaatgctcttttactaaaggtcaaccagattggtactgtcactgaatcaattcaagctgccctggattcaaaagctgctggttggggtgtgatggtcagccacagaagtggtgaaaccgaagacaacttcatcgcagatttggctgttggcttagcaagtgggcagattaaaactggggctccatgccgcagcgagaggctggccaaatacaatcagcttctgcggattgaagaggggcttggcaacgtgcgctatgcaggggaggcattcaggtctccataagaaatagactttaaatcaccgcgcgtgtgtgagaaagtgccagctttatatggacaagactattcagagaggataatgaatgagagctaataatttttttacacaaaatcaaccttggcttgcttcctaaattctctctcaattcttcaaaacaccagaactctttcaaatgagatgcaggtggttacaagttct

SEQ ID NO: 16510 - DNA, 916 bp, Zea Mays
gtatgaaaatgcaagccttattacatgcattgatgcagtatcagaccgtgattttgtacttgagtttcttgctgccaattcgattgctgctgtccatctttcgcgaattggtgaagaatgggttctttgggcatcagaggaatttgggtttctgataccaagtgacaaagtttcaactggaagcagcattatgccccagaagaaaaatccagacccaatggagcttgttcgtgggaaatctgctagggttgttggagacctcatgactgttctaaccctctgtaaaggccttccacaggcctacaaccgtgaccttcaggaagacaaggaacccttgtttgatagtgtgaaagctgtattaggaatgcttgaagtatgcacagagtttgctcaaaatatctcttttaattcaaaaagaatacaaagttcacttccagctggttatctggatgcaacgacgctggcggattatctcgtgaagaagggagtccctttcagaacttctcacgagatagttggaaggtctgttgctctatgcgtctccaagaactgtcagctagctgagcttgaattggctgacctaaaatctgtccatcctgtatttgaggatgacgtctatgaatacctgggggttgaaaacgctgtaaacaagttcatatcctatggctctactggttcagaacaagtgaaaaagcagcttgaggattggcgcatccagctcggggtgagctcataagggttggcatggttcaagaaataagctcgcaaattagtgcttgcgatttttgaaggtgtatgttgacgtcgtgaactttttctgtgtgtttgttcatacatttcgaaaactggaatgaatgatgtaaacatgttggacaccttgagcctcttttatatattattattgcactgtgtttta

SEQ ID NO: 16511 - DNA, 3607 bp, Zea Mays
tgaagaattttggaccccactgccaagtttttgaacaaccaacagttgccatgtgagattcagaagaacttttgcaagaagggaggtcttgtactttggaactactcgatagccatatttttagaggttagcaaaaggagatcagaatgactaatgaaactagaaaacatcgttccaagtgggacacaaaagaaggatctgatgtagttgagatcagtgatgatgagtctcctgataagacaggtgttcaccgtaaaggtggcgatttacacacaaaacctgacacatccatgcaccacagaggcgctggacatgagaaggaacatgctgatgggtccaatgaagatatgaaggaaatgcaacataaggcaccctctgaaagatcacaacctcttagaatggttgatgagcgtgataataatgagtggagcaaggcaactggtaaccaaggcacaaacagatatgcagatgacagaagacgtggtgatggatggggtacagctcctagtcgtgattattcttctgctagggcgccttctgatccagatgcatggaggcagcgcagccgaagtccatctccaagaggggtttggaacaaatcacgcaggaacaggagtcgttccagaagcagaagcagaagcagaagcagaaacagaagtaggagcagaagcaggagtatagggcgaggcagaggcaggagcagaagtccatatattgctgaccgtggatctgagtggagggttgagagaggcagaacatctggaggacctgttcggccctgtagggattttgtggctggtaggtgcagaagaggctcaaattgcaggttccttcatgaagatggtgggcacaggccatttgatgatcactatcctgctgacccaagggaaaggtatggttatcagagcaaggagtttatggatacaagaggaccaaatgactatttgcggagtaggcaatctcgagatcgttatgatgataggccttgggagagatctgaacctcgaagggattaccggtatcctgaacaatgctttaattttgccaaagggaaatgcatgagaggtgctagttgcatatttgcgcatagtaattctgcttctcatggtagatggagagatgagactagggaaagtgcccatgatagatttggccctgattcatcctatgggaataggactgagcaccgtagggtaaacaaaaacccttgtaagttttttgctgaaggttgttgtcgccgtggtgaaaattgttcatatctccatgaggaagctccccatagtcagataggagtgagtgcacctgatgaggctttgaattacagtgatgggcatgcagcaagaggaaactattcaaactggggtgaacaaaataatgctgtgcatgcaacctctcagattttatccagggatgacagggaaagtcctatttctcagagtattggcagaaatgattctcgcaatgattatgaaaaccagcattcaaaagatgctggaaagagccagtaccaaattattcatcaggaagattttggttcaccagggcaaaagaaacatgaagatgctatttcacaacagccacagttattgactcctgtccagactactgctcttagcatgcataatgaaaaggtatctgaaatggacagtcagaatgctccttcaagcattggaggtttgagcatgcaatcaggggttcgtagtgctaacattatagcagagcaaagcctgggtcaaatacttcagagacatgatccaattcctcatattcctgggccacaaacgcttccgatcaccacacaaccacagaatgttacgtcttcattcccatcaaatagccacgtgcaacaaaataactttcctatacatcagaacaggcaagagcagtttgtagttccacacgcagctgcaaacatctcaactcccagcatgcagagccagccaattgcttctcacatggggcacatccaacgtggcggctatggtatagagccacaggcattgcccaatatctccacacataacgggcataatttcaatgttgccagtcaagttccaccaaacattccaacagctgtgcatgctgggcagactcaggtgacaattgacatgccaaggttgggtcaagacagtggtcctcaaagcatacacaacatggagatgcagccaatgtctccaaacgtgcaaagccaatccttgcaggggttaccccttgtgccggcttccagctcagctgatatggccggagttcctgttcctcacaacgctgtgaaaagcgaagaagttagccgagttactgcatccctggcacaatactttggaaatactgctttcggcgctggtacggttggattacaaccgtcgcagccgaatatgaatgcaagcctgatggccactccacctgtggtaccaccacctgtccaacccaatccgtggccctgggcgcagcaacagacagggatagtccaacccggtctccctgttccacctcagcagcagcagcagcaacaacaggctccccagaggcagcaacaacaacaggctccccagagcttccagacgctgatcgccgttggtggcagtaatggcaactctatgctcatacctaacgcaggcgcatcggttggtcccgccaccgtggcggcgaaggaaaccgcgcctccagagagcaagaaaggagagaagaaaaatgcagacgcagaaaagaaaaatggcgacgcggagaggagaaatgccgaagcagaggcacaggaagacggcgacaagggtaagaagggcaaggactccaagcagctgaagatgttcaaggttgcgctcgcggacttcgtgaaggaggcgctgaagccgacgtggaaagacgggcagatgagcagggaggtccacaagaccatcgtgaagaaggtcgtggacaaggtgacgagcaccgtggagaacacccctccgaccaaggagaagatcgacgtctacatgacctactccaaggagaaactgaacaagctcgtgcaggcgtatgttggcaagtacgccaaggcgtagtagcgtttggccaagaacacactgacgcccattttgtgccccgaggtcggaaggatggaaagcaccgcgtgcatccgtgctcagaggtttaggatttgtgaaggcgcgcgaggttggggggggggggtgcctgggcttgtctgcagtttcagagagtttagcgtgtggtttgtgggcaaatggcgccgttccaacatctggctgtaacttttgtagaattgttttattctgggatttagaacatggtgtagcggaatcatgcatggcgtggatcattttttatggatagactatataggaggcatgcatggtgtggtgcccatcgacgtgctagtgttatagtattgttgatcggaggaccagaccagtcaaggaacgcacggtgtccctcttgatgagaagtgagttgcttgctcatcgttcctcatgcatggtgtgcagcagcgtgttttatcgtctatctatgagtagtaggtggaaagcatgtggaaccaaaccaagtaagaacttggctttctctgcctgattctgtggttgtgccgacgactagccggccaacacagattggtcga

SEQ ID NO: 16512 - DNA, 1275 bp, Zea Mays
cgccacacggatggtataagagtaaagacaaccttttcgccgaaccccccctcggaaggatggcggcggcggtttccagggccatctgcgtccagaaaccgggctccaaatgcagcagggacagggaagcgacctccttcgcccgccgaacggtcgcggcgccgaggcccccgcgcgccaaagccgccggcgtcatccgctccgactccggcgcgggacggggcccagcagtgctcgccgctgagggcccgtcgttgacgccgcgtcgatacagacgaccaaaaagagcaaatggcgcctcagtctcccgcgcgcaagctacaacggttcagggtccggtgctgcggcggctgagccgtctaccgtgggagacaccttggaacgggaggagggcggcggcacagaggcaggcgcttcggctgatgagtcatccaaccggaagcagccgccccctgttgaccccaagattgagaaggagctcaagaaggtagttcagaagactgcggcaacctttgcaccaagggcgtccacgaaaacaaagaaccctgctgtccctggaagtaccctgtacaccgtctttgaagtccagggctatgtttccatgctgttgggcggagcactttccttcaatctcatattcccatcgaatgagccagacatctggaggttaatgggaatgtggtccatttggatgttcactataccttcgcttcgggctcgtgactgctccaataaagagaaagaagctctcaactacttatttctcctgattcctctgatcaacgttatgattccattcttcgtgaagtcctttgctgttgtttggtcagcagatacagttgctttcttcgtgatgtatgcatggaagcttggatggctgcaaaggttgaaatgaagatttttggtgtgctctcttggtgatgtgtgtatgaaagcttggatatttggtttgaaaaggtggagtcggtagcttttttgctgagagaaacatttgtcctcaaaattttcacatcttttggagggagctgcatgattagtttattccaagatttagttcatatagccttttatatcttgtgtatatgcagggagtacgaaaaaacagcctttcacatttagtgataaatatatgtacctgaagtctgaacatttttgttgactacgaactgaacagctctaaatggttcttgatttctcaatactttttgtcccagacaatatctatgttgactgctttttctgaaaatgaaacggggtaccagtggagtttggaaa

SEQ ID NO: 16513 - DNA, 609 bp, Zea Mays
gcgtccacttcgctcccctaggtcgcgagcgagcgacggccgactgcgcgagaccgcgagtgaccgccggtcgagccccgaggccggagcggctcccccgcaggcctgccctcgtctggtcgccgcctcgccgcgcagcaaccccgcgacccgctgcccggccggcccgccgggcgatgcaggcgaagaagctgaccctgctgcagacggtggcagctgcgggagtcttctctgccgtctccttttggtatggcttcatgttcggaagggagtccgcgcggcgcgagcttggtggcatcatagacgacctccgcagcaacaagcccaccaatacccctgccggtcccgatgctcattcgaagccatagtggggtatggtgttctgttgttcctcctttgccgtactaaatctaaatgtggtcaagcttgtcttgtggatcctgctaggctgtagacggaagaactagccttggagctaccagttttttgtccccttctttcataatgtgtatacggcttgaacatcagtttttagactgaaaaaaaaaacaagttaacctgccacaaaagacaaggaagaaaaacaagttaaaacctcctttggttcag

SEQ ID NO: 16514 - DNA, 150 bp, Zea Mays
atctccggccgggtggcggagtgcacccgccctaaatcctgagatgaggaggggcttaggcgttttgcttgatcgttggaatgaacgggaagaacgcaagaacacacaaggatttagagtggttcgggctgccggagcgtaataccctac

SEQ ID NO: 16515 - DNA, 1248 bp, Zea Mays
ctggacttctggtacttgtaggagcgtcctgtcttagggaatgttttaccagtattgttcatggtaaactcagagtttctatcaactgcccgggaaagtgaacttgtttccactccatctttagtgtcaaaaccaatttcttctacaggggcaacggaactacttcgaagtgaattatgggtgggttctgctgctgcctcagtgctgaagaatttgatgaatatgtctatccaaacaaccctatctataggcaatgcgtatccttgaggcatcttttccacagcatttttggcgggtatactgcaacattccagaggcttgagtctaggccaaacaacccagctcaaggggttgctccactgggatccactaatccaagtgtcaacataaatgacaattcactcaatcttgtttctagaccacctccatatgataccgatcctagatatgcccgtgttcaaagagagggattagtctccaggcgtgagaaatccataaatcttgcacaagaagagtcactggcccttagacgaaatgccagcagctctggtattgaacatttagctgctcagaagaaacgcaacagcactgaaaatgagggtgaatataaggtccatcgttctgaatcaactaagagtttgtctgcaaaagcttatagtagcagctatgctgttgtcgcttcagaagatgaggatgtctgccctacttgcctggaagaatacacgccagacaatccaaaaataataaccaagtgctgtcaccattttcatcttggttgtatttatgaatggatggagagaagtgatacatgcccaatttgtggaaatggagttttgcgagagcccatgatagcctttcggtttacatgatctcacatgaagtctgagctgcaggaaatggggttctgtgagaaccaatgatagcctttcgatttacatgatctcagatgggagcaagggaaacattctacagagtacaacagaatgctggagaattgtaaataatagttccttatgcatgcgatgtccaaatagatctctttctcgagatcagtttcttacatgtactgagatggttatctgtcttactaaattcatgctagaatttgcttggccagtttttgttatatttgcaaatggtagctcatagatggaagcacaactcatggatgaaagaatatattaacctgatcatgtgactgtctggcggtggatgtaccctatgaccgtatctcatgatgaatctttg

SEQ ID NO: 16516 - DNA, 800 bp, Zea Mays
gagacagaatgcactcaggtcgaagtgcttgagcagactagttgtggagaaagcacttacagatcaaaacggtgtcctgcaaaagttcatggaggcagagaaggagaaaaacaaggctttgatgaacgcgcagctccgggagcagcaaaatggagcatcaacaagctccccatcactttcaccaccaatagttccagattccatgccaactctaaatatagggccatgtcaacatagaggggcagcagaatctgagtctgaaccgtctcctgctcctgcacaagcaaacaggggcaacctgccaccatggatgctccgcactgtcaagtaacaggtgaggtcttcccagtgtagttttgcagctgatctcgacagcaacacacctgtcaccgaaatgcttcggtgaccctagatatcaaccgatgcacgatccatctcgatcctgtgatcgaataccggcgtaggtactaccaataaagtcaggccccgtcaaatgctttacatggtgattgaagtctggagcttctcagcaccaccatatattgtgttcagttcctgtgtttattgccatagctaccctttttttctctgatctacgagctagacgtagctttgtgcttggagattccactactatgtttcctctgtcctgtgtatgctttaacggagatgcacgttgtacccgtggtaatatatataaatttgcgttgtaaagatcaagtggctcttttctccgaaatgttatgaagtctcaggtgtcaaacatgcgtgactttttaactttgaactgtacgtttcag

SEQ ID NO: 16517 - DNA, 721 bp, Zea Mays
acattacaatattgaggacctatccataaaactcacggccctactggttcgaggctgactagcactcgtcaccgttccgagaccagcgccagacgcagacggccccgaacgccggcggcggagcatcaggtcgtcgacctccgagcatcgacccgccgcgatggagaagggaaagggcctcgctcgccgctgggcggtggagctccccgacgcctcctcctcctcccccgccgtccccgacccgcccggcttcaccagatccgcgcccgacgcggacgacgccgctggagcgcgccagcgcaaggactccgaggctgcatggaaggcgcagaaagcttgggaagttgcgcaggctccgttcaagaacctgatgatgatgggatttatgatgtggatggcagggagcactgtccacctcttcagcatcggaattaccttctctgctctgtggcaacccctcaacgctctccgatctgttgggaaagtttttgaaccatttaaggacccaagggtggatactattgctcctaagttgctctttattgccctcaatttggctgccatgggattgggtatatggaagcttaatacattgggccttcttccaacaaatccatcagattgggtgtcttctctggctcctgctcggatgaaatagtctcatctttgtcatgatgcacctttggcactatgtatgaactgcctgaaaatcatctaatcg

SEQ ID NO: 16518 - DNA, 1616 bp, Zea Mays
gcaggttcttctttgattttagcctcacgtacgttggtgcggggatgatctgttcgcacctcgtgaacatctccaccctccttggtgccatcctgtcgtgggggatactgtggccactcatcagcaagcagaaaggggagtggtaccctgcgaacatacctgagagtagcatgaaaagcttatacggttacaaggcattcctctgcatagctctgatcatgggagacggtacataccacttctttaaagtcttcggtgtcactgttaagagtctgcatcaacggctgagccgcaaacgtgctaccaacagagtggcaaacggtggagacgaaatggccgcgcttgacgacctacagcgtgacgagatcttcagcgacgggtctttccccgcctgggcagcttacgccgggtacgccgcgctgaccgtcgtctcagcggtcatcatcccgcacatgttccggcaggtcaagtggtactacgtgatcgtggcctacgtcctcgcccctctcctcggcttcgccaactcctacggcacggggctcaccgacatcaacatggcctacaactacggcaagatcgcgctcttcatcttcgcggcctgggccggcagggacaacggcgtcatcgcgggcctcgccggcggcaccctggtgaagcagctggtgatggcgtccgcggacctgatgcacgacttcaagacgggccacctgaccatgacgtcgcccaggtccctgctcgtggcgcagttcatcgggacggccatgggctgcgtcgtcgcgcccctcacgttcctgctcttctacaacgcgttcgacatcgggaaccccaccgggtactggaaggcgccgtacggcctcatctaccgcaacatggcgatcctcggcgtggagggcttctccgtgctgcccaggcactgcctcgcgctctccgctgggttcttcgcgttcgccttcgtcttcagcgtcgcccgggacgtcctgccgcggaagtacgccaggttcgtgcccctgcccatggccatggccgtgccgttcctcgtgggcgggagcttcgcgatcgatatgtgcgtcgggagcctggccgtctttgtctgggagaaggtgaacaggaaggaggccgtgttcatggtgcctgcggttgcgtccggtttgatctgtggagacggcatatggaccttcccgtcttccattctcgctctggccaagatcaagccaccgatttgcatgaagttcactcctggaagctagaaacagtattgacagttcacagaaatggagaatgcgagatacactgaaggcatcaactgtggttggttgaagtgttgaagagcaagtcctctggtcgtcgacatgaagcggagccatatgtcccctgtattatccttgttgtgcatgtgtgggttctccaagggctacagcactcgagattttctatagagttgatcatatgttttgttgtcatgttgggttcaacctatgtttatgttttgggtggaaaaaagatacaactgtacatttttaacagaaattaatgctcattttggttgtgtatttacattctttcaagtttgtggttactgccttgtatagtttgttgtcaacaatggagctgattgg

SEQ ID NO: 16519 - DNA, 760 bp, Zea Mays
aataggccgaaggaacagacatgaaaaattggcatatcgaattggtctctccccccactcctggtgctgaagtagcgaccttcgatattgttgggccagtttgtgagtctgcagatttccttggaaaagatagggaacttccaacacctgatgagggagctggactggttgttcatgatgcaggtgcctactgcatgagcatggcttccacctacaacctgaagttgaggccgccagagtactgggttgaagaggatggttcgattgttaagatcaggcatgaagagaagctcgatgactacatgaagttctttgatggtcttcctgcttagatgtttatttgtgactgctaggggcgatgttttcttggagataattgaatttttctttgtcaagctcattttgctttcttgtggttgttatggaatgttactggatactggatagttagttcggcctgtaggcgtatcctcctgaacttacctctcattgctgttagttttggcaccaagtttgttcccaattgctatttacggaagttattgcataaagggctgtttggttgtaatcttcccgtaagaataagatgcatgtttttgagttagaggaccatgcctgagcgtgatttgtttgggactgaatgttttacctggtgacttgcctgcttgtgatccaaatctgtcacctgggctccggttattcccatcatccatggattagagtccatggattagagaggattggaaaaaaataagaaaga

SEQ ID NO: 16520 - DNA, 157 bp, Zea Mays
gaatggggggctggcgacgcgcaccggccgtatgcggaaacggcttcctgctggtcccgccgatcgggctcggggcgtgggaccgttgtcgcccgcgccggcggccaaagcccgggggcccctaggcgcccccggcagccgtcgtcggcgcggacgg

SEQ ID NO: 16521 - DNA, 2594 bp, Zea Mays
tgtctattatttcaatcgtgtttcggtcactacttgctatggattcttgggaagccctgtacctgactactggatccactaccaagctcttcaagttccaggatccattcctctttgtcgggcaagagctcttggcctctgtggattatcagcctgattcacaactctctgcaagaattcgagcgcagatgggccaagaaagcgcggctgacgcgattcctggtttgatggtttctgttggtgtttcgggctaacagactctcttttttttgtttacttcctcaaagttccacttcaacatatggatccgggcttcccgagttggaatctgatcactcgcgtcagtgcttcttagcttccttcatttgccgtcatggaggagcagaactcatggcttattaggaccaagttctcccatactgtctacactagagtggatccacgaagagtagcagctgttgctccggtgggcaaagatgtggtgctgccttttgctccgcttagtaaggatgttgagcggaagctgcagaaaattttcagtatgaagaagtctgcatcgatgcctgttgatcgggatgatgaagacacagggactgcattcaagcactgcgctagcttgccgctagtccggtcctcgcctcagcttgatagggacaaggtcaacaagcccaggagggcgggcctggaggttcctgcaagccccccgatgaactcagagagttgcaagacaccaaaggcaaggagcctggtcaagagcccaagttcgatgatgctcctgagctacttgaacaaggcaccatcaaaccaaggctacagtccgcaaaaggcttatggatctcggcccagaccgagatcaaagtccccccttcccagtatcgcgccttcggaagtgttcagggaagcgaagtctaccagcaagaggtttgcaagccctcctccacagcgaagaggatctgaaaagagtatctatggcaaatcgtttgctagacaggtgtcggatattggtcagagtcctgattggtgttcaactccagtggtatctggtaagcacaagtctcaaaagaatagtgcttggtcaaggaaatccagcggtggaaggaggattagcgcagtaaaccctgcggatgatcgtagggcgcagatggttagaatgaatcaggcggtgcagacgacgttcgattggacgctcgatccatccaagctgcttgttgggcacaggtttgctagtggagcgtgtagccggctgtacaaggggttctatgatgagaagccagttgcaattaaatttatccgccaacctgatgatgacgacaatgggaagacggctgcaaagcttgagaagcagtataacagtgagatcaattcgttgtctcacctgtaccataggaacgtgatcaagcttgtagcagcctacaaatgcccaccggttttttacatcatcaccgagttccttcccggaggctcgttaaggtcatacctaaacaacacggagaaccacccaatccctctggagaagaccatatccatcgctctcgacatcgctcgaggtctggagtacgtacactctcaagggatcgttcaccgcgacatcaagcccgagaacatcctcttcgacgaggactcgtgcgtgaaggtcgctgatttcggtatcgcctgcgaggagaccttgtgtgacgtgcttgtggaggatgaaggcacctacaggtggatggcgcctgagatgatcaagcagaaggcgtacaaccggaaggtggacgtctacagcttcgggctggtcatgtgggagatggtgtccggtagagttccttacgagaacctgacccctttccaggtggcttacgcagtggccaacaggaacttgaggccaacgatttctccagaatgcccatcggccctcgggcccctgatcgagcagtgctgcgccttgcagcctgacaagaggcccgacttctggcagatcgtcaaagtcctggagcagtcccactccatcctctcgcagggtggctgcctcgacgcgcagaagagcggcacctgccaggaccccaagaagcggctcatgcagtggatccagaagctgaaaccaacgcatggcgcctgagtaaccgagttcttacaggctatagcatcgtttcagccgcagttttttttttcttttctgtctagttgggtatgctctcagtagtttagacctgttaaggaggatccttggtttaaggaaccagcgttctaaggcggatgctcgtagctgtgtgaccaaccactggtctgcgagcatagatcttgcagtagctgtacatggttatgcttttgcatctcgtctccccatcatgttaaaacttccctgcaggttgttctcatggatggtaccatagtgtgtgcggtgtgcggtgtgccccctcactcgttgagctgaaagcgagaggaaaatcatacgacgcagagttgactcctgaggccgtctttcgggaaagggtcgtatgctaacacaattattgcgcctttcccttctattgttagcagctgccctgccgtgcttattgtcatcatgatgctgatatctgagacagcaacatctgatggctgcttgtctaaag

SEQ ID NO: 16522 - DNA, 264 bp, Zea Mays
cgacaatcgtgacaggcctcatgtcctttgcctccctcgtcacctgcgagggggctatcaacgctttgtcccgtgaggggtgcgggcactttgaggtcttcgaccagtcggacgaaggcttcgagcatgaaatcttccaggtcgaagacctggtgctgaagcgatcgcgggggcgctcttcgacaggatgtgggaccctcacggccgggagacggtccgggagaggtccgaccgggcgatggatcaagtaaaggcttattcgtg

SEQ ID NO: 16523 - DNA, 348 bp, Zea Mays
catgagctgcctgaatcacgactcatgtaaaaaagtgatttggagcatacacatctggtcaagggcttggactatgctctacttcataaagtacggagtgaaattgaaaagaaacctgaggcagaggatgggaaggatacaaagtcaagggcagcaaaagaagatcaggcagtctccttccgcaccgcaactgcaaagtctgtgtaccaatggatcataaagcctcaaagcataattaaagagaatgaattgtttcttcctggccggatgtcatttatttacaacatggggcatcatagcctcataattgctaaatacagtactttctctgtcttcatgttctattag

SEQ ID NO: 16524 - DNA, 1652 bp, Zea Mays
tttttccaggtctgcgatggccaaaccattgcccctgagttgatgcttctggggttcatctccctgctgctgacggtgttccaggggatgatccggaggacgtgcatccctgaacgctggacattccacatgctgccatgcgagaagccagatgagaaggccggtgaggccgccaccatggagcattttgtagggacgcttggcaggatcggtaggcgtctgttgcaggaaggcactgctggggctgagcaatgccagaagaagggaaaagttccacttttgtcccttgaagccatacatcagctgcacattttcatatttgttctggcaatcacacatgttattttcagcgtcacaactatgcttttaggaggtgcacagatacaccaatggaaacagtgggagaatggaattaaaaaagatgctcctggaaatgggcctaaggtaaccaatgtacatcatcatgaatttatcaagaaacgttttaagggtattggcaaagattctataatattgagttggctgcattcttttggtaagcagttttatagatcagtatctaaatcagattacaccacaatgcgtcttggttttatcatgactcactgccctggaaatccaaaatttgatttccatagatacatggtaagggttttagaggcggattttaagaaagtggtaggcataagctggtacttgtgggtcttcgtggtgatatttctgttgctgaatgttaatggctggcacacatacttttggattgctttccttccccttattcttctgttagccattggcactaagctggagcatgtcatagctcagctagcccatgatgtagctgagaagcacacagcggtcgagggcgatgtgatcgtaaaaccatcagatgaacacttctggttcggcaagcctagggttatcctttacctgatccacttcatcctctttcagaatgcgtttgagattgcgtttttcttctggatactgagcacttatggattcgactcgtgcatcatgggacaagttcgttttattgtgccaaggcttgtcatcggggtggttattcagcttctctgcagctacagcaccttgcctctgtatgcaattgtaacccagatggggagctgctacaagaaggagatcttcaacgagcatgtgcagcagggcgtcctgggctgggctcagaaggtcaagatgaaaaagggactgaagggagctgcatctgctagcaaggacgaatcgattaccaatgccgattcggcaggaccttccgttaagattgaaatggcgaaggctggggaggatgttgagatcgttggaaacacaggttgattgggacaatagggtgcccgtgttgtaatgatgtaacaggttaatatgccatcatctttttttgtagatactagatagcttgctgtggcaataccgcaatagcggtgaactagagaaggtgagtttgggcccgggagcctcatctgttatcggtccagtaggaagcaaattcttatatacgggatatcgataagaaatgaactaagaacatgttcctggattcattaccactaaaaattagctagctaaaagctgttatttttttactagctacctttttgtcaggggctgtttagatccacacctgctaataggtc

SEQ ID NO: 16525 - DNA, 1176 bp, Zea Mays
gtgaagcggcgcttcagcctgtggtcggtgctttcgtccataaaaagtggggaggacggctcggggagcttgacgacactgcacacctctcaccagtccccacacggccacaccacacccagctgtccccatcgcgcgcacactctctcggtctctccctcccagtcccagcgtttgcggtccagtccagagagctcgagcagccatggcggctcccctgttcctcctcctcctgctgctggctatgttcacaggctcagcagacgcggcgttctgcgtgtgcaagacgggcgtgcccgaccaggcgatgcaggcggcgatcgactacgcctgcgccaagggggccgactgcgcctccgcctccaagggcgcgccctgctacggcaacggcaacaaggtggccgtctgctcctacatctgcaacagctactaccagagccgcagcgccacgggcgccacctgcgacttcaacggcgtcgccacgctcaccggcaccgaccccagctccggcacctgcaagttcgcctccggccccagcagcgcaggcaccggcggtggcatgggcgctggcgcgggtaccggcggtggcatgggcgcaggggtcgcgacccccgggagcgccctgagcccaccgttcggcggcactggcgcgtacggcccgtcaggggcaggcagcacggactacaacgacgccgtcgccccgcgcgccgccgggctgcacgtggtggctgccctcgctctcgccgtcgccgtcgccgcacctctccaccgctaggggcggtgccatggcaactgggagctggcgggcacgacactcgcagacgggatcccgcctcggcggcccgccagcgcgggctctggtcgatgtccggcgttagtgcgtgcgcgtacctgatgaagtgatgatgggttttgatcgaccagccgtcagcgtagtgcggtcacggggtttacagtgttattcgaactgacctctctgcttcctcgtgctagtagtggtggctgccatgtgtgtgtgctgctggtagagaactagggattctttttttttcttctgtcgcttccttgcttatatgtcccgtcgtgttaggctgtgtttactatgcagtgtttggtggtggccgctttccatgagaatatttggtgtgcgcgctcatgttgcactgcacgtttggc

SEQ ID NO: 16526 - DNA, 208 bp, Zea Mays
tataatcattcatgtgcattatgcatatcattcaggttcgttaattgatcacgtgatgcggagaacaagagccgagttgatctcaaaatgatgctggtgaacgaacctaaggatggatgatctgatagagtgccagaatgagagatgctcaccaagtggtcgtcatttaacaacactaacgtagtgtttatcccaggcaagccccggt

SEQ ID NO: 16527 - DNA, 693 bp, Zea Mays
gaaaagaaaaaatcgaaccaagccctgctagcggtgtccggtccggtgcccacctatttcctctcgcagcctcttctccccaaaccctaatcttgctcctgcctatctctgctccaatccgttggtcgagcggcggcgatggaggggaaggaggaaggtcggatcttcgtgggcggcctgtcgtggcaaacggacgagcgcaagcttcaggacgcctttggtcgcttcggcaaggtcgtcgatgttcagattgccgtgggatctcccgtgggactgaaggaaggactaaactgcttcactctaaaccatattgattccaccggttgccccctttttttctgttgctgcgggaggagggtagtggcgcgagaatggtaaagggtattttattcttcttacaagtcatttgatgagttgtgaacacttttagtcatggaaccaaacatgcagcaactaaactttagttcttggactaaggaaccaaacatgcccttagttggaagtagcaaggtcgaattctttggcttcattatcgaaattataatgatgaaacggtgcttcttgtcatgatggactaaaagaacatactatcctgtatgtatcctagcttctcaaagactaaagaactaagtctagtgtcatttgtctagtatgattcatagttattttcctatgttgatagcttgctctctg

SEQ ID NO: 16528 - DNA, 1655 bp, Zea Mays
aacggcggtgatgatagaaaagttagggttttgcatatggacagaaatgactactatggaggagattccacctcactcaaccttaatcagctctggaagaggtttagaggggaagacaagcccccagcacatctaggtgcaagcagagactacaatgtggacatggtgccaaagtttatgatggcaaatgggacattggttcgaaccctcattcacaccgacgtgacaaagtacttgtcattcaaagctgttgatgggagctatgttttcagcaaagggaagatttacaaggtccctgccactgatatggaggctctgaagtcccctttgatgggcctattcgagaagcgcagagcaaggaacttcttcatttatgtccaagattacaatgaagctgatccaaggacacatcaaggattggaccttactagggtgacaactagagaacttatagcaaaatatggtttaagtgatgatacagtggatttcgttggacatgcacttgctcttcatagagatgatcgttatctcgatgaaccggcacttgatacagtgaaaaggatgaaactatatgcagactctcttgcacgctttcaaggaggctcaccttatatctatccactatatgggttgggtgagctaccacagggttttgcacgactgagtgctgtttatggtggtacttacatgttaaacaagccagattgcaaggttgaattcgatatggaggggaaagtgtgtggtgtcacatctgaaggtgaaactgcaaagtgcaagaaggtggtgtgtgatccttcgtatttacaaaacaaggtcaggaagattggtagagttgttcgtgcaattgctatcatgagccacccaatccctaatacaaacgagtcacactcggttcaaattattttgcctcagaagcaacttggacgcagatcagacatatgagattttctatgatatctatgacagatatgaaccagtgaatgaaccatctcttgataattgctttgtctcgacaagctatgatgccaccacacattttgagacaactgtaacagatgttctgaacatgtatacaatgatcaccggaaagactgtagaccttagtgtggatttgagtgctgctagtgctgccgaagaatactgatttcagtcatagtgtcatgtttatcaaagatcacatcgttggcgacagcacatgacccacattaatgaatggctggaatgcgtttattcggttccagattatatcatgccacatgtactgttctgcgtaatgtctactgggctggcagaactatgcacaatgttgattcaagttgatggatggtggtggttctgttatttactagttagtcgaatggtgcacaacattaaacagtgaccatcatggctgtgtgatgtatcataataactgttcagtaaatttgtgctctgcctgagttctgctcgatgctattgacggcgccctaggtgcttgttccactgtgaatgaaccaagtctgtcacccatcatgttcttcaaagatttttaccaaagatctttttggtctgatgtgtcagaccggctcttgtgatggacgtattgtttgccaaattatgcgattatttttggcagatggagtctggcaactaaattttgtggcacgtgatatggg

SEQ ID NO: 16529 - DNA, 130 bp, Zea Mays
caccaaccatcgacctcgtcgttaagcacggacgttttactttctcgccactgcattgccatttgctatcggagagaaagattctcggacgttttggtagaaaggagaagaaagctcatgtatcgctcgc

SEQ ID NO: 16530 - DNA, 804 bp, Zea Mays
cctttggccgaggcgactgtaactgttgaatgcagagcggaggacttagtgatgagcagatcaaagtgcggcttgaaatcaagcaacttctcaaggaggctgatcagttgtcaacgccgtccacatttgcacaagctgctaaactcaagcgcctggctgctgccaaggagaaggaactggcaaaaatgcaggaacatgaccttaaagggaagcaatccttatacgacaaatacacaaaatttttgttggttactaaggtcataatttatgctgtgctcgttctgtgcttttggagtactcctgtaactgcagttccacaacatcttctacagcccttcggaaaaatgttttcctggagaggtgttgatactgccaccggcaatgttgtggttggaatactcccgtggctgtttttgacctctcgggtcagcaagatgctgtgccagaaactgggcttcgtgcttgtgcgtccgtagcgcctttccatgagaaagtcagcaagttgctgcacctaaacaagactgctaactttgttcttcttctatatctttttataatcaactgtttcacttattgtccactatatactctgtccgttcttttttaattgtcgtgttttagtttaaaaattagcgggcgataaatattcgagaacggacttgtagtcatataaatttgctgtgctatgtgctcaagcggatacgtgtataagttactagtagccgtgaatgatgtgtagtttttccccctttccctaccgcgggcatccctgtggtgttgctaacctgtcaaactgcatccacg

SEQ ID NO: 16531 - DNA, 614 bp, Zea Mays
tatctgctgcttcttgatgataactaaagctttgttggatgtgtacacaataaagagagaaattggcacactagatggaattaaacttggtttggttggtgaccttgctaatgggaggacagttcgttctctggcttacttgattgctaagtaccagaacattaagatatactttgtatctcctgatgttgttaaaatgaaggatgatatcaagaactacttaaattccaaaggtgttgaatgggaagaaagttcagatttgttggaggtggcatccaagtgtgatgttatttatcaaacacgtattcaaaaagaaagatttggtgagaggattgacctttatgaagctgctcgtggcaagtacatcgtggataaaaaggtcttagatgtgctgccaaaacatgctgtcatcatgcatccccttccaaggcttgatgagatcacagtagaagttgatagtgatcaaagagctgcatattttaggcaggctaagaatggcctctacataaggatggcattgctcaaacttctgcttgttggtcactgacatttcggctagtgctttagcttgtgctgcgtcaagggattagaagctgtgaggtcacgagaaactg

SEQ ID NO: 16532 - DNA, 1813 bp, Zea Mays
cgtaggagtgaagaagatgtacctgggatggttgaaactgtcacagagtgtttagacaaaatattttcctcaagatatggagcgtcacttctgccaaactacggtgcatttattcaagctggattgctcacagactcgaagcaaatcagaaaattagcctgcaaagctgtactccatcttcttgacaaggctgaagatggtggtgctgctgtggaaacagttgtgcagcataatctgtatcctcttctgatcaaatgtttgattgagggagatgaagaaatttcagcaatcattttggacactgtaaagcgtttagcccaaattcctaaaggagctgaagtcatattcccaccagatggtcaaggatctgtgcaacttggtaaagtggcagctcagtcatcttcattggcacggattcgtattctatctttgatagccaagctcttcactgtttcaagttatactgctactgctattcgtgattcaaaccttctgagcatatttgaagaggaaataaaagatagaagagatatgcttaaaaccctcagtgcgctagaggtcctatatgagcttgttgaacaccctcacagcaacattttcctgctgaagaccaacttgcttcaactcataattgatatcatcaatgattcctcagctgattctgttatacggtcaagggcagcattagttagtgggaggcttctttcttcagctgatgctttcacagcaatagataaatcctgcgttaccaatctgctcatagccataggcagaattttgaagatggaagaaagcaagaatactgatgaaattgagagtgcattggagaccttgggtctaattggtacaacaagtcaaggagcacatttcttgctgacatcatcaaatgttgccagacatgttgtcgagtcatcctttgatcgtcaaggcaggggtagacagctggctgctttacatgcctttgggaacatctgtggtgttggtagacaagaagatcagatgaaactggatagcgaagccgaggaaaacttgaagcgcttggtctatacgactgcagcaaacagtccaaaattaaccccttcagctcttctactatcagttctgcaacaagacccagacgttaggatagctggctacagagtaataacaggactggtcatccgggaatggtgcttaagggaggtttgcttaaattcagagataatcagatttgttacggatccaacaatggagacaacaaaacttggcatggaaacccggtatggctgctgtgtggcaatcaacaaggccctatcatcatcccatcttctgcatgaagcaagtctttctgaactcgttgggaagttgaatgatgcggtgaaacggggcccttacctttctgataggaagcgtgtggaggcacggccggtggttgatactgcagagaggttttaaggtgccctcgagtattcacccaaagtaaacgatcactctcacagcgtagctaggaggtaactgagcgtgccctgcgtctcatacggttggcttatgggtaacagacatatatatgatgtacctggacgatggggaggacaatgtgtagttgaattcactgagactggcacaatacctaaacttacaaagcaaagatgttgtttcttctattttgctttgtggatgtcttatgcagcccctacctgcgaaagaaaatcatctgttgcaggaccgtgccaaattttgatgaaattgcagatgcagccggcactaatttttcatgtattgaatgctcaatcgaatcaggtaatttctcagtattatatctaaacctaaactg

SEQ ID NO: 16533 - DNA, 2824 bp, Zea Mays
ccttttccgctccagacacagcagcccctcttgtaccagtaaaccgtgctgctatcccccgctaccgctacccgccgcgctgctgcggctcgcctccctcctccccagtccccacgccccgccgccgccgccgccacctcctctcgctccctccttttaccccgagcttaagctcgcgcgtacctgcctacctatccgtaggagaggaagaggggacaaggcccggtcggtcggtcggtcggtcggggggctctcggatctcgccgctgcctccccgttcgttcgttcgttcgttgggatctcgcgccatggccgccgtcgcgccgcccccggcccccgcgccggcaccggttccggctcctgctcctgccaccgtccctgtcgcggatcaaaccacggatctgctgcagaagctgtcgctcgactcgcagcccaaggcggcggacgcaacacagcctgctgctgccaccgccaaaaagggcgccgcggcgagccagccgctgagcgtggcgatcccgccggagccgtccatcacgccggtgatccaagactttacggatcccaacctgttttatctaccagcgtattactacggaggctacgacagttccatgagcgagtgggatgattatccgaggtatctaaattcagatggagtggagattgccccagcggtatacggagatatttatggatatgggtatgctccttacggggcatactctcctgccacttccccagttccaacagttgatggtcagatgtttggtgcacagcattaccagtatccaactgcgtatttccagcctcctacaccagttccttctaccactcaaagtgacctacagtcttctaaaaatcctgaaaagccagcagctaaagcagatccagccaagactactaacggtgttcccaatggtactgctcacagtaacagtggaactgtaccccttgcgtcgagccaacaaaattcatcactgacgcctgatggaacttatagggcgcccttgctaggtggagttccttctgctggttacctggacacgacatatgggtatgacagcacaggggcacactttgcatggtatgatggctctgcttatgcaaatggacaacaaagagcaactacaactaaccattttccatcctcaacatttggtaatggttccccagcaaggtatcagaacaagagcaccaccacaccgcagatgggtatgcagaatagaagacctacaactacatcaccagctcctacttatcccaataggatgtaccctagctcccgaccgtacacccagtatgggaattcaataaaaactggccttccctacgggagcaacggttatgattccaggatatatgggcgatggggtcttggtatggataacaggtacaggcctaggggccgtaatggatactatggttatggcaacgagagtcaggatggaacaatcgagttaaacagaggtcctagatctggccgtttcaagaaccagaaattgtacggccatactgtcactattgctgtgaaagggcagagccttccttctggtgaaagcaaggatgatagtgccgtgcctgatagagcacagttcaatagagacgatttccctgttcagtatgatgctgcaaagttctttgtcattaaatcgtacagtgaggatgacatccacaagagtgtaaaatacaatgtgtgggcaagcacaaccaatggaaataagaagctcgatgctgcttatcaagaagctcagtcgaagggttctgcgtgccctatattcttgtttttctcagtgaatacaagtgggcagtttgttggtgttgctgaaatgacgggggctgtcgattttgagaaaaccctggggtattggcaacaggacaagtggaatggttccttctctgttaagtggcacattgtcaaggacgtgcctaacaacattctcaaacacatcatcctagagaacaacgagaacaagcctgtcacgaacagccgcgacactcaagagatacacctagaacaaggccttcagatgctcaagatattcaaggagcatgtcagcaagacgtccatcctggatgacttcgccttctatgagagtcgccagaagctgatgcaggataagaggtcgaaacagcagcaggtctgggacagtaggacccccatttctgtcactggaagcgagcaacagcaggaagctgccaatgggaagcccaatccgtctgtaccaaacggtgtccctgcagaggtgaaggcggcgaaggcttctgcagagaacggcaccgccactccagctatttcctacgcggcaaaggtggcccaagcagcaacagagaaacctgtgctcgccaacggagtcgctaagaccggttagctggaccgcccaaccgatgctccatagctagccgcgagcgacggtcgacgtccccaagagctcgaccgaatcactgtacaagggaaactggtgaccaaccaaggcaggctgtggaactgggcaggcatggcgccctagagcgttgcggctccatctcgtcgctgctggagagcagctggctagctgttagcgttttccctagtctctctctctgttccccgtttcagtttgcttatagcccgaagacttttctgctgtagtattggaatgccagagacctttggccggacaagaggaatttgcgaaggccgtctggctgggtgtgttgcgtcgtcattggggtcgagtatggccggttgtgttcgtcgttatattgagtggatccgaatgaatgtgggttagattggagctttccttttctttctctttcctttacctgtttgattattgcggac

SEQ ID NO: 16534 - DNA, 863 bp, Zea Mays
atgcggagtgctgctggagttggtctaagcatgggatgtcatcttggacttgggatagagataacagagtctgttagagggagaatcacggcgagagcgtgctcgtgggcacccctctccgtcaactggggtgcgcgatcgatcgatcgaaatatcgaactgcagttgccaaaaccccaatccggtcttctatttccgatcgagccgcaaaggaggcaggaagaaggccggcgcaggcgcaggcgcggatggcgatgggagcgacggttcgcgcggcggccgcggacgccgtggtgacgttcctgtgggtgctgtgcgcctccgcgctcggtgcctccacagcagccgtcacgtcgtacctgggggtgcaggagggcgccggccactacgcgctcctcgtcaccacgtccctcctctcggtgctcctcttcaccttcgatctcctctgcggtgcgctcggcggcgccagcttcaaccccaccgacttcgccgcctcctatgccgccggactcgacagcccctccctcttctcggttgcgctccgcttcccggcgcaggccgccggcgctgtgggcggcgccctggccatctcggagctgatgccggcgcagtataagcacacgctcgcgggcccctcactcaaggtggatccccacaccggtgccctagccgaaggggtgctcaccttcgtcatcaccctgaccgtgctctgggtcatcgtcaagggcccccgcaacgtcatcctcaagaccttgctgctctcaacctccatcgtctccgtcatcctcgcaggcgcagagtacacggggccgtctatgaacccagctaatgttttttgccttggagtcctacatgagctgtca

SEQ ID NO: 16535 - DNA, 3976 bp, Zea Mays
gcgagaaagtgataaggttcgtgggtgcgtcgccactcgccaccctcacgtctcccgagtggactcccgcctccttccttccgtcccttcccggctcaccgcccttcgcctcaccccgcgcctcctccctgtcccccctccagaactgtcccccaccgcctcgagatgctcgcggcccccgccgcgctccacctcctcctcccggcgccgccgctgccgcccccgcactaccaccaccaccacgtcgccttccccgcgccgccgctccacgcctcgctcccgtgctcacgccgcccgcggaggaggccgcccaggcatggggtcgccagggcctccgccgcaatggcggaggaggccagcagctccggaccgaccaagttctccgtgaggatccccgtcggcgaccgcgagatattggtggaaacgggccacattgggaggcaagcgagcgcttctgtaatggtcactgatggcgaaacgattctctactgttctgtctgtctgtcggatactccaaacgacccttctgactttttccctttatcggttcactatcaagagcgcctttcagctgctggaagaactagtggcggtttcttcaaacgagaaggcaagacaaaagaccatgaggttttggtttgcagattgatagacaggcccctacgacctactatgcctaagggtttctactttgaaactcagattctatcctgggtcttcagttatgatggcattcactccccagactgcttggctatcacagctgctggtatagccgtggccctctctgaaattccaaataaacaaacaattgctggagtaagaattggcctaattaacaaccagtttattgttaacccaactactgaacagatggagaattcagagttagatttgatgatggctgggactgatagtgccattttgatgattgagggctactgtgattttctgactgaggagaagctgcttgaagctgtcgaagctgggcaggtggcaattagagaaatctgcaaagcaattgatgttcttgttcagagctgtgggaagaagaaaatggtcgatgctatcagcctaccgccgcctgaactctacaggcatgttgaagatatttctggagatgagttgatgaaggcattacaaataaaaggaaagattcccagaagaaaagctctttcagcattggaagagaaagttataagtatactttctgagcagggctatgtttccaaagatggcttatctggaggcactgaaagtttggctgatattgttgaggatgaggatgaggatgaaattgtagatgacggagaagtagatgaaggcgatgttcacatcaagccggtttcaaggaagccccttcagctatttgcagaagttgatgtgaagctagtcttcaaggaaatttcatctaaatatttacgaaagcgcattgtagagcgaggaaagcgaagtgatggacggagtccttgggaacttcggcccatcaattctcaatgtggcttacttccaagagctcatggtagtgctctgttcacgaggggagaaacacagtcactggctgtggtcactttaggtggctatcagatggcacaacgaattgacaaccttgttgatacggaggactcaaaaagcttctatcttcagtactcatttcctccatcatgtgttggcgaagttggtcgaattggagcacctagccggagagagattggacatgggatgcttgcagaaagggcactggagccaattttacctctggaagaggattttccgtacactattcgtgttgagagtactatcactgaaagtaatggttcatccagcatggcttctgtttgtggaggttgtttagcacttcaagatgctggggttcctataaagtttcctgttgctggaattgcaatgggcctggtccttgatacacaagaatttggtggagatggtagcccacttatactttctgatattactggagctgaagatgcctctggtgacatggatttgaagattgctggtaatgaaagtggcatatctgcatttcagatggacattaagttgggataactctacctgtgatggagaaagcactccttcaagctagggaagggagacaacatattctaaatgaaatgttgaaatcttcacctccaccctcaaaagcactatctccacacgctccattaattcatgttatgaaggtcaaacctaacaaggtgaatttaataattggttctggtggaaagacaataaaaagcataattgaggagactggggtagatgctattgatactggagatgatggcacggtaaaaattactgcaagagacctaacaagcttagagaagtcaaaaattataatagctaatcttaccatggttccaaaagtaggagaaatatacagggactgtgagatcaagtcaatagctccatatggtgcttttgttgaaattgctccagggcgtgagggtttatgtcatatcagtgagttaagttcgggctggttggccaaggctgaggatgcttttaaagttggagatcgcatagacgtcaagcttattgagataaacgataagggtcaacttcggctaagctctcgagctttgcttccagacgtggattccgaatccaacataggttcaacaaaagaaaaggtgccacaaaaagatgatgtcataaaaatgacaacaaaaagaccaaggcgcaagaaacagccagagccgtctggagctgaaaatgccacaacaaaggctcttgcgaaaagcgctgctgctccagctggttcaaagggcagtgaagcgtagtaggatgtggacagcttggtgccttaatcagacgattgactggccaagctagggatacatccttcaaccgactatatgatggtcatatggcatgagaaagagttcagacatgagggcacaactgtctaaacaggaatataatggagaagaattggttgatcgacctcgatgttagacaggtagagtgtctggttgatgcgttacacaaggcgtgcgcctatccagcagtaatggtgcccaggactggatcgtcgccatggttagcggaacagatcccgtaaccaccatggaaacttgattgtaatcgccagaagtgttgtatcgttctgtactaactacatattcttgccaatccggccaatgcaaactactgcatgaagtaattagccaaaaaaaatttggctcagcctgggaataaccggaacatggaacaaataatttgacagtcagaggcaatgcaactcctatctcacatttacaagccaaatccaactcctatcagttaactgtcccgaccggcaatacaaaatctaccaaaagagaaacagaaactaggatctggggtagctttccaccgacacatactagtttccatgctagcaaaatctaccaagaaggctgttctcaacactttaacgctcaagtctgagcagcgagatgtctttgtactctgtcaactgttccacgccaactcgttaccgttgagcagcccgctccccaccaattcattagcgatgagatgctccaggtcatcaaattcatggaagggcttggccttcaaagtcgcggcattgcctccagcaggagcagcagcaacagccagattgctgcttaccgacttgaaattgttacttctggctgtgctgttattgatcacactagtaggcccggtatagatggtggcagcaccatttacggccatgcgctgtccctgatctcctgtaccagcactgttggtgttagcacctcctgatgtgataccactgcttatgttagggatatctagaggtggttgctgtggcagtgtgtgccttttagcgttcttaacttcttgaatcagctgatttaaagcatgctgctgatactgtgggctcacgcccaggccccggtgattgttttgcaaccccaagccctggaggttgttgtgctggggcattgggtgctgaaatgac

SEQ ID NO: 16536 - DNA, 1814 bp, Zea Mays
caggggtcgtcggcgccgccaaggctgcagagaaggccatggatctccagcggggattaaatgctgttcaccatgtcgtaaaggatcgactggacaagagaatggccaactgggagaaattctgccttcgacattgcttcgatgtacctgaaggttttgtggccgatgaaaatgatagttcttgtgcaaaagaatcacacaaaaatgggacttcagattcagatttggatttggaacttgactccttaaggagaaagctcgaaagtgctaacaaggagtctgaaaatcttgaaagagagatgtcgtcattggaaaggcaaagtatgcacaaaagaaaacttgattcttcaatctctgagatacaaaagttgtttgaagacaagttaatgcagggatttgaagaccttgtgaaggcaataccggcattgcggcagaaaataatagatatgaacaagaaaaggactgagatcaggtgtttggtagatcaacaggtttggaacacgagcagtgtgagaggcaacaagcgacaaacactggataagggttttactgcatgtggtgtagacactcgagaggtcgtcagtatctttgagaacatgtagcttgttgttctttacctgattcatgttgcttacccatagtgcccgcagcttgcttgcttggagcttttccccagtcttgttattgattgacaccagatattatttgggctaattcaattcaagaatgactggagatattattggccatctggcacaggaatgcttggcataagctgggtgctatgcctacagaagaagctatgcaagggtacatcacaattgttcaggacctattccctaactgggatgcaggtgcaagtgcgaaaaggaaagatgaagatagcattgcttccgcatcagcttcaaaggggcccatgggacctgtgtttagcagtttaatgtatgaggaagacgaaggaaatgaatcagaacttggtgacatccatgtttcagcaagggaaggggcgactgatgacatagtgaagcttctggcagctggtgttgaggtcaacgtgagagataccgaaggtagaagtccgttgcactgggctgttgatcgtggccatcttagtgctgtcgaggttcttgcaaatgcaaatgcagatctgaatgctaaggacaatgaagggcaaacggcactccactatgctgctgtttgtgaaagagaagacattgcagagttgcttgtcaagcatcatgctgatcttcggatcaaggacgaggacgggaacacggcacatgacttgtgcccttcgagctggtcttttatgaaccaggcaaactgataacacgaatatacggatatgcttgaaggtgtcatctgccaagaaacatgctagctgtatcctaaagcccatacggcacatatggtgtatcttagtgtcatgtgtgacgtgtgggaaatcaggcaggttgtttgcgtacgtggtgccctctctgaaatcagatgagttgttttatcgtcctcatcgaaccagttgtcaaaggatagtattagtgttgggaagatacatgtattgctttaatcaaaagaatcatgctggacaccaatgcaagcccaaatgggaagaaaaggatgtgcggacatataactagcatcatcgtctggtggtttccaatcaagcatctcctaggtaggtgatacatacagacacaagtggtctgtcctaattaccacattgagtgcaagaaatacaaaagagaatcaagtttctcaatgacagttttataaaggtttcattctcattaataaatgatgtgacatgtcaacag

SEQ ID NO: 16537 - DNA, 1542 bp, Zea Mays
gaagctgaagcctatgcaccaccggcctgtccaccttgcatgcttatgatcatcgtcgacgacgctggaggcttcctcccggcgctgaaccactctccctgggacggcgtcacagtagctgatttcatcatgccgttcttccttttcatagtcggagtctcactaacactagcgtacaagcgggtgccggatagagtggaggcaactaggaaggcagtgcttcgtgccctcaagctgttctgccttggtcttgttctccaaggtggatttttccatggcgtccacagtctcacgtttggtgttgacctaacgaagattcggttgatgggcatacttcagaggattgcaatagcctatctcctagctgcagtatgtgaaatctggctcaagggagacgacgatgtagattctgggtatggtttgctgaggagataccgctaccaactgtttgtaggattggtcctctctatagcgtactctattcttctctacggcatgtacgttccagactgggagtaccagatagcaggccctggttccagttccacagagaagtcgttctctgtgaaatgcggagtgagaggagacaccggaccagcttgcaacgcagtcggaatggtcgaccgtacggtcctagggatcgaccacctctacagacggccagtttatgcgcgcacgaagtatagattatccagagaatgggcctctcccacctgacgctccgtcgtggtgccaggcgccatttgatcctgaaggcctcctcagctccgttatggcgattgtcacttgcttgatcggactccagtttgggcatgtaattatacatttcgagaagcacaggggaagaatcgccagttggttggtcccttccttcagcatgctagctctagccttcgtaatggacttcgtcggaatgcgaatgaataaaccactatacacgatgagctacactctggctactgctggcgctgcgggtcttctcttcgctggaatctatgctcttgtggatctgtacgggttcagaagacctaccatcgccatggagtggatggggaagcacgccctgatgatatacgtgctggtggcgtgcaacatccttcccatgttcatccgtggcttctattggagggaccccaacaacagccttctgaaagtcattggtatcggggcgtgaagccatgaccttctacatgttcaggcccaaacttggacatgcacagcgctctcgcatgtttaagagcaataatctaggtgctcaggccaagttttgctatgcggttagaggaccatagcgcgctcaggtcatgcgccatggggctgcctatattctcagcactgccgagatgcctgttgccacttgcagatgcatggaatccattctcccagccaactttgtatatggtggagttgagcacatgtacatgatatcacacgagtaatatgttgtgattcagatgaaatatatactagtacatatcagtccatattctataataatactacctccggtcttgaatatattttcgtcggctagtttatttt

SEQ ID NO: 16538 - DNA, 691 bp, Zea Mays
tatgattctgatgatgaagaattttgcatcatgaatctctttggtgtgcttaagtacaagaagatgggagaagactttgtctgcaattcagggataccattcacgattattagggctggaagattgacagacgggccctacacttcgtatgatcttaatacacttcttaaagctacagctggagagcgacgagcagtagtcataggcaaaggtgacaagcttgtgggggaagttagcagacttgtggtagcagaagcttgtatccaagctttagatattgaatccactgaaggacaaatatatgagattaactcaggtgaagggcccggaactgacccagagaaatgggaggagctattcagatctgctcggtcagactagtggcattctgcaaagcgtagtaacgtaatgtaggaatatgcatcgtaatacaatgtaatccatagagtgcagccctaattcaatagtcactgaacagtagcgatcatgtagagaatatttggtttgtgtacatagtatgagcattcatatatgacgattatacctcctaaaagtgatagtttttgttggaaagtaaaatgttcagtgttatccttatccactttcagacttgattttattttctttttctcggaatgcaatcataatttgattgttcatttcaatatatatccttatttttcaaatatgt

SEQ ID NO: 16539 - DNA, 4411 bp, Zea Mays
gccgaaaaagtgcagctcagccacgaatagcagaaatggccgcagtagtgttttggtccctccgccgccccccacggtctaacacacccgcccgctaattcgccgaccagcctgccatcacccgctcgctgcagccgccgcgcccctcccactcaccaacgcggcaacgcccatggcgcccgtctgctgaaaacacccgccgccatgcctcgcgaccagatggtgaccaatggttttggagcaaaaagggataatgcaggggcaaaaaaatctccccagcaaattcagaggctggagaagttttactctgatgtacagtatccaaagccagaggaaatgggtgagtatgcaacctgtgttggtttgacttacagtcaggtccgtatatggttcaaagagcgaaggagaaaagagaggaggatggagatgggagccattgggtctcagatggaaaggcaatttagtgcacgttccagtggacctagatgcagcagcagttcttcgttttgtaaccaagctcccatctatgacatttcacgttcagagtcggacacctggggtatgagcacggcaggagaggaaagtaaaattctatcacaagttctgtttcccaaggattatatcctgagcaaaattttccgcaaggatggtccacctcttggtagtgaattcgaccccctcccccaaagtgcacatggctgtatcagagacactacatgccatcattcctctgagaaccaaagaactgtgaagaagagaaagatcatagagtcaactaaccagagatctgatgtgtatgagaatactgctcctgtgaggaaacatggaattggcaaaggtctaatgacagtgtggcatgccatgtattcccataacgtgaaatgtcaaagcggtcgaaatttcattgatgaaactggttgcttgaggtctcttagaccgtttgacgattttgatggattagaagatcgcgataatggaaggaagactcaaaatcaaggtatgacacggaaaaagatagtcaaaaggagtaaagttctggtgaatagaaaaaaggtgccgtgtaagagagttactggtccaaaggtgcatcctccaatggcttgccatctttcagttgatgaatcagaatctttagaactacagactgaactagtgactttagtggatgatgaggagctcgagctcagtgaattacaaacaggtccgaatccattgagatgttcagctcacctgtcttcaagtggtagacatgactgccccctttgtaaagatttacttgccaagtttcctccacaaagtttgaagatgaaaaagctattctctacaaaaccttgggagtcatcacctgaaatggtgaaaaagctttttcagattatccggtatgtatacactcattttggcagtattgatgtccaccccttcatatttgatgagtttgtgcaagcattccatgacaaggactcctcgttgttgggggaagtacatgttggtcttctcaagctactgttgttaaaggctgaaataggaagtgatggtgtatttgttccacgatcttctaaagactgcagatttctcagtttcctgaactttgttagggaacaagaattcgatgccaatgtttggatcagatcgttgaatgctcttacatgggttgagatacttcgtcaagtccttgttgcttcaggctttgggccaaaacagcatttgctgaatcaagaattctttaacaaggagaaaaatcaaatggctaaatatggtttacgtccccgcacactgaaaggagaattgtttgcactgttgtctaaggcaggaagttgtgggttaaaggtttcagtactagccaaatcatctgagattattgatcttaatgtttcgagcccattagaactagagcagttgatatctttagctctctccagtgacatcacattatttgagaagattgcaccttctgcatatcgtctccgtgttgacccccaaattaaaggggaagaagattctatgtcagatagtgatgattctggaagtgttgatgaggatgaggatgctagccgaagtgatgatggatctgatggttcccaaaagttaaaatttcttgagaatgaaagcagacttgctcgaaggaaggagaaaaatgcacatggaagtccaaataaatgtagtgaaattgatgaaagttattcaggtgaaaaatggcttttggcattgatggaaggcgagtattcagatctaagcattgatgagaagttggattgtttggttgctttaatagatgttgtttctggtgctggttctgttccaagacttgaggaaccgcaaagagtcttgcataatgtgcccagagtgcatccaccacaatcaggtgggaaaataaagaaatcaactaaaaacctttgtcaatatagcgatgagtccttaaatggttcaggaagtttggattgttgtcatcaaggccagtcaggaaggcgaaaaaatcaggattacaccactgaccctggaaggaacgatttacctattgctgctcatggaccacaagttgttctcttaggatcagaccgcaggtataatagctattggctcttccttggtccttgtagggaagatgatccagggcatcgtagggtctacttcgagtcctcagaggatggtcactgggaggtgattgattcaccacaggaattactttccttgctatctatcctcgatagcaggggcactagggaagcacatctccttacatcgatggagaagagacaagcctgcctttttgaagccatgaaaaaacatgtggaaggagggaaggcagccaggcttccagcctcatctgattcatactgctcccagacaagtagtggagatggaacttcgcccaagacaagtagtgtggatggagcttcatctgtatcagacattgagaacacttctgttcctacaagcctcaaagatagtaatttggattcatcgtctgccgtagtaattgaaagtgggaggggaggtgatgagaaaatatctatgtgggaacggctgcaagcatttgataaatggatctggacttctttttactccatccttactgctgttaaaagtggcaagaagtcatttaaggagtcactacttcgttgtggaagttgtcatgatctatattggagagatgaaaagcactgcagaatatgccattcaactttcgaggttggttttgatcttgaagaaaaatatgctgtacatgtggcgacgtgcagggagcctgaactttcacatgaggtaccaaatcataaatttctgccatcacagctacaggcacttaaagcagccattcatgctattgaggcctctatgcctgaggcagcttttactggttcttggatgaagtctgctcacaagctgtgggttaagcggctgcgacgaacgtcatcattgccagagcttttgcaggttcttgtcgattttgtaggggcaatggatgttgattggttgtacaaaagttcatctgcgagattgagaacaaatctggatgacatcattgtcgactttcagacaatgccacaaacaacatcagcagttgcactttgggttgtccaattggatgccctcattgcgccttatttggataatgccatggcaagacagctggtgaatgctaggtagcttacaaagatggattcttttgcgtgatgcacaagcaccccgagctgacttctttttctggcaccatctgcaagttttttcttgatgaaagcttttcatctaggtgagacagaacatggggtctgctttgagttcgagaacaagatcttgcgacttgctgtaaagcatggaatatattgttccctcccagcagagcattgcgtcatagacaatgaaaaagttttgttaataatcgttgcttcagatatgtgaaagttttggctttccatgtagcgacacaattgggatgtaagcaatttctgaaacagaccgctgtttgcaggtggtgctgtttgggacttgattaccagctgtgcccttagttttaacggaggggtggttataattttgttccttctatatctgtatgtgctaagttgctcctagtccgtgagagctttctacattaggctatttttgtatgttatgtaaccagtttctattagagtgcagttgtagacatttagaacatgtacaccaatattgtgactgtttgaacaagtgagggaggcatagaagacttcatacggatgaattcatgattagaataaaattgcaccaaaaatcaattttgaaccgttacctttttggtatctcgtatatgttttttttttgtctatgtagtgctagttgataaatttcggatagatgtaaataggaaactgaaactctattcggatagatgtaaatagaaaaatgaaactctatttgtttaaaataagttaga

SEQ ID NO: 16540 - DNA, 2363 bp, Zea Mays
cttcgtcatcagtgatgattcggcaggggcagccgcgcccacacgtcagagacgaagacgccggcggccgcacctccctcctcgccgccgccccggcggcttctagcttctgctgccgatgccgatggcgctattgtctcgcggattgatgggtgccacgcgcacttcaacgcgccgtgctcacacggcgctggcgcccgggccccacagcaccgctttataagtaaccagcacgcgctgccccctcccctcctcccccggtctcactcacactccttcatcgggctcggcccgcgcggtcgtgagttcgtgactgcggaggaagtagcgcaggcgaaaaggctgcagcagtggacggcggcgaaccctagcctagctccgcgagtgcgttggcggtttgattcgatggccgtggcgtcgcggctcgcggtcacgcgtgtgtcgccggcggacggcgcgcgccccgcggcggcggcggggaggaggagtgggctcgcggtggttcggctcccgccgaccgacagcagggggagaaggaggaggcgcggcggggccgtcgcggccagccccccgacggaggaggtcgtgcagatgacggagccgctcaccaaggaggacctcgtcgcctacctcgtctccgggtgcaagcccaaggagaactggagaattggcacggagcatgaaaagtttggttttgaagtcgacacattacgccctataaaatatgatcagattcgtgacatactgaacgggctcgctgagagatttgattgggagaagataatggaaggaaacattgttatcggcctcaagcagggaaagcaaagcatctcactagaacctggaggccaatttgaacttagtggcgctcctctcgaaacgttacatcaaacttgtgctgaggtcaactcacatctatatcaggtcaaagcagttggagaagaaatgggaataggatttcttgggcttggctttcagccaaaatgggcactgagtgatataccaataatgccaaagggaagatacaaaataatgaggaattacatgcctaaagttggtacccttggccttgatatgatgttccggacatgtactgtgcaggttaatcttgacttcagttcagaacaggatatgataaggaaatttcgtgctggcctcgcattgcagcctattgcaactgcaatatttgccaattctccctttaaagaaggaaaaccaaatggatttctcagcctaaggagccatatctggacagataccgataacaaccgtgcagggatgctcccttttgtctttgacaactcatttgggtttgagcaatatgtggattatgcattagatgtccccatgtattttgtgtaccgaaataataagtatattgactgcaccggaatgtcatttcgggattttatgcaaggaaagctccgacaagctcctggggagttgcctactcttaatgattgggagaaccatctaacaacaatttttcctgaggttaggttaaagagataccttgagatgagaggtgctgatggtggcccatggaggagattgtgtgcgctgcctgcattttgggttgggctgctgtacgatgaggaatcattacaaagcattttagacatgacttttgactggacacaggaggaaagagagatgctaagacataaggtaccgttgactggtctgaagacaccatttcgcgatggatatgttagagatttagccgaggaagttctaaaactggccaagaatggattggaaagaagaggatacaaggaggtcggtttccttagagaggttgacgaagtggtgaggacaggagtgacacctgccgagagacttctgcatctgtacgagacgaagtggcaacgcaacgtagaccatgttttcgagcacttgctatactgatgttgtagatgtaccctagtacaaaaatctcatctttgattcattcaacgccttgagtgggagggcacaggaacacagcttttggttaagttgctgaccgggggaacagctacccggtgctgcgtgcggtgcctacaaataacttcgctcgggacggatcactactctctagggagatggaacaaatcactgtttgtaccggccctttttgtttctgttttccttcagagatggagatgccgtattgaaaataagtccatcttctgtacgatgggaactgtctgttttccccccttctttcctttcagcattgttgggatgtttgtcccgtgttaacatgcaaaatcaattacgtgtacgataaataagctgatggtttgatccggaatctgcaattgcgcgtgccttttcccaccttgtttttagccaaaaatcactatggatgagactacagt

SEQ ID NO: 16541 - DNA, 1722 bp, Zea Mays
ctcccctctcggaagttagctgaataccgctaacgacgttaaagtcaggctcacagacggcctgtatgacccttgcctctgcctttcccttttctcctcctatccctaacgcagccgccgccgccgctcggctctcccttgccaatgcacacatgcactcgccgccgccgctcgactctcccctcccaatggcaccccgtcgctcaccatcaaatgtttcctcccctacaagtgcaagatcgccaatgaggtggtatagccatccgccacacctgccactgtccctttgccatttctggtcctagatctgtgttacctgcatttttctttgccacgggatcgggatggtggaggagcagctggtggggattagcatcttgcttcagatatctattctcgtgctctcgttcatgctcagatattgatggcgctgttggtggacccacctgacatcaagagggagatgtagatggagatgcagcccgcaccaccaccatctgctgcggcgtcggcatcgcagacggcgtggccactggattggccggtggacgggcgctcgctcaatcctccatcgccgcccactatatcagtccagtatgtgagtcatattgattttataattgattttatgcgccagttcttgcctcgactaatgggtcctcttccattttgtaatcacctctgcatgtttactgtatcactttggtaaattactattgttccatgttgtcttccacaacatactgcactagttcagtggttagtttcctattcaaccatttcgtaatgaaggaggtattggtatttaggtaaatatttatttatgattgtgctggtattatctcaataggctggaaaattttaaataacctaatatgacataaacctcaactgcccatgcactcttagttgttgttttgaaccggtctttcgttgtttttcttttcaccaaaaaataaaatcttgatgatgtgtgacacacctgtttggttatatcatgttatctatgtagttcggccaattaaactatgttatcaggtataactagatgaggcaaattatatatatatatatatatatatatatatcgaaataaattgttttatgaatatccaaataaaccatatagtgtcgaagctgggtactttccattgccatcattaatggacaacaatatgctactatctcacatatattatgaaatgtttctacacgcatggagcatttcttgcagtagagcgctaggtatgctctctatgcctacgatgatttatatgaggatgacttagataaggaggtggatcacatgtcagtttcgagcaaggtgtttggactggaatgcgcacagtctgttactttgatgcaaaacgtatgaattggttggacagagccgccaacgaagtaccatgggtaaggatgtgctggacaatgaaagcttctgtcttgaaataataggatacaagaagcttgcaagtggttttgtgaaggcttttgtgaatcacttgaatcattagttcttttaagaatggttttgtaaagcgttagcaaatatgtgtaaaacacaataagatgtgtggcaaattcagtgatctagttgtacaattttttgtgtttatgggatatgtggatatttcattgtggaatgttaatgaagtgtgtatgtctatgtgattatgtgtataaaatatatgttttgtggtgcttttgtgataatatctattc

SEQ ID NO: 16542 - DNA, 106 bp, Zea Mays
cagaaaacccgctacagtttattggaagctccaatgcaggaatcccttgcatgaccgccatcgcagcaaaatcgtcccgagggcctccctacactgaccactcccc

SEQ ID NO: 16543 - DNA, 1071 bp, Zea Mays
ctgctgacatgaatttcacacaatgctttactgcttttctggtaggtttgaggtaaaaaaaatgcgagacgacaacgacgaaagcgagcaggcatggccgcgagcttatctctccacgtcactgccggctgcgggtccaagaagaagaagaggtacaagcaggcggggaagagcagagcagtgaccagtgagctgcttgtccaagaatcgctcccactcccggctgtcgggagagcgcagcccagctagccgcctccgcttcttggaggtcgatggccgcgaaggggttgagggaggtggggaggaggagggcggcggaggtcgggcggcgctgcttgtctggcgggagcgctgggccgccggcgccggcggcgaagcggaaggagggagggaaggcggtgaacctgttcacggccgtcaaccaggcgctccacatcgccctcgacaccgacccccgcgcctacgtcttcggagaggacgtcgggttcggcggcgtcttccgctgcacgacaggcctcgccgatcggttcggcaagagcagagtgttcaacacgccgttgtgtgagcagggtattgctggatttgccatcggcctagcagcgatgggcaatcgagctatcgcagaaatccagtttgcggactacatatttccagcctttgatcagattgtcaatgaagcagctaagttcagatatcggagtggaaatgaatttaactgtggaggcttaacgattcgaactccctatggtgctgttgggcatggtggtcattaccattcacagtcaccagaggctttcttctgtcacgttcctggactcaaggttgtcataccacggagtccacgcgaggctaaggggttgctgttggccagcatccgagatccaaacccagttgtattttttgagccaaagtggctgtatcgcttggctgttgaagaagttcccgaggaggattacatgctgccattatccgaggcagaagtgattagggaaggaagtgatataacacttgttggatggggagctcagcttgcggtgctgaaagaagcctgtgaagatgctgcaaagctac

SEQ ID NO: 16544 - DNA, 3394 bp, Zea Mays
ctgcccatggccatcccggaggacctagaggggacctcgggcgatggcggggtgacgaatcgcgggagtagagggcggcgaaaaggcgcggcgaaggggcgcgggaggggcaggccgcggagcgccgacagatcctttccgccgccggcgatggctggggtggcggtcggggacagggtgctcagggagaggaggcacacgaccaacgttttctgcgagcgcgacacggatgttgacgatgagtccatttattttcaggatgatgttgagacagttaggtccaaggactcaaggagtggcgatgttttacagactgcaaaaaagaggaagaagggaggtgcagggaaggtttctgtcacaaaaaggtcgaaaagagagggtgaagaacaaaagaaggcatcaccctccaaggataaagattgtgctgaaactaatgggaaaaggaagatgttgactggggataatgccctgatgtgccaccagtgccagaggaatgataaagggagggtggtctggtgtaattcatgcagaaataagcgcttctgtgtgccatgcattgaaagatggtatcctaacttgtcagaagacgaatttgctgcaaaatgcccatattgtcgcaagaactgtaattgcaaaggatgccttagaatgagaggggttgaagagcctccaaagaaggaaatttctgaagaaaatcaaatctcttatgcttgcaatgttgtgcgcttgttgcttccctggttgagaaaactgcgacaggagcagatggaggagaagaaattggaggctaaaataaaaggtgttttggtgaatgagatgaagttggaacaagctgaatataatctagatgagcgtgtctactgcaataattgcaaaacttctatagttgattttcacagaagctgcaagtactgcttttatgatctgtgccttgactgctgtgtggagatccgcagaggtgagattcctggaggagaagagataatgagagtaaagcctgaagatagaggccgagcatatctttttggtactactaactcaaaggatgggagtaaaaggttctccatgaggaggcacagctcatccctggagaatgagccttccaatgtagtaggttctagtgagggggcaaataactctctggagctgtggaaagcagaaagtgatggtagcataccttgcccaccaaaggagctaggaggctgtggcggttcgattttggatctcaagtgtttttttccagaaaagatgctttcaaatttagaagaacgagctgacagaattatgaggagcgaagtatttgcaaaagcagtagccaaaagaagtgaccagtgcccttgttatgaccattcaggaaacataagaactcaggacgtgcgagagactgcaaatacgaaaggctcaagtgataaccatctctactgcccagttgccactgctatcaaggaggatgacttggcgcactttcagatgcactggacaaaaggcgaaccagttattgtttctgatgttctgcatttgacttctggtctaagttgggaaccattagttatgtggcgggcattgcgagagaaaaagactaatggtgacgtagaagatgagcactttgctgtcagggcattagattgccttgattggtgtgaggtggaaattaacatacacatgttttttgtgggatatatgaaaggcagaacgcatcacatgacacactggcctgagatgcttaagctaaaggactggccgccatctagttcttttgatcagagattgcctcgccatggtgctgagtttatcagtgcattgccatttcctgagtacactgatcctcgatatggtccgctgaatcttacagtcaagctacctgatggtgcattgaagccagatcttggaccaaaaacttacatcgcttatggattttaccaagagttaggcaggggtgattctgtgaccaagcttcactgtgacatgtctgatgcggtaaatatattgacacacacagcacaagtgccctatgcgcgttatcaacttgagaagatagaggaaaccagaaagaaaatgaaagaacaagatcttcaggaactttatggtgtttcagaactaaacctatcatcaccttttactgattccaggaatataagtgctgatgaaatgtcaaagacctcatgtttggacgtcaatgatgtaccacctgttaataatgaatctgaggtacaaagtggggcaggccagtgttcagattacattgacaaggatagaagttatgctgggatgcataacggggagagaaccggtggtgccttatgggatattttccgaagagaagattctgacaagatacaagattatcttaggaaacatgccacggaattccggcacatcttttgcaatcctgtgaagcaggttattcacccaattcacgatcagactttctacttaaccgaggagcataagagaaagctcaaggaagaatatggtgttgaaccctggacgtttgagcagaagcttggtgaagcggttttcattcctgctggatgtcctcaccaagtgaggaacttgaagtcttgcattaaggttgcgatggactttgtctccccagaaagcgtcaacgagtgcatgaaactgactggagagtttaggcggcttccacctgatcacagggctaaagaggataagctggagatcaagaagattgctcttcatgctctgaaccaagtagtaaatttcttggatccttcctcggagtggtcgaagagttggtttgcccaactcaagaacaaaaaaaaggctggagctgaagaacaggagaagcctaaaaggaagcgtggccgcccatgtcgcaagtccaacgatgaagctgctggcgataggcacagaaagaagggcggccgccaaagaggtcggaagaggggatacggcaagtccaaagatggcgctggcgctgttgatgtgaagcctcctaaaaggcagcgcaatctcctgaaaggctctggcaatcgtgtaggtggttgattgtttcactgctgactgggaagatggaaggcgtaagggctgtaccgacccaaccttgacgtggttattttggtaccaggttgtaagtgtagactctagattgtagaatagaccaggcatttcgtcacccctgggcgccattatggcgtcttgcttttgttcatatgtggcgattgccggttgacaccgttttggaagaataatatgctagatgctcgttgtaccagactcttcatgtagcgggctatggtgaattgctgttcagcatgtctgatgctgatgttggtaattgacctgaatagatgtggtcatttgaactctctggattctgattttacatatccaatccattggctgaggctgagcattcttagttgaaaaacga

SEQ ID NO: 16545 - DNA, 2570 bp, Zea Mays
gctgagctcttcctcctgcccctgcccctgcccctcccccctcctagtgctatgtataaaggaagcaaagcaatccatggagacccaaccatcaatcccatttccctcccatctaggcagtcagcaggcagtaggcagtaggctgcatctcaatctccatctacacgactgcactcctgctcctactcctacaggaaacacacaagaaaagaaaagaaaagatgatggaggtggagaggccgatgtgggagctcaaggaggaggaggaggagccgccgcagctgctcatggaggccgaggaggatgactatgaggaggaggaagacacctccgccctcctatacactagggagagagagagcatgaggaagaagatgacgacaacgatggcggacctggacctggagatggagtcctccgactccgactccaacgcagcagcatcagcagcagtagaggaggaggcggcggcggcggcccagcagagcatcttcttggatccaacacaagcctctgaccatgctactgggctgggtgctgaaaaccaagttgagaaacaggacaatgtcagcgctcaacaaactaaccacagttcgagtaatggcaacttggaaaatggttcacactctaatggtgtgcatgagatctccagcagcagtgaaaccgtgacgaccattgcggacggactcaaactgatcacaaccatccgcgagggcaggcagcacatcttgccaagttggagtggctctcttgaccacgtttctggtggcagcacgagcacatctcaggttcatgaaattgaagttgagaaggaagtcagtaagggcgacgtcaaagttgaagagtatgatcttgagaagattctggacgagcaagaaacccatgacctctattgccccaactgcaaatcgtgcataactcgaagggtcatccttaaaaagagaaagagaacagtaaggcaagaaacaggcaaggaaccaccaaaaagaccacagcttgtagagcctcccgccaatgctccaagccaaacaatcaatcaagactcgccggaagtatttagatgcttgtcgtgcttcactttcttcatcccaacaggttgcgggtttaatatattccgcatatttgaaaggagggatgtagaccaacaagttcaatctcagcattcttctgcgtctgttgaaaattgtggaagttggcttctttcttgtttccggacaatagatagtccaaagccattacataatgcagattcattggaggaacctctagtaagtgattcgcagaggactgacaatataacttcagttgaagagaacacaccattgcatagtgataacacaataggtaaagcagaacaatcaaacaaaccatcaccaactggatcccaaaccacagctgcgacgtatgaagtaaaggagtccttcagtcaattccatgcatcatctaaagacgtgacaggatccacgcaaaaagaggcaggacatgtggtaactgtgcagcgaaacggagcacgccaagagcaaattcctctctcacggcctgctgttgatactaaaactgataccagtcatctaggccacaaagaagaattcacgcaaacagaagcaggacatgtggtaactgtgcagcgaaatggagcacgccaagagcaaattcctctctcgcagccttctggtgatactgcgaatgattcaatgcaccttggccacaaacaagatattctggaagatataatggcgccctctgataacagcacatttttcagcccatcgtttgttaaaccagtacttacaatcccaataaaagttttgcctggggaggacaaccagacggttgagaaaccaacttcagttattcgtcagccagctgagccagaagctccacctcatagagtattggcagtccctgaggccgaggcactagttcctgcaccatcagctgagagggatgaatgggatatcctgaaagccgtagtgtatggtggccttgttgaatcaatcacgagcctctcagttgtatcagcagctgcagcaagtggtgccaagactttggatatattcatcctgggcatagcaaaccttattggtggtcttcctgtactttaccacaatattgctgatctacgaaacacaggagatatagctgaaagcagtgagcaagtggggcattactggctagagctgggaaggcgatccaagtaccagttgcacatggtgatagccatactgtcatacatcctcttcgggctgctgccaccagtcatctacggactgtcattcaggacgagcgacaacagagagaacaaagtgctggtggtcgctgctgcatctctcctgtgcattgcgctgctcgcaatcgggaaggcacatgttaagaggcataggacatacctcacaaccctcctctactacctgtccattggattcagcagctccggactgtcgtacgtcgcaggcgtcctcctcgcgaaggtcctagcacacttcggtatcattgatcagggtggtgcatcagctcctgctcctccaggtctctcattccctgaagcagccgcctgggcttcctactga

SEQ ID NO: 16546 - DNA, 3151 bp, Zea Mays
cctctctcccctctgctcccgcggcccgcgcagcgcacagcatacagcgcaccgagctgcggccaccgcagcgaacagcaaagcacctccgactccaagtcgcgagagccttctcattcgtcttcctcctcttccacccatcctgcctgctcacttccgttccgtagtccagctagatccccgggcaaccgatccaccgagaagcttgtggttgtggcggcggcggagagggaagcgggaggtcggaggccaccgtgcgtcggaggtggacgagggagcgaggcggcgccagaccgaggttgcgtcgggctcgatttctactgggctgctgtctgctgagtttacggaagtgtttggccctagaagagttgaagataaggagtggagctaggtttaaactctggtgacttggttgttgcgtgcaacgaatcaactatgctgagtttttctgtagagtaacagaaattggatcaattcaagtagaggtctaggaggagatatgaggtactacttgcgtcaggtccagcgtttggttggagatatggaaggaggagctctcttgtttatagacgacctcaactccaagtgacaaagcgaacagctgttgaacgtttcccttctatttctgtttctttttgccggatttggagatggaggtgaattcctctggcgaggaaactgtggtaaaggtaagaaagccgtacacaataacgaagcagcgggagcggtggacagaggctgaacacaaacggttccttgaagccttgaaactttatggcagagcatggcagcgcatagaagagcatgttgggacaaagacagccgtgcagatcagaagtcacgctcaaaagttcttcactaagttggaaaaggaagctatgaacaatggtacttctccggggcaagcccatgacattgacatacctccaccacggcctaaaagaaagccaaacagtccatatcctcgaaaaagttgtctcagctccgagacacaaaccaaagaacttccaaatgacaagtcaacaaaaccaaatatgcccttgagcaatgggcatgtaaaaatggtaggcgatgcatctcttcagaattttcaaaggaaggagttgtctgaaaaaggaagtcgctcggaagttcttaatctcttccgtgatgccccatctgcatcattttcttcagttaacaaaagctcttcaaatcatggggcacccaggaggaccgaggcaagtaaaacagaaagccgagatatgtccatcatggaaaataattcttttaaccccaacacccaagaggatgtaaaggtgatcagtgatcaggaaatggaaaggcttaatggtatccagatcagatctaaatgtgaacattctcatgaggggtatttggacatctcaacgcaacaaatgaagctaatgccaaagtctgtggagacaacatatgtggatgaacaaactgcaagagcttcacacaccctagcagagagcgacgggacagctagcattccagtgactgtacctgaaggaactcatcctgatcaaacaagtgatcaagtgggaatcaatggaagcatgaacccatgcatccatccaatggtttctgctgacccaaaatttggtagtagtgccacaccacagactttccctcataattatgcggcctttgctccaatgatgcagtgcaactgtaaccaagatacgtacaggtcattcaccaacatgtcatccaccttctccagcatgcttgtttccacgttgttgtcaaaccctgccatccatgcagccgccaggctcgcagcatcatactggccagcagctgaaggtaacactcctattgatccgaatcaagaaaaccctgcagatggcgtccaaggaaggaacataggctctcctccaagcatggtttctattgtagcagctacagttgctgcagcatctgcatggtgggcaacacaaggtcttctccctttcttcgctccacccgtggcttttccatttgtaccagctcctagtgctgcctttcccacagttgatgttccacgaccttcagagaaagacagagattgcccagctgaaaatgcacagattgaatgccaagaagctcgaaaacaggtacagttcgaaggtttaagaattgctgcttcttcagagtctgatgggagtggaaaaggcgaggtgtctctccatacggagttaaagctatctcctgcccagaatgctgatgccacacctaccacaggagctggcacaaatgatgcattcaggaataagaaaaagcaggatcgctcttcatgcggttctaacacaccttcaagtagtgatgtagatgcgggcaatgttcctgaggaggacaatgctaatgagaaggcgaagcaagcctcctgcagcaactcttcagctggtgacactaaccaccgcagatttagaagcaatggaagcacaagtgattcatggaaggaagtttccgaagagggtcgtctggctttcgatgcgctgttcagtagggaaaagcttccgcaaagcttttctcccccacaagcagtagactcgaaggaggttgccaaggaggaggaagatgaagtgaccacagtggcagttgacctcaacaagaatgccacaagcattgatcatgatgacctcgacacaatggatgagcccagggcttcctttcccaatgaattgtcgcacctgaagctgaaatcgcgccgtacaggcttcaaaccatacaagagatgttctgtggaagcgaaggaaaaccgggtgccggctagcgacatggttggtaccaagaggattcgtcttgatagcgaagcatccacataattgatttcttcaaagttatatttacatctaagctactataggacttcagatcttgcaatgcagtgcttcattaaaactcaatctgttgtgtgctgtattttaatgcttgtcaagcagcccgctagactgctttaaaaccttatctcgtagagtctgatttaagcatcatgcaactatcaaacttttttttttggtcaaaatgtattttccttatgttttatatttttggaaaggaaaataattgaaatattatttattttgaaggctcatgcaaaggtttatttgatcaaggtgtaggataggctgagcgagagggtgaacattatgactaatatagg

SEQ ID NO: 16547 - DNA, 123 bp, Zea Mays
cacacccctgcctaagcagtggagaggtaaagcatcacagtagtctggaggaaactgacaacacaccggtgaccaagcagtggagaggaggagcatcacagtagtctcgtgagtttacatttt

SEQ ID NO: 16548 - DNA, 1669 bp, Zea Mays
gagattaaacggttgcgaacaggtggagattatactcattctccttatgctcctccatttcatccacctccaccagctgtttccatgtggggaaccccaggttatatcacagcgccacctccttacaatccatatgctgcgtatccagtcccccctgtagcgatgacttcacctgctcctgttacaggaccaactgcctatgctcctgtgcagaacacaaaggataatcctccctgcaatacccttttcattggtaatctcggtgatactgtagtcgaagaggaattgcgaagtctcttcagtgtgcaacctggattcaagcaaatgaaagtgttacgtcaagataggaacactgtttgctttattgaatttgaggatgtgaatgctgctacatctgtgcaccaaactctgcagggtgctgttattcctagttctggtcgtggtggaatgcgaattcattttcaaagaatccctttgggcgaaggaaggattcagctgctggccttgcgagcgttctaaatggggctcctgcaaattgattgcagcctgaggggatgtatcttgaactttagcatgccatcatggatttcatactaccacatcttatttatgatctgcatacttctgctgaatgcacgctctctcacgtggcatcatcatcttcatttggtggagtatctgggacatgatcatcatctatcatctttattaggtggagtttcaggggcatgatcatcatctggctgacattgcattgtcaccaaaacatgctggtgttacttttttttacattatctttgtagcttgtgaaggccatcctagtcttctagatgtgcatttggcgtttgtcatgaacattacactttgtagtattcgtattatgtatttccctttgtgcagttgcaacgttgtgttttcattataatagttgatgtggtttcgctggtttactaacaattctgaaatcttggatgattcattccatcatgtcatggcattttgacgaggaaattttgtagacatggcatggcaatatggcatacttcattccatgcatgctggagcattgccatcatccccacgaagcatgtaatcacaacgttgattggtttgttcttaaatgttttcatccaggctgagaggctaacagggatagtaaaattgcaaaaaagtcgcaagctgtttcattcttttactacagtggtggaacaccgaagcgttgctacggtcccttttggaaagccttcttgttcttttcttacagtggaacgccttggttcttttgctgcagtggaacaccttcattcttttgctgcaggtgaatgccaaggcgtggctatgtactttttggttagagaaccttagtgatgctaaaatataagctaactgaagcttagtgatgttgatgagatgtaaggaacttatggatctgctgaggtggtttctagcttgactaggcaaccctttcggtttttatcctgccttgtaataccaaggcatggttgtggcccttttgtttagagaaccttagtgatgctggtatgtaagccaacttaatcttagtgatgttgatgagataaacaatggatccgatgaggtggtttatagcttgacgagttctttgattagatgatgagagctgagaagtttcattgacttatgcatcaga

SEQ ID NO: 16549 - DNA, 1987 bp, Zea Mays
gtgaagtgcctcagtgacccgcatggattagcgagacagtcaataaaagggataagtggctgttctggagactgtagctgtcattacacatgacaagaagaagaatgattcacaacatactaattccccaaaacctttccaaataggtgacatgtttggaggccaagatgaaacctccgatgacttggaaactgtgattgataaagaggataatgtttttgtgatgtcaaatcgtaaaacaaagtatccaactcttcagctagatttacgattgattaaagatctggtaattataatcgtttcagctactggtggtggtatcatgttctcttttatggggcagccggttatcgttggctacctgcttgctggttctctagttggacctgggggtttgaactttatcaatgaaatggtgcaggtggagacttttgctcaatttggtgtagtgtttcttctttttgctcttggtctcgagttttcactgactaagttgaaagtcgttggtcctgttgctgtacttggaggtctgcttcagattgttctgttcatgttcttgtgtggcctcactgcagcgttgtgtggtgctaaatcatctgaaggagtgtttgttggtgccttcttgtctatgtcatctactgcagtggtttcgaagtttttagtggaaaaaggtagtacaaacacgcttcatggtcaagttacaattgggacgctaatacttcaggattgtgcagttggcctgctgtttgcactccttcctgttcttggaggtgctagtggcatttttggaggagtgatgtcaatggcgaaactgttgctagtgctatccgtatttgtagctgttacatatatgatgacatggtcaattgttcctcgattcttaaaactgatgattcagttatcttcacagacaaatgaactctaccaattggcctccgttgcattttgcttgcttctagcctggtgcagtgactattgtggattgagtcttgagttggggtcatttcttgctggtgttatgatatcaaccacagattttgctcatcatactatggagcaggttgaagccattcgcaatctatttgcagcactcttccttgcaagcattggaatgctcatacatgttaagttcttgtggaatcatgttgacatattacttgcagctgttatactggttataatagtaaagagtattgtcgtagctattgttgtaaaggcatttggatacagcatgaggaccgcttttgttgttgggctgtccttggctcagataggagagtttgcttttgtgcttttgagccgggcctcccatctccatcttgttggggggaaaatgtatctattattactgggaacaactgcccttagcttggtaacaactcctctcattttcaaactaattcctgtggtaatgcaccttggcatccttatgcgttggttcccctcggaaaacagtatgcagagtgaggaaaaggcggttatgcttgaagcccacaacagatcactctaacattgcctagccacaacattcttttgactgacggtgatttatttgtgcatcgactctttgcgcatgccatggaaacattggagaaacaattacacaccagtactccctttttgcggcgatatgggaacacgatgggatggacagagttaacagcttggccagccttggggctctccgtatagcattcttttttattgcgcttttgagttgtacatataggggatactgtacatgtcgtcaaggtagcatacagggggaaggcgccgatgggccttggttttgtatcattgttgccaactcgatcagtcgacagtctagaaagctagatagggatttttggtacctcgtgctcaaatgtacacttattgtcagaagacgatgggaaagttgtatgttatgtatttgttatgcccttgtgacgactaattgaccatggacacatgaatggtaacgtgttcaccgtatcgattactccct

SEQ ID NO: 16550 - DNA, 108 bp, Zea Mays
ggaccctgtcgcaccacgaggtgccgtcaacgagtcgggttgtttgggaatgcagcccaaatcgggcggtaaactccgtccaaggctaaatacaggcgagagaccgac

SEQ ID NO: 16551 - DNA, 171 bp, Zea Mays
tgaatgacttgagaggtgtaggataagtgggagcctccgggcggaagtgaaataccactacttttaacattattttacttattccgtgggtcggaagcggggctccgcccctccttttggctccaaggcccggcctcgacgggccgatctgggcggaagacattgtcaggg

SEQ ID NO: 16552 - DNA, 1158 bp, Zea Mays
taatcaacctgacgtggacttcagagctgaaactaaaccaacatgaccggagtccaaaaggaacttggagaggcttatcaagtcctaagtgatcctgggaaaaaggaggcgtatgataattatggaaaggagggtattccccaggataacatggtggatcctgctgctgtctttgggatgctttttggaagtgactattttgaagattacgttggccagcttgctctagcatctatagcttcagtggaggttgaggaaaactcaaatagtcaagaggcaagagcaaaagttcaagaaaagataaaagaattacaaagagaaagagaacaaaagcttactcagagtctgaaggaccgacttcaatcatatgtagatgggagaaatgatgaatttgtgagctatgcaagcgcagaagctaggcgtttatccgaagcagcatttggcgaggctatgcttcacaccattggttatatttatgtccggcaagcagcaagagaactcgggaaaagtagaatttacatgggtgtaccttttatagctgaatgggttagagacaaaggacaccacattaaatcacaggtgctatttctctaatacaacttcaagaagggatgaaaaagatggaggggagtgaggacagcgaggagcaacttatgaagagttttgaggagaaaaaagatgccatgctcagctcgctttggaaaatcaatgtggttgatatcgagtccacgctctcacgtgtctgccaagcagttctgagagatagcatggtctccaaagatgtcctgaagctgcgagccaaagcgttgaaaaagctcggaacgatattccaaggcgcagagtctatgtaccgtcgtgaaaacagcctgcgcgttgaaacgagcacagaccaacaagccgcttcgtcacactgaagccacctgtggaccaccgtgtaggaatggatttggtgttttgtgtgtgtgtgtggctttcttctttgtttgtaattgtgtatgctatattaattttcttgtagaagatgtgaaacatttaacacaaagattttaactgctattgatgcagaaatataacctgcagctgccttttttctttcttgatggtagaattgtatttgtacacttatttgccaagtgtgttggcttcattgttcactat

SEQ ID NO: 16553 - DNA, 717 bp, Zea Mays
caggcttgctaagtcagcttcttctgagcttcggctgtctgtatggatggatgatgtctataattttatgcgctcgcaaaagaggcgtcgacttctaagttcagacgttactcaagattttgatgcaatgagaaagcagctagtgtcagattctgcagcaatatttaggtcaaaagttccggagtcactgatggaaaatctcattaaacgcctgagatcatacttcgagggcaaacattcaccacatgagtagtttttcatgcagttcttcagaagctacttaagacaatttaggtgtcaattggatcttggtggtctactccctaacgcttcgcgcggcttattttgaggaattttttgttttctttgctgaggttgagacgaggagttctaagctgtatcttttgttgtttccctgatgttataggcaacgcaccaccatccccaccgcttctctgtctagaatgtagaagatacttccttttctccttttgtaagatactatagctggcagattaaagcaagagtttatggtgtttttgaccctttacaaatgtattttttgccccgatcagtctcagttttggtcaatgttctgttacgggcagattcgatagcaacatttttctagattttctggtgtaatctccggaagcaaattgacttgagaatacaatcttttatcgttctgatggtaaattgatgtttgatcatgag

SEQ ID NO: 16554 - DNA, 1045 bp, Zea Mays
gatggaatcctcgaattcgtgaggaatttattgttcatgcattggttagcttgaatttgacttgccttcgatactacactggaaaataaaaggaaaacttgtgcctttatggctaccccaacgaaacatgggaagtaactttgccagcagaggaagttcctccagagatccctgaaccagctttgggtataaactttgctagggatggcatgaacgagaaggattggttggcgttagttgctgtccacagcgatgcctggttactagctgttgcattctactttgcagcccggtttgggtttgacaaagaggccaggcggcgactcttcaacatgataaataacttgcccacaatatttgaagtagcgactggggttgccaagaaacaaaacaaggagaaggaacccaataataccagcaaaagcaacaaaccaagttcgaaaatgacaacaagacccgagtctcatttgaaggcgacaaaagtggcgccccctaaggatgaagatgatgagagcggtgaagagtatgaagaagaggaagagcgtgataacaccttatgtggatcctgtggaacaaatgacggcaaggacgaattctggatctgttgtgatagttgcgagcggtggtaccatgggaagtgtgtcaagatcacgcctgcacgagctgagcacatcaagcactacaaatgcccagattgcagcaacaagagggcaagagcctagcaccaagccctgctgtgactctggagtgaagtaagcgccaaatcattgatgtctgcagatatatgcctagctgtctagcttgtagacttgctttccatttggaatgaacgctgttgattcactcggttgccctcagcagctcatgttgctcaggcttaattgtgtttaatgttttactagcgaaacaaaatgtgccagtgtgttgcatcggagcgtatattttattatccggtaatcgtacccatagcaaacttgtctatacgttgcaacaggacgtattattgtgcggttatttaaggctagccatttttgtttgactaaaa

SEQ ID NO: 16555 - DNA, 1236 bp, Zea Mays
cactgatggcgtggtaatgcaaacaatattgatctcaacagggattttcctgaccaattcttccccgttaacaacgatattgactacagacagcctgaaactagagccattatgaattgggtaaagcaagaacacttcacggcttctgctagcttgcatgggggggctcttgttgccaactatccatgggatggaactagagacacaagcaaacactactacggatgtcctgacgataagacattccagcacatggcatctgtgtatagtcggtctcactataacatgtctttgagcaaagaatttgaaggagggataacaaatggagcattctggtacccaatatatggtggtatgcaggactggaactatatacatggaggctgctttgagttaactctggagattagtgacacaaagtggccaaaagcagatgagcttcctatcatctgggaacacaataggatgagtatgctcaatcttctagcaagcctaataaagtcaggggttcatggaaggatatttgcagcagatacgggcaggcctgtacccggctcagtgatgataaagggcattgattccaaggtaagcgcgagcagcacttttggagattaccatcgaattgttgcgcctggtgagacatatgaagtggtggcatcgatgcgaggcttccggcaaaaatctacacgcatcaggctggagcaggaagccgtcagcctggatttcatcctggacccggatggagccgatgggcagacgaagctgctgccccgtagtaacgaccggggctgccgctgcgacaacgacaacgccgccaagccgttccatgtccacgaagctcacctctggttgtacctccttatcgtgtccgttctcctggccctctacgtagtcttcaagaggaaaacggtgccgaggctgctggcgtatagacactcatcgtcactcagacggcctgttgctgtataagaggaactaattttgtggtctaggcggatagttttgtactacctctgttctcgaatagttgttgtccgctagttaatttttatagctagttcatttttatactaaaatgtgacaaatagaaaagaacggagggaaggagcaactgaagttagtcttctctttgccaaaacggtcggttgctgtataagttgaaggatgggtaatgtaccatggaaatgacattttttttgaatcaatgaaatacatgttgcgttgatgacaaggaaa

SEQ ID NO: 16556 - DNA, 1882 bp, Zea Mays
cacaaaggataggaagatgagagcacaagccacagggaagctttcttccaaaggtggtgggcacagaaaagcctgacagtccaggccacagtacacaaactggtcgattcgggtcagctagagttcataaatggtgggtggtgtatgcatgatgaagctgttgtgcattacattgacatgattgatcagaccacacttggccaccgggtgatcaagaaacaattcaaaaagattccgagagctggctggcaaatcgatcctttcggtcattctgcagttcaagcttatttgcttggagcagagaatcgattaccaagatagggcaacccggaaagcaaataagggcctagaagttatatggcgtggctcaagacctgttggttcatcatcacagatcttcacgaatgtatttccagtccattatagcgcaccagttggcttcagcttcgaagttttggctgaaaatgtcatacccgttcaggatgacatgtcgctgtttgactacaatgtccaagaacgtgtagatgattttgttgctgcagccatagcacaggcaaacgttacacgtacaaaccacataatgtggaccatgggggatgattttaactaccagtatgctgaatcctggttccgaaatatggacaaacttatccagtatgtgaacaaggatggccgagtgcatgcattatattctactccgtccatctacacagatgctaaacatgcatcaaacgaatcttggccagtaaaatacgatgattatttcccctacgccgattcaacaaatgcatactggactgggtattttacaagccgtccaactttcaagcgatacattcgagtgtacagtggatactatctggctgcgcgtcaaatagaatttttgatgggtaggagctccttgggattgttcacttccagcttggaagatgcaatgggtattgcccagcatcatgatgcaatctcaggtactgcaaaacagcacacgactgatgactactcaaaacggattgctattggagcatcaaaggtcgaaaaaggtgtaaacgctgctctgacttgtctaaccaactctaacaaaacatgtgtatcctctgtaccaaaatttagtcagtgtccacttctcaatataagctactgcccttcgactgaggaagcaatttcagcaacaaagcatttagttgtagttgtttacaatcctcttggttggaaacgtagtgacttcataagggttcctgtcaatgatgaagacctggtggtcaaaagctctgatggaaatactgttgtgtcacaaatagttgtggttgataatgtgacaaacaacttaagaaagttatatgtgaaggcttatcttggagtcacagcaaacaaggcccctaagtattggctaacatttcaagcttctgtaccaccaatgggatggaattcttactttattttgaaatcaactggatctggatacaacaacactgaacatgtccccgtcgtggttcctccaagtaacaacacaattgaagctggacaagggcatttaaagatgtcattctcttcagcatctggacaactagagagaatattcaattctgcctcaggaggagacttaccaattcaacaaagctttctttggtatagatcaagtaaaggagatgccttggacccacaggcatctggagcttatatatttagaccagatggtaatacaccaactattgcctcatcatcggtgactcttaaagttatccgtggacctctatttgatgaagtccatcaacaattcagctcgtggatttatcagttttggtctctgggaccttctttcttcttaatttaatggtgcgcagttctcctgcgcattcgagaaaaaaaagaagatttataccag

SEQ ID NO: 16557 - DNA, 118 bp, Zea Mays
ataagtttgaaatatatgctagctcaagcgaccatcctcaataagaagtatagaagggttacttagacttataagaaggccgagcccaccggcacttaacaccatcatcaacagcaca

SEQ ID NO: 16558 - DNA, 2592 bp, Zea Mays
tttgtgtgattttgcttaggtcagccaaaaaggcatctactgacgactggttggagtgtttttgtaagcgcgaaaagactagtagcaggggattctatcatatttatctggaatgataataaccagcttctcttgggaattcgccgtgcaagtcgtccacagactgtaatgccctcttctgtgctatcaagcgatagcatgcacattggtcttcttgctgcagcagctcatgctgcagccacaaacagtcgtttcactattttctacaaccctcgggctagcccttctgagtttgtcattccactggctaagtatgtgaaagctgtttaccacacgcgcgtatctgttggaatgcggtttcggatgctttttgagacagaggaatcaagtgtcagaagatacatgggtacaatcacaggcataagtgatctggactcagagcgctggccaaactcgcactggcgttctgtgaaggttggttgggatgagtctacagctggtgataaacagccaagagtttcactctgggagattgagccactgacaacctttccgatgtacccaactgcttttccattaaggctaaagcgtccgtgggcttcaggactacctatgttcaatggtgggaggagcgacgagttcgctcgttattcttctctcatgtggcttcgagatggaaaccgaggggctcagtcactgaacttccagggacttggagcatcaccatggcttcagccaagaatagataatccattgttgagtctgaagccagatacttaccagcagatggctgccgccgcactagaagaaattagagctggggatcatttgaagcaggcatcttctctcctgccagttcagcagactcaaactttgaatggtggattagatcatttgtatggaaatcctgttctacagcagatgcagttccaatctcagcagtcaacactgcaagctgtgcagcaaggttatggtcagaatgcaaacgactctgggtatgttcaaaatcaactgcagcagctgcagctgcaaaagcagcaggagccaccaccaccacagcagcagcagcagacacaagtccttcagcgacaagcacatcaggaaatgcaacagcacctctcagctagttgtcatgatattgctaatgtagcttctggtgtgtccatgtctggatctgcttgtcaatcacaatcttctctgctttctgggtcatcgttctaccaacagaacatctttgatggaaatggtggtccagatctgcatctgcacaacagtttccacaacttttcaagccaagagtcctccaaccttcttaacctcccaagaagtggccaattaatggcatcagagggatggccttcaaagaggttggctgtggaatctcttgctggtcatgagatccaacctctgcagcacaagcttgagaaagttagtcaccagagtactgtgtctcactgttctggcaccttgccgccactatcagcaagagacggttctagtgcccaggcttgtggtacaaatgttcagagtcacctgcttccatcatcatttgcaatccatgatggattgtcaaccatcaggagtggtggtgttggcagtggaactgatgcgataaccatagcttcgttgagatatagtgatgcgaatttgctacctgaaaactccatagcaacttccagttgtttgggtgaatcaggaaccttcaattctcttgacgatgtttgtggtgtaaacccatcacaaggtggaacctttgtgaaggtttacaaatcagggtccctcgggagatcgctcgacatcaccagattcggcagctactacgagttgcgtgtcgagctcgagcggttatttggtctcgaaggccaactggaggaccctgcaagatcaggctggcagcttgtattcgtcgaccgggaaaacgatgttcttctcctcggcgacgacccgtggcaggagtttgtgaatagcgtagggtgcataaagatcctctcgccgcaagacctgcagcagatggcccgcggcggcggaggtgaccttctgtctgcgcctggagcgaggatgctgcagggcagtgtctgtgacgactattctgcaggccacgacgtgcagaacctcaccggcagcattgcgcctgtggtgcctctggactactgaagaggactgaggcgaaggccgggatctgaagctctgaaccaaaaccggcaatccagcatttgcaggatttgccatccgcaagtcgtttcgttcctgtgttatgatcctctcagtctcaggccctgttgatcgggaataacctagtcgtttaatatagctagatgatgatccatgtatcattatggtaatggacatgctgtacgatagctactgtagctctaaatgcaggcaaggcaagaattgatctatcaaagaacgaatgaatgcaggcactcactgtagaggtgatgtagccctgtactcctaagtcctaagatatattctcatagctaaaactgatggttccatgtggcattggcacccaagctattgaaaccagtcacctttgccgattctttcttcacctcaatttgcggttgttcggtcctgctgcatgcc

SEQ ID NO: 16559 - DNA, 1237 bp, Zea Mays
gagagggcaggtgcatgtgtggtatcttttgcctgatgagttgaaggatgcctcccaactcaagatgtacacggagctcctttccccttctgaaaggaagactgctttgtctatgaacggggaaaagttgcagaaaggtgccgtgctgtcccgtgcactgctgcgcaccaccctctcgagatactagatacagattgcaaagttgatccaagatcatttgagtttaagaaaaacaagtttggcaaacctgaggtactgtggcgatctgatgacagcaggatggaatggcctttacatttcaatatttcacacacatcatctttgattgtctgtggcataaccatggatactcctattggcattgacgttgaagagaagacacgaaagacagccaagaatattttatctcttgctcgccgttatttcaccccatctgaaattgattatctagctaaaattccagatcctgatgctcagcaaaaggagttcgtaaaactatggactcttaaagaagcatatgtaaaagctcttggaagggggttttcaggcgcccctttcaacaaattctcgattatattggcagcaaatggcagaatccaaatttctgtggcaccaaaagtatcgaacggttctgactctatccatgactgtctgtccgagaattggcagtttgcacttgctgaactaaacagttctcattacatggcaatctgtatagaggatgactcaacaagttcagattctggaaacggtagactgccactaggattgaaagtatggaagaccactccgttcgtggaagatatacttgtttctggaacggaagctgtaaaacttgtcagttaagtatgtgagaggatatctgccattggtcaagtgatttcgccagatgacaatgtgatgcaacgaatgtatttggacgaagtatgcgctgtgcagggaggctgaacggttttcttcgagcatactgcatgcattgatgaactgaccactgacactgtgtgctttagttaagatttggaaatgcaatgacatacactttggagtcctgatattcatattagcatatcacgacactgtttcgaaaggaataaacatttatctctctcttgtgtgtgtgtgtggggtaattttagacgtattttgtactgattggtccttgttatctgacggatcattggaagaaatattcatgcatcagcatgcttctatcggtggcataggaattctgctattg

SEQ ID NO: 16560 - DNA, 167 bp, Zea Mays
cccagatccaaattgcgaagaagttgtcgtccctgcacatggcggttcccgattgtgatccatttctgaacttggaggaaattgacggtcaagcttcggtgaccaagagatcaaactcttcgagttccacaaagttgaagaccctgagcatctgtttggtggaggca

SEQ ID NO: 16561 - DNA, 858 bp, Zea Mays
ttccctgctacttgcaactgcttcctgccataagtccaagcatgacctgaagggaaaagatcaactgcttgttttgattagaaagttcccagaaggtcttgctgttgtggaagtcaaggatgcatattcaaatgtattggaagatttgcaggctctgaaggctgctggtgaggtttggctgttatcaaacatggactcccaggaggacattgtatacccaaatgatccaaaagcaaagatcaaggttgatgatgacctgaagcaactcttccgtgaaatagagctgccacgtgacatggtcgacatagagaaggagctacagaaaaacggtttcaagcccatgacaaatactgccaaacgacgagcagctgcccagatcaatggcgtaaaacccaaggctaagcccaagaagaagcagcgtgagatcacaaaacggaccaagctcacgaatgcccatctgcctgagctgttccagaatcttaacacttaaacgtgctacagtatctgacgacggaagatggttcattttactcctatttattgctacgttgtgtgtatgtgttatgcagctatgctgtatggcttatggttatgagcgccacaaatttgtttgtcaagattctggatgatatacttatgcattctgacataataggaggcaaaacctcaagattttccttatttttattttatcaattacagcattttctgagtttgcggcattatgtttggttgattttgggtcaattaggttggtgtgaggacaagctgaacatattttgatggattgcttagcttgaaatgataccagaatttaaacctcataattacgagtactgcggatctgcaggtttagct

SEQ ID NO: 16562 - DNA, 2904 bp, Zea Mays
tctagtatcaatcaaaatattcgggaaggattgcttgaagtattctatggagtttatgaaaaggatcctgacaaagtgcttcaagcaatggttcaaatgggtgtccttgttcctactggagatatgactgttgtcagaagaaccgctcaatttttccttaatagctttcaagagtgcctaacagcacaaaggaaggagagagaaatggcaaccgcagaactgggtttcaaaaagcaattaactaaggaggagaagtttgaaaagaggaagcagagacttgctgcaatcggagaggatcttttggcgattgctgctgatcaaccatttcgcttccctgccacatttacatttgtggtcagagcattctcagatggtactgggaaaggccttgatcctaggtttcatattacagagattgctaagccaaatgccaaggaattgctaagatttaatgacgctggtgttgaaatagttgtgaaggcaagtttcaacatttggtcaaagctgttaacctatctctatgatagcacatctcctaagggttagggcttgtttggctaggagcggattgaaggggattggaggagcctattaagcattgaacaatttacccatgcttgtttcctattctttggtcgtgataacgtttgcaaccatgaatagtacatattgcttttccaggtgtgtggagagacatgtgtattcctcctatgacgaattccttaggctccatgaagtgtatcaatttgtcttagtatttttattcgtggggatgcctgactcaaatgaactcatgttcaacactgagcaacctacttataattttggagcctataaaatttctaagctaaaaaaggtaataaaaaggaatgatattatagtcacatcatctgaacaacagtgaagggaagggagggatagatggtctgaatgcctataaatgtcgttcccttggtctgcttcttaaatttgaaaccaagatactatagtcaaatacttctaaacttgaagcctgtaaattggaatcaccaagttaaataagaacaggggtaactattcatagctcagatggttgtcatccaatacgtgcgctaaggcacagacaggtgaggttgcatattcaatccccaagacagtaaaccattgaggcatattaaaacacattttccatgaggtttcctaagtgatcctttaggtaaacagaaccatacctagctccatatgaaactatttcccgatttgaagtacacctaagttaaggttcatacattggagctctggcagtaaaacaatagtccttaccttgagacagcttagattagaatgaggtggatggtaatatggcatgagcaacataccacagttcatgcatggaggaaatcatttttactttctttcctagccatggtagttgtgttgctccttaccaaggcactacatggagcatcatatggttcatgatgtaaacatggttttagatctgtctatactcacactcaagaaccagccaaaatgtgatattccacaacctgagagaaatcaaaatgaaatcatgtacaacatagtacatatgatgatgtgcggtgatgcgggtgcatgtgtgttgtgtgtgtaggagaggagggcgcagcttgattcaatccatgtcaagtcagaggctgctgcgaggtttgcacatgcaagtagaatttagatggtcctgcttcgctttcatgtggatttatcttgcaaatggtatgtggatccgttccagaggcaatgagccttgcagccagtttgcagtataaaaaacccaattatgtccactgttggttcgacgcagcgtgtgccgaggatttctactgccaagcataagaaagagattgttcttgtcaccccaaaaatgttcccattctactttcgggcaggtgaattgcagataaatggtctgttcgcaactggtgctctcgggcgactccatcactgagcaacccttcgccccggtggctgcggtgtcgcactggctgacacctgctcgcagttgcattacaagttttactgactatgtattttcaggtttattcaatttcagttgtaatgcttctgacagcagttgtatcagtcctcttgttcagcttccatgtatccctcgcatccttccttggatccacataagtgttaatgataattttgttgcatctcctctgctgatcagagctttcaaactcatgacagaataatgtactaaacttcagtttggtgtctatctcagtgtacctacactcagttggaaaacttcaaccacactgcaacaaggtttataaaaggtactgttactattgttaaaattagtcattttagctatccgcttctatttcaccgtgcttgcaggtttgctatgaggaaaaacaaatttatgggctcaaacaaagtgtgatagtgaaagtcattttgcttccagcttaagaaccaagccaagaaaacagatatcaactgtgacgccacactcaaaagcttgtttggtgagagggataaggttgggatgctggagatctctaagcttttgagccgtggcttcccgaaaatctccaagcttttgtggtccatggagccagggatggctctttggtaaaagacttcgttgtggatggcctcttttatggtccatgttaagtcccaagtcccactaggtggttaagcagaaaaatcttgtgatggcattaagactttcagactttgtttttgggtctgatgcatgtaaaaaggattcccagtgtttctgttgctcttgcgatcctgtgaggacacatatgagagaaatatttagtttgttgatggcaaatcttgtcttatgttcatgcctgtacctatctgatcaagcgttatgatatgatcccatgcgtggtactgtgttctttagagatg

SEQ ID NO: 16563 - DNA, 296 bp, Zea Mays
cacgggagccgcgtgccacaccaatcgccgcgcctccccaaaaccctaggtctcctctgttcaccatggtaattgctggtgcgccgccgccacaccattgcgcctctcaactttgctccacccccgatactaggtctaggagtgcggcaaggacctcgtgggtgtgtgcgtcaagaatcaggtcggttgggcgctccaggaatcggcgattgctcgtcggagttcgtttcccctagtcaagttgttggacaccatggacagctcgggtcgacaccctaattcatgcgtgaggtcac

SEQ ID NO: 16564 - DNA, 1714 bp, Zea Mays
ggcattgcatcgcattgccagagggatcgacggcagatggacaaggcgtcgatcatcaaggacgcgatcgagtacatcgagcagctacaggcggaggagcggcgggcgctgcaggcgctcgaggccggcgagggggcgcgctgcggcggccacgggcacggcgaggaggcgcgcgtggtcctgcagcagcccgccgccgccccggcgcccgtggaggtcctggagctgcgcgtgtcggaggtgggcgaccgcgtgctggtggtgaacgtgacgtgcagcaagggccgcgacgccatggcccgcgtgtgccgcgccgtcgaggagctccggctccgcgtcatcaccgccagcgtcacctccgtcgccggctgcctcatgcacaccatcttcgtcgaggtacgtcgtcggcaggcaagcactagcagcagcatatatgttcgcattgtgcattgtttgcgaagcaagcacagagtgctctgctttttcttgtcaagttttcgaatgcttaggaatttaggggatgttggttttgaccgtatagtttgacattttttctcctgttcttttctttattagggcttattaagactaatttagaaactttaaaagggatttacatatttctaagagaaattagtttattttttctgggtaagattagaatctactggaagaacagtgttctcaaactagaccttagataaaaaaaaagtggagtgaataaaagatcctgtgtttcataacgaacggcacgaattgaaaagggcagcgacgagtttcctgtactgcacgacgccatggctgccctgcccctcacatgtcgatagcacgtggaaaacgatgggcacgtgttcgagccacccgcaagtcgcgccgtggctgtttccatcatgcatgaattattagtactagcactagcaggaacacaacaaatctattttccacatgcttgatagcgactggtccgagtcctacgccgtcgccgggcacaaactgcacgtgctcggctatctcgcatatgattagtgtgtgtgggttggatcggatgcgagtgactgattggcatttttagcatcgataatattttactatttttggatgaaaaaaaagagacttacaatcctgtggttttctttgccaggtggattcggaccagacgaatcgtatccagatcaagcacatgatcgaggccgctctcgcccagctagatgatgcctccgcgagcccgccgagcgtgatgagctactattagaatcggacaaccgtcacgctgacatgcacgagccggcctagctactgtggccgaccggtactgttccgtgcgcgtatataggaactaggaagaagtgggtgctttgtttgctatatatgaggcactaggtcagggggttttgtgatggggctttatgcaactttgatgtaatggaccgaaaacgacagattgagtgttggcggctagctcccatatgtttagagtctagggaaggaataaataatcgagacaagtcttatccctgtatttttgtagagaggtatttgaaacaagaagttcatcaaatacaagggaaaaatgtcatggcgacaaatatgttagaaatctatggagttctatgtttaatttaatctgaaaatagcataatatgtgacgacacacatgtgtatgtatatacttactagtacttgcaatagtaccttatacatacatgcaattata

SEQ ID NO: 16565 - DNA, 543 bp, Zea Mays
cagagcccatcgccacagatcaaaccagacgccaccacgaccgacagcaggatacctgatgagcatcactcaccgcatcggtctcagttatcttgtgtagtacgtatgtctttttgcagcatgccgaagaagttgacgaacgtaccgagaggcgcgtagcaagactcatcactcttttgaatgcaagagttggtagtagaataaagtaggggttccgtgtgtgtgtgcgtgtgggagagagatcgtgaaaaacggtttgcatctagcggtgacctctttacattggtttttccagtgcctgttgcggttagctatgtgttactaattggaatggatgcaagtaagtgaggatagagtcgttctaaacccactctccaaatcacccatgcatcatcatttgaacaaggtgctccataaaaaattgtttggggccttaatacatgttttagtttcttagatttcgcattttttgaatctttcaagatgtcatcagatggagatatgctctatgacaaaattgcagtggcccaccagagatctaaa

SEQ ID NO: 16566 - DNA, 1837 bp, Zea Mays
cggcgccaatgatgacggcgtcgagctaggggtccatttttaaaaagaaactgacagggacataattatgcaaaaaaaaaaaccaaaaagggcaaaaaaaaaaaaaatggccgcaccgaccctcgagagtccagacggccgtatcgttggcgcttgtcgtctccctatcgccccggctcctcgcctctccgtggccggccggtgctgatcacttctctgctcaccgctcgaatctgggctgtcgccgagccattctgatcaccgctgctgatcacttctctgctcaacggaaaggagacagattcgtggttcgtcagcggacgcggcggcgacttcatagggtgttctcggccgcttccggcgcgcaaagcggacgcacggcgtgcgcccgcccccagggatgaactgctccagattctacaaaggttagatctactgctgcatcttccgaatccgcgtgcgaatgcaccgccgagctcgataaggccctgtggccgcgccggcgctgtgcctcgtacgcctggccgcagggtcgttggtaggcgcgtacaaccccgccgctattgctcgcggatggcccggtgcgtggctcgctgaggcagtgtgaggctgccgagggggccggtggggaaatcttggatcctggtcgttcggcgacgtggcggtatctatagagctcggattcatgggctcgtcatcccagcacgattccatttccgcatcaggaagttcggagcgtgctgatggcagcagaagcagcattagcatgtggaccaaaattacgagcacagactcgtggagatggtgcctagggttgatttacatcgttgctgttgccagtatatggattgctgctagctacatcgtgcagtctgttgtggatgccggtgtctctccgttcttgatcacctatatatgcaattctctgtttgttgtctacattcccatagtcgaggctgcccggtactttgaggattctattggtgacttgtggacaaagctgaaattcaaggatgctgaaagcctgcagcaggcttctgacatggagagtgtgaatcttctccaaagtggggggcatgagatcaatgttgcctcggatcaatcacaaacaaggctgtctggagacgcttcagttccagatacatgcttccctgcccaggcagagctaactgttgtagattgcagcaaagggttggatgcaaaagggcgctggacacgtgctcgtgtggcccaagtgagcatgctaatcagccccttttggttccttgcacagcttacgttcaatctgtctctaagatacaccactgtcacgtcaaacacgatattgagtagcacgtctagcctcttcactttcttggttgcattagtttttcttggagagacattcacatggttgaagctaattagtgtgcttctctgcatgggaggtacaataattgtcagcctggctgattcaagtagttcagttaatgccattgctacaaatcctcctcttggagatttcctatccattgtttctgctggtttatacgctgtttacatcaccttgattcgaaaaaagttgcccgatgagaaagaaggtcaaggacaagtgagcatggctcagtttctgggattcctgggactgttcaatatgttgtttttctttcctgttgcgttggtgttgaacttcgccaagctggagccattccacaggctcacatgggaacaagctggtcttgttgttggaaaaggtaggtttgctctccactcatggaagttctattaataaagctacacggtgatatgtaggaataacctgtagaaatgctgaggacccattaattaaaataacaca

SEQ ID NO: 16567 - DNA, 1074 bp, Zea Mays
acgcgctcgtcccgtctccttccctcccttggtcagcctcagccaccgaccgttgcaccagctcgcatggcgctccacgccgtctcccccgcggcggtctcctccccgctacgcgccctctcgcgcagcctcccccagcgctcaggctgtggttgtttaccaaagcagtccgtcacgatttgctcctctacgaactttgcgagaaaacttcaggatggaccagtggactttgctgctaggcgactggttcttggacactcggacaagagagcagttctgacgcatgccactattgaagaaattgaagcggagaaatccctcatcgaagaccaagctaaagaaaagatggagaaggcgatcgaaacagtccaaactaacttcaacactgtgaggacagggcgtgcaagcccggccatgcttgaccggatcgaggtcgagtactacggaactccagtgaacttgaagagcattgcacagataagcactccagatgcaacttctcttcttattcaaccatatgacaagtcaagcctcaagcttatcgagaaaactatagttgccgcaaatcttggtgtgacaccaagcaatgacggagaagtgatacgagtgactgtcccaccattgacatctgatcgcagaaaggaattagcaaagacagtagctaaattggctgaagatggcaaggttgctataaggaacataagaagagatgcaatcaaagcttacgataaactacagaaggaaaagaagctttctgaagacaatgtgaaagatttgtcagctgacctacaaaaagtcacggacgagtacatgaaaaatatcgattccatccagaagcagaaggaacaggaactgatgaaaatctagatcttcaacaagctgagctgactgtgtatgactgcttggcgccgcgccgccggggactgcgcacgttttgaggtcaggtcaggtgctttgctgcaaccttctggatgcacacatgctgaggcaatgctgttgtgggtcgtttctctttttttttttcatgaatacagatcgaaatacaggccactgtctgctaccctctgaactctg

SEQ ID NO: 16568 - DNA, 3593 bp, Zea Mays
cgggaaggagcaagtttggcttgacaagttgggcgcagttggcttttgcctcgtcccctccgccgccccgttgccgaaacaaaactcgctcttcggacaaaacgccaacgccagggcgagcgagcgaggtgaggtcacctaccagctcccacagtcgcactcccccctcgcgccgtcccgtcgtaggaatggaatgaggccgaggcccctcctcctcctcctcgtcgtcgtcgtcgtcgtcggtgcttctcccgtgacaggcctcccttcctccggtccggtcgccctctgacccaatccgcatacatccaccaaccagacaggggaggatggatttgtccaggctcgcctccgtcgccgggcccagccgcgcggccccgcgggcgggcctgcagatcggcgccgccgggaatggcttccgcgtctgctccctgcggcaccgcggcgccgggaacgggcgcctcacgtccgccgccgccctcctccgcggcagcagcgggctcttctacctggctcccgcgcgcgggggccctccccgtctccgcgccagagggcggccgcggtgccagggcagcgactcgttggcctacgtcgacggccccttggaggccgccaagggctccggcgaggtctacgacgacgatgccaccagctcggggcccgacgacgacgacaatgacaagggccccgccgacgtggacggtctccgggagatgctgcagaggtgcaggaacgagctcgaggtggccaggctcaacagcaccatgttcgaggagaaggctcagcggatatccgagtcggccatcgcgctcaaggaccgcgccgaaggcgcccagagggacgtgtccgcggccgtcgccaccgtgcaggaggtcatcgtcaaggaggcggacgccaaggaggccgtccagaaggctaccatggcgctgtcgatggccgaggccaggctgcagctggcgtccgaggcgctggatgccaagcgggggtcggtcgggcccatggaggttagcatcgaaggcgtggaggaggaggcccttgtgtctgctcaggaagagatcaaggattgccgggcagccttgttgcggtgtgaggaggagctggaacgcatccaggaacagaaaatgaacctgcagaaggaggttgataggctcaccgagctcgctgagaaggcccagttggatgcatccaaggccgaagaagatgtcaccaatataatggtgttggctgagcaggcggtggctcttgagatgaaagccacgcagcgtgtcaacgacgcggaggcggtgctgctgaaagcggagaaggtcatatcctcggttgacaccgtggtggagctaacatcacttgctgaagagcagaaaagcgctgaagaggatagcgtttctgaagggtatgagtatagcagcaatggcactgatgatgttcctgtgagggatgaggtgtcaagtatcgagcgtctaatggtaggtgacttgactgttgagggcattgagcagcttgaaccatcccgtgaaatatatgatgaagcaagcagcgataagatgtccgttgagcctcagaaagaagctgagcctgattcagacaagttgaagcaagggaagaagcaggaaatggaacgaaaggagttcaccaaggaaccactgagtgctcaaaaatcactgaagaagagatcatcccgcttcttcccggcatctttcttctcctccaaagctgatggagagtttacacctacatctgtctttcgggggttaatgaaatcagtgcaaaaacaggctcccaagcttgttgttgggatattgcttcttggtgcaggggccttcttcttaaatagagctgagaagagtcaactatttcagcagcaagaaattgccacaagtattggaaaggtaacctccacgacaaagcccatagttcgtgagatacggcaaattccacagagagtaaagaagctaatagagctcttacctcatcaagaggtaaatgaggaagaagcttcacttttcgacatactgtatttgcttcttgccagtgttatttttgtaccattatttcagaaaatccctggaggcagtcctgttcttggatatcttgctgctggtgtcctcattggtccatatgggctctccatcatccgtaatgtgcatgggacaaaggcaattgcggaattcggagtcgtgttcttactgtttaacattggacttgagctttctgtggaaaggctaagttcgatgaagaagtatgtcttcggcttgggatctgctcaggtgctagctactactgcagctgttggtgtgatagctcatcgttttgctgtgctaccaggaccagcagcaattgttgttgggagtggcttggctctgtcatccacggctgttgtcttgcaagtattgcaagagcgtggtgaaagtacgtcgcgtcatggacgtgccacattttctgtgttattgttccaggatttggctgtggtggtcctgttgatattaatacctctcatatcacctaattcttcaaaaggaggggttggtttccaagcaatagcagaagccatgggaatggctgcagtcaaagcagtagctgctataactgccataattgctggaggtcgtctgttgcttcggcctatttacaagcaaattgctgaaaatcagaatgctgagatattttcagcaaatacactccttgttatttttggcacaagtcttcttacagcccgggctgggttatcgatggcacttggagcttttttggctggtctgttactagcagaaacagagttctccttacaggttgagtcagatatagctccttatcgtggtcttctgttaggacttttctttatgacggttggaatgtctattgacccaaagctgcttctgtcaaacttcccaatgatctctatgatattgggtctcttgataattggaaagacattgttggttacatttgtgggcagggtatttggggtttctactatagctgccattcgtgttggtctcttgcttgcgcctggtggtgagtttgcttttgttgcctttggagaagctgtcaaccagggtcttctatcacctcaattatcatcgttactgtttttagtcgttggcatttcaatggctctgacaccatggttagctgctggagggcagtttctggcatcaaaatttgagcagcatgatgtgaggagtttattgcctgtggaaagtgagactgacgatttgcacgaccatattattatattaggctttggacgtgttgggcagatcgttgcgcaactcctgtcagagcggttaattccttttgttgcccttgatgttagaagtgatcgggttgcagttgggcgtgcacttgaccttccggtatattttggggatgctggaagcagagaggtactgcacaaagttggagctgaaagagcttgtgctgctgcaattactttggatacccctggtgcaaactatagagctgtctgggcattgaacaaatatttcccaaatgtgaagacatttgttagagcacatgatgttgatcatggtgttaatttggagaaagctggtgcaacagcgtacttacaacatatcttctaatggaactgtgcg

SEQ ID NO: 16569 - DNA, 1411 bp, Zea Mays
gcataacggcgaatagtccatccatcatcagcttgagacggagacgacaagaacgacgctacctcaccatcttaatcttattagcagcaaatagcagatgcagatcaataaacccttaccaagcccaatgcagggagcagattctctctctctctctttctcacacacacacaaccccaatgatccatacacacattttcatttttgagctgatatgttgccacaaagcgaggttctggatgcaaagtgagcagccacaggccacagcaggaggactaggaggagtggcgtcgcgcaggccacgcagagagtcttcctgtatccacaggctcccaaggtctcctccatcgtgagcagcaagtacaggaccgcgtaccacttccagcctcccaagaactggatcaacggtgacgcctttgtgccggataccgtgatcgaggaccggaggctgtggtcaaggattgactacggcaactactacgcttccaagtcgttcttcgactcgaagaaagggaggagggtcatatggggctggacgaatgagacggacagttcgtcagacgacgtcgccaaaggatgggctggaatccatgcaattcccaggactatatggttggataaagacagcaagcagctgctgcaatggccggtcgaagagatcgagtcgctccgaggaaaacaagtcagacaccaaggcctggagctcaggaagggggatctgtttgagattaaggaaattgacactctgcaggcagatgtggagatagatttcgagctcacatccataggcagtgccgacccttttgacccttcctggctcttggacatcgagaagcagtgccgggaagcgggcgcgtcggctcatggcccgttcgggctcgtggttcttgcttctgagagcatggaagagcacacctccgtgcacttcagagtgtactacagatcacaggagaagcacatggttcttatgtgcgccgatctgaggaaatcgtccttgagaccggagctgtacacgccagcctacggaggcttctttgagctggacctggagaaggaaaagacggtggtatctctgagaactttgatcgatcgctctgcggtggagagcttcggtggaggcggcagggtgtgcatcatggccagggtctatccggcggcgctcgtcgacgacggcggcactcgcatgtacgcgttcaacaatggcactagcaccgtcagagtgccccggctagaagcgtggagcatgaggagggcacaggttaacaagggatgaggaggaacacaaggccatttgatagctagaggagaggaacagagcatgggcacatgaattaaacacacactgctggtttaatttgctggaattaatcaatcaatcaatcaacaaacacacgaagattaaatcaaaaca

SEQ ID NO: 16570 - DNA, 122 bp, Zea Mays
aaaaagtaaacattattatatgcattgattggatacaaatagaatatgcagagggagaatccatttgccttgctcaaaagtgtcctgcgaatcgtcctcacacgaattcggatcctctacca

SEQ ID NO: 16571 - DNA, 343 bp, Zea Mays
gtccggttggaaaatagttgcaagttttgagggcaagttcccagataggatcaaacaacttccattggacaggcattttgatttgaacaacgtgaagaggattgtgttggaagcggatggctatcaaccctatttgatatctccagagaagggtttacgttccttaataaaaggagttcttgaaatggccaaggagccatcacgactctgtgttgaagagggaccaaatttgcaggttgctgggcctggcggcgaaataactgcaggttaccttttgaagaaaagtgcaaaaaataatgaatggagtaaaaggtggtttgttctaaacgagaagagtgggaag

SEQ ID NO: 16572 - DNA, 1924 bp, Zea Mays
caaatccgcgctccctgattcgccatcctcttcaccaagttaggcgacgactggcgcccatcgtcgattccccgttctccgtttccgtctcgcgtgtttggtgctttcgatctccccaaggcggcaggcggcagcgccgtacgcgttgcgggaagattttggttggtggattgttggtggcggctccactccgtcccagtgcactggtccaatccaaatggcggccaataatagcgacccgatccaggatcagctgggggaaggaggggcgggcgtgaggcacgaggctgaggaggaggaggtgggggaggagacgtcttctgccgcggcgcaggcgaccgcgacgacgatgctgccccggtcgagctcgcggccgcagctggacctcagcggcgcggcgatccacgggacgctggaggaccgtaaccctaccatccttttgcccaaccagtccgacgacatctctcacctcgcccttgacatcggcggatctcttataaaactggtgtacttctcgcgacatgctgagctctccactgaagataagcacaagatatccacaaagagaagacttgggatgtttaatggtggcaggagaagctacccgattcttggagggaggctccacttcgtaaagtttgagactgggaagctaaatgaatgtttggacttcatttcttccaaacaactacatcgtggtggaattgattcaccttcatggcgctctggggctcagtctgatgacattgtaattaaggtggtggagcattcaagtatgcagatgtcttcaaggaaagattgggagtcagccttgaaaaggaagatgaaatggactgtcttgtggctggagcaaactttttgcttaaggctatacgtcatgaagcttttacacacatggatggccagaagcaatatgttcagattgatcagaatgacttgtttcccttccttcttgttaatgtcggatctggtgttagtataatcaaggttgatgggcatgggaaatttcagcgagtaagtgggacaaatgttggtggtggtacgtactggggattggggaggctaatgacgaagtgcaaaagttttgatgagttgctagagttgagccagcgtggagacaatagcaccatggacatgcttgtaggagacatatatggtggtctggactactccaagattggcctttcagcatctacaattgcctctagttttggaaagataatttcagaaaacaaggagctatcagattatagacctgaagatatatcgctctctctgttacggatgatttcatataatattggccagatttcctatcttaatgcacttcgttatggactcaagaggatattttttggtggattcttcatccgtggtcatgcctacactatggatacaatttcttttgcagtgcatttctggtcaaaaggagaggcacaagctatgtttctgcgccatgagggctttctaggagctcttggtgcatttatgagttatgagaagcatggtcttgatgacttaagggtacatcatttggttgaacgcttcccaatgggtgctccatatgttggtggaaagattcacgggccacctcttggagatctcaatgagaagatatcatggatggagaagtttgtgcaaaagggtactcagattatagcccctgtacctatgggagttccagctacgacaggtatgggaggctttgaaaggccgactgctaagggtgacatcttgcggtcagatgcaagtgcagcgctaaatgtcggtgttctccatcttgtacccacattggatgtatttccattgttggaagatccaaagacgtatgaaccaaacacaattgatcttgaccaggatgagttcaagtactggttcaagattttgtcagatcattcgccggacctcgtggacaagttgctag

SEQ ID NO: 16573 - DNA, 2229 bp, Zea Mays
tcatttttttgtacatacatcaaatgctccatttgatctcagaagaaagatccacttttggtgaaggtgaataagctgacatccacgaagacgcaacttccctactcatattactctcttcctttctgtaaaccaaacacgatagttgacagtgcagagaatcttggagaagttctgcgtggtgatcgcattgagaactctccttatgtgtttgagatgggggaacccaagatgtgccagattatctgcaaagcaaaaattgatgataaacaggcaaaggagctcaaggaaaaaatagaggatgagtatcgggtgaacatgattcttgacaatctcccactagttgttcctcttgcaaggcaggataggggtgctactgtttaccaggctggatatcatgttggtgtcaagggccaatacgctggtaacaatgataagaagtcctttatccacaatcacttggcatttttagtaaaataccacaaggatgaaactacagatctctctagaattgttggatttgaggtcaaaccattcagtatcaatcaccagtttgaagggccgtggaatgataaaaacactcgtttaatcacatgtgatcctcatgccagcaagcttctggtaaactcagatactcctcaggaggttgaagccgggaaggaaatcatatttacctatgatgtaggcttcgaggagagtgatatcaagtgggcttctcgctgggacacctacttgttaatgatagatgatcaaattcactggttttctattgtgaactctctcatgatcgtactcttcttatctgggatggtggcaatgattatgctccgcaccctgtatagagatatctctaggtacaatcagcttgaaactgaagaagaaacccaagaggagacaggatggaagcttgttcatggagacgtattccgccctcctgcaaactctgacttactctgtgtctgtgttgggactggtgttcagttcttcggtatgctgctagtaaccatgatctttgctgttctgggtttcctttcaccatcaaaccggggaggactgatgactgccatgctgctcacttgggtcttgatggggttgtttgctggatatgcttcttcacgcctgtataagatgttgaaaggatcagaatggaagagcatcaccctgaggaccgccttcctgtttcctgggattgctttcggtattttcttcgtccttaatgctctaatatggggggagaagtcgtctggcgctgttcctttcaccacaatgtttgccttggtcctcctctggtttggtatctcggttcctcttgtatttgtcgggagctatctgggcttcaagcaacctgccattgaggctccggtgaagacgaacaagatcccgagacaggtccccgagcaagcttggtacatgaaccctgccttcaccattctgattggtggcatacttccgttcggagcagtcttcatcgagctcttcttcatcctgacgtcgatctggcttcatcagttctactacatctttggcttcctgttcctggtgttcattatcctcatcgtcacctgtgcggagatcacaatcgtgctgtgctatttccaactgtgcagtgaggactacctgtggtggtggaggtcctttctgacttcaggatcatcagcaatctacctcttcctgtatgccgggttctacttcttcactaagctgcagatcactaaggtggtgtcgggcatgctgtactttggctacatgcttcttgcctcgttcgctttctgtgtgctcaccggtacgatcggcttctacgcctgcttctgcttcacaagattgatttattcttctgtgaagatcgactaggcatgttccatgggcctgcagcgagtatgcccattgcgtttttttcatgaattttcagtgcagctgtacttttggtgttagcttataaaccatttatgctcactgtggttcagagttgtacaaggataggacactactgctagctttatatggggtaattttaacttgtgctgttgagaactgctgcatacgttcaatccatagtctcgttatcgtctgccacccctttcctgcttcagctgcatgatgatgtccatacgtgcttggctttcatcaagaaaatgttagcttcatctccacagaatatttcggggactccggcggcactcatcctcaccaggcgaataccgtacttgatcagtttatgcaaaatattcg

SEQ ID NO: 16574 - DNA, 679 bp, Zea Mays
ttcatttgcagcccatgccggcccagctcagcggattacgagaacccgccgccgctccgccccataggtaggttttgtttgggatctcaccgtttcttcctcgtctccgtctctacacggcggcgccgccgccgccagctgctgccaggagccaagcccaagcctgagcttaaaccatgccgattggttctcttttcgtgtcgaggctggccaggtctagccatgccctccccgctgccgccgccgcggccatctctcaggcgcccaggccccagcacatcgcatctcctatattctccggccttggagcagcggctcgtgatttcagctcaagggctctatggaagggagcattcgtcgatgccttcctggctagaataaagaagaacagagaaaacatgaatgggaagaagatttggtctcgtaggtcttctattttgccggaatttgttggttccactgtgctcatttacaatgggaaaagtcatgtccggtgcaagatcactgaagggaaggttggccataaatttggagagtttgcttttacacggagacgaaggccccatcgaacaataacaggaaagggaaatcaaggaaagggcagaaagtaaaagtagaaatgtgcatgaaaggaaaaacattcttctggtgctaatttgggctctggcacaataatctg

SEQ ID NO: 16575 - DNA, 486 bp, Zea Mays
ctttttttctgtttcacctacatgtgagccccatcggccggtcgtcttcctcgcgcggattttgctccatggacgaagctaacaaccagacctcgtcaacctcccagccgattcggccgcggctgttgcgccatcgccgtgacctacaaaactgagccccgcctcttgctcaaccacctcgcatcgtcactagagatccctcgccatcgagaaagagcagagtcgctgagagaagggaggggttcctgccgcacctacgaatcgacgatgccgccgcccaaatcccggtggaaaggagtggagaatcacccatgcaagtggagtatggccgctgcatcgctcggtgttgtgggggcgcctcgtcaccgcaattcctcgtcggaatctgaatttgcccgtgatccgcgccgcatcgcgagccgtgaactacagacggcattcccgccccgataagccttcaaacggaagtgaggtcacgaggatctg

SEQ ID NO: 16576 - DNA, 513 bp, Zea Mays
atatcgccggggcattgtgctatgccaaactgctcgcctcgctaaatccgctccattccctcgccctcgccgatcgccggatctctccctccgcctcgcttccgccgcacgccagggcgcacggcttcttcctccgctccctcgcctcagcgcagttcctatggggttcctgcaaagcactttttcgctgttgatcggcaccggctgcggcatctacattgcccagaactacgacgtcccaaacataaagaagctcatgaggagcctggtgggcaaggccaaggaggttgaggagtcatacaagaagacgggcaacagcaagaacaaggataacgaatagcgttgacccgcagtctgcggtccaccatctaggaaagctaattgttgcaagattattctgattattggagaaaatatgagatggcatactggaactgcggcctactcttgccccggattgaatctgtctagatgtggcaatacaatttttgaggtgaaagagccggacggggg

SEQ ID NO: 16577 - DNA, 2760 bp, Zea Mays
aaagcacaaagccaatcggcaacgggccaaccgctggcagcacaaacagaacagggagtcaattacggaacaactgacgcccttatctgtaaaatcagatgtaaagtaacgcaaaaccgcccccggttaaaaattccgaacgcatcacgcaatcgagaaaaacacaaaccgaaaaacctcctctacagtcccatctaggcgcccctcctcggctccgatccagtttcgccggcggccatgtcgcagccggcggcgacggtggccgcggcggcgcagccgcagggtcgcggccccgcggggcgccagggcggcctggggcagagcatcgcaggcatcgtgcggatggcggtgttctggtactttgcgtccaagttcttcgggcccaagcgcccacccgcggaccccgggatgctcatgtccaacctcttccagaagggcgagccaatggatatgtggatgtatttgtcagagaacgagaagttcaacgattttgctaatgaggatgcacttatttggcacgaggcaaacataccatatgcagtctggggacctaccagtactagaacacggtcattaacgtactatccgtcagaggctctcaagcataatggctctttgtatgctcatgtttacttcgccccgttcggggttatcctgtggaccctacagatccagaatatgagcagaaatcttcgtttgggaggacccatcgtatctgttgtggcattcttgccaaaatcaaaagctggtaaaaagaagagcttgcttggagattcagaagagcctgaagagaaagcaccgcgcaataaggagaataaagaatctgaggataaagatgagggtccgactgaatatatatcttattggaaaccaaatgtaacaataaatcttgttgaagatttcacacggtatcccaacaataatgtacctcccattgttgctccatatctgaatgtggatccagttacgggcgattattatcctacagtattcttcaatgagttttggctattgaaggataaattaatagcgctcaacgagactgtggaggaattgcccttaaaccttgaagttggtcctattagcatgaccaagtggcaattatttttacagattgagcagtccttccaggttcatcgtagttatggaagtatgcttgaaggcgaggctgatgaactcaagagggtttttcttgaaggaaatccttatcttcttggattgactatggtcgtttctctattacactccctgtttgattttctggccttcaaaaatgatatccagttctggaacaagaacaagtccatggaaggtctatcggcaaaatctgtggttctgaattttgtgtgtcaactagttgttttcctgtaccttcttgacaatgacacttcatggatgatccttgctagctctggagttggtgtgtgcattgaattttggaagattggaaaggcaatgcatattgaggttgatagaagtggaaaaattcccatgttgaggttccgagaccgtgaatcatatgcacagaataagactaaagagtacgatgccattgcaatgaagtaccttacctatgtacttttcctccttgtggtcggtttctctatctattcacttaagtatgaaaagcacaagagctggtactcatggatactttcttctatgacaagctgtgtgtacatgtttggtttcattatgatgtgcccccaattgtttatcaactacaagctgaagtctgttgctcatatgccatggagacaaatgacctacaagttcctcaacactataatcgatgacctttttgcatttgtcatcaaaatgccaatgcttcatcgtctctcagttttcagagatgatgttatcttcttgatatacctctatcagaggtggaagtatccggtcgacaagaagcgtgttaacgagtttggcttcgggggcgaggacgaaccggcagcccaggaggctgtggaaggaagtgattcagctgcagcaccccagctaacggaggccgggtccgagacgagtacggaggacaagaaaaccaagtgatctccaatcttttgatcatccaaatacaagcatacatctctgcaacatctgccttcccagcgggcgtgaaatttctttgctgaaactggatgctggactcttgcggtcttgtcttaccgagacgtgctgaccataagataaggcgtgtaacaagggacacgatagtcttttgtctagagcagcgggcgaacaggcacacactgtcacaattacgtttccagttcgtcttttagcagccattactagttgatatgcttgtttgattggtttgtgtacaaattttgtgcatttttcttaaaacacacaattggcggctcgtagtttcatcgtgatgtgttttccctaatattagtgttgcaacgagtgtccactagtgagtgcacacaacggtgcggttctaaactgttcctcacaagaaacaattgaatccctgccaagagaagtagagaagcatgttggtaaccaaattattagatctataggccatatttggttgcaaggatgggttctgattcttgctaggggatggaagcgggttctgttgttagtctccggtgaatcattttatgtgaagcggttgttttgaattagagaaagaaaagagagagatcatttcccagttttgaattgttcggatatctgccaaacacacggtgcgttcctcgggcagtttctctttttatggctggcgctggctgcaccagagtgaaa

SEQ ID NO: 16578 - DNA, 779 bp, Zea Mays
acggttgcaacgccttcctaacacataactgaacactatgatgaaatttgcttgctttgaaactattgttgagatggtctacaagcatgctgttccgaaaccgaaagaccaatgcagtaagccactacaactagcagtgagctttgcagggggatacattgctggagtattctgcgcggctatatctcatcctgcagacaacctcgtatctttcctgaacaatgcaaatggagccaccgtggcagatgctgtaagaactcttggaatatggggtcttttcacacgcggccttcctcttcgtataattatggttggtactctcacaggagcgcaatgggcagcctatgacgcgtttaaagtgtttgttggactgccaacatctggcggagtggttcgtagctgtgctgctgtgcctcctattcgcgccaagagggtgcaccgagaagacgtgctaaaccaacggagagtagacgtaccgcattgagaagatgtgctgaaccaacaaagcagaataggaaatgtgttgcgatttcactgagttttgtaggagttcgaaaccagttgtttaagttttagctggtagagcaaaagagcattcactttcaaggggcttttattggaacctcttgaacaacagacattgtaatgataaacagctttagaaatgcgccatgcctggtgtagcagtacaccagcaccccgtctctactagtcagagtcaaattttgcttgtgtgaccgaccattctattcaacacacgtgattatggttatgcagaa

SEQ ID NO: 16579 - DNA, 936 bp, Zea Mays
cagacgcggcagatcaccggggagacggtgggcgaggtgcgggccgtggcggggatgcaccagcgcaaggcggagatggcgcgcaactccgatgccttcatcgcgctcccgggcgggtacgggacgctggacgagctcctggaggtgatcgcgtgggcgcagctgggcatccacagcaagccggtgggcctgctgaacgtggacgggtactacgacttcctgctggcgttcatcgacaaggcggtggacgacgggttcatcaagccctcccagcgccacatcttcgtcagcgcccccgacgccagggaactcgtccagaagctggaggggtacgaggccgtgcaggacgaggacccggcgacgcccaagctgcggtgggagatcgagcaggtcggctacaacgcctcgctcctggccgagatcgcccgctgatcggccgcgcgacgatcgctgctgctgcgggagctctggtggctccagtccacgcatcgtctgccggccaggccactggcctccacctgctgctatctaccctacccctactaccccatcgatgatcgatgcgatgatcctgcgtatcagatcaacagaagcacgcattcatatgtgtgtgtttctcaagtgtgaccgcagaaacggggcaccggtgagcaagacgcacgcgaggacttgttttttttaggggtgtgcgttctgctcctagtcctagcagctagcagcggcttgatcgtcctgccgcatgtactctgctcctagccacgtactcgtactcatattcctgatcgacgatcacgtgtttgtttactacccagcagcagctagtactaatgtactaagttaatcgtcgtcccctggtaatgtaactgacctccagctccagctagctagctgcgacattattctgtgcatacctctcgcctcaatggcgtattggcg

SEQ ID NO: 16580 - DNA, 1232 bp, Zea Mays
ttttgatgttgctgctcctgccagccacgacgagttcctaagtcatgtaggctatccgagctcagcaatgctgaggttagcagcctcaaggctcgtcctcgcatcgattcctcgtccatgtccatatttggcacggtgaatccaattgttgagggtgtctgtgtcagaggtgatgcagcagataagcagtaccaggtgaaaaactgcagatggaggccaacttttgccttggagactgatgggccatctaacactgatggccaagactttgatgaggacagtggttttcttggtaggactagactgggaagactcatccaagctgctgcaagggagctacttgacaagctgaactctgcgagaaccaattcgccaacaaagatattccttgtcctccttggtttttacacagccaatgccttggcaacaatactagggcagaccggtgactgggatgttcttgttgctggtgttgtagtggctgccattgagggaattggcatgctcatgtacagaaaaccaattgccaggcctcctggtaggttccaatctttgatttcaatggtgaactactggaaagccggtgtatgcctgggcctttttgtggatgccttcaagctgggtagctgagtttatacaatcatctgctgctatctgcctatggtaattttttgggtatattgggatcacaataacgccatgatatggttccatgatggccattgctcgttgctcgaattctaatagctgcatttggctctaattctgggagcattggctgctgaggtatcagatttcttcaaagttaatgaagatgtttggagcagatattattctgaggtgactattcatttttccataatcgaaggccatgtttgtcaaccattgtttggcccgtaaactgtagatatgctgtagtttttccacctccatgtcatttagccctaatatgcatttatgcgtactgagagaagtaaaaaaaaaaaaagatgtgctgctttaagggcatgtttgggagcaaggggatattgaatagcaatgggattttagccccttcaatccccttgctccttagataggatgtatttcttctacggatatatggtacttgtacgtgcgtgtcagcatgtgatgagttgaatacttctttcatccaggattattctatatcttgcactatatgtcattgttaccaaaaatgttttctctcttcaaccatatgaaaaagaaaa

SEQ ID NO: 16581 - DNA, 2644 bp, Zea Mays
cgcaagagaaaatttcacgttatcttttctttttcgttaaaaaagaagcaagcgaaaaaaaacacttctagccgtgcgggcttggccgtccgcagtagcagcagcaacgaaccaacgaagcactggttgttggtaggtgcacgcaccccatccccccacccaatccctcgcggcgggcgggcgagagagcgagcggcgatggcggcactggaggcggtgaggtcgtgggcggtgtccgtcatcccgccggagctcgccgccgccgcggggggagacccgctcgccgcgctggcagccaccgccgcggcccttgtcgcggggctgcttatcctcgccgtctggttccgatccggaggcggggcgccgtccaagccggtcgccacgccattacggccgccgccggtgaaggtggacgccgacgccgacgtggacgacgggcggaagcgcgtcaccatcttcttcggcacgcagaccggcaccgccgagggattcgccaagtcgatggcggacgaggcgagggtgcggtacgagaaggccgtgtttaaagtggtggatctggatgactatgctcaggaggacgaggaatacgaggagaagctgaagaaggaaactgtggcgctgttcttcttagcaacatatggggatggagagccaactgataacgcagcaagattctacaaatggtttactgagggaaaagagaaggaagtttggctgaaggatcttaaatatggtatttttggccttggaaacaggcagtatgaacattttaataaggttgcaaaggtggtagatgagctactagaggagcagggtgggaaacgtcttgttcctgttggccttggagatgatgatcagtgcattgaggatgatttcactgcatggaaagaactagtgtggccagagttggatcaattgctccgcgacgaggatgacacaaatggtgcatcaactccatatactgctgctattcctgaatacagagttgttttcattgataaatctgacctgtcattccaagatagatcatggtcactagccaacggtactggtgtgattgatattcaccacccttgcagggctaatgttgctgttcgaaaggagctgcacaaaccagcttcagaccgctcttgtattcatcttgagtttgatatttctggcactagtcttgtgtatgaaaccggagaccatgttggtgtatatgcagaaaattctgttgagactgtggaggaggctgaaagcctacttgacctttctccagatacagtcttctccatccatgcagatgcagaagatgggtctcctcgtaaaggaggaagttccttggccccacctttcccatctccatgtactttgcggactgcgcttctacgatatgctgatctactcaatccaccgaagaaggctgctttgcttgctttagcttctcatgcatctgatccagctgaagctgaacgacttaggttcttggcctctcctgctggaaaggatgagtattctcaatggataactgctagtcagaggagtcttcttgaagttatggctgcattcccttcagctaagccaccactgggagtgtttttcgcagcaatagctcctcgtctgcaaccacgatactactcaatttcatcatctccaaagatggctccctccagaattcatgtaacatgtgcattagtttatgggccttcaccaacaggaaggatccaccaaggagtttgttcaacatggatgaagaatacaattcctctggaatatagcgaagaatgcagctgggctcccatatttgtgaggcagtcaaatttcaagttacctgctgacccatccactccgattatcatgattggtcctgggacagggctggctccttttagaggtttcttgcaggaaaggttagcactgaaacaatctggagcagaactgggcacttcaatccttttctttggatgcaggaaccgtaatatggactacatatatgaagatgagctgcaaactttccttgaggagggggcgctttctgagctaattgttgcattctctcgggaagggccaactaaagaatatgtgcagcataagatggtggagaaggccacagaaatttggaacatcatctcacatggtggttacttatatgtatgcggtgatgccaagggaatggctagagacgtacacaggatgcttcatacagtagtccaagagcagggatctttggatagctccaaaaccgagagctacgtaaagagcctgcagatggaaggcaggtacctccgtgatgtatggtgacacatcacccccattcagccatagctctagcgtgtggaagtaaagctggctttgcgtgtacgacatgcctaatgccaaatgaagcgtgccattgattagaaactgaaatgttcagtcgatcagtgtaattctttgacatctaactatttatcattatatggaatgggaggaactgttgtagatttgtagaactacaaaaaaattgtgtatccctaacaagtttgtagcaaagggggtacattattacagtttgagatgaggacatcatgtatactgtttgagacgaggacattatgtatatacttggtacataattacagtttgagatgaggacatcatttatactgtttgagacgaggac

SEQ ID NO: 16582 - DNA, 2728 bp, Zea Mays
caaaaagtacaggtatagtggcagccttaaaacccctttttcgggcacaaacccccagccgtccgtgacatcgccgggatcccgcccggacctcacccggcgatatgtcgacggcggctcccgcgccgggctccacggccacggtgcgggtatccaacatcccggcctcggccatcgccgcagagctgctcgccttctttgactccgccgtcaccatcgctggcgcgaccttcgcctgcgagatagtcgccgctcaccgcggctggctcagccgcggccacggtttcgtccagtttgattcctccgccgccgccacccacgccatcgacctcgcctcctctggccgcctgccccccttcctcggctcctgcctatccgtctcccccgcccgcgctgacctcctgccccgcgcgcccgacctctccctccgcgctgccagcgcgagcctcattctaggcaaccgcgtcgccgagcgcgagctggaggtggcctactcctgcgacggcgtgcgggccgaggtcatcccgaggatgcggcgtgtggacctctacctgaagcacgattcccagagctacaagcttgaggttctctttgaggacatcaatgagtgctttgggtgccacctcgatgggacgggcgccatcttgctgcagttaaatcaaggtttacagatgatcgctttcatgcatgcaaggaggacgccaaatttgcatgggtcagagcactagatttcacacctaatagctcttttggcgagtgttccactcttgtcctgaaactgagcaaaggtgcatcagtatcatatattcttgaaagtttacccttctcaggagaattaggggaattggccattgcttcgatggatgtgtttggctcctcctccaatgtggttcctcttgttgactgcccaaatggcttttctgtgccttatgaagtactttttcgtctgaactctcttgttcacatggggaagctagttgccaggcatgttaatgctgatctgtttaaagtccttgaagatctgtcaatcgatactttaaggagaatatttgagaaaatgagcaaattaaaatctacctgctatgaacctttgcaattcatcagacatgaggctcatagcatgaatatgagaaagaaagccttgtccaacaagagggagagtggaaaattgatgaggtgttacagaattcacatcacaccatcaaaaatatactgcttggggcctgaggaagaagtttcaaattacgtggttaagtaccattctgagtatgcttctgactttgctcgagttacttttgttgatgaagattggagcaagctttctcccaatgcattgtcagctagaactgaacaaggtttcttttctaaacccttgaaaactggcctgtatcatcgtattctctccattctaaaagaaggattttgcattggccccaaaaaatatgaatttttggccttttcagcaagtcagcttcgtggtaattctgtttggatgtttgcttcaaatagttctctgactgctgagaatataaggaggtggatgggccactttgaagatatccgttcagtctccaagtgtgcagctagaatgggccaactgtttagctcatccaggcaaacatttgaagtctcatcatatgatgtagaagtaattccagatattgaagtcacaactgatggcactaaatacatattttcagatggtatcgggaagatttctactagatttgccagacaagtcgccaaattaattggcttagacccagctcatcctccttctgcttttcaaataaggtatgggggctataaaggagtcatcactattgaccctacatcctttttcaatctttctctgcgacctagtatgaagaagtttgaatcgaagagcactatgctgaacattacaaattggagtaagtctcagccatgttatgtgaaccgtgaaattatctctcttctttcaacattggggataaaggatgaagtatttgaatcgatgcaacaagatgacatgcacgaatcagatggaatgctaacaaataaagaagctgctttgtctgtcctagggaaaattggtggcggtgataccaagacggcagctgatatgcttctgcaaggctatgaaccaagttcagagccttacctattaatgattcttaaagcccatcgggctaataggctgaccgacataagaactcggtgtaagattcatgtccagaaaggccgtgttcttattggttgtttggatgaaacttgcaaattagagtatggccaagtttacatcagaattacaaagaatcacaaggagcagaagtacagtgaacagccgttcttttgcaacgatgatggcaaaacagctgtaattgtaggaaaagttgcaatcacaaaaaacccttgtctccatcctggtgatgtcagagtacttgaagctgtatatgaccctggattggatgctaggggtcttattgattgtgttgtatttcctcagagaggggaaaggcctcatccgaatgaatgctccgggggcgatttggatggcgacctcttctttattacttgggatgacaaactgattccggagaaggttgatgcacctatggactacactgcaacgaggccacgcataatggaccatgctgttacacttgaggattaaatccatgaaacaggccctgatagggcaataacgagcacaagaccatccagccagcatggtattaagacggta

SEQ ID NO: 16583 - DNA, 1802 bp, Zea Mays
ccatgcgcatcgtccagccgggtgcgagcacggacgacacggcccacggcgtcttcatctcgccaccaaggtggtggtgtgggttgcggcgccggcgatgatccgcgcggggctgacgacgccggtgatgacggtgctgctggtgtcgttcctgctggagtacctgcccaagatctaccacgcggcgcgcctgctccggcggatgcagaggcagtctggctacatcttcggcaccatctggtggggcatcgcgctcaacctcatggcctacttcgtcgccgcccatgctgtgggcgcgtgctggtacctgctcggcgtccagcgggccagcaagtgcctgaaagagcagtgcctccaggcggccgggtgcgcgcgcggcagcgcggtggcctgcgcggcgccgctgtactacggcggctccccgtctcccggagtcggcggcggcgacaggctcgcctgggccgggaacgcgcaggcccggggcacgtgcctcgccagcggcgacaactaccagtacggcgcgtacacgtggacggtgatgctggtggcgaacccgagccgggtggagcggatgctgctccccatcttctggggcctcatgacgctcagcacgttcggcaacctggagagcacgacggagtggctggagatcgtgttcaacatcatcaccatcacgggcgggctcgtcctcgtcaccatgctcatcggcaacatcaaggtgttcctgaacgcgaccacgtccaagaagcaggccatgcacacgcggctgcgcggcgtggagtggtggatgaagcgcaagaaactgccgcggagcttccgcggccgggtgcgccagttcgagcgccagcggtgggccgccacgcgcggcgtcgacgagtgccagatcgtgcgcgacctccccgagggcctccgccgggacatcaagtaccacctctgcctcgacctcgtccgccaggtcccattcttccagcacatggacgacctcgtgctcgagaacatctgcgacagggtgaaatccctcatctttcccaagggagaaaccatcgtgagggagggcgacgtggtgcagcggatgctgttcatcgtgcggggccacctgcagtgcagccaggtgctgcggaacggcgcgacgagcagctgcacgctggggcctggcaacttcagcggcgacgagctgctgtcgtggtgcctgcgccgcccgttcctggaacgcctcccgacgtcgtcggcgacgctggtgacgctggagagcaccgaggtgttcggcctggacgccgccgacgtcaagtacgtcacgcagcacttccgctacaccttcaccaacgacaaggtgcgccgcagcgctcgctactactcgcccggctggcgtacctgggcggccgtcgccgttcagctggcctggaggaggtacaagcaccgcaagacgctctcgtcgctctccttcatccgcccgcggcgcccgctgtcccgctgctcctcgctcggggaggagaagctccgcctgtacacggccatcctcacctcgcccaagcccaaccaggacgacgacttctagctagcttagctaggccgttccaggccggattctcttctcctcagcgaggagtatatatatcaaacaacatgcatttatttgtagtattcattactcgcatgtcgcatgagagacagagccatgaccgtactccctccgctttcctattagttgtcgtttaggataacgacacggtctctaatatataactttgaccaatattttttgttaaaatacaaataaactcttaatacatttatacttttat

SEQ ID NO: 16584 - DNA, 1720 bp, Zea Mays
caaacgggtccttagtgatttcttgtagttgctctgagtctctctcgtctgtcgcccaaatccattttccacgtctcttccatcccatccccgtgacgccgtctagatttcaaatccgcgtcaagccagggcagagctcagggctcggtctcccccttcgccgccagttgccgcagcctccaacccctcgagatccgccgcgtgtgagaccgccgaccatggaggccatggaggagctgtcagagctcgccgagtcgatgcgccaggcggcgtcgctcctcgccgacgacgacccctccgacgccgccgcgccgcgccggcccaccaccttcctcaacgccgtcgccctcggcaacgtcagctctggcaagtcggccgtgctaaacagcctcatcggtcacccggttttgccgacgggggagaacggggcgacgcgggcgccaatagtggttgacctgcagagggatccggggctcagcagcaagtccatcgtgctgcagatcgacagcaagtcgcagcaggtttccgcaagtgccctccggcattcactgcaggacagactcagcaaggggacgtctggtggatcagggaggggccgtgctgatgagatttacctcaagctgcggacgagtacagctccctcattaaagctgattgatttacctgggatagaccagcgagctgttgatgattccatgggacaagaactgttggtgttataagcaaagttgatcaagcagatggagatgcaaaagttatagcctgtgttcaggccctactatcaaacaagggtccaaaaaaccttcctgagattgattgggttgctctaattggacaatctgttgcgattgcgtcagcacaatcagctgggtctgaaaactctctagagacagcttggcgagccgaagctgaaagcttgaaaaacatcttaactggagctccgcagaataagcttggtagaattgctttggttgacacaattgctaagcaaatccgtaaaagaatgaaagtgcgggttcctaacctattgagtggccttcagggtaagtctcaaatggttcaggatgaattggcaaggctgggagaatctatggtacagagtcctgagggaacccgggcagttgctttggagctgtgccgagaatttgaggacaagtttcttgctcacataacatctggtgagggatctggttggaaaattgttgcaagttttgaaggcaagtttccagacagaatcaaacagctaccgttggaccgacatttcgatctcaacaatgtcaaaaggattgtcttggaagccgatggttatcaaccatatttgatatctccagagaaagggttgaaatccttaataaagttagtactggaaatggcaaaggagccatcacgactatgtgttgaggaggttcatcgtgtattgttagacatagtcaatgcctccgcaaatgccacaccaggactcggaaggtatcctccattcaagcgtgaggttgttgcaatagcatcaaatgcattggataccttcaaaaatgatgccaaaaagatggtcgtcgcgcttgttgatatggaacgtgcctttgttcctccccaacatttcatccgcttggtgcaaagaagaatggaaaggcagcgtcgagaggatgagttaagaaaccgatcttctaagaaaacacaggaagctgaacagtcaacatctaagaggttacagtatatattggct

SEQ ID NO: 16585 - DNA, 666 bp, Zea Mays
actacccgccgtgacctcgcgagtcgcgacccggacgcgactagtacactgcctgccaaacagctgagcagagtagagtagagcagagggcgaagtgcagcgcagtgtgccccgtctcggaacagcgcggaccaccagagcgtgcgcgtccgtgccccacccctccctctctatccatggcggtcccccgcgggtgcctcgggctccccctggtcgccgtgctcctcgcgtccctctgccgcggccaggcggcggtgagggagctcaaggtcgggtactacgccgagacgtgcccggaggccgaggacatcgtccgtgagaccatggcgcgcgcgcgcgcacgcgaggcccgcagcgtcgcctccgtcatgcgcctccagttccacgactgcttcgtcaacgggtgcgacggctcggtgctgatggacgccacgccgacgatgcccggcgagaaggatgcgctctccaacatcaactccctgcgctcgttcgaggtcgtcgacgagatcaaggacgcgctggaggagcgctgccccggagtggtctcctgcgccgacatcgtcatcatggccgcccgcgacgccgtcgtcctggcaggatcacgatcattttgcctaccactgaccatggcaccttaccattgacgacatggcgatgcatgcacgg

SEQ ID NO: 16586 - DNA, 1429 bp, Zea Mays
gctaaagctctctcctatcttcagctactacatccatggataaatctgccttgtcaaccagtcaagctgatagtagctctggagttccaggaattactgttgataaatcagtagagttctcgtatgaagaactttttaatgccacagagggatttagcatgagtaacaaaatcgggcaaggtggttttggtgctgtctattatgctgagctcaggggcgagaaagctgccataaagaaaatggatatgcaggcttctcacgagttccttgctgagttaaaagttttgacacatgttcatcatttgaatctggtgcgcttgattggtttttgcaccgaaagttccttgtttcttgtctatgagttcatcgagaatgggaacttaagccagcatttgcgtggaactggttatgagcctctgtcttgggctgccagggttcagattgcactagattcagcaagaggtcttgagtacattcatgaacatactgtcccagtgtacatacatcgggacatcaaatcagcaaatatcttgatagacaagaactaccgtgcaaaggtcgcagattttggtttaacaaaacttacagaagttggtaatacatcactacccacacgtggaatcgtgggcacatttggttacatgcctcctgaatatgctcggtacggtgatgtttctccaaaggtcgatgtttatgcctttggcgttgtcctctacgaacttatttcggccaaagacgccattgtcagatcaaccgagtcttccagtgattcaaagggattggtttatctgtttgaggaggctctcaacacaccggatcccaaggaaggccttcaaagactgattgatccggcgctcggcgaggattaccccatcgactcgatcctcaagatgacggtcctggcaagggcgtgcacgcaggaagaccccaaggcaaggcccacgatgagatccatagtggtggcgctgatgacgctgtcgtcaaccagcgagttctgggacatgaacgcgatccaggagaaccaaggtgtcgtgaacctcatgtccgggagatgactcctgtccctgtgggctgtggtatatattattgtacgtcctacctgccttcccctgggcaattgtacattagggctcatttgtacggcccgttgacggccagagaggagggccactgtaggtatttacaatgtaatatcttgtcactcaagggttttctcccgtgtttaggctccctttggaacaaaaaggaaatttcctgaacctgtgttttttgctgtattttttaactaatttctatgaaattcttatagcattcatgtgaaattcctgcattctaaaggatcggaaggtcgttgagagccgcgtgtgagttactggggttatgtacaactctgaagatacttataaaagttattaatatttacttattt

SEQ ID NO: 16587 - DNA, 1293 bp, Zea Mays
cccgtacacattccaccccaaaatggcactcgcgccatcacccccagcgctgccgcccaacccggcgctccctttgccgtggtgggggcgggccggccgcggtgcgctcctcggcgcccgcgcccgcgtccgcgccgtccgcgcggcgctacggcccccgagccagtggtccgtcgggagctggcggggccgcccggcgcagcagcagcccgagtacccggacaaggcggacctggaagacgtgctgcggacggtgggaacgttcccgcccatcgtcttcgccggcgaggcgcgcaccctcgaggagcgcctcgcggaggccgccgtcggccgggccttcctcctccagggcggcgactgcgccgagagcttcaaggagttcaacgccaacaacatcagggacaccttccgcgtcctcctgcaaatgtccgttgtgctcatgttcggaggccagatgcctgtcgtcaaggtgggaagaatggcagggcagtttgcgaagccaaggtcagatggttttgaggagcggaatggattgaagttgccaagctatagaggggacaatatcaatggggatgcattcaatggggagtcaaggttgccagatccacaccgcatgataagggcgtactcacagtctgcagcaacactgaatctgctgcgggcattcgcaactggaggttatgctgcaatgcagagggtagcacaatggaaccttgatttcacagagaacagcgaacaaggtgataggtacatggagttggctcaccgagttgacgaagctttggggttcatgtcagctgctgggctccctttagatcaccctataatgacaacagcagaattctggacgtcacatgagtgccttcttctaccttatgagcaagcgctcactcgtgaggattccaccacgggcctctattatgactgctctgcccacttcctatgggtcggagagcgcactcgccagcttgatggtgctcacgttgagttccttcgaggcattgccaaccctcttggtatcaaggttagtgacaagatggacccagcagaacttgtgcggttgattgatatattgaatcccgaaaacagggctgggagaataaccatcatcacaagaatgggacctgaaaacatgagggtgaaacttccacacctgatacgcgctgtccgtggggccggtcagatagtaacatgggttactgacccaatgcatgggaacactatgaaggccccttgcggactcaaaacccgctcgttcgacaggattttgaattttgattgacagtgaaaggg

SEQ ID NO: 16588 - DNA, 764 bp, Zea Mays
taaggttgaagtaatagattgcaccggcgagatgcaagctgtgtagttgtaggtcctttgtgcctttcggcaggatgatgatgccaaagtgaagagggcattccaaacactgcttacttacattggaaacgttgctaaaaatcctgacgaggagaaatttagaaagatcaggctgacgaatgcaacatttcaggagagggttggaaatctgcatgggggcatagagttcctggagctctgcggatttgagaaacttgaaggcgacgaattcttgtttttggcaagggaaaaagtcgacagtgctatcctgaacacagctggagccgagctgaattctgccatcaccaatcctttcttcggagtcctttgaatcgtaaaaggctacaatgtatactcaaaactctcgggttctcctttgcttgacatcaattgggcgccaactgttgatttccaagtctgtggtcagtctcagattccatgaattattatcagatcggattccgtacattgctgaggcaatctttgaagcaacttgctgcgcatatatgcttgggatctttccgatctcatcgcttcgctgaccttgatgcattttacaatgttctagcaccaaaaataagtgatgtactctgatgtatgcgttttacaacgacttcacttgttaatgacaactcgatcatctttaattatagattactcctacgaaacatatagcatctgatgaagaagaggaagttgcttgcatatcccagtcataatcgcca

SEQ ID NO: 16589 - DNA, 708 bp, Zea Mays
cttgctattgctatggggccggggcggagtaaaaaatttctttactagagacatgcgagagcatggtggcggtggagcggcggctcaaggagatgggcatcccgtacgtgcagcgctgcgtggaggagggcggcatcaacgtggaccagatcttcttccacgacccggacgccttcatgatcgaggtctgcaactgcgacaacctccccgtcgtcccgctcgccgccgccgccgaccagcgcgcgcctgccgtcctcggcgcctgcaagcgggccgcggcggcggtcggcgtcaagcagcagcagcagcaaagcagcggcggcgccgtgccttcttccgccgccccggcggcggccgcgcagcgcgtgccgtcggcggcgcaggcgcccatcgtccgcgtcgccgaggagtcgacgtcgcacatttcgtgcgcgtgattcttcatgccaaatggcgaggacggtcagtgtcgtgccggcctgccggatgccgtcaccgcgacggtgaccgcgcgcactgcatgtctgcgtcgagccgtgacgaagcaggcacgatgcgtcgagtcacggcaaaaagcgtctagcgcgtcgtctctgtatatgcgagtgcgtcgtcgtgtagctccatgtgcaagcaaactactgcccttttgtagtaaagaataaaaccatgtgaagagacgagtgcgtgcatcattggatatctcag

SEQ ID NO: 16590 - DNA, 1222 bp, Zea Mays
cgacgcatccgctgtctgactctgagaccgagagcctccagaaacccacgcgacgcgaccgaccaccatggccgcctccgcgctcctcctctcgccgcggctcgtgtctttcccgcctcacccgagcctcgccccactcttcaccaagagaccaccgccctaccccctcggcggcgccggcgcgaggctccgggccgtcggggacgggcccggcgcggggctgccacccgagcaggccacggtctacgacggcgcctacggtccctggaccctggaggactccgacgtgcgcgaggtcctgctgtaccggtcggggctggtgacggctgcggcgtccttcgtggcggcgtcctccgcggcgttcctgccggaagggaaccccgccgcctccgccgtcaccggcgccgccgacctcctgtacgccgccggcgccgcggggctggggctgtcgctggtcctcatccacatctacgtcaccccgataaagcgcttcctccaggcgctgtgggcggccggggcgctcggctccgtcgggacctacctcgtcgccgcccgcccgctggatgagggcctcgtgcagtacgtgctggaccaccccgccgcgctgtggttcgtcggccccacgttcgccgcgctcactggcctcgtcttcaaggaaggtctctgctatgggaaactggaagctggcatcttgacgtttcttatccctgggcttcttcttgggcatttggtaactcagaaaccaaccactagcatttatctcctcaaactgttggtatctgcttctgttgtcttacaatctttgtgcagtctggtttaatggataacagcacaaaggcaggtcttttaggactgtggatgcttcttttcacaatcttcgccgctagaaaattccagcagcccatcaaggatgacgtcggagacaaatctgttttcatgttcaacgctctccctgaagaggaaaagaaggcttggatccagaaactcgagaggcaaaaggggcaagagttgtttgagtagaaaagagtagcttgtcttggtgcagccaatagttcgtccgtgaatgtttgtagctcatgtatatgattatggctccagaaatttgacaaatacacccaaagacatgaagacgagaacacgttccaatagagatgtaattacaaatctgttagatcacaggtaagatgtaactaaataaagcagttttgttgttataaaaaaa

SEQ ID NO: 16591 - DNA, 4362 bp, Zea Mays
aaccagtagccgtactctacagaagcaaggacatagagaattgacaagaaaaatcacgcaagggaggagagagagaaggggggagcatagcataggcatagcaagagcaaagctgaaaaagaggagcaccactcgtggggggttaaaaccccgagaacaaacttgggagtagcagcggccagccggaagcgagcggagaccgaggggagagggggtgaagaagcaacgagacgcagcgagcaagcgaaagcataccagagcaccaagcatagggacgcgcgcgcttctccagttctccctccctgccctgcaaggcggctgcaactgttccagctagcccctctcccagcctctgcgtcgtagacgtggtagtagcagccgcagcagcagaagcggcggcgagcatgctcttggcacccctccccggcgccgggcggatctgccggagggcggcggccggggcgcttggagcgcggcgctaaccgcgttcgaaggacctcgggatctgacgccgcgcctcccctaatcgatcgactccatcggtggcggcggcggccgaggcggcagcagccgggtctctcggctccgggacaagataagcttttgctctgcgcattcgcgctgctcaaacatcgtagccagccacaccaagcaactgacttgtgctcctctgattgtacaagggaaagattgcgcttgcgcttgcttgggcgccggccgcgccggtggcggtaatcttcgagagccgcggtcgcggcgcgcggtgaagagaaaaaaaggtgtgtgtgtgtgagagagagaggaggctccctgccctctcgcggtgacttggcgaggagggggagggactgggaaagcgaatggttttcgggaaggcgctgtgatttggcctggaaaggaggaacctttccttcctcttcccgtcctttgccggctcttgtaccgccctcagatcggcgacccggttgtttcttcggcaacgggcggaaatgaggctctcgtcgtcgtccggcagcgtcctgccggctcagccgggctcgccggaagctgtggaggagcacaagtgcctgaactcggagttgtggcatgcttgtgccggcccgcttgtttccttgcccgcggtgggtagccgagttgtgtacttccctcagggccacagcgagcaggtagcagcatcaacaaacaaggaaatagagtctcagatccccaactatcctaatctgccgccacagcttatatgccaacttcataatgtgacgatgcatgctgatgcagagacagatgaggtatatgcacagatgacactacaaccactcaacccgcaagaactgaaggacccatatttacctgcagaattaggttcggccaataaacagccaacaaactatttctgcaaaacattaacagcaagtgataccagtacccatggtgggttctccgttccccgtcgagcagctgagaaagtgtttcctccactggatttcacccagcaacccccatgccaggagttgatggcaaaagatcttcatggcaatgagtggaaattccgtcacatctttcgtgccaaagcggcatcttctaactacaggttggagtgtctttgtaagtgcaaagagactcgttgctggcgactctgtcctttttatctggaatgacaataaccagcttctgctgggaattcgtcgtgcaaatcggccacaaactgtcatgccatcttcagtcttatcaagcgatagcatgcatatcggtcttcttgctgcagctgctcatgctgcttcgacaaatagccgatttacaattttttacaacccaagggcaagcccttcagagtttgtcataccactcgtaaagtatgttaaggctgtgtatcatacccgcatatctgtggggatgcgattcaggatgctttttgagacagaagagtctagcgttaggagatacatggggacaattaccggaatctgtgatcttgattctgttcggtggccaaattcacactggcgttctgttaaggttggctgggatgagtcaactgctggtgagcgacaaccaagggtgtcactatgggagattgaacccctgacaactttcccaatgtatccatctccttttccgctcaggctcaagcgtccatggccaacaggcttgccttctctgcatggtatgaggtgggaaggatgatgacctggctaactctctcatgtggcttcgagataccgcaaatcctggttttcagtcgttaaattttggtggacttggtatgagcccttggatgcagccaaggctggatgctaccttacttggtctgcaacctgacatgtatcaggcgatggccacagctgcttttcaggatgcaacaaagcaggcatcgcccacaatgctgcagttccagcagccccagaacatagctggccgggcttccccgcttctttcaagtcagattttgcagcaagcacatcatcaatttcagcagcaaccgtaccttcaaaacatctctgagagcacaatccaagcacagggtcagtctgagttcctcaagcagcagatccaacgcagccagtcattcaatgagcagaagccccagatgcaacaccagcaagaatcacagcagcagcagcaaccacagtgtctgccagtcccccaacatcagcaaatgcaacaacagaatatgaccaactaccagtctatatctaatgcattatcaccgttttctcagctgtcgccagtttctcagtcttcacctatggcgctgcagactatattaccgttctcgcaggcacagagcttcacagacacgaatgtaggttcattgtctccatccaatggtaacaccatgcaaaacacactgaggccgttctcatcagaagcagtttctcacctcagtatgccgaggcccactgcgatacctgtcgcagacccatggtcgtcgaagcgtgtcgcggtggagtctctgcttccttctcggcctcaggtttcatcccagatggaacaattggaccctgcaccagctagtatacctcatagctctgcgttggcaccacttcccggaagagggtgcttggttgaccaagatgtgaactctgatcctcaaaatcatctcttgttcggtgttagtatagactcgcagtcactgctaatgcaagggggcattcctggtctccaaaacgggaatgattcagctgctataccttattccacttccaatttcctcagcccttctcagaatgactttcctctggaccatacactaaattcttcaggctgcttagatgattctgggtacgtcccgccatgttcagataattctgacaaagtgaaccgaccaccagcgaccttcgtgaaggtttacaaatctggaacctacgggaggtcgcttgatatcactaggtttagcagctatcacgagctccgtagggaactggggcgcctatttggccttgagggccagttggaagacccattgagatcaggctggcagcttgtattcgtcgaccgtgaggaggacgtccttctcgtgggcgacgacccttggcaggaattcgtgagcacggtgtcctgcataaagatcctctccccgcaggaggtgcagcagatggggaagcagggcctggagctcctgagctcggcccccgcgcggaggctcggtagcagctgtgacgactacgtcagcaggcaggagtcgagaagcctgagcaccgggatcgcgtccgtcggttcggtcgagttgggatgagcagcaagatagcgcgcacgcagcagcagcagcagcaggttacgcatcctcagcctcagggtaggtaggggactgaagggttggtctgcgacttgatgacccacgagctcctcgttgcgcgcttcgttcgcctccatgcgatggatagaagttcagcgcagaccaagccttagctctgcgagctatgtaccatctaataattctgtccgtgtcgtaccatgtcaactcctaagtagaagaattgaagaaactaccagcagccgctgtctggtatacacgctgaaacattttttttcttgtatggagaaatactaatcatctggatgtagccaggcctatgctctctaatggttgatcgggtaatacagcccctcgcacacagcaaactcacaagagaaacttccagttgctacattaagtttgggcagtaataaaaggtccgtcaaaaattaacttttttttttctcggcagcaacaagaagtccatacaaaattaacttattttttagtggctaaacggaggaggctgaaaatattttttttgttttggcggtatgtactaagacgttgtatttagtcattgaaaatagattgattttcggcagtctctatcgcagcaagaaagaaag

SEQ ID NO: 16592 - DNA, 2680 bp, Zea Mays
ttggtggccttgaggatatcatataggcgttcaggtccaagacaataatttgctgtcttcagaaacttgtgtccatttcctcctcaaattattaaaccctccggtgaatgttgttgatgccaaagcaccatcaataggttccaaacttcttggaatcagtaaatttcagatgcttaacggttccaataaggatgtggactcttgttcagaggacatacttttaaaagttgaagaaatcctcttaagctgcaaagagatcaaaccagcagacagggattataagagaacaacaaggccggaactatgttcaaagtggcttgctttgttgacaatggaaaaggcgtgcttgtctgctgttgcattagaggatacatctgacatggtcttagaactcggaggaaatttcaaagaaacattaaggcagttgggtggccttgatgatatttttaatgtcatggtgaattgccattcagaattggagaaacttgtaaaggatgcctccactacggttgtggagggaaaagaaggtgctcctctacaaagcaccacactcctcttgaaatgtttgaaaattttggagaatgccacatttctaagtgacaacaacaagacccatttgctcagcatgagtcgaaaattgagccctaaatgccgctcactttcttttgttggtgtcattctcaacattgttgagttactatcagctctctctctccttcagaaaccttccactgtttcaagaaaagcagatccaaaaaatactaaagtttgcaacggggcctgctctgcagacagtagaggtttgagcttattgaatcatcattgcaagtgcaataactcaaagaaaaagagcattttactgaaccgaaggtgccagtattgttcatccaccaaatcagaagcttctcatgttaccctctcttctagtagtgatgtcagtcagtcagaaaggatactcaattgctcatctttttcaagcaatgggacatcaagtggttcatttggagtgaaacatattaatggtgctagtttgaagctcaatgtaagaatggatcgttctaaagcttatccagtcagaggctcaactggttggatttctatgaaagcacaaacttctgattggaactccagagaaatggcaaaaaagcggcgcctatctgaaaatgtacgcactgatttgagtaatggtggtgatgatccatttgcatttgatgatattgatcaagaaccttcaaattgggatctatttggtccaaaaaggaaatcaccacagaagcgagcgaaaagaactaatggagaagtgttggatgattgtggaactgcattaatgggaagtcctaaattatgtcaacctgaagatatttatcagtcagttgcaacttctggttctaaggttgtagatgagtccaatcttttggaggattgccttttggcgtcagttaaggttcttatgaacttggcaaatgacaacccgtctggttgcgaacagatcgcgtcatgtggcggacttaataacatggcctccttgatcattaaacatttcccctcatttgatttctccatgaacagtaacaatcaaatgaatgaaagtgtgtcctctggtgatccgttgtcttcccagaacagcaagtcaccccaaatcaaaactaagcagttgcgggactatgaacttgattttctagttgccatattgggattgcttgtgaaccttgtggagaaggatagccttaatagggtacgacttgcgaatgctcgtgtttctgttaatctatctcaaaatccagatagcaaagaggtacagagggatgtcatacccctgctctgttcaatattcttagcgagtcaaggtaccggggaaactgctgaagctatatcaccggatgatgaagaatctctgttgcaaggagaacgcgaagctgaaatgatgattgtggaggcctatgcagctcttgtgctcgcctttctttcaacggaaagtatgaaggttcgaggagccatttctagttgccttccggacaacaacttgaaagttcttgtaccagtgctagagaaatttgtgtcatttcatctgcagctcaacatgatgacaagggaaacgcattcagctgtgactgaagtcatcgaaagatgtcggctatcatagaagtgggaagaggcgccctgtacagattagctgacctctttgcagccgaagcacacacaggtgttgctcatcacctggccagggcgcaacaaatggatgccagaggctggcctgcagtgggctttgggagctaacagtgattttattctttcttttgtccctagtttcttgttctccgcatcccccgaaatcacatgtttcattgtcgtaggaatagtccgtattatgaatgtacaataacaacataggccgtagggggaatgtagttgtgctgtttcagttcctgggctgtctgcctttcaggttgtatgctcgtgtcacatggaatcagtgaccgcatgcctaaatctgagttaagattgtatatcacataatagccgtgcaattcaactatgtagccctatgtacagaggcgccatatattgaagcatcttctggttgcaaaaaacatgaatgttgtataaatagtgtaactgaaggtatacaaatcttccaggcagttccttggtgctatataatgcacggcttagtggcgta

SEQ ID NO: 16593 - DNA, 783 bp, Zea Mays
  misc_feature (782)..(783): n is a, c, g, or t
cacaccccagccacgagctccctctcttttccgccctccacccctcgcgagctctccacccctccacacgaccctcctcggcggcggcggcggcgatgcagatggcggcgaccaccaccgagtcccaggcggccgtgccgcctcaacaccctcacgcccacccccacgcgcccccgcagcatgctcacccgcaccaccacatgccgcagccacggtgggtcgtcatcccgtacccgccgccgccgcccatggtggccgcgccaccaccgccgccgcagtttgccaagcacttcgctgctgggccgcccccgccgccccaagctggtgctgggcgccgcacgccgaccccgccctcgtctggatccggcgggaacgggtgcgaagaaaataaaaccatttgggtcggtgacctccagtactggatggatgaaaactacctacataactgcttcgggcccagcggcgaggtggttacaataaaagttatccgcaataggcaaacaggacagtcagagggagaaagctcttcagaattttactggtcatgtgatgccaaacactgaccggccatttaaattgaactgggcatcgtatagcatgggtgaaaagcgatctgaagtggcttctgatcactcgatatttgttggcgatctagctgctgatgtcactgatgaaatgctgctggagcttttctccagcaagtaccgctcggtgaaaggagctaaagttattattgatgcaaacacaggccgttccaggggctatggatttgtcaggtttgnn

SEQ ID NO: 16594 - DNA, 1303 bp, Zea Mays
taccaaacaaacatcttttgcagcaggttcttatgaacttggcaaatgacaacccttctggttgcgaacaaattgcgtcatgtggtggaattaatacaatggcctccttgatcattaaacattttccctcatttgatttctccatggacagtaacaatcaaatgaaagaaagagtatcctctggtgatctgtcgtcttcccagaacagcaagtcactccaaatcaaaactaagcaattgcgagcctatgaacttgattttctggtcgccatattgggattgcttgtcaaccttgtggagaaggataaccttaatagggtacgacttgcgaatgcccgtgtttctgtcaatctatctcaaagtccagatactgaagaggtacagagggatgtcataccccttctctgttcaatattcttagcgagtcaaagtactggggaaactgctgaagctatatcaccggatgacgaagaatctttgttgcaaggagaacgcgaagccgaaatgatgatcgtggaggcctacgcagcacttgtgctcgcctttctttcaacggaaagtatgaaggttcgaggagccatttccagctgccttccggacaacaacttaaaagttcttgtaccagtgctagagaagtttgtgtcatttcacctgcagctcaacatgatgacaagggaaacacattcagctgtcaccgaagtcattgaaagatgcaggcagtcatagaagttggaagagggcgccctgtacagattaaccgacctctctgcagtgcagccgaagccacacacaggtgttgctcctcacctggccagggcgcaacgaattgattgatgccagaggctggcttgggagctaacagtgtttctattctttcttttgcccctcctgctgttctgatcctgtcatgtgcatctcctttagtttcttctccacacactcccccccggaaatcatgtagtccatattatgagtggaacaataacagtgtaggctatagggaatgtagttgtggtgcttcagttcttcgtctctgttttacatgttgtattttcgtgtcacatggaatcagtgaccacacatgcctcaatctgacaaattaagagtgtatatcacataatagtagtgtaatttaactatgtctctttttccgtataaagaacctattagttggaagcatcttccggttgcagaaaatgaccatgttgtatgcaaacggtgtaacctggtgtacacaattctttcgttgctatgtactgttctgagggaattagaacccaggtcttctgttgcttgagcttaaa

SEQ ID NO: 16595 - DNA, 1193 bp, Zea Mays
ctttggggtcctgccattctttgaagtaaagagtccggatttaacttcttaggcatatagtcgttcaagaggttgattgacgaccatgtagagaagataaaagcatttccaatggaaacgactataccattccgagagcggctgaagatacttggcagggtggctaatctggaggatcttcctttgagtgcagcggagaggaagctaatgcatgcgtataacgagaagcctgtcctttctagaccacagcatgagttttacctgggtgataactacttcgagatcgacattgacatgcacagatttagctacatctcaaggaaaggttttgcaacatttttggacaggctaaaagcatgtgttctagatgttgggctaactattcagggaaataaagctgaagaactgccggaacaaatcttatgctgtgttaggttgaatgggatagattacaccaaataccagcctcttttgactcacgctgcctgaaataaacgcttacaagaaccagctaaccgtcatttggaattggatgctgagaggtaaccataccaggacccagactcctggagatttcagaccagagccgctgtcgattatcacagcttctgctgaaacgccatcatccgagcttaggtggggcaggtgactcattgacaactggctgctcccgttcgaatccgtggtgctaatgtagtcgtttctttctgaacacggggggaaaaggcggagactgcggtacatgtaagggcatgtttggtttgtggctaaatgtgccacactttgcctaaggttagtcgttcgaattgaataactaaccttaggcagaaaagttaggcaaaatgtggcaattgaggtaaagaaccaaacatgccctaaatctgtaaatcattgctggatagctccggttgcctcccttttactacccaacattctagatttagtaaatataactaattctgactatggtcgagtaggtttaggcgttaaagacctctacaacaatttcactatatccgtacaggaacaggatgtcgtcttggcccaaaatatcgtgtacaacttgcatgatgatgtgttgttaactttggaagctctatatggttcagggctatcgtcccaaattatcgtgtacaagtacaatttttatgatgttgagttcgtaacaatgcgaggttgtcggatggtaagag

SEQ ID NO: 16596 - DNA, 4753 bp, Zea Mays
gctccatcgaaccaaacctatttgaatcgccaaagccggtggcggtgggtctcactctcacagccctccgctcctcgtcctcacccctgcttcgcttgcctagccttccgtcgtcccctgctgtcagtccccgaagacggcggcgccgccggccatggaggaccccctcgccacggcgccgccaccgcgccggccccaccgggagcggcggcaccggcggaaggcgtcggacgccgccgcggccgcgctggcggcgcaggcggcgtcctcctacggcgacgtcttcggcgggcccccgcggttcgcgccgcctcctgcggcgttcgccgcgggggcggggactgcgccggcggactacgccgaggtgttcggcggagtcgcggcctcctgctccatcccctacctcgacctgccgcccgccgttgccagcggagtcggcgccggcgggtacggcgagatcttcggccgcttcgacttcggggagtttgcggtgccgtacgaggacatgctttctggtgcagagtctctggtggaggagatcgcgtcaccaagtgggagctcaagatcatcaactagaaaagaatcggtccgattggatactgagccatctgtaccctatcaacaagttccagatgctggttctggcaggcactctgatgacgagcaatttcatgcagtctcctttcctccagatggcgagcaaacgttcactatgtcatataacaagatcacccggggaaggccagatgatcttgttgaaatgaccgcttgcatagtagaaccttcaattagctatgtggttgactcttgcaatttgtcaaatgatttagaaatggattatgtcccagtaatggacagtggcacaaatgctaatgttgtgaaagaaaagatgaacctaccaaacattgcagattccggcctggagtgtgctgatagtgcttatgtggttgatcatcagcaacatatcccaacatgccctcccatctctgaaaatatttgccaggatgaaaactacaacaagaggtctagcacacattcagtgtcaagcgaggaagcaccttcccctgactatccattcttaagggtatccaacatcaaccttccagcagcacccatcaaagtacaaccaccaccgatgcccccatctaaattgcttaataaaaagggaagcaacgaaaatggagattctgatgtcaatcctaactcagttgctgctgctgctgctatgaaggaagcaatgcaatttgctgaagccagattaaaagctgcaaaagaattgatggagataaaaggtgtcagctctaaattccgtaagcggccagttcatcacaaaagcacaaaatcaactgaaattaaggaatacaatgcacctgaaaaagcacatctatttgaagaaaagctggatatgagaagattggtaaaagaggaaaatcaaagcaatgatatagctttgctggataaaaacacgggcagtgttgcacttgagcacagtgatcatgacaaaaaagggattatatcaccagggaagcctaaggagatgatgcaaaacgacagtgaactagaacaattaggagagtggacatcagatgctgatttttatgaattggttagcaatgatcagaaatgcagaactaatggagctgaatgcagagacaatggtctgatgacaaattccttagccaagcttgaccggtctgagaatgaaaaattaggaggctttgcaggtgagtcaaaaaggtctaggaaattgtgggattgtaacaacagaacatgtctgcggactgaacatgtaaatcagggaaaagatggtataggttcattggaggttgaacaaaagaatactaggtctccagaagttacagaacatgtaaatcagcaaaaagatgctatagattctgtggaaactgaacaaaagactcctaggtcacctgaagtttctccttgtaatgaaagggtgacgtatgaagagccaaccaaaggaaataatgatctgatgacaaattcttccaccaagctcgaccagtctgtgaaagtaaaggaagggggttttgcaggtgagccaaaaaggtttagaaaattgtggggcagtaacagtacaacagttctgagaacagtgcatgtaaatcaggaaaaagatgctatagctttcgtggaggctgaagaaaaggcacctaggttttcggaagttcctccttgtgatgaaagggtggcatcccaagaggcaactgattcccgtttagaacaatgtctaggggtggggaattctctaggtcacgaaaatggtgcacaatttgagacttcatgcgtgaataatttaccttcagaggtccatgcagacccagaaatctccagttcattttcggaatgttgttcatcaggaagtcatgccaatggtaatgaaaatcattctgaaagcacagctcaggaaactgcatttgtagggaactctagccaaaatgtcaacaataaagaggaacttgagcttccgtgcattgatgggttgccttgtacttcagcaaggaatcagattttgcaggaacattttaatgttattaatgctgatgaaaacaaggaaattgaagtgaaaatatcaaaattagaagggtcttccaaatcttatttgaattttgaggaagaaaagttacccagttttgttgatgaatcatgcctacagaacaaaaatgaaagagaaaatgaagtaaattcagaatcacccatccatgaaaagatgacaaagttcgggtttgaggacaaaggtgatgcatatgaagattttcaagagggagatatggatcaggttgctggatctgctgaagaggaaggttatgttacttcaggaagtggtattgctaatgaaagcgaatatgaagaagcagaagatgatatatttgtaggagacatggaatcaaatgtaagaacatgtggtagttttgacaaagatccatatcagcgccaagaatcacaaggatcatggggaccccaagatttggataatagaatggacaaaatcagtgatacaatatctcatggaaaggaaagggagactaaagaatccttgctggagaatgttgaaaagacagcggcagaagaagtactaaaccatgactgcagggaagggcagaaatccatggaaaccgttgactacatatggcccaaatatgtatgtgcagaatttaatgtaagtagtgacaaagatggtaatgtgtttgattctgctgatgaacttatcagcgacaatggcagtgattatgccatgaacatgagcacaatgtcaaataatctgcaagcttcattttcagaagcatgcagtagcattcaacatctttctcaaaaacctcagtctatttctgctgagaaggctgatgaaagcactcctgttcttggaaatcttgaagtggactgcggagaagcaggtagaaaaattccaagtgaaaattgtgaagtctcagaagaagggcaaaatattggaatcgaaatggaagaaagaaaaagagaagacaatatatcaaatataaggttcatggatcagcaaccattttacttggacagtgacattagacctaaggctgcagaaggtactgcatcagaaactattctaaaatccagagaagaggatcttaatgttcagagaactaaagtgaggaatgacataaaagaggctgaaggagaactcgagaaggaggtaaaagttgttgaagagaaagaaaaagaatgcaaaatgggaaaagagaaggaacaagataaagagagacaaagaagagagttggaagaacagaaggaacgggaaatggagcgagcaaaagataggcttgctgttcagagagctacaagagaagcacatgaaagggcattcgccgaggttcgagctaaggctgaaagaatagcattagaaaggatcacctcagcacgtcaaagagcatccgcagaagcccacgagaaagaagagaaggcaaccgctcaagcagctctggagcaggcttcaagggaagctagaatgaaagcagaacgtgcagccgttgagagagcaactgctgaagctcgggagagggcaattgaaaaggcaaaagctgctgcagatgcaaaggagcgaattgggaagttcaggtcctctttcaaggatagttttaaggcacctaatcaggacaatcaacatgaggcatcatctcagaagacggcttataataagcatggaaaaagcatggattcttgtgttgaagtagtcgaggttgagtcagctctacgacataaagcaaaattggaaaggcaccaacgcacagctgagcgagcggcgaaagcccttgctgaaaagaatatgcgggatatgctggtgcagagggagcatgctgagaaacatagactggctgaatttcttgatcctgaagtcaagagatggtcaaatggaaaagaaggaaatctgcgagcattgctgtccacattgcaatatatacttggttcagacagtggctggcaggcagttcccctcacagaccttatcacagctgctggtgtcaagaaggcatacaggaaggcaaccctttgtgtccatccagataaagtgcagcaaagaggtgctacaatcagacagaaatacatttgtgagaaggtgtttgatcttcttaaggaggcttggaataagtacaattctgaagagcgctagtgggataggtggttctttatcaattgtttacgggggacaggatattggctaggttccgcctattcacctccctctaggcgactttcaccacccaac

SEQ ID NO: 16597 - DNA, 1100 bp, Zea Mays
atcaccatctcccaaccaatggtctctctttgagtgaagttggtaacaaccgtacaagtaacaacaaagttgtttgctgtcacttctcttcagatgggaagttactcgctagtgccggccatgagaagaaggtcttcctctggaatatggacaattttaagatggataccaaaatagaagaccatacaaactttatcacagacataagattcagaactaattcaactcagttggctacatcatcttctgacggaactgttcgactttggaatgctgctgatgaaagtggcgctttacaaacttttcatgggcataggtctcatgtaacatcagtagattttcacccaagattgacagaggttctttgctcttgcgacgacaatggagaaattctcttctggacagttggtcagactacatctactcatgttttgcgggtgaagcagggtggaactggaagagtcaggtttgaacctcgaagtgggcagctcctcgctgtggcagctggaagcatggtgaacatttttgatgttgaaaagcaatccagcttaccctgccctccaaagggtcacaatagtgaggtaaactttgtgtcctgggatgaaaatggtgaatatctggcatctgtaagtcaggacactgtgaaagtgtggtcggtatcgtctggtgtgtgcattcatgagttacgatccaatggaaaccaatatcagtcatgcacattccatcctagatacccgaaagtgttgattgttggtggttatcagactctggagctgtggagcttatcagataaccagagaatcccaatccaggcgcacgaagggttgatagctgcactggcgcactccccgttcactggaatgattgcctctgccagtcatgacagatgtgtaaagctctggaagtagctatatatagaggcggagacgtgagatggatatacttttcaagggtgattggaccctgtgaggtggatggatgtagggtcggttgtacatgatatattgttgagctgatgattgggctgtatctgcgcctataccattatataacccaccggtttaaatttcgctgaacccatccaaccaaaccacgcccac

SEQ ID NO: 16598 - DNA, 1117 bp, Zea Mays
gttttggacgacgagcacctcgtggtttccgcttttcccaaattgcccctctgaaatcctcgcaggcctacggtctcgcggtattgcgcttctcgtcttctctaatcctcttctgctccctccactaccagtccaccaccaccactgctaccatcggttccccaaaccctagccaagggacacggtggccagcgatggacggcgacagagaaggcgctgcggcggtgcaccaccacgcgcgctcccccgaggacgtcttccgcgatttccgcgcgcgccgcgccggcatcgtcaaggcactcaccacggatgtggagaagttctatcagcagtgcgatccagttcatagtgatgcgtggctcctgtctgttgcattctactttggagctcgctttggatttgataaagatgcaaggagaaggctcttcaccatgattaataacctgcccactgtttatgaagttgtgaccggggttgctaagaagcaatcaaaagcccccaacggcagcagcaaaagcagcaaatctaactctaaaccatcaaaacagatcaattctaacagtaagcctgtgaagccagcccacccaaacgaagaggaggatagcggccgtgaggacgcagaggaggaccaggcgtacctgtgtgggtcctgtggggaaagctatgcgaatggggagttctggatctgctgcgatatctgcgagaagtggttccatggcaagtgtgtccgcatcacccctgcaaaggcagagcacatcaagcagtacaagtgtcccagctgcagcaccaagcggagccgggaatgacaggcgccctggggcaggactcgctcccacttgacgaagcatttagaatcattaggagcagtgaaagtgtgaaactgtgtcattagaatcacttcctctgtttagtggaccagtgcgtgtgctggctgttgtatttttctcgtcgtgtgttgtacactggtagtaatggacatggtagctagtggtgacgtgttgtgttagcaagcaggctgactgttgtcatcgtagagtcggatgaactgctggagtttggaaacacatgttcagtaattcagtgatgtttagcgtgtatgataattttcttcggcttg

SEQ ID NO: 16599 - DNA, 1714 bp, Zea Mays
attatccttaggtcgaccaaatccttagaatgctcctgttcttatccagttgaggtctagaagcttactcatcacgccggagcagcagtagcagtcgagctcggcatcagctcccttgctgctcactttgcagcacctcgccagctccctggtaacactctgcacctgccgtcgaactctctcagaatgagcagtttggtcgtccccatctcgccgtggttcgtcctcaccatgttttcagatgtgtttgggctgagatgccattcaaaatcgatgatctgttcgtcgccaccggccgcaagcaccagttttgttgaacgtgagaacgtcttaatctgttgatatgagttgaaaattgatgtgtcgatctgtggtttgacctagtgttctcgtcatgtctatgttctggtcgaggccctagatacgtgattgaagatcctttgtggtgatgaaggtgaaatcagcatagcactcgccaagcattctacagaaggtctggactagagaaccatgttgtttcacgtttgttgagttcggttggattagggtgacctgattcattgctctggctattaggtctaattaataggcttggattttagaaataaaagtgcagtgccaaaaaaaagtatggcaatgtttgaataaccttgttttggtcatttaagcacttggtaaaatttgggggctatttggaaatcctttgcttagaaagcattgtaaagttacaaataggatggattaatccctttagaaaagatgaagtaagtttatggatgaaatctaatgtgttcagtcccttggtagtcatagtttgtaggtgtagtctggtaatgcttttaaatatttttgttgcaaactgcataaacataagcatccatgatcatgtcatttcatgtagagctcccaaaataaagagtgaagatttaagatgaagtggttgttgaagaggagtttactccagtgcctgttcatcaagtggatggagccatctaactgatcatcgtgttagaagtatctagaacctcttctctgcaacaaaggcaagccccggtgcatttgccccttccttgtgttttaaatgctttatcaccttaaatgatgcattaggtgataggagttgtgtgatgaacaactgatgcattaccattccttggaatttaaatactataccttgatccctgatttataaaaagaactgataatgcttaaccctgcttagaaactgaaaaatcatttgttttcaaaaagaatgattgcggaacattagttatgggctttttgattcaaaaatcaaagcaaactaaggtgatgactccacttcggccggagtgggatcatcattggaaaagagtacccctgtcgggtgccaaaaatggggaaatggttaataaatctagaccagacgctgagcagacagagtcgcccgtctgtgtcgattaaggaccgtaccgttgactggcctgttgtggttgagactttgcaactagccacataccctggtatgggacagggtaagcttgaacccggctattccatacgtgaagagacaatcgcgcactgggagtggagagatggcgggagtagcatgtaccctcctggcatagtagcacgcctggtagggtaatgtgctctcgggtggcgcggacctgttcatgtagtggaggactccgtgggaacggttgacatatgcaagggttaagtgctacatatg

SEQ ID NO: 16600 - DNA, 693 bp, Zea Mays
aataatccactacgttgcacggcggtagaggaacatgtggatatcacacgcacgcgcctacgcttattagccctcattcgaagtcgacggcacccgtcttctctccgcactcgaaaccccatccttgactagctccgatctggtacgagatggccggcaagatgaaggagttagacggcgccagccctgccaagatcttcattggcgggctctccaaggatacaagcatgagtacattcaaagaacattttgggaagtatggggatataattgatgctgtcataatgaaggaccgctacacacaaaagcccagaggctttggctttattacttttgctgatcccactgttgttgacagagtgattgaggatgaacatgttatcaatggaaaaccggttgaaattaagagaacgatccctaagggagctgctcctttgaaagatttcaagacgaagaagatttttgttggtggattaccctcagctctaaaagaagatgaattcaaggaattcttttccaagtttgggaaggttgtggagcatgaaatcatccgtgaccatgcaaccaaccggtcacgtggatttggttttatagtctttgatgcagaaaaagcagtagatgatttattacataagaagggcaatatgattgatctaaatggttctcaggtttgacttttttgctttgttgtag

SEQ ID NO: 16601 - DNA, 3719 bp, Zea Mays
tcgcgagttggcatccaaacagctgcacatgtaatttctcgcgagcgcattcagcacagcaggttactattggctgctcgtccacttaagcaggttgaggtatccatttggttcgacacagtgaagaactgaagatacgcattgtgcttgcttgtcttgcggggctcacaaacatcctgctggtgtgctgtgctgggaaggtcacataatccacttggctatatgccggggtgggaatgtgaatcggggcttcattagtgcaggcagcaggcttgttaacttgttttgcaacaagcatgggggcaaaagttgaaggggaaagctatatgcctggatattatgccacaggggatctcaacgtggaagcaagtggtaggtggtctccatactatgaggagatgacatcaaatggccagttatgcaatggcttcgcaacaaaaccaacaagtggttattcagaatttgacaaagaaatactcaagcatcaaattcttgaacatgaagctgtgttcagacaacaggtgtatgaactgcaccgagtttacaaaatacagaaggatatgatgaaacaacatcaaagaaaagaggtatattcatacccaactttggcaggtgcatcacatactaattcaccatcacaagtgccaccaaacggtgcaaagatgatgtggcagatgccagttcctcctgtgtctacaacatacaggaaagctattggagagcataatgatacaaaccagtcctgcatgaagttccttagagaaggcagtgtgcagtcttctccaaatggatttctatcaagtgatgctgctccaagaaccagacaaggcacttttgaccttcaacttccagccgatcattatatagatgacgatgacacatcagataacaagcccatagatttccttggtttggcatcagatgcaaaaccccagaatgatgctgagcttacattagttagtgcagaacgcttgggcaagttcagtgataatagttcatcctcaggtttgcggactacaaataatcttggaagccgacaagttaccaacctgaatgaatcaaatactggcttctttatgggtagagcaaatggatctgtttccagaggccttccgcataccctcgagaactcgtggcaccaaccgatattgagatcaagcacaactactttcaatttcagtaaagaatactccaaagaaaagcacacaaatgaaggtacaagctcaaatttttttgacacaagtgcgaaactaacacatgacgacaagccaacaatcaataaaggtaaacaagtcagcagtataacttttttagcacccagatataatgatgctgatcccccaaaatacttcaaagctgctgatgggaggcctgccagttataaccaatttctttaccaaggtcagaatagttcagctggatggattgcacgaagtcctctggaaccttctgttatcaataattttgctagagttgaccgtccacatcattcgaatctgggtacatttactgtccccatctctattcctcaaatagacaatccttcaattgtctccccgatgggttcttgcacagcagacccaaggagcagcattgtcaacaatcctgctttaattccaagattcaatgggtcgtcaaccgtgaattcgtacgccagtcttagtgctgtgacacagagcattggaacttcaatcccaaagctgaaaaatgtggataacttagataaacgctatcctggttttccacttgattcgttttctgtgtcccactcacgacatcaggtagcaatttcaagtaacctggagcaaaagaactcccagaagtttgaagattcagatcaacagtcccatggcaagggtatgaagaacttcaatttgaatgagacactgtcagattgtcaggaagatggtcttgtagaacaagatgggagatgtgctgccagttttcagcatggtaaagacggagggtcagtattcgggatctcttggctcaaaaataaagctgtgtctgctgatccaacagctttggagaaggcagggaagatttttggccattcgtttggaactacaatggagctgaaaaatgctaaagaccagaacgaaccagctgtgactattcgaaatttgtcagactctgcttcgacatctcttggctgtggaattaagaaggatgggccttcagaagacattgccactggaactttgctggtttgtaataaagcccaagaggacgctacatgtttacccctttcatgccagaaacatgtgcctaaagatggacaagatgctgatggagtcatcaagataagtggtgcctccatcaggaatttcatcgatctcaatgatgctgtgccaaacgatgacaattctgaagaatcagtagtgtcacatgaatgccaggcggaaccttcacggaacaaccatcctaaacgagcatttgtgattgatctagaggtgccggcttgtgaagaggatgctgcttgggattttgatcaagaatgtgcacagcctaaacctgatgcacaccaggaagttgacggcagatctgatacatctgctctagctgcagctgagaacatcgtagcgttgtcaaggattattccaacagctctagaggcatctgatgatatgttgcagtggtttgcagatctcgctgtattgaacatcaaggaccttgctgagcaagctgaactccaagcttgtaccaatgattccagtaacgacgagtcagattcattcgaatccttgacactgaagctggaagagaccaagattgatgagtactggagcaggccactggaacctgaaatcacaaccgatgaacaattaatttcaactgctcaccttctcaccaagcccagaaggggccagcaaaggaggcgacggcagaagcgggatttccagaaagatatcttgcctggcctttcgtcactttcccggcctgaaatcatagaggatgtccagttgcttgaggggttagtccaggcttctggtggatcctgggagtcgagtttaactaggcgaggacgttatggtgggcggactcgaggtaggaaacctcggaaaactgtagtaactgtaattgtagaagaggaggtcgaggttagcccaccgccgaaacctgttggcactggcgacctcgaagccgatggtaggggtatggttggatggggcagaacaacaaggcggtgtcgcagagcgagatgtccgtcaggtaacaacttggctgctgcgtcttgagaaagggtattgccagcaagcattggacctgattaggtacttggtggttcacaattgttatagactccgatggatggactggtataaggtgatcacagtcatgagtgtacatactctgtcggcgtattggcctcaccccaactttcatgcttttgggttgaaacatggtttacgttcttataataagttccgtaaattagctggtaagacatttctgcgacagcattgtattaagctgttccaggttatgaggtccggtataaattcattgtgagaaaaaaaactgcaatgcctgtaaaccaccttgatctctgaagattagctcatcgcatgcgcaacaaagggtgtgaaagacttcgggtctgtattcttttttagcttatatatgctctgcctaattggctagtacatattcagtatccgaaatgcccatttatttttgtttagatactgattggaagcacccaaattttaagaacc

SEQ ID NO: 16602 - DNA, 1349 bp, Zea Mays
gtgaatttccatattgctcttagtttctagagatagagatattttgggctatttttttcttcaatcgataaaggttaagtttaagattgataaagattgccgtcctctccctgagagtagtctcaagcaagccatcaaggaaaattacaatgcaaagagcaaatttgatccagagctcaccacaaaacaagtccaaaggttacttttgctgtttaagcctgttagtgcacctcaatctgtttcaaataatcaccttggagaaaggcgccactatgaaaaacgaaggaagccacgccattttgaagaaaggcggcctattgaagcagcgcgtcggccacgatttgatgaggaaaggcgccctgcggttagacatgttccttttgaggatccatacagggcaccacgctatgctccagttcctgttgactctcagcatggccattctttggctagtgatcaccacagatattatcaaccagcacttacacctgagcctcggcagcttcctcttgttctagagcctcgatatgttccgccggccctagatcatcatcatgtgccagagcttcgacatgccccacctgcatattatcgcactttggctccatctggtgattcatactatcggtctgttgagaatctggtgcctgagcgatatgcagacagaaccatggctgacttgaccactagagatccaattattagggatcacacagcactaccaggggaggcacttgctcgagcagaccgcttggatgatctctaccgttctgatcgtgtggaggaactctaccgttctgatcgacttgttaaccgtgctgtggaccgccctcatccagcctattttacagctgcttatgagaccaaccctgcttatgctgaaacgagcattaggcctgtctctgcaagggtcaatggacccagtgcggcagtttcgtcactctattccttcagtggtggcccagtatatcggtaatgaatgatcatggctctgttgaaagccttagccagactaagaagacagggtattcgtctctttaactgcaactgttgtttgccttagcttctattcggtattttcttaaatatccttccctggatgaatgacattcgttatcaagacttgatggtctaaactgtcgaaattatgtactgtacttggcgtgctttgaagctcacttcgttctgtgaatggatcgatgcacgtattggtagcatttgcttgttctgcccttcagattggttgctacttgctaaactgagtagggctacctcatgcagtggtcatttcttaggatctgtgtatatgcttatcctaatatacaggacgttagggttgatatctgacg

SEQ ID NO: 16603 - DNA, 1895 bp, Zea Mays
gcgccttatgtccttcaccattgctgcatttgacctacacagatcttgcaaaagggataagcagccgttaccatgggaaatgaggctgagggttgcatatttcattgcgcaagctctcgaccattgcaatgctgagaacaggaaaatctatcatgatttgaatgcttatagggtactttttgatgaggaaggtgatccccgcttgtcaagttttggattaatgaagaacagccgtgatgggaaaagttatagcactaacctggcttacactccaccagagtttctacgaactggcagagtaattccggagagtgtgatctatagctatggaactgtcctgttggatcttttgagcggaaaacacattcctcctagtcatgccctagatttaataaggggaaagaatatactgttgctgatggattcctccttagaagggcagtatgctaatgaagatgcttcgaaattggttgatcttgcatcaaagtgtctgcaatttgaatctagggatagaccgaacataaagtatcttctgtcttctgttggtcctcttcagaatcaaaaggaggttgcatcacatgtgttcatgggtattacaaaagccacatcagtactgccaaccatttgttctccactcagaaaggcctgcactggtatggatctttcagcggtgcatgatattttgctcaaaacaggttataaagatgatgagggtgcagaaaacgagctatcctttcaagaatggacccagcaagtgcaagagatgctgaacacaaagaagtttggtgacattgcatttagagacaaggattttaagactgcaattgactactactccaagctagttgcgatgatgtcgacgccttcagctacggtttttgtcaggcgcagtttttcctacttgatgaatgggcaagcagagctcgctctacgggacgcaatgcaagcccaggtctgcatgcccgagtggcctacggccttctacctccaggccctggctctttcaaagctcggcatggaaaccgatgcccaggacatgctcaacgatggcgccacgtttgaggccaagaagcagaacggctggcgcagttaggagccgacgacgaacaaagtctctcttccaacgactccgtgccgttgccctttgagagaagaaggtacaatggcgagtctcctccaaatcagttcactgggacacgcctgttgcactactagtagtgggattgaaacgcactgttttatcgtgcaatctcctctcgaatgtcggtaacgagtgatgatcatgatcaggggtggaaaaataggtcagggcctttgaacgcatagcgtactcttccgtgggttgcgctttgtgttgctggcgatggtggcaggatctgcctgattgttgcaactgcagttgtaattaaagggatgctttctaacaccttctggttttacgtggaatctttgggccccagagcacatgagcggtgtgcaaaaagccgagttcattgtgattagctacgaagaataaactagagccgtcgggattccattcgattcagccatatttatatgcggtgttatctttttttccctttttttatgatcaattctgtttgtttcttgaatcttgatcggccgagtcgattcagacagccagttgcacatccaccgatttggtttcaaagcagcaggttaggttagagtagctaagctatttgagttgtattgctaataattagctagaccattagctggcccgttctaattctctctagttttagcggttaactattggtttgaggtttgctaattgtcgtaaagaacttgcacaactgtctgttgggagcttatgtggtgtgtaattttattttgtgttgttagattattgtaatgtttaagtgttatgg

SEQ ID NO: 16604 - DNA, 953 bp, Zea Mays
aatgagctagtaagaatccacaaaccgataacatcaatagcaactattctcaagttcaacagactcacaatgatctgccagccaagagtgcctaagaaacggtacaaaaacaggatagataaaagggatagataaaagggtgaccaatacggcaatcctacaaatcctaaataaacggccattgcttaatctccatcgaggagagtttgttacagcattaagatcaaatacgagccacagggaaatgctctctctcaggcagcatgtggctcagcacacttcaccatggcgctggcgccactgtccttggtcatggtgttattcagccatacaggcagattaatcaccacaggccacaataagcatgcctgtcaagcagcagcaggtttgcgcagctcaccttcgccatgggcgaagtggcacctgtctccaaaggtgcaggagcctttgttgaagttctcgcacaatttggttttgaagttgcttccaggacccccggcatgagaaccaggccccctacctgggttgttcttggcttgtggaggcggcttaccactgatgcggacaatcaactctgtgaccattgcgctagcgtgcttgatctggtcaaatgttccctcgagctcgatgtttttatggttgggatcagcctcgttgtcccggatggctaacttggccccagtcactcgggatatatgctttgtgttggtaccacccttcccaatgatggcaccagcaagggatgcatcgacgctgatcttggctgtggcggaagcaccgaatgtggagggaggaaccatgtctgggaaaggcattggcggcggcggcggcggcgggcagaaccctagctagggtttcggtcccgcgggggcggcgggtggaggagagaggtgtggggggaggctttgccgcagcgcaacggcacgagcgcgcggccgcaactgatgggggct

SEQ ID NO: 16605 - DNA, 1344 bp, Zea Mays
atgtccaccccccaccccccaaactgtcgacgccgactcgacacgaacccaaccggccaaccacctcccctgctggtcagaactccgcaagtccgcatcaattcgcactcccagcttcctttaccttcgcagcaagcaagccggtagcagcaagctagatcgcggggaagcgactcgcctccaccatcggcgctgctccggcgcggagaagcgtcctctcgcggcggctgggaagaccagtctccgccagtcccggcggctgcttccgtgaggtgcccttggctcctgggcgacgggctcgtggcggccggcgagatgaacagccatgcggccggaacaagcaacgggggacccggggatgcggccgcagccaggaggaacaccaggatgcccaagtattccaagttcacacagcaggagttgccagcttgcaagccgattcttactccaaaatgggttgtctctgttttcttcatcgtcggggtcatctttgttcccattggtgttgtttcactgctagctgcgagagatgttgttgagattattgatcggtatgatgaggcatgtgtgccaggcaacatgactgagaacaagcttgcttacatccagaatgagaccttatccaaagagtgcataaggaatcttacggttacaaaggatatgaagcagcctatttttgtgtattatgaacttggtaacttctaccagaaccataggaggtatgtaaagagccgaaacgatgcacagctaagagatgctagtaaagctaaccagacatccgcttgtgaacctgagaagaccacagctaatgggcaaccaattgttccttgcggcctcattgcttggagcttgtttaatgatacatataatttcactcgtggtaatgagaacttgacagtggacaagaaagatatttcctggaagagcgatagggaacataaatttggtaaagatgtctatccgagcaacttccagaatggcgcacttaaaggtggagcaacacttgacccaaagatcccgttgagtgagcaagaggatctcatcgtttggatgcggactgcagcacttcctacattcagaaagttatatgggagaatatacattgacctcaaggagaatgacacaataacagtgacattgaataacaactacaatacatatagcttcggtggcaagaaaaagctggtcctctccactgcaacttggcttggggggaagaacgattttcttggctttgcataccttatagttggcgggctctgcattttcctggcatttgcattcaccttgctgtacttcgtaaaaccaagccgtactgtgaatgtgatgcttgctgtgaagtaa

SEQ ID NO: 16606 - DNA, 1394 bp, Zea Mays
acagcaccgcgcccgccttttcaccccgctcgatcgatcggcacccgcgcatcgcgtcggcattctctccagccgctactccctccctgcctctccacgatctcgcgaaccctgctagatccttgactcgccatgtccaacccctggggcggcatcgttggtgccggcgcgtgggcgctggacgcggagcgcgctgaggaggaggagcgcgacgcagccgcggcccccgtccccgcccccgcccccgccgcgggcttccccagcctccgcgaggccacagcgggcgccgccggcaagcaggacgcagccggccgagcccatttggagccgcgaggccacgggaggacgtgctggccgataaggggctggactggaaaaagatggaaactgagattgatcagaagaggactagccgacccactagctcgcagtcgagtaggacagagagtgctcaaccatcacgtcctgggagccccgggtcacagatatcagccaccggtagtgaagccgcacccacggcgcggccgaaggttaatccttttggtgaagcaaagccaagggaggtgattctgcaagagaaagggaaggactggaggaagattgaccaagagctggagcatcgccagattgatagaccaaagacaaatgaagagaacgtgttgaaagaagagattaacctacttaaggtggaactagacgaaagtgaaggcaagataagtgatgaggatgcaaaagccatgtctgagaaaataactcaaatggaagagcagctggaacttcttagaactgcgatggatgacaagatcagatttttgcaaagacctggttctggagcaggcagggttatagcatcgccacctactaattttgtagatgaaccccaaataaaagagtccatggaaaggccacgagcacacagcagcacagagcaatatacaaaaccaactgaagaaagatgggggtttcaggggagcagagatagaggctcttttggtggcaacagaatttcagagaggtcgtccgcaggacagaggtggtgagactataggggtcagatttttttttgccatcgtttcttcgaaactgcagaagaataagttatgttcctcttgctacttgactcccattttgtttggcttggaagaatggagagcatcgtgggcaatacagattacattgcacgaacctgttaattaccacctttatatggtgtttttcttccatttcctctttttttgtgtgtgcgtaatttttcttttgccctcctcttccatgtcaaaacaggtgctttgagcctttcatacataggctagctattgctattgattcctgcataactatgctttaacattctttgccaatgttttgtttaaaaaggcggtagattagaccgt

SEQ ID NO: 16607 - DNA, 1090 bp, Zea Mays
acgtggcttagtgcgtgtgcgactcgatccggatatgcccaatgcacggaagtaccaaagcaagagctttccattgcttgactcactagaactgttatttgatggtcctattcctgaaggggcacaaaaatcaccttccagcatacctcagaatgttggtggaaacgttggtgatggaggcaacaatatcagcacagccccagacttgtctgaaagacctagtggaacaattaacacaagcgttaatgaggcatggaataatatcagcctacttaagcaaacagcattgggaccccaaggtatagacaatctcgacacgctgcaaaatcgtgatgaagaggtgctggaacggctacagcatggctcggaccggaggccgcagagagctgatgaacaggcacagtcaagttcttgcgtagaactgcagagagacaggcgcaagaagcggaaggccccagacatccagcagatcatggagacctatatgaatttcagaatgaagcaacctcgcgtcaaacaacgaagagcaaaggacgctgaccagttcacgatttcaaggtattagcctctgatgttttcaaggaccctgagaacagggagacctttctttcgtatgaacccaggctgcgcaccttgtggctgaagagggaagttggcaagctactctccttatagaagtggcagcccttgcttgttttgtttgctacccgtgcctaggcttcatttaacaaactctactagtgacttaacttgttccatgcacagtacgtcactacgctgcttagtcattcatgatcaatgatgtgcttgctgcgtgtagtgcttccaaaattttgcatctgtgtcaatacactgttaaaaatgcgacagaatgcttgtttcttgacagcagatatttaggatcgttctgcatgactgagcgtcaacagcagaggttgtagagccactcaagcgcagtatatactttcggcctaaactttctgcaacaatatcgttcttagcaaactgtctattcattctcaacaatcagctcaaacaaagcgtctagacttggcaccgcaaaaaaaaacatttcaagaaactgaaaata

SEQ ID NO: 16608 - DNA, 1399 bp, Zea Mays
gctgcaggaataggatgacatcatcggcgtactaggaaattctttggctgaaaccacgacacaacattggtctccacgttttgttgctgctgatatcaatccatttgccccacagatcattcagaacctgtccacagcactaggtttccctgattcatatgagaacccctacctgatgaagtgcctgatgcgggtgcttgggattgctaatatagctggtcaaattgttcatgagatcactgctcgacttgtgggtattctcatggaagtgtgcaataaccccaagaaccctgacttcaaccactacttgtttgaggctctggcagcagttattggccggactggtgagcaggacccagcgctactccctgcttttgaggccagcctcttcccagtgctccagaggatattggtcgaggacatctcagagttctggccatatgcttttcagatatttgcacaactcgtcaatttgagccgaccacctctctcgcagaactatatgcagctatttggtgttctcctcagtaatgccacctgggaccggccaccatgtgttcctgccttggttcgcttgctgcgagcattccttaggaaaattccaaatgagctaaaccaagagggcaggcttccaaatatcttggcaatatcccgtagtctcctctcacgcagcagcactgaagattctgctttctacatgctgaacacaatagtggaaaacgttggttttgacatactgaacccatatataactgagatatggagtgctttgtttactcggttacagactagacaggcagtgaaatatgtgaactctcttgtggttttcatgtcgctagtgctggtcaaatatggatcaagtgttcttgtcagttccgttgattcaattcagccaaatcttttcacccaaatccttcagcgattttggattcccaacctcaaattgatcaaaggtgctcttgaagttaagttgacagcagttgcttcgacaaagctgctttgtgagtctgcggtgctgttggatgctgctgcagctcagttatggggtaaattacttgatagtattgtcacactgttgtccagaacgaatcaagatggaacacaagagcaaaatgatggtactgatgcagtggatattcagaagacatcaagttattctgtctcatttgtacggcttcaatatgctggaaagagtgaagatgaccttttgaaagaagtaaatgatccaaaacagtttgtggtcacatccttggccacactttctgcccagtttcctgggaggtttggacttgtcattgagcagcatgtggacccagcgaacaaaagtgtgcttcttcaactttgtgcagcctacagtgccaacattgtctagatgtcttccacgatgttgtaactccta

SEQ ID NO: 16609 - DNA, 1346 bp, Zea Mays
gtcaaactgaatagttaacactaagttttttaagaaatttcttcaatttaaaaggtttgggtgatcgaaatggaaatggtacacctagtttaccagtttctgatacttcacataacagcaaccattctgaagatgtagatggaaattctggggacattttaagtgacccaaaccttggctctaattttattcagtgtgttgaacctggggagcaaaatagcttaatgcttaatggaaatatcatatctaatgcaaatgctggagatttttttaataattccagccccagtgatgggttcctagagctgaaggattttgcagatgctgcagatctggatttccctttgggcaatggatcaaccatatggccttcagatggttgggcatggaaaacacctgactcagcggaagctgtaaatggagctaacgatgagattcctccactccctgatgaccagattttccagccagatgaactggaacaactgttgcagtcaatacaagaagattcccatttgggctcaactatcattgaccccatgcattcttccatgacaaattcagttctgcctgaggacgattatttgatgttctatgatgcacccttcgattccactatgtgtgatgggtatggacagaatggaattcttggctccgcagcagccaatctatctggcattggcatgatggaggatggtatggcatactttgatgcaatggatgataattcatttaatgatactctgggctccatacagcagtcagctggtagcagttcccatgcttttaatggcccagtccttacccaagaggtcaacaatactatgtgtacatatagtccaactcaaaaggttttagaacctaattttctagttggtgccccgtcatctgctaggttacctgaagctggtagtcagttaaattgtgttgttttaccagatggtcaggctaagagtagtactattggaaagggatttgtaaagattttggactcaatctccgctcccccagcttttgctggagaattcccagctatccaccgcaaatctttggctcatatttctggggggcgccccaacacactccatgtttctgctgaagtgatccgcgtaggaagtttagctgttccttctggcgcagataagtgggcgctgcataaagatcaagacatggagctggtcttttctgcagattttgagcctgatacccgtcttcactgtgctgcaatagccattaccgcgatgctgcgaggtgaattcaggccttttcttagtttcggcaacaatgctcaaagtgaggtatggggtggggaatgtaacctaagatatgtacaaggccgtctcgga

SEQ ID NO: 16610 - DNA, 1937 bp, Zea Mays
cacgcctctgttctaaaggctgacattctggctctccaacacagttgtcctcagggagataattgtacaaacttttggcatctcacatcaatttactccatccatgatgaatctgagcatgaatggtggtgccaaaaaacttgatgggaaatctatgacaatgctgtggagaaacagctacaatggcatgcaagccaagtttgctgcaaggcagatgccagatgattggcaggaaacaagtacacttttggctacattagagaagattgagtcttggatattttctcgcattgttgagacaatatggtggcaggtaaatgtctgtcttaggcactaactcctcacatgcaaaaacgagtagaaggatcatcaactccaaaggctggtagagtgctatgtcctactttgggtgatcagcagtagggcaccttttctgttaacctgtggaaggctgcgtttcacgacgcattcaacagaatgtgccccctcagtgctggcggacatgagtgtggctgtttaccaatattagcaaaactggtgatggagcagtgtgtagcccgtttgaatgttgccatgtttaatgccatccttcgtgaatcatcaagtgagataccaacagactctatatctgacccaattgttgacccaaaagtcctaccaattccagttggtgatctaagctttgggtcaggcgcgcagctgaagaactctattggaaacgggtctagatggctgacagataatcttggcatagatcatgatgactttgaggacataggagatgttgaagacgaaagaagagttgcagctgaaacgaaatcgtttcaacttctcaatgagctaagtgatcatctattttttagtttttcataattttcctttcatggcctccttacatgtttgatttcctatgatccatgagctgccaatcatgataacgcggtttcactatgcaggagatgaacaaggatgcagtcacaactgatgctatcggcagtatcagaacttgatggtgcttgtagactgttcatggtgcttgtagggatgatgtatgtctatggcttactgagctccaaccaactatggcaggagcgttagctaggacagcagtcagtctaacaattgtggacaaagttcagtctaccatacactgaagcgcacccttgttgctaaagctgcaggtgtgaacaactttgctcagcagaatggaggatcattgtcactagcagcaagacctcgagcccagttaaccatcagtttctttccttctttctttgggccgagagagcaaagaaggatgatgcactttccaacctgtgtagcacgttgggacaactcaagaaatggcagtggatatggacatagaaattgacaggcaaaacaaagcgctggttcctttcagcgacgacatcactgaactgaattttagactgaaaggcgtgaatcagtgtggacaccagttgctgggcaagtgatatggagccagaattcgggcagttcggagactatcgccttgattgcagaatttaagaacattgttgttttacatgtttttttgcagtgaatcaggccacacatgttgtattagtgagagaatgatgatttattttatattattatggatttcatagattattttagttttccctgaactgcaattgtttcaataacataggaggggactaccttcaatgacatttaggtgaatttttaaggtatgtccattattccattatagagcacaaagcctacttcttacaactcactgtatgttttataattgtatcaaaagcactgaacaaacatagttagctatcacgttcactgttgtctaaatagattgaaataatgtggtgaagccgtcatggactcttaagtagcttagccactgcaaaggatacaattaattataaaacaccaatgaatcaataaaaaaa

SEQ ID NO: 16611 - DNA, 219 bp, Zea Mays
aactggcaccaagcagccaatggaacttgagcagccaatggatgatttccattcccctgctgccaattctctgaactgcttcgacccttcaactcaatctgcatgtacccagtaaatgttcaaatctgaatttggatcattgctagcaggattctttgcttgctcttctacttctgaaaattcgcaaaaatggatagataattccagttaattttaatc

SEQ ID NO: 16612 - DNA, 507 bp, Zea Mays
ttggatttggggaagaaaacaagggagctactccaacttttatggtggcttatattctggtggtagtgctcagatggttgagaaatcactagacattcatggggatgagatattatatgttggggaccatatttacacagatgtaagccagtcaaaagttcatttacgatggaggacggcattaatctgcagagaactagaagatgagtttaatgcactggtcaaaagccatgatcagaaagaaaagcttgttacacttatacaacaaaaagaaattgtgggggatcttttcaaccagcttcgcctggctctgcagaggcgctctaattcacgtcctgcacagacgcttgctgcaacttgtatggatgaccaggagcttacggagagtatgcaaaagttgctcattgttatgcaaagattagatgaaaagatcgggccaatgctagaagcagatggagaacttttcaataaaagaaaagtaagctaagcaagtatgcttttcctttt

SEQ ID NO: 16613 - DNA, 1346 bp, Zea Mays
acacgacgcgacgtagggcctaggcccgcggcccgcggcccgcgggcgctgtggtgcgccttttttttaccatcgagacaacacgacgaggccagccacgcgcaaaccgaatccaccaacgtcaaacgaccgcaccaaccaatccacttcgccggcgatccgtctcatctcgtcgcgtctccggcgccggcagacacgggtaacgcggctccgagatcggcgggcaggatgatgatgctgatcgattgctcggggtgccgtaccccgttgcagctgccgcacggggcgccctgcatccgatgcgccatctgtggggccgtcacgcacatcgcccccgcccctcccgccgagcccaaccgcggcgccgtacaaccggcgccggggtgggcgccgccgccgccgccggtgcacggacggaagcgcgccgtggtgtgcgggatttcgtatcggtactcgcggcatgagctgaagggctgcatcaacgacgccaagtgcatgcgccacctgctcatgacgcgcttcaacttccccgacgactccatcatcatgctcaacgaagaacaaacggacccctacaaaatcccaacaaagcataacataaggatggccatgtattggcttgtgcaaggttgtcaacctggagattcattggtgttccattattctgggcatggatcacaacaaagaaattacagtggagatgaggttgatgggttcgatgaaaccctctgcccgttggattttgagacacaagggatgattttggatgatgagataaatacagcattagttcgaccacttcctcatggagttaaacttcatgcactcattgatgcttgtcatagtgggactgcacttgatttgccttatctctgcagaatgaacaggagtgggcaatatgtatgggaagatcaccgaccgcgatctggtgtctggaaaggcactagtggtggggaagctatttcctttagtggttgtgatgatgatcagacctctgcagatacctctgctttatcaaagatcacttcgactggtgcaatgacattctgcttcatccaagctattgaacgtggacagggcaccacctacggtagtatcctgaactctatgcgttccacaatacgcaacacaggtgactcagcgggtgtaggtggcggtgctgttacatcactaattacaatgcttcttactggagggagcctttctgctggtggtctgagacaggagccacaactgacggcgtgcgagccatttgatgtctatgcgaagcccttctccctatgacgtgttcatagtattgcccaattgatgacagaagaataatatgtaaataattcgttgataaa

SEQ ID NO: 16614 - DNA, 2344 bp, Zea Mays
gcgcacgacgcctacatctgtcaaccacaacccaagcgctcccccctccccgtcgcctgcaggatctcctcgggccaaggaatcgttcccctccggcgaccttcctccctccctccgttccgtttcggtccttccactgtatcaccggcaaagcaaaggatcggaggccactccgcccggaggagcaagccgactctgagcattggagttgtgcttgttcaaaagtgtgaattgcatggagatgggaatgactcctgatgtaatgtatggacaaaatgtttttgttcctgctactgcaactccctaccaatatggttatgcagaagttggatcacagatggaatggtgtaaccagtcgagctctttaggatatgatggccaagataatttctatccgactgaaggcatgcaatgcgtatactacgcagccccagacaacggatctgtgcatcctacctacagttcttacccttctgatccttctttcgtacccgatggctcatttatgcctcaggagtatgttgctgaccctgctaactccacatgccaaatagcccagacatcctattatattccagctgttcttccttatgcacaagatagtgccttgggaagcgcgaccacacatcttcactccaactccaatgttgcatttcttcctggcataccaggttatgctgcaacatctgcaaatgcagcatttcctttaattgctcccgtcaccacaaaaagtgacattgttatgcatccacatgtacagtctactattgtcccttcaaagcagttccaggactatgcaaagccaccaaaggttcagctgcacaattcagttccacagaagcaagagttgccagatagatgtatgattcctgctaaactccctcatgcttctcaggtatcagcacatttgtctggaaacaattgtcttggatgtgctgctgggtctgatcttcggaagtgggctgctgccgagaaattccaaccatcttcaaagtcaagtggccatctaaatgctactggccaaaaagcgcatagcttagttgattctgagaaaccaagcaatcagaggcctgctataattgtgaagtctcacacaacaaggctccctgttggtaatccggatgggacaatcgttataagaaccgaccagtacaacagagatgatctccgactcgactatatgtatgcaaagttctttgttatcaagtcaattggtgaggcagatgtgcacaaatcgataaaatatggtgtatggtcaagttcctccagtggaaacagcaagctagatagcgcattcagggatgctgacaggatatcgaggaggcattctactaagtgtccggttttcttgttcttctctgtcaatggtagtgggcacttctgtggcatggctgagatggtcggacctgttgattttcacaaggacatggacttctggtgtcaggataaatggaccggatgctttcctgtgagatggcacatcgttaaagacataccaaatggttctttgcagcatatcacactgcagaataacgaaaacaagcctgtgacgcacagcagagatacacaggaagtaccatacctccctggaatgtctgtgatcaatatcttcaaagacatcaaagtgcggtactgcctttttgatgattttatgagctatgaggcagaagaggcgcaaaagagggcacacagaaggtgcaagctaagttcgaatgctccagactttgtacctgtctcacagcgtacaaaagatgagtctggcactgagcagagagaatccaggagcgtacttgtagacaggacatctgggatacaaaatgcggccgagaagccccacgataccaaggtgatcaagcctcaggatccgtgcgtctccgaagagcaggctagcgaggccgagaaagagaatggacctcagggatgtcgttgcagcggcaatcagggccaagaggaggcagcgaaaactgcaactaaccacccgccagcttcaggcttgaaggcggcaggtgcggaggggaagcagcagcagcagcgctggaagaaggtcgaaaatccaaagcagcatgcggacagcgtccctgcccagtgctcacaggaagaagcacctgagaagcggttaaatggggtcagcggctgttcgagcgcagttcaagagggttgcgaggagcagagggccgctgccaaacttgcttctctcaagatcggttccagggcggcagtggaagctgaccgtaaaactagcgcagttggtgtggtgacaatcggctcgatgcctgtccgggttgactgttgtgacgtctagtagtggcccatccggagctttttttttttggacccaacaaga

SEQ ID NO: 16615 - DNA, 1671 bp, Zea Mays
gcccgctgccgctcccgggaatccgtccaggtgcgatgaatccagcctcccgcgcccgacctatatgtaaaccacccgcccgcttccaccttacgccacaggaaggggaaaaaaaacgcaggtgcccaaaacacgttcgccccagagaattgaaaacttaccactgcgaattcaattcgaaagcctcagacccagagagcttcccatggcatccgctaccacctccatctcgtcgcaccctgccgccctccgcgacgtcaaagcggcgcggaggacgtggcgctgatcgagtacgcgaagctgacggggcgtcccttccgggtgttcagcctggacacggggcggctcaacccggagacgtaccagctcttcgacagggtggagaagcactacggcatccgcatcgagtacatgttcccggacgccagcgaggtgcaggagctggtgcggaccaagggcctcttctccttctacgaggacggccaccaggagtgctgccgcgtgcgcaaggtgcggcccctgcgcagggcgctcagggggctcagggcgtggatcaccggccagaggaaggaccagtcccccggcaccagggccagcatccctctggtccaggttgacccttccttcgaaggcctggacggcggggctggtagcttggtcaagtggaaccccgtggccaacgtcgacggcaaggacatctggactttcctgcggaccatggacgtccctgtcaacgccctgcatgctcagggctacgtgtccatcgggtgcgagccgtgcaccaggcctgtcctgccggggcagcacgagcgggaaggccggtggtggtgggaggacgccaaggccaaggagtgcggcctccacaagggcaacatcgacaaggacggccaggcggcggcggcggcggcggcccccaggactgccaacggcaacggctcggcgggcgccccggacatcttcgagagccccgccgtcgtgtccctcacccgcgccggggtcgagaacctgctgcgcctggagagccgcgccgagccgtggctcgtggtgctgtacgcgccctggtgcccgttctgccaggccatggaggcctcctacgtggagctggccgagaggctggcggggtccggcggcgtgaaggtggcccggttccgcgccgacggcgagcagaagccgttcgcgcaggccgagctgcagctgcagagcttccccaccgtgctcctgttccccagccgcaccgcccggcccatcaagtacccgtcggagaagagggacgtcgactcgctcctcgccttcgtcaacagcctccggtgaggcccgccagtgagcgagaaccatcgttctctgtcagtatgtactgtattacatgttggtatccatctaggtgcgctgtacgtagagagggaggcggagggaactgggatgctagaaaaaacagatgcaggtgttgcttgtaactgcagaatgatggtaggtatgcatgaagtctgaggtcctgtgttatttggcagctgagggagagatttgtgcgtgcttgtagttgtagctagtggcgatggagtattctaaggaaaatcaaataagaatcgaagttttgagagttcttgtttgttcatgttggctgtcgactatatagacagtagaaagcgaagatttttatttataccttgtgcg

SEQ ID NO: 16616 - DNA, 1721 bp, Zea Mays
agccagtgatgaaggctaccagcagaggacagtatcaagcagaagaaggggagttgttgcctctgaatcagagggatctgaagataattactatgctgatggagctcaagaagatgaggaacctcgccaaacaaggaaacaaagctctccgatggaggaagaaagagatcatgaagtagttcgtgatgtgtttggtgacagtgatgaagatgaaccagctccatatcgttctcgccatgaaatcgatgaagaatctcatagatctcccatggaggatgaagaccagtatgagaaggacatgcaaccagatgacactgtggctgatgaagatatgcgatatgaatctgatgagaatcgtgaactgaaaccaaaagagaaaccagtcggtccaccactagacctggtggttccatttaagcaaccaccagctcgacctgacaaaatgaatgtgatcaaggtatcaaatattatggggattgaccctaaaccctttgatccaaaaacatatgtagaagaagatgtttttgttacagatgaatctgggactaagaaaaggatacggctagaggacaacattgtgcggtggagaaccattaggaatgcagatggcactacatcttgtgaaagcaatgcacgctttgtaaaatggaaggatggaagtatgcagcttctgattggcaatgaggttcttgatatatctgtacatgaggcgcatcatgaccaatcccatctgtttttgaggcatgggaagggaattctacaatcacaaggaaggctattgcacaaaatgcaatttatgccatcctccttgttttcgaagtcacatcgcttattaactgccctggttgattctcagaataagaaaactgttaagatgcaaaaatggtttgagactaaggatcctgagaaagcgaaaatggaaaaagaaaggattcagggccaaaatattcgagcccattcaatccttcaacgcaaaagggaaaaagtgaaccgcaagtacacacaacctgctcggccaaggcgacagctttctccaggatttttggaagacgctctagatgaggatgaggagccagactatggttctcggcgaatgccaggtcgtagacgtttcgaggatgaattggaggctgaagcactagctgagaggcgtatcatcaacgcgaagaagtcaaatatgagcagaaatgttccccgcaaaccaccgtaccctcctgctcgtctgccgagacgtcaagctgatgaatactcggagagtgagagggaggagtcagaatatgaaactgacggcgaggatattgaacattcaccgcctcgtggaagggaagatgagctggatgaggaggaagaatacgaggaagaagttgaggaagaagcgcctctctcagatgaagaaatggaggctcccaaaaggaagagagaatcagggggtggtggtgggcacatgcgcgaggagctggcgtccgaggacgacgaatccccaccaaggaagcaaccgactgttcagcatcgtagaaaggctgtcgtgtttgatgacagcgacgaggactagtgtgtgtatgacctgacctttacagtttattttttccatttcttgtcgagaatgatttatctgaaaagaagatgttggtaactgttattttccggcgggccggtttattatgagatggtgaagcaaaaaaaaaatatgttgggcaatatgctatcatgtcaccggggtg

SEQ ID NO: 16617 - DNA, 1211 bp, Zea Mays
tcgtgaatttcatgacttaagaatgaaagttgaaactgttgatgactatgacgagtattgtcactatgtagccgggctagttggttatggactttccaggctcttttatgctgctgggacggaagatctggctccagattcactatcaaattcaatgggtctctttttacagaaaactaatataattagggattatttggaggacataaatgagataccaaagtcccgcatgttctggcctcgagagatatggagtaaatatgcagataaactcgaggatttcaaatatgaggaaaataccgaaaaggcagtacaatgcttgaacgatatagtgacgaatgcactgattcatgctgaagagtgccttcagtacatgtcagccttgaagaaccatgccatcttccatttttgcgcaattccccagataatggcaattggaacatgtgctctttgctacaataacgtgcatgtctttagaggagttgtaaagatgagacgtggtctcacggcacgaataattgacgagacaaattcaatgtcagacgtctataccgctttctatgagttttcttcattgatagagtcaaagattgatgacaatgatccaaatgctgctctaacacggagacacgtgaattcaataaagcaaacttgcaagtcatctggtttggtaaagaggagggggtaccatttggacacatcaccttacaggcctatgctgatcatgattgtcctcctgctggtggctatccttttcggggcactgtataccaagtgacttgtagctggcctttttcccctatggagacgagacaaactctgccaatctgatccttttcgtactctgtagtccccaatgactgcaggaagttcggaattactggctgtagaagtgtagatcatacggcagcatgctactgcttccatgactccgttactgctctcgattcgtttcttcattatgttttttcgcgcgttgtatcgtttgaagctgttttaagcaacggaaaaaaaataccatgtgacacgtgtatcctacgaacatgggtttctgtttagttagcagtgggcgcactgtattatgttgtcttgttgacatgtcatgttttcaaagctgacgtgtttgtgtttaccagaattgtgtagtggagaagaacatttgccgcgttgaccttgatgagttactcaactatacaccagcaataatagtg

SEQ ID NO: 16618 - DNA, 2633 bp, Zea Mays
aatttccgtgtgaatggcagcatgggagaagaatttcaccttcaagagaaaaagcattggaagccctgcccaagtgaataccatgcaaataatcctgagatgtccaagctgttgcacaaagcaattcgtgagaaacgtgataatgcgtacactgtctaccaacaacatcttgcaagccgtcctgtcaatgttcttcgagatcttcttgaattgaaaagtgatcgtgcacctattcctattggcaaagtggagtctgcaacctccattgttgaacgtttttgtactggtggaatgtccctaggagccatttcaagggaaacgcatgaagctattgcaattgcaatgaatagaataggtgggaaatctaattcaggagaaggtggtgaggatccaatccgttggaatcccctcactgatgttgtagatggttattctccaacacttcctcatctcaagggtcttcagaatggtgacacagccacaagtgccattaagcaggttgcatctggacgttttggagttacaccaacattcttagtaaatgctgaccaaattgagataaagattgcgcaaggtgcaaagcctggtgaaggaggtcaacttcctgggaaaaaagtcagtgcatacattgctcgtctgaggaactccaaacctggagttcctctaatctccccgcctccacaccatgacatttattctatcgaggatcttgcacagttgatttatgacctccatcagataaatcctaaagctaaagtatctgtaaagcttgtgtctgaagctggaattggaactgtagcttctggagtttcaaaggcgaatgcagacataattcagatatcaggtcatgatggtggtactggagctagcccaatcagctccatcaaacatgctgggggtccgtgggaacttggtcttacagaaacaaatcagacacttatacaaaatggattgagagagagggtagtacttagggtggacggtggattcaggagtggtcaagatgttcttattgctgctgctatgggagctgatgaatatggctttggttctgtagccatgatagctactggatgtgtcatggcacggatttgtcacacgaataattgtccagttggagtggctagtcagagagaagagcttcgtgcaaggtttcctggtgttcctggtgatcttgttaactacttcctctttgttgccgaggaggttcgagctgcattagcccagttgggttatgagaagttggatgacatcattgggcgaacagatttgcttaaaccaaagcacatctcattggtgaaaacgcagcacattgatcttggatacctcctatcaaatgctggattgcctgaatggagcagctcccaaattaggagccaggacgtccacactaatggccctgttcttgatgagacaatccttgcagatcctgagatagctgatgctattgagaatgagaaggaagtttccaaggcatttcaaatctataatgttgacagagctgtctgtggtcgggtagcaggtgtgattgccaagaagtatggagacacaggttttgctggccagctcaacatcacgttcaatggaagtgcagggcagtcctttggttgtttcctgactcctggaatgaacattcggctagttggggaggccaatgattatgttggaaagggtatggctggtggagaactggtggtagttcctgtagacaaaacaggatttgttcctgaggatgctactatagttggaaacacttgtctgtatggagctacaggtggtcaggtatttgtgagaggcaaggcaggagaaagatttgctgttagaaactctctatgtcaggcagtggttgagggcaccggagatcattgctgtgagtacatgactggtggctgcgtagtcgtacttggcaaagctgggaggaatgttgcagctggaatgactggtggtcttgcctacattctagatgaggatgatacacttgtcccaaaggtcaacaaggaaatcgtcaaaatgcagagagtgaatgctccagctgggcagatgcagctaaagggcttgattgaggcctatgttgataaaacgggcagcgagaaaggtattgcgattttgagggaatgggaggcctatttgccgctcttctggcaactggtaccgcccagtgaagaagactcgcctgaggcttgtgcagagtttgagagagtacttgccaagcaagcaaccacccaattgtctgcgaagtgatcgaatcagactacaggaaggtggtaggtgttttctatttgacacaaagtgatctcatcttatcacttcaagaaaatcgaagaccataaccggcgctctgaggcaccgaagtgcccgtctgaagactgcaactttgtggaggctctgcccaggccatctttttgagttgagctaacagaaccgagggttcttctcgacgctcgtgcacctaggtaacccctgtaaattggtttgctgacgctaggctgcaaggggcctgccctgtttgaactgctgtactgtacatgattcttggccgttgccctgtgtaattatgttttggttagctcgtaaatttatacgcatccaatggaggcatacaatgcaaaaaaataattaagatacaacaataa

SEQ ID NO: 16619 - DNA, 4950 bp, Zea Mays
cccgtctccagtctccaccaagcagcatccagttcatgaaatgctgcccgtgttcatgatttcctccagcacttactgcaggtagtaggttggtgccagactcttgaacagattcaactctagttgcttgggtctactgcatcagctttgaagccacagaagttttctcaagagcccaggagtgctgttctgctctcttagctggcctcaatggccatgtcgccatccaatccaatgcgcaagtactcatggtggtgggatagtcacatatcccccaagaactccaaatggctccaggagaatctcaccgatatggatagcaaaatcaaagtgatgatcaagattattgatgaggatgctgactcgtttgccagaagagcagaaatgtattacaaaaggcgcccagagctgatgtctttgcttgaggagttgtaccgtgcttatcgagctttagctgaaagatacgatcatgcagctggagaactccgacaggcccataaaaagatggcagaagcatttcctgatgagtttcagttggactttgatgatgacttgcctacagaaactgtaactactgaaactgaagcagacaatcgtgatatgactccatttttcctttcattcatcaaggctggtgattcgaaaaaacgtgctaaagaggatcaagaccatgagaagctgcaaaaagagatatcgagtttgtcacaggaaaatcaagaactcaagaagaaaattacatcagtgttagaaaaaggcaatatggctgaatttgaagttctttctctcaaggaggcccttgcagaacaagaagcggagaaggaagctgcattttcacaatgccagcaatccagtgatcgattacagagcctcaagtctgaaatattgcatacccaggaggagttcaataaactgaaagaggagatgcaaaatggactgcagaatttgagcactgcagaggagaggtgccttctgcttgagacagctaaccagaatttgcttctcgagctagataagctgaagcttgcctcaaaagaaaagcatgacgagctaaatgaaaaacacattgaattggagaagcttagcatctctatacaagaagagcaactcaagagcatgcaagcagaaatggcccggctatctgtggagaagcaattgacacaagcacaggagaagctaagacttatgtctcttgaaaagcatggggaaacaagtaagattgagaacattgaatcaaccagagttcaacttcaaaaggaattagacagtattcgagaagagaaccggaaactggatgatcaaaaccactcctctacctctgtgataatccgtcttcaagatgagataatttctttgaagaatgcacagcggcgtcttgaagaggaggtatctcggcatgtggaggataaaaaggtgcttcagcatgagctttcacacctcaaagatagcaagggtgacatggacaggaagcacttttcgatcaaggagcaaatacaagaggtgaatttcaatgtagaatcactccaatcacttgctcaagaggtgagggatggaaatgttgagctaaaagagaccataaaaaatcatgatggtgtaaaagccttgtacgttgataatctgatgttgctggagagaacgctggagaaaaatgctcatttggagagatcactttcagctgccactaatgaaattgaaggattgcaggagaagaagtctgcattggaagaatcatgtaaacaccttcattccaaggttaatggccatcagtctgagagggccatgtttgttgcacggattgagggtatttctcataccgtagagaagctatcagaaaagaatgtcttcttggaaaatttgttatctgataagaatactgagctggagttgcttagaaggaagctgaaagattcagaggaatctactcatgcattccgcaaccaaaattctgtacttcgatctgaaaaaagaactcttatgcgtgaggtggatagcatcaatagtgctctactcagtttggaaacccaatatgcagagttagaagggcgatatttggatcttgagcaagacaaagacaaggccctcaatgaagtgatcaaactacgagacctgttgaggctagaaaaagaaaaacacaaagaagccaccaactcagacatgactaaattcagtgctatacagaagcagataggccttctgctaaaagaagttcaccgcagggaggaccagcttcaagaggaggagcacaggattgttgaagctcagactgaaatttttatcttacagaggtgcttaggtgacatggctgaagcaaatgctgatgtcttggcacaattgcagaagcaacaagtggtatgcaaggatcaagaggagaaagttgatttcttgtcacagaacaaccagcagctgactgaagggataggttctgtagtggaagtactgaatctggatgagaaatacgaatcattggatctgatgaagattgatgttgttgtgcagctcctcttgcatgagatcaagtgcctactgaatactatttctgatgctcaggatgtgaagcagaaccagatccttgagaagtcccttgttgtcacgcttcttgagcactttgggcgagaggtggctgacctgaggtcggaaaggagtgttctgaagcaagagtggcaagcaaagagtgaggagctgcagcagctgcagagtgaaaagcatgacctcctaaagataagctgtgagctacggaaggaaatggaggctcgtaaccgcaaagtggatgaactgaaatctgaggcaaagttcttggttcgacaactgtcggaattgcaagagtcacggcagtcgttgcaagcagagattgtcaagctgattgcagagaactcttcactctctagcaaagtttacagatccagagagaaagagacgtcatttgatgaggatttcagcacacttgttgatgaagcgatcaggacagatattcttggtgtcatttttagaagcctttatgaagagaggacatcacaattgcagcgtttgcatgaggattttgggtctctacatgcagcaggcaatgagctgtatcaggaaatcaagctgatgaacaagaagctcggagacctacagcttgagaacaactatcttgagaaggaactcagtagaactctaagcatctgtgatggctctggtacagaaatttcctccggaagaaggcgtgctatgaggagggacacgaagctattaaaatctggcaggaaaagccaagagggtggccagaacatggaacaacgaaaagaagttgacaatgctggcctcgagaaatcgaacgaaatgcttagagtggagctccagaagttgaaaaatgaactgcaggtccttaaaagcaaggaacagcctgtgattgacgtgaaatcttgtgacgcagagatcactaaactgctggccagcatgcaattggccacagcgaatgcgtctctcttcaaggagaaggtgcttgagctcatcgtgacatgcgagagttttgagatcagtgacatggtgcagaaagaggtgctgaaagaggagatcactcggaggaactcttacgtggatgagctcaaggacaagcttaatgccattgagattgagaacagaaggctgaaggttgatctgaacggcgacttcacactgctcggagcattgcaaactgaagttgatgccctggagaaacaaaccttgtctctagccaaggattgcctaccaccaagcatgctcaagaaggaggagaatccactatcacctcagctgtcaaagattgctgtgaggccaagtgaagatcagaacaccacaaaggtggtgaaggacatggagctgcagaaactccacgggaccatcaaagcacttcagaaagtggtgtcagataccggggtggtcctggagcaagagcggcttgacttcaacagcaacctccaggacgcgaggaagcagatcgagatgctgaagctgaaggagatcctggacagcgacgccagcgacgtgaactacgagcggatgatgaaagacatccagctggacctcgtccatacgcctagccggcgagccgccgcatcctcacacgggcgccacaggaagaagaactcagtagccgcgacggcgcagtctgacgacaacaagatgctcgcgctgtggagcgtggacagggtgagcagcggcagccggcggcacgacatggacctgcggccgccgcagagcgaggctgccgagaccgagaagggaaagaagcggccatcctccgagccagtgccagttgtgaccgtgaaggacctcagcgtggacaagcaggaggtcctctcacggcccacggtgatggcagtggcggcgacggccaccacgacggagccacaccgggagtggaagaagaaggtgatcgaccggctatcctcggaggcgcagcggctccgtgacctccggaccatcgtccaggagctgcgcgccggcgtggaggcgtcgtcggacgcggagctggacggcgtcaaggcgcagatggccggcgcggagggcgccatcgcggagctggtcgacgcgaacgctaagctcctgaagaaggcggaggagttcacgtcggcgggcgacggcggcggcgacgtggacctgcgcagccggagccagcgcaagatcctggagcgcgtgcgcaagatgtcggacaaggccgggcggctggagctggagctgcagcggttccagcacgcgctgctgcggcacgaggaggagcgcgcggcgcggcgcgcggccaaggcggcggcggcgagcaccaccgtgcaggtgcagcggcggtcgcgggtgcagcttgtggagtacctgtacgggcggcggcgcgacagccggcggcccaagcagaaggcccgcggcccgtcctgctgcatgagggccaaggccatcgacgactgacgtgacgtggcgtcctagaggagaggggctggacctgtt

SEQ ID NO: 16620 - DNA, 1466 bp, Zea Mays
gggacacgtttctggtgtggaagcgtggaatctggtgaggtaattgaccgggaatgggaggaggggactggggaatctcggtacgaggggaatccgaggtgttaaatcatcgaagtgattcagaatcgtctttattcgatctcgtcattcccactaaaggctggacctgtaagggcatgcagagctttagcaagcaactacacgcaaacatctgaaacagttgatttggactgggagaacctgggttttgggattgtgcaaactgattatatgtatattgctaagtgcgggacagacgggaatttttctgagggtgaaatggtgccttttggacctatagcgctgagtccatcttctggagtcctaaattatggacagggattgtttgagggcctaaaggcgtataagaaaactgatggatccatcctattatttcgcccagaggaaaatgctgagaggatgcggacaggtgctgagaggatgtgcatgcctgcaccctctgtcgagcagtttattgatgcagtaaaacaaaccgttcttgcaaataagagatgggaaggtttagcaccaataaatttgatagttgaagacaagttccatcgtgctactcctggtggtactgggggtgtgaagaccataggaaattatgcttcggtgttgatggcacagaaaattgcaaaggaaaagggttattctgatgtcctctacttggacgctgttcacaagaagtaccttgaagaagtttcttcatgcaatgtttttgttgtcaaggacaatgttatttctaccccagcaataaaaggaacaatattacctggtatcacaaggaaaagtataattgacgttgctttgagtaaaggcttccaggttgaggagcggcttgtttcagtggatgaactgcttgatgctgatgaggtattctgcacaggaactgctgttgtggtgtctcctgttgggagcattacatatcaagggaaaagagtggaatacggccaccaaggtgttggcgttgtgtcccagcagctgtacacttcactgacgagtcttcagatgggtcaaaccgaggattggatgggctggactgtgcaactgaattagttggccgtggttcgtggatcattcccaacagatgatgggttcgcaagatccaaatctggaggatcacaaccatgtgtacctcttcggttacagttttgtagtgtcttatgcgatggcgtcctgctgtatatttcttagacggtatttaaaccataaaacagtattcgtctgtacgactgtacccttcagttctgtagcatctgccggagacgagtactagttttgttattttctttcttttacaaaccaagaacagttctatagttttattgtagacactggaccatcatatgatctcaatgggtagctttttcctttttatatttaaaaataaacagaattttaattttataaattttatattttaa

SEQ ID NO: 16621 - DNA, 548 bp, Zea Mays
cgtccaactcgcatccaacgcccctgccgcatcccgcgtccctcccgcactcgtctctgccgcaccgtacgcgcaggcccgcccgcccgctcccattccccacccccacctatggcggcgctctccgcgcccctccgcgccatcgccgccggatcccgcgtcgccgcgtccgaccccgtcaaggtctcgtgcgtgaggagcactggctcagctcacttcggctgcgcctccatcgatctgccctcgcgttctatgggtccggcggcgaagggaaggcaagatgtacaccgcgaggaagaagatccagaaggagaagggccttgagccctccgagttcgaggactccgttgcccaggagctcaagagcgacctcaaggacctgtacatcaacaatgctatccagatggatgttaccgggagcaggaaggctgttgtcatccacgtcccataccgcctgcgcaaggcctttaggaagatccatgtcagactcgtcagggagctggagaagaaattcagcggcaaggtttatatgctaattgtagctacta

SEQ ID NO: 16622 - DNA, 771 bp, Zea Mays
attctttgtgcatgaattgtaaggcaattttgtttggaaaataatcctgtatctttaaacatagtaatcagtacaacgctcttctctatcctccaggtcctctggcagattgtattcttgatgtggcacatatattgcatctgcttcaacatcaagacagatgagtgggtaatttcaaatttcccatgctttggagtcttcgttcatcaattgcaggtcgtcttctcgttagctgtttcttgtagctaaaaggtgagattttccagattaactggaagaaatatcctgaattccagatgaaggaacaacctcgatcagattctgaagtcaaatttgtgaacccatatgacaagggcatgctgtgtaacataagagaatttctaaagccggaatgatagatagccaattttgagtacgaagacctggaactagaaagatgggaagtctgaagtgcgttataactggatggaagcttgtttccttgttggctatagattttcaggaatctattctgatgttgtagccgtttagttgagattccagatttatgacagcgaatctggttcagtaaactgaaccaaacacactctgaggatcattgaactccctgtagtttaatgtgcaagtaacattcttttgtaaggttactttcacttatggaattcatatcgtggtcctgcatttttcaccgtttggtctgacgttctgtgggaaaagggtcgcacctgtagggatttgaaataatttgaagggaattgccgtgcttttgtc

SEQ ID NO: 16623 - DNA, 4700 bp, Zea Mays
cggcccgtcaggccgtacgagtcttgctttccgccccccttccgtcgcagcgtcctccttccacggtgaagaggagcgaccgcgcgaggacacgagacgagacccctgttcaatccccaatctggaatggtgatccgcgacgagatctgagagagagcgcctcgcaagaggcccgccgtccgcttcccccctccccacggcagccttccacgcgatggcgtcctccgcggcgccgccggcctccccgtcgtcgcgatcgcacggcaatgcggcgggcgccggcagcagcgccacggcgatgatgctcccgggccctccggggcgcggcaacggcggctgcatcgacctcagccccgcgggcctcctggcgcacggcgccgggagcagcgtcgttgtgtccgacccgcgctccatgcagctcctctgcgtgctccccatgccctcctcctcactcgcctccttcgtcaccgccgtccgctgggcgccccccgacacgccctccctcgacgacgacgacgacgaccgtcgcccgctccgcctcgccgcgggggaccgccacggccgcatcgccgtttgggacgcccgcgcgcgggctgtgctccactggctcaacctcgacgaggcgcgcggcgttgcgccgggctccgggggcggggtgcaggacctgtgctgggtccaccacggctccggctggcacctcgcctccatccacggcccctcgctgctctgcatctgggagacgtccaacagcccgcgcgtcctctggatgttcgacgcggcgcccgagtacctctcctgcctccgccgtgatcccttcgacgccaggcacctctgcgccattggccttcgcggcttcctcctctctgcgattcccaggcaggactccgacatctctctgcaggagcaccgggtgaactgcggtgcaggggatgtcgccgacctgcagaggctggagaaggagatttcagcacctgtacccgccccggcgctcgcggcgttcccgctcttttcctcgagaatttgcttctcccccctgtggaggcagatcctcttcgtcaccttccctcgggagctcatcgtctttgacctcagctacagcactgcgctttctgttactccattgcccagggggtttggcaagttctcggatgttatggccgatcctgatatcgacatgctctattgcacccatctcgacggcaagctgagcatctggaggcgcaaggagggtgaacaagtgcatttattatgtgctgtggaagagctcatgccttcaattggtactgttgttccttctccggctgttcttgcagctacaatatggcagtcagagtctattttccgaagcattgaaaaacaatgtcaggatttggcacagccacattctttcatgattgatacaaattcagaccagaatgcttgtcaagggactatgacatatctaacgtcgatatcagaagatggcaagatctggtcgtggcttttgaaatttgacaagtccgcacttcctagcaaagctaatctaggtagaccgagccataacaatgctgcaactgccaacacatgctccaatagacctgattttataataaagattaatttggtgggacaacttcatcttttgtcatctactgtgactacactagcagtgccatccccttcattgcttgccacagtagctcgtggtggaaacaatcctgctccagcagtgccacttgttgctctggggactcagaatggaactattgaagttgtagatgttgtggcaaatgcagtttcagccagtttttccgttcatagcagcacagtgagaggattgagatggcttggcaactcacgtcttgtttcattcacatataatcaggttaatgataaaactggtggatacaataataaacttgttattacatgcttaagaagtgggctaaatcgctcattccgtgtgctccaaaagcctgaacgtgcaccgattagagcattgagggcttcttcatctggacggtaccttctgattctgtttcgcgatgctcctgttgaagtgtgggctatgacaaagaaccccatgatgcttaggtccttggcgcttccttttacagtattagaatggacactgccagctgcacctcggccaggtcaaaatgcatcatctaaacagtcttcaacctccaaggagcgatcagcagaggcttctggtgcagaaagttctgatgaaacatgtgaaagttttgcttttgcattagtcaatggcgctcttggtgtgtttgaagtgcatgggcggcgaatacgagattttaggccaaagtggccctcgtcatcatttgcatcttcagatggtttggttactgctatggcttaccgccttccccatgttgtaatgggggatcgatcaggcaacattagatggtgggatgttacaagtggcctttcttcttcttttagcactcacagggaaggcatcaggaggataaagttttctcctgttgttcatggtgatcgaagcagagggcgcatcgctgtgcttttctatgataatacattttcgatatttgacttggatagtccagatcccttggcaaatgcccttcttcagccgcagtctcctggtacccttgtcttggagcttgattggttgtcaacccgaacaaggaaggatgaaccacttatgttatgcattgccggagctgatagtagcttccgactgattgaggttaacattgatgctaagggcagttctatttcgaagccagtagctacgaaagagaggtttaggccaatgccattttgtttgccagtattatttccaacggcccatgctttggctttgcgaatgatacttcaacttggggtgaagccttcttggtttgaatgcaatagtagtgataaattaactggggacagctttaaggtagcaccaacatttggagatcttcgtagttacatgattgagacaacactccctcctattggtgacgccgttgtggctgaattgctccttaaagtgttggaaccatacagaaaggagggttgcattcttgatgatggaagagccagcctatattcagctatagtgaacaagggagcttgtgcaagatttgcatttgctgctgcgatttttggtgatttccaagaagcacttttctggctacagctgcctcaagctcttcgccacttcctgggtaaatccacaagtagatcaagagagaagatctcacaatcaagtttacatcctgattctgaacaaagctccagatttaatcggatagcttcaagagagagatctgcttctgaaaagttcacgaaaaatgctgcgaattatgggcaattaagctcaatggcatttaatcaagagcaactatggttcaatgcaagtgaaaggataccttggcatgacaagctcgatggtgaagatgctttgcaaaagcatgttcatgagcttgtctctctcgggaacttagaggctgcggtttcattgttactttcaacgccacctgaaggatcaaatttttacccaaatgcattaagagcagttgtgctgtcatctgcagtctcacaatccttgcatgaacttgcagtgaaggttgttgcagccaatatggttagaacggacaaatcgctatctggcacacatcttctatgtgctgttggaagatatcaggaagcatgttcacagcttcaagatgctgggtgttggaatgatgcagctactttggccgcaagccatttgcatggatctgactacgcaagggtgctgcagaggtgggccgattatgttcttcgtggtgagcacaatatgtggagagctcttatcctatacgttgctgctggagcactgccagaggctttggatacacttcgcaagagccagcgcccagataccgcagccatgttcttgctagcttgccacgagacctactcacaagccttatcagaatcagagcccgaggacgacacttccgtgttagcactgacgccgacgccggagcagacggagaagctccggttcccttccaagaatgtggccgacgaggacctgatcgcagtcagtgaggtcttcgggcagtaccagcagaagctggttcatctctgcatggacgccgaaccgacgtctgactgaatcgcacgccttgtcgcatggcagactgatgcgggcgtggattctccgtttttgaagcttattattatcaacaggttgcaaattccttccaagtttctgcgaagctttttgttctgtctgttggtaggtaccagacgtccagacatgacatcgggactgctgatgtggcagaatctgatggcaggaggcaggaacagacatgcagtgctgtatcgtaggtgccaatggttggcactgtttatacatacgtaagcatttgtatttggtacaagctatgttttttttttctttggtgcgcaaagagcgagtgcgcagcgaacttctcttgtggccgagatgagatgagaacagatgccatcgaggcagcagcagacgatatacttacacctgtacacccatgacagtttttgtctgaagattggttattatatgcttatctgcaaatgcatcgcttcaggccctggagacatcgctgtcactggatccatcgtcattgccgatccgtgcagacattgttttggaggtccgaaagctacgttcttgtcgcattcaagccctccatgattatggatgatggataatgata

SEQ ID NO: 16624 - DNA, 2836 bp, Zea Mays
tagttttctttcttgttggacattcgggcggccaaagcagcggcccccttatctccagggaccaggggaggtcgcacaccaacgcaccgtccttccctttcctcctcctcctccctctcctcggaaggtcaagtgacggtatttgtgaccatggcagggaccttactccagtcagttgccctgggaacaccatttgggggtcgcatgagaacccattgttggaggtcccatggcaccaggaggcctgcctctatgttggcagtgtcacttagccgccctgtcaagatgtcagcatttgtgggtctaagatcagtgcatagcttctcggtcacaccgacggtgtccaattccaggtcggcagttgcatcttacaggtcatcgcgacagacaagacgatctcgttttgtcactcaggcaatgtttgagaggttcacggagaaagctattaaggtcatcatgcttgcgcaagaggaagcaaggcgcctgggccacaactttgttggaactgagcagatcctcttgggtctgattggagagggcactggtattgcagctaaggtgctcaagtccatgggaataaatcttaaggatgcacgtgtggaggtggagaagattattggccgcggcaatggttttgttgctgttgaaataccattcacaccacgtgcgaaacgtgttttggagctctccttggaggaagctcgccaattaggacataattatattggatctgagcacctgctccttggactgcttcgtgagggtgaaggtgtggcggctcgtgtgcttgagagtctcggagctgaccccagcaatatccgtacacaagttattcgaatgattggtgagaccacagaagctgttggtgctggagttggcggcggcagcagtggtaataagatgccaactcttgaggagtatggaactaatttaacaaaattagcagaggagggaaaattagatcctgttgttggaaggcagccacaaattgagcgtgtggtacaaattttaggcagacgaaccaagaacaatccctgcttgattggagagcctggtgttggaaaaactgcaattgctgaaggacttgctcagcgcatttctacaggcgatgtacctgaaacaatagaagggaaaaagtgatcggtttctcccagataaggcaattgacttgattgatgaagcaggttcccgtgttaggctacagcatgcacaggtccccgaggaagcaagagagcttgacaaggagctcaaacaagtcacgaaacagaagaatgaagctgttcgaagccaggattttgagaaggctggggaattgagagaccgtgaaatggaattgaaggcccagataacagccctcattgacaagagcaaggaattgagcaaagcagaggaagagtctggagagacaggacctatggtcaatgaagaagatatccagcacatagtatcttcatggactggcatccctgtggagaaggtttccagcgatgaatctgataagcttcttaagatggaagagactttgcacaagcgtgtcattggccaagatgaggctgtggtagcaattagtcgctccatccgccgtgctcgtgtgggtctcaagaaccccaacaggccaattgcaagctttatttttgctggtcccaccggcgttgggaagtctgagcttgcaaaggctcttgcagcctattactttggctctgaggaggctatgatccggcttgatatgagtgaattcatggagagacacacggtatccaagctgattggttcacctccaggatatgtaggatacactgagggtggccagctgacagaggcagttcgacggcggccatacacagttgtgctctttgatgagattgagaaggcacaccctgatgtcttcaacatgatgcttcagattttggaagatgggagattgactgacagcaagggaaggacggtggacttcaagaacacactcctgatcatgacctcaaatgtagggagcagtgtcatcgagaagggtggaaggaagatcggatttgaccttgactctgatgagaaggacagtagctacagcaggatcaagagcctggtcatcgaggagatgaagcagtatttccgacctgagttcctcaaccgtctcgatgagatgatcgtgttcaggcagcttaccaagctcgaggtcaaggagatagcggacatcatgctccaggaggtctttgacaggctgaaggccaaggacatcaatcttcaagtgaccgagaagttcaaggagcgggtggtggacgaaggctacaaccctagctatggtgcacgcccgctgaggcgagccatcatgaggctgctggaggacagccttgctgagaagatgctcgcaggggaggtaaaggagggcgactctgccatagtagatgtggactcggaggggaaggttgttgtgctcaatggtcagggcggcataccggagctctcaactccggcgatcaccgtttagctcgtacataacaaatgacaaaattaatagcatagtttttgttcaaacacattatcatttatggttagaatatctgtgtatatgtagtggtatagtcaatggggaaatcgttcctgcctctaaattcctttttttcaagttaaggtgtttcttttgtcgcaagttaatctgcctggttattaagatattgtttacagagtgatgtgaaaagctcttgtctgtgttcaaggatacatatacagacgggtcaagtagcatgtaggcaatagttccaatataggcctcagcgttgtctttaaccgagcatccgaaaacacttgcacctaaataccgtcgcctgaaaatacaaaaaaa

SEQ ID NO: 16625 - DNA, 1564 bp, Zea Mays
gcagagaaaacacaaaattctgcccttattgtgcacaaaatgaggtactgtatgtcatgaatccgaacaagttcagggcttgtgaattcctgattcgattccatgagcaacaacgtggagacaagataattgtgtttgctgataatctgtttgcactaactacttatgcgatgaaactgcgcaagccaatgatttttggtgccacaagccatgctgagaggacaagaattctctaccaattcaagaacagtccagaagtcaatacaatttttctttcaaaggtcggtgataactcgattgatatcccagaagctaatgttatcatacaaatatcatctcacgctggttcgagacgtcaagaagctcagcgtctgggccgtattctcagagcaaagggtaaacaccaagataggatggctggaggaaaagaagaatacaatgcttttttctattcccttgtatcaactgacacacaggaaatgtactactcaacaaaaaggcagcagtttcttattgaccagggatatagcttcaaggttatcactagtttgccgccggctgaagaaggacctaatctgagctattacacacttgatgaacaacttgagctcttgagcatggtggggcatttctgtactcactggtcgtagttttgttggctattattaatcgtgtgcagatggccccattcacctctaccaacaggcgctgaatgcaggggatgacatgattggtgttgagcgcttagaagaagattctgatggcaaggctcttattagagcacgacgctctgccggatcaatgagtgccttctctggagctggtggaatggtctacatggagtacagcactgggaagggaaagggtgttcagaagaaacacaaggacccgtcaaagaggcatcatctgttcaagaaacgctatgcgtagcctgttgtgctttgctagaaatgatttggttcatgacaaccttgttttggcatcaaagtcgttggtttaaacacacaagcccatgttatgcacagttgttgctcttggttaggaccatcctaaagcaattgttttctctgtttgagcaaggttactgagctactgtagcgaagaacaattttggtctcaggtttacacatgctgcttaaagttggcatacccggctttcgggcgggacaacaggacgtgtcttcttgaattgccttgtattatacaagtataaacaaacaaacgctaaatcgcaacgcttcttatgtgctgctggttctggcgtgctgtatttcacctgattagtttccgatcatcttgtgtatgatgcgggattgtctatggttcttcctatggttcagttccataatttgtaatggattacgactaacaatgtagtatttgctcggtttttaatcagttttcgatgttaaaaaatgggcgatgatgtaattcgttaagtagtacgtgcacgcgtgtgaatgtgtctcattaactcagcatgatctatagtttatttgtaaaatacttccattctaaattgtaagccgttttggttttggctgctctagatgtacacttcttg

SEQ ID NO: 16626 - DNA, 1577 bp, Zea Mays
actttaacttaccctattacctttctgctcgtggtgagtgctgacaccacctcacgcacacaagccgccggcggcgaccagaccgaccacctcgcgcactagccttgctcgcttctcgtcgccggctcgttgccggctcgtcggcacgatgtcgtcggagcctccacccgccccttctgccgccgcagcagagggactggctgctgacctttccgccgccaccctcagcaagaagcagcagaagaaggacgccaggaaggcggagaaggctgagaaggcggcgcagcgccagcaacagcagcagccggccgacgccgaggacccatttgcggccaactacggtgatgtccccgtcgaggagatccagtcaaaagccatttccggccgcttgtggtcccagatcggcgacctcgacgactcctctgcggggcgctctgtgcttatccgtggatccctgcaggctatccgcccggtcagcaagaagatggctttcgtcgtgctgcgccagagcatgagcaccgtgcagtgcgtgctcgttgccagcgccgacgccggcgtcagcacgcaaatggtgcgcttcgccaccgccttaagcaaggagtccatcgtcgacgttgagggcgtcgtgtccctccccaaggagcccctcaaggccaccacgcagcaagttgagattcaagtcaggaagatctattgcatcaatagggctatcccaacccttccaattaaccttgaagatgcagctcggagtgaggcagattttgagaaggctgaactggctggagaaaagcttgttcgtgttggtcaagatacccgcttgaactacagagctattgatctacgaacaccctcgaatcaagccatattccggatccagtgtcaagttgaaaacaaattcagagaatttctgttgtcaaaggactttgttgggatccacacgccaaaattgatttctggatccagtgaaggtggtgcagctgtattcaagcttctgtacaatggtcaacctgcttgcttggcacaatctcctcagttgcacaagcagatggctctatgtggtggttttgaacgagtatttgaggttggccctgtgtttagagcagaaaattcaaacacacacaggcatctctgtgagtttgttggtcttgatgctgaaatggagattaaggagcattattttgaggtctgtgacattatagatggcttatttgtatcaatatttaaacacttgactgaaaactgcaataaagaactcgagacgataaacaggcagtatccatttgaacctctgaagtatctagacaaaacattgaagctcacttatgaagaaggagttcaaatgttgaaggaagccggaacagaaattgagcctatgggtgacctcaatactgaagctgagaaaaaacttggtcggcttgtcagggaaaagtatgacacagattttttcattatgtatcgatatcctttggctgtgcgtcccttctacactatgccttgttatgacaacccagcttacagcaattcttttgatgtctttattcgaggcaggatttgttctttcataactgttacaggcg

SEQ ID NO: 16627 - DNA, 1778 bp, Zea Mays
aaaaaaaacacgaacccactagccctctctgcttcctctccgtttctcctccactcaccagtcaccactcctgattgctgtcgagtctcgatctgccagcgcgcggcgcgatggccgacaaggcggcgtccccggagaagaagtcatgggccgacgtcgaagaggaggaggaggccaaggctaaggcgaccgcggcagccgaagcggcggcggcggccgccgcggcgtcctcttcctcctccatcaccgagccggcggtggaggagcaggccaagcagatcgaggcgctctccctcgccccgtcggtggacgacgccgcaggcgaagagggcccgcccctcctcgatgactccgacgactcgcaaatccaagccgtgatttcgggtggcacggtgtacgagtcggccaccacgttcgaggatctgaagctgtcgcccgagctgcttaaggggctgcacgacgagatggggttcagccgcccgagcaagatccaggcgatcaccctgcccatgatcctcacgccgccctacaaggacctcgtcgcgcaggcgcacaacggctctggcaagaccacctgtttcgtcctcggcatgctcagccgcgtcgacccgcaacgcaagataccccaggctatctgcatttgccccaccagggagcttgcgcagcagaataaggcagttctcatgaggatgggcaagtttactggcattacatgcgcctgtgcaatcccgccagctcaaaaagactacatgccgatctcgaaaatggctccgatcactgaccagatcgttatcggcacatctgatcatatgcttgctgaggatggctttaggagtgattctgaaaggatgatgagggatatacaaagaagcgctggtggttgtcagggtgaaggattttgttacaaaggtcattagggatggaaatcagatatttgtgaagaaggaagagcttactttggaaaaagttaaacagtacaaagttcaagtacctgatgaatcggcaaaaatagaggttataagggacaagatatttgaatttggacagaaagttggccaggttatcatatttgttagaacaaagcaaagtactaagaatgttcacaatgctttgacgagggaggactatgtgtgctcctcaatccaaggatcccttgaccaatcagagagggaaaagataatacaggaattcaaagatggctacaccaaggttcttatatcaactgatgttcttgctcgaggttttgaccaagcacaggttaacctcgtcatcaactacgacatgccaatcaaatttggtacaagagatgaacctgattatgaggtgtacttgcacagaattggcagagctgggcgcttttggccggaaaggtgctgtgttcaacttgctgtgtggtcaaaccgataatgttgtgatgaagaagatcgaggactatttccagcacagtgtgcctgaggggtgtaactaaatcttgtgcatgcttttatcttatgctcttatgcatattcttattgtgttgtgttaactttaggttcggaattggcaacgtgaagaagattttgaggctgctctcaaggatgcaggtttactttaaagtaaccaccgaaacctgtggtgagcagcgctctccggctcaggacaattgaccggtgattttttttgtcgagcctgctgcacaacgttagtgtgctctttctgctcatcctgttcgcagcaccgattttcagggtgatttttattgttttttgatgagcgtgctgcacagcgttgctgtgcta

SEQ ID NO: 16628 - DNA, 477 bp, Zea Mays
ggccttagacttagtactgttgaaacatgaatgagcagacttcccttacacgttgacaccttcaggaatcagatgacagccccggatacagagttccggaggtggaaatgtccggccagtactctcaaaagagcgagctcctgactggccggaaagcgttcgacaggtgagcaagtacagcgctgcgacacttgaccctgcaacaaacaaagacgatgactgttgcagctctcaagcaaggtcccagctatcgttggtccagtgggcgtcgccccagctgcacgacatcgaccagatgacgctggaggggctgtgccacgcgaagtcctctgcgtccagattggtcggtttccggttgcgcaacctgagccagaattcaggccgcccatgtcggaggtcgtccagtcactggtccgtcttgtgcagcgagcgagcatggggacgacgacagcgctgagtggggaccacgcgtcctag

SEQ ID NO: 16629 - DNA, 2416 bp, Zea Mays
caggacatgggtacggcaccatggcctcagggtcacggggcacgggcacttgtgcagcagcgcaagcagacaagggccacacattggaaatatcggtggtgtcgaacgaggcgcgggcgatgcacaacgtggggctggcggggctcacgttctggagccccaacatcaacatcttccgcgacccgcggtggggccgcgggcaggagacccccggcgaggacccgctgctcaccagcaagtacgccgtcggctacgtcaccgggctgcagggcgcggtgtccggcgccggcgccctcaaggtcgccgcatgctgcaagcactacaccgcctacgacgtcgacaactggaagggcgtcgagcgctacaccttcgacgccgtggtgtcgcagcaggacctggacgacacgttccagcccccgttcaagagctgcgtggtggacggcaacgtggccagcgtcatgtgctcctacaaccaggtcaacgggaagcccacctgcgccgacaaggacctcctgtccggagtcatcagaggggactggaagctcaacgggtacatctcgtcagactgcgactccgtcgacgtgctgtacaacaaccagcactacaccaaaacccccgaggacgcagccgccatctcgatcaaagcagggctggacctcaactgcggcaccttcctggcgcagcacaccgtggcggccgtgcaagccggcaagctgtcggagtccgacgtcgaccgggccgtcaccaacaacctcgtcacgctcatgcgcctggggttcttcgacggcgacccgcgggagctgccgttcggcaacctcggacccagcgacgtgtgcacgccctccaaccaggagctggctcgcgaggccgcgcgccagggcatcgtgctgctcaagaacaccggcaagctcccgctctccgccacctccatcaagtccatggccgtcattggccccaatgccaacgccagcttcaccatgatcggcaactacgaaggcacgccatgcaagtacacgacgccgctgcagggcctgggcgcgaacgtggccaccgtgtaccagccggggtgcaccaacgtggggtgcagcggcaacagcctgcagctcgacgcggccaccaaggccgcggccagcgctgacgtgaccgtgctggtcgtcggcgccgaccagtccatcgagcgcgagagcctggaccggaccagcctcctgctgcccggccagcagccgcagctcgtgtccgcggtcgccaacgcgtccagcggcccgtgcatcctcgtcgtcatgtcgggcgggcccttcgacatctccttcgccaagtccagcgacaagatcgccgccattctttgggtcggctaccccggcgaagccggcggcgccgccatcgccgacgtcctcttcggataccacaacccaagtggaaggttgccggtgacgtggtaccccgagtcgttcaccaaggtcccgatgaccgacatgcgcatgcggccggacccgtcgaccggctaccccggccggacgtaccggttctacaccggcgacacggtgtacgcgttcggcgacggcctgagctacaccagcttcgcgcaccacctggtgtcggcgcccaagcagttggccctgcagctcgcggagggccacgcgtgcctgaccgagcagtgcccgtccgtggaggccgagggcgcgcactgcgagggcctggcgttcgacgtgcacctccgggtgcggaacgcgggcgagaggtccggcgggcacacggtgttcctgttctcgtcgccgccggcggtgcacaacgcgccggcgaagcacctgctgggcttcgagaaggtgtcgctggagcccgggcaggcgggcgtggtggcgttcaaggtggacgtgtgcaaggacctcagcgtcgtggacgagctgggcaacaggaaggtggcgctcggcagccacacgctgcacgtcggggacctcaagcacacgctcaacttgggagtctgatggccgagaggggaatggctaccaagtaccaacgtgaaggcagttggaatttggagggctggatgggtcggaggcagtcggaagagaaggttgtcagaattggttcggcaggtgtctaataaaggcttcctgttgggaaagaattggatccacgggcagctttttagtcatttgtttggaggcattggattcattggagggtcgatttgtgattgtaatcacgataaatgtaatggattggaaattcggaaggggccagatctctttttcatacaaatcacgtgatttagtgtacaattcttttgccactaaaattgcgcagggtttgctgccctgatgcagagctagtgcaagtattgattattaaggctagttattttaatctagtgtttatgagtaaattttctttataaaaagtatagactattcgcttc

SEQ ID NO: 16630 - DNA, 1812 bp, Zea Mays
cccactcccacactcccactccgacgcttgcgccgcgagaggagaaagtgccggagacagaagcgaggagagagagagagagaagagaagcggggggctcgcagaggcgtagctcgcgatccgggcgccgagctgggatgaacatggtctgttttatgcactggaccttggcgggaccaactttcgtgtcatccgggtccaacttggcggaagggacagacgtgtcgtgaagcaacagtatgaagaggtctccattccgcctcatcttatggttggaacttctacggaactatttgatttcattgctgctgagttggaaaaatttgtgcggactgaaggagaagatttccacctaccagatagcaagcagagggaactgggtttcaccttttctttcccagtgcaccaaacatctatatcatcggggactctaattaagtggaccaaaggattttgcatcaatggcacggttggagaagatgttgtggctgaattgagtagggccatggaaaggcagggtcttgatatgaaagttgcagctctggttaatgatactgtaggcacattggctggtgggagatatgctgataatgatgttgttgctgctgtaatattgggcactggcacaaatgcagcttatgtggaacatgcaaatgtgattcctaaatggaccgggctgctacctagatcagggaacatggtaatcaacatggagtggggaaacttcagatcagataaacttccaaggtcggagtatgataaatccttagacttcgaaagtttgaaccctggtgagcagatatatgaaaagatgatttctggaatgtatcttggagaaattgtccggaggatcctgctgaaactggctcatgatgcttcattgtttggggatgttgttcctccgaaactggaacagctatttatactgaggacgccagatatgtcagccatgcaccatgacacctcacatgatctcaaacacctgggagctaagctgaaggacattcttggggttcctgatacttctctggaagcaagatacatcactcttcatgtgtgcgaccttgtcgcagagagaggtgcacgcctggctgctgctggtatatatggtattctgaagaagctgggtaaagacaaattgctaggtgactttagccaacaaaggactgtagttgctattgacggtggcctatacgagcactacaagaagttcagtgcctgcctagaggcgacgctcacagacctgctcggcgaggaggttgcctcatcggttgttgtcaagttggccaacgacggctcaggaattggagctgcacttcttgctgcctcgcactcccagtatgctgaagctgcatagttctaggagctcgggggtcctagtgtaacctttttttttgtttcccaccatttcccccttcaatcgagaagcccccctcgtgcgattcgcatctctctattttctttcctcagcagcgggatatagctaggatggtgccattgagcttggagtacattatcactagcaacaagcattagcagcggcaggaaagaagtggaagcggaggcctgaataagccgttccattcctgccgattctttttcttcccaatcccttgaagtttgtattatgaggcgatatcacaaaacagccagttcttatctgtgtgatctcgtctttcaaaataaggagagaggtgggggaccaaatcatacagtctttactcattttttattgaatcgtgcagtgcttctgcctttatttcagaaacaactgcaatggcaatatttgcttgttcttatgtttgattggtc

SEQ ID NO: 16631 - DNA, 678 bp, Zea Mays
cagctttcatgatgatgcaaaatctaagcaataagggttttcgagctttctcatttacgattccatcagttagagagctattgcagatatttgaaattgcagctcctgtttttgtgacaatgacgtccaaggtggcattttatgcattgctcacatattctgcgacttctatgggagcaataacgcttgcagcccatcaggttatgatcaatgtcttatgcatgtgtactgtttggggcgaacctctgtctcaaactgcacagtcattcatgcctgagctggtatatggtgctaatcggaatctgaccaaggcaaggatgctattgaagtcacttgtgatcattggagcgataactggattgaccttgggggtagtagggacacttgttccatggcttttccccagtgtctttaccaatgaccaaagggtcatccagcagatgcaccgagtactggctccatatttcagtgtattgctggtgactccttcaatacactcccttgagggaacactcttggctggaagggatttgagatatttgagtcaatcaatgggtgtctgcttttccattggaacccttctcttgatgttttactgtctacgaccctcactttttgaatgatggcagctgcgaaggctgtgagattgatcaactagcgagagtccgaagtccttag

SEQ ID NO: 16632 - DNA, 1811 bp, Zea Mays
attaactagcttgaatacttggcctctgacaagttttgttgacctttggttctgttgaaagagcaaagttgtgcctgtacctggagaggagaaaggattctggaagttgatggtacattgacaacacaaccagtacttgaacatgtgggtatttcaacgtggccaggaagattaatactcacagatcatgccctttactttgaagctcttcgggttgttacctatgataagcccaaagtttatgagcttgcagaagatttaaagcaggttgttaaacctgagctgactggtccatgggggtcacgtctctttgacaaagccgttatgtacaaatcaacaaccttaacagaacctgtgatcatagaatttccggagttagctggccattctcgccgagattattggctggccattatatcagaagtactttatgcccatagatttgttaggaagtttgatataagcggaattgacaaagaggaaacaattctgaaagcagtacttggtattatgaggttacaagccattgaagagttacattttgaagttccaaatcgttatgaatctcttttgttgttcagccaatgtgacaaacttcctggaggtgatgttatacttgaaacattagccagttctatagcatcaagaacttcagatcgaactaaccaacctggcacaagtagaggaatgcatgctgtcctgtcaaacctgggcatggtatcaccagttaatagtggtgagcgtttgtttgttggtgagattgttgttggggaaattagtgccttgcagaaggctgttactgattcaatgaacaactataagaaagttgaactggcccaagcgtcggttgatggagtcaaagttgatggtcttgatacaaacttagcagtaatgaaggaattgttatccccggtaagtgagctttggagggttttgctattgctcacatcatgggacgagcctatgaagtccatgttgttttgcttcctattctcttatattatcatcagggggtgggtaatctattttattgtcacggtactattgttttcagcaacttttatgtttctcacaagattaactaatcaaggaaagcaaatgagtgaggtaaaggtggtatccccacctccactgaacacaatggagcagctcctagctgttcaaaatgccatttctaaaattgaggagcttgtccaagatgcaaatattgttcttctgaagataagagctctattgttggcttttccatcccaggcgacggacagggctattctggcattggtactgatggccctgagccttgccatcgttcccacaaaagtgcttctgctgctggtgtttctggaggtatccacgaacaactcaccactacgaagagcaagcacagaaaggtgtaccagaaggttgagagagtggtggttcagcatacctgcagctccagtggtggtggagaaagagaaagaggacaagaaaactagatgatacatccaatgtaatctttatgttgcttggctgatacgttgtgtaacgtatcagccaatgcccacctttgtacaaagaccgcaatatcaacaacgaggggcagtttcaatgaagatttcatctcacttgtaccacctgccctgtttacatggctcttgatgctttgttgcaagttgactagagctgaggccggtgtcaatcgccgctaataacacaaatccctttctctgggttggacatatcgccgtgcggacctgcgccccttcgtttgtaacatgaacagtattgattcttcgatattatgggattgcttctctaatagactatgt

SEQ ID NO: 16633 - DNA, 1241 bp, Zea Mays
attgcctatcaaccgctactcacgccgtactgtctgatcggcaacacctcgtgtacacgtaggcccggagatatggcggcatcgccggtggccatcggcacggcggtgttccagcgggggccactccgcgtggaggcgaggcacgtcgactacagccaggtccccagcgtgcccaagccgctcatggtggtcgcccccaccgacgccggcgtctaccccgtggccgtcttcctgcacggctgcaacacggtcaacagctggtatgagagcctcctgtcgcacgtcgcgtcccacgggttcatcgccgtggcgccccaggacatcgacgccaccaggcaggtcaccgcctggctcgccgacaagcagcaaggcctggcgcacgtgctcgccaacatcctccagctccacggcgtgaggccggacctctccaggctggcgctggccggccacagccgcggcggcgacacggccttcgccgtggcactcgggctcggacccgccgcctcggacgacgacgacaacaacgcagacgcaggcacatcgccggcggcgttgccactcaagttctccgcgctgatcggcgtggaccccgtggcggggctatccaagcaggcgcaggtggagccgaaggtgctgaccttccggccccggtccctcgacccggggatgccggcgctggtcgtcggcacggggctcggccccaagcacgtgggcgggccgccgtgcgcccccgcgggcgtcaaccacgccgagttctacgacgagtgcgcgccgccgcggtaccacgtcgtgctgagggactacgggcacatggacatgctggacgacgacggcgtgccctacgtcatcaacaactgcatgtgcatgaggaacaccaaggacaccaaggacctcgccaggagggccatcgggggagccgtggtggcgttcctcagggccacgctggaggacgacgacgaggatctcaaggtcgtgctcgagaaccgccctggcctctcgccggcggtgctggacccagttgggcatgacttggcttgaatagcaaggctggcggagtgtgctacattgtcgctccttatttacacacacataccacatgtttcttttccattttgtcctcgatcgtgtcatgtcccacttgccacaactgtccagtccgctggtgtccaatgaatagcaaggatgtgacactattcgcgcgcttccaaaatcaaatccgtacaggtcgacgtagattgctc

SEQ ID NO: 16634 - DNA, 2378 bp, Zea Mays
atggagctcgccggggacgtcctccatgggggcacaccagatctggccatggacacgccggatccgggcatgggctcgccggaattggcctccggcgacccacaaagacgacctggccgccatgaacggagcaacccgtggggaagccaaccacgcagagaggagaggagggccccaccgccgtccttgcaccgacgtgagcttcctggccgcgtgctcgagcggcggcgaggcggagtgtctgatgctgggccagttcttgacatgatggctgttatgctagaaaacattgcgagcactcctgttgtagctagatcaactgcagctgctgtttatcgcacagctcaaataattgcttcggtgccaaatttgcaataccagaataaggtgtttcctgaagctctgtttcatcagttgctgttaacaatgatacaccctgaccatgaagctcgtgttgctgcacaccgcatttttgccattgtcttagtcccatcttctgtttccccttcgattcaagccagtccatctagccgaccaaagaaacatgacatgcagaggacactctctagggctgtctctgtattttcttcttcagctgctatctttgacaagatgaaaaaggacaagaactcagaaaattcacaaggagaaagcaaggacaatagtatgcatagcgttggtgaagggaccggacaatcaaagagtcaaaaccttcacgtgtctcaaagccgccgtagcatgaaagctccgaatttttccatgaaaagaggtccttcaatggccatgagagctccttcagtagcgatcagagctccctcaatatctctgagaggtccttcaatgtctttgagagcatcttctatgtctgtaaaggaagaccaaagttcctcaaacaagtcagatgaggaaacggaatctgtgttggtgaagctgagcgcacgtcagatcacacttttgctgtcatccatttgggctcaatcaacatcccctgaaaatactcctgtgaactatgaagccattgctcatacttacagtttgcttctgttgttctctggatctaaggcatcaacttttgaggctcttactcagagttttcaggttgcattttctttgaggagctattcactcactgaagcagattcattacaaccgtctcggcgccggtcattgtttactctgtccacagccatgattattttctcgtcaagagcttacaatgtcttgccactcatcccgatctgtaaacaaatgatcaatgatcgtgcggccgatccgttccttcatttggtggatgagagcagacttacagctgttaaggattcttcaaatgatccttcaaaaatatatggatcaccagaggacaacaataatgcactgaagtccctttcagaaatagaactatcagaaagtcaatctcgagaatgcatagtctccacaatcatgaacaacatcgcaaatatgctggatgcggaattgcataatgtgagaagccaattgctaagtgatttcactcccgatgacatgtgtcctacaagcactcagttctttgaagtgcatgctgataacccttcatcagggtcttatgagactggtcaccatcaagagggcttgctgattgacctagggaatgaccatgatgcttttggggaagcttcagaaagcgcagaagcttccgcatcttctatacctgcatcagatcttctgagtatcgatcagcttcttgaaacggttggtgcagaaccagcacctcaggctggagtagtgtcagcagacattgggttcaaggatatgactagccactgcgaagccctgacgattgggaaacagcagaaaatgtccgccttcatgagcttccagcaaagcgtgcaagcggcagggctgccgagcagccagcccaaccagatggagctggacctttcccaagacccgcagttgcctcagaccggggcacatagcacgaacccattcactgatgacagccttcagggatatccacagtacacgaaggggcccaacggcgacaacgcacagccaggccaggacttccaacaacagtccctgaagttaccggcggcgagcccatatgacaatttcctcagagctgctggctatagccacgaactttccattccgcaggaaatcaaggaagaggtatgtccgtgtatgaggtcttagctagagactcaaccggattcgacacccattctttatgtatagctgtatatatgtataggttggctctttgctgctgctgctgctgctgtttttgccaatgcaacgagtagagggactgggggggagcagtgccttctatcacagactgtacatgtaaacatgttgcagaaatatatgaagaaaaaaaatgacgtttgaagaaa

SEQ ID NO: 16635 - DNA, 1659 bp, Zea Mays
ccttagcgcaagttttagaggttggttgtggagctgggaacacaatctatccattgctttctacatacccagatatttttgtccacgcctgcgatttttctccacgagctgtcaatttggtcaagaaacacaaggacttcaaagctgaccggataaatgcatttgtttgtgatattgcatcagaacaactaaccgagaatgtggaaccttcttctgctgacattgtaacgatgttgcaccagataaaatgcctatagttctggagaatgttagaagtgtcttaaaacatggtggccgtgttctttttcgggactatgccttcggtgaccttgcacaggaaagactgatgtcaaagggccaacaaataagtgagaacttctatgtcagaggtgatggtacgcgtgcatattacttttcaaatgaatatctggtagatttattttcaaaatgtggacttactcttgaggagatatgtgtgcacaacaagcaagttgaaaaccgttcactggagctggtgatgaacaggaattggatccaagctaccttcaccctaaattcagctagtcctcaaggtccaaatggtcaacacgatctccttgcttacgaaggagaggatgataaggtagttactgacacatctaagaagaaaagcagcggtgaagaaatcgatctttctgaagatttttgcaacatgtttgggacatcacacagccttgatgaggtacaaatcattggggtgaaagcaaaaggccacgacttcaaaataagaatgctcaggaaggaataccagcacacctgcagatcaactggcttaatgctctgggaatctgctcaattcatgtgctgtcttttagcagagaacccttcgatcgttgcaagcaaaagggtcctggagttgggctgtggctcagctggcatctgctcgatggttgctgcaagtttcactccctttgttttagctacagatggggatgaagaatcactggacctccttagacaaaatatctcctcgaacatggagcctaatttgctgagcagaatcatggttaggaagttattctggggcaacgaagatgatatgaaggcagtccgagagcttcatggtaacggcgtgggttttgattgcataataggcaccgacgtgacatacaatcctgatgctatactccctctcttcaagactgctaggggagtgatttctgagaaagctaacgaggactcggtacctgctctcattctttgctacatccagcgacgagttgatgaggactccatcctttctaatgcaacgtcccagggtttcaggcttgtggacaaatggataaatggagttcacgagagtaacggtaccatcagttcttggttctctggtaatgatgtctgcagtgctttccggcatacagtactttcagtactgtacttcgagctgtgaatgctgctatgcatgtgcaaggttactgtataacctgaaggatttttgtagcagctgtatcaagcaacggcaaaccaactttgaatctttaggccttgtttaatgatttcaattttacgtgaatcggactgtactggaatggattgagatagattttgacttctatggatttaaattgacttagtgccatccaatccatatggattaacggtgaaacgaataagccc

SEQ ID NO: 16636 - DNA, 1050 bp, Zea Mays
ggcagcgtaaaccctagcttccgtcacccacacagccggcgaggtggcttccatctcgctcgtgggccgatctcactgagcccccgccgttcttctctccacttcctgcgttctccagccgccgtcttcgctgataggctacgccgcccgctggcctgcgcgcgccgcagccttaccctgtgtgcaccctgttcctaaccctgcgtgtggccgccgccgactggcttgcgtgcgcccgcgcctccgcctaaccctgctagcttgcgcgcccaacgccagatgccctgagcccaccgccggctgtctgtgcacgcaagtgaacccatccggctacctgggcacgccatccgacctccctgcgaacctctgtatcggccgatattcctcaagaacacagtgcaaacagtaagttctggagacagcaaaaccttaaggtaacacatcagcaagttcgagactgccaaaaatatgcaaggcagctggctggaaagaaccatcatttgactttgaagaacaaggacctccgcataacagagtattcacatgcaaggtgaccgtccacctggatgaactggtcaacaccattatggagtgtttcagcgaccccaaacctaagaagaaagctgcacgggagaacgccgcacaaggggcattatggtgccttgagcgctctggttatgtcaagtcatcttcagatgttcctgacctgtgcggccatcagcccttctgctagccagatctacccttgtaggagtattaatgttggtagacgggtgcagcttgttgctgtggcacagtggttatccatgcactgatgccatgatactcttgagaagttgagtcccttatgaatcttgagccggctgtgttggctcgtgtacctagtctctagctcgtttggttacatgcccaacgcctgcacttgtactgtgtaaaatactgaactccggcgatcaatgcaatcaaactggaactcctagccgagctctgtcttgcaattcgatgtccggccttctcctgttggatgttaaacaggagccacggaatccg

SEQ ID NO: 16637 - DNA, 1134 bp, Zea Mays
ttttgactttcatgtttcttgcccataaccatatgccttatcagttatctctatcttttcaggtgcatgtgccgcccgtttgcatgcttgatggagttcactctcaacatttttttggaacaggggttataatatatcattctgaacacctgggtctggttgcagttgataggaatacagtggctgtatctatctctgatataatgctttcttttgctgcatatcccattgaaatacctggggaggttgttttcctccatcctgttcacaactttgtcctggtcgcttatgatccttctgcactaggagctggagcatctgttgtccgggctgctaagcttctatcagaacctgctttgcgacgaggagattctgtctatctagttgggcttagtcgaagcttacaagcaacatcaaggaaatcaatcataactaatccttgcacagctgtcaatattgggtcagctgattgtccacgataccgtgccataaatatggaggtcattgagctcgatactgattttggtagcacattttcgggcatattaactgatgagcaaggaagagttcaagcattatgggctagcttttctacccagctgaaatatggttgcagcagctcagaggaccatcagtttgttagagggcaatgccatttgtcagacttttggaggtggaactttatccaactttgctatccaaggcaagaagttacggattgagtgataactgggtgcaggcccttgcgaagaaggatcctgtgcgtagacaagtcctacgggtgaaaggttgtttggctggatcgaaagcagaaaatcttctggagcagggagatatgattcttgctatcaacaaggagccaattacatgcttccttgacattgagaagacttgccaagagttggaccaatccattgggtcagatggagtgcttaacatgacaatattccgtcagggaaaagaaattgaccttgttgtcggaactgatgtaagagatggcaatggtacaacccgtatggttaattggtgtggttgcattatccaggatcctcactcagcagtgcgtgcacttggctttttgccagaagaaggtcatggtgtttatgttgctaggtggacttaatctactatttt

SEQ ID NO: 16638 - DNA, 1829 bp, Zea Mays
ctaatatccatgtcgcttctcccgatcaacagatagttccatggaaatagctagaattttggcagatgaaggtaagaaacgtgtgatcatagtggacacatctaatgaaataggaggtgatggggatgtacctcactctggcattggacgtgctaggagaatgcaagttcccaaagttactatgcagcacaacgtaatgatcgaagcagttgaaaatcacatgccggaagtaattgttatcgatgagattggtacagaacttgaggcaatggcagctaccactattgctcagagaggtgttcaactagttggaactgctcatggtgtgacaatcgagagcataattaaaaatccttgtttgcaaatgctcgttggagggattgagagtgtgactcttggtgatgaggaagcaaaaaagcggaaggtgcagaaaaccattctcgagagaaaaggacccccaacatttttatgcgctgttgagatgatatcgaaaactgaatgtcgagttcatcacaggttagatgccacagtggatgctattcttgcagggaagcctcctaagtttgaagctcgcaagatgcataataagtctaccgagtttgaaatgccgttggtgatacctgatagagagtatgaaatagaatcactgccactctatcaggaagttatggtcacgaggtcattatcatcagatgataattttggtgataattttgtttatacaaggaaagcaaaagggaataaacctgtgcatggaaagtctctagtccaagtatacacataccagatttcagaagctgatattttacaagtagcaacaatgatgggatttgatgatgaactagatgtaacagatgacattggagcagctgatgtgattcttgcatcgagttctgaaatgaagcagaatccttggattcataatgttgccaaataccacaagcttcccatatttgttgtcaagactaatacgatggctcaaatagttaaggctatcagaatgattgttggaagggacaacacatcatcaagtaagcagcctgaggttatggagggagagatagagattgaggatgatgctccgaaacgtaagccatctttggaggaaattgatgccttggaggaggctcgtcttgcaatcgagtacatcgttattccaggtggggagccagttgagctcctcccaagatgttcagaaatagttgctcggcagctggagctcgtagagagctaccagctacttgctgaaacctttggaagtgactccaattctaggttacagattctccccatgaaaataaccaagaggggttctagtaaagacaatggagcatcaaagcccactaaacaaaccggatcagatttgatcgtcagtgagaatggtggtggctcaagtttttctcggctgccatttctgccaaagtgatcgtctagatcttctgatcaccactgtcgaaaatgtacatcattcctctctcttgttgttcattgtacaacattgtgcagtgttgtaaatagtgtgtcgaatgttgaagaagcgaaagagcaaaagctaactgcaattgccttccattcttttgctggaataaaatccgttcatttctggtgtcagccaggtcagctcacatgctcatgtggaaaaaaattgcacgcggccgtgccgcacgaggccgccggtgcggcccggcaccgattaacgacgcgtggatattcaacggcatctgtatctcatggataaagcctcggacgtatacgcagctcggctaagcctcggacgtatacgcggcttggcttacagaacggctcgctttaccatcgttgcttccata

SEQ ID NO: 16639 - DNA, 1083 bp, Zea Mays
ctttagattacaaggatctccattgattggaactgggaccatctggaggctgtgtttgaacaacttaatcagttgccatcaaaagaacatggaaccaatgtgatgcgaattaggccgtggtacttggatcagcatgcacagtactatcggcagacaatactgttaagctcataccttacaccagagattaatgctttatttaacggattatgcttaaattatgaaggaaagattaaaatggtgaccgagtatgcaggagttcttcccaaaatacaacttgaagtgcggcaggtgtatgaaagatttgatgcatcttctattgctgaagctgacggtgctcgttttgattatttctgcaacaaggtatatccaaagatccaggacttggatgagggtgggctgctgctattcgtcagttcgtattttgaatacattcgaataagcaatttcttaaaatccaaggaagcgtccttttgtcgaatcggagaggctacgtctcagcaggatatatcccgtgcaaggctctggttttttgagggcaagaaaaagatcttgctttacagcgaaagatctcacttctaccaccgatacaagatcaggggaacgaagcatctactagtctattcgttgcctgggagaaaagaattttatccggagcttgtaaatatgctgggcgaatcagaaaaccgcaagtgcaacgtcctcttctctcgtctagaccttctcaagttggagcggatcgttgggaagtcttcggcgcgaaggttgatttcctcggagaagggcatgtttgtcttctgctgatgtagcagcctagcccgtactgtagagcaggcgaatggttttatacattgatccctagcaaatgtacccacagcagggggtcacgttgttgtttgcctgtcaggcaagaatctggaccatgttatgtaggcaaaaaaaaaaaaaaatctgaatcccgtttgtacggctaacattatacttttatgcccctatttgtttccatcaaacttatagattatatagtcacctaatgacttgcttatttgttatcatagtctaggtatgtaaattatatattcc

SEQ ID NO: 16640 - DNA, 3927 bp, Zea Mays
cattgagtaaagatatcagcatattatgatctcatgcactgtctcatttaacttaactcctgattcaaggctcttaggtgaattgcatattgctctgttgaaatctatcattaaagatattgaggatgttgcccggactccttcagttgctttaggtgtaaatcagagcagttctgccaatcctggaggtggtcacccacaaattgttgaaggggcgtatgcttggggcatcaacatacttaactggcagcaccacttgaactttcttacatggccagaaatattgcgccaatttggtttatgtgctggttttgggcctcagttaaagaaaagcaatgctgaaattgtccatcaccgtgacaataacgaggtccataatggtgtagatgtcatttccattctgcgaaatggttcagcggctgtgaaggctgctgctttaatgaaagaaagagggtatactaatcgcaggtctcgacaccgtctgacacctggaacagtaaagtttgctgctttctatgtactgtcacttgaagggagcagaggtctcacgatattggaagttgcagaaaagatccagaaatctggactgagagaccttacaacaagtaagacaccagaggcatctgtatctgcggcattgtcgagagacactaagctttttgaaagaacagcaccttcgacatattgtgttaaaactccttacagaaaggacccagatgactctgaggctgtgttgtcagcagcacgtgaaaaaatcagggtttttcagaatacactttcagagtgtgaagaagtggagaaggatgtggatgaggctgagagggatgaggattctgaatgtgatgatgctactgatgacgctgatggtgacgacgtgaatattgagggcaaggatgccaagtctcctctagttggagctcaatatgacacacaaattacagtagttggtgatgtaaagaaagaatcaaacagtgtgatgaacatatcagtgccaccaagcattcaaattaaatctagtgcaagtgtaccgttgcatactttagacagtaaagcaagtagttcaactgacccacaagttggagatgatgataaagacactgagatagatgaaagtaaccaaggggagtcctgggtacaggggttagctgagggtgactattgtgatcttagtgtggacgaacggctcaatgctttcgttgcgcttattggtgttgccacagaaggaaattctatccgtgcaattctggagactttacaggaacgcctagaagcagcaagtgctttgaaaaaacaaatgtgggctgaggcacaacttgataagaggcgttcaagggatgactttactagtaaggtgcagtatgattcttgtgtgggtataaaggttgatacagatcaaaaaaataatgctgctgaaagtacacttgtgccagtggataaccctattagaaacaacaacggaaattccagtttgacgaacaacgatttacttgttgataagcagaaccagcttattactggtgatgtatttcaacaatggaatggtgtaagccaagaattgagtcacaaggcagaacagctatacgtgtacagatcgctaccccttggacaagatcggagacggaaccggtattggcagttttctgcatcttcatcatcctatgaccctggttcgggaagagtcttttttgaatctagagatggatattggagggtcattgattcatctgaggcgtttgaagctttggtatcttcccttgatactcgtggcatccgtgagtcacatctacactcaatgttgcaaagtatcgagccaacttttagggaagctgttgagaggaagaagtgtgttagtttagaacacacaactgggtggactgacaatggaagtaatgaaagtccaaactgcaacaatgagtttggaagtccatgcagtaccctttctggtgttgcttctgataatcttatggcatattcagatactttcaagatagaaattgggcacaacgaagctgagaaaagttctatctcgaaaagggcttctgtgtttctgaaatggatgtggagagagtgctactgtcaccaatccacgtacaccatgaaatatggaaagaagcggtgccctgagttgattcaatcttgtgaccattgctaccagatatacttagctgaagaacaacactgttcttcttgtcacaagtcattcaaacccattcacaatttcttggagcacttatcacaatgcgaagataatcagagaacaaatcctagttggaagacacaaattgtgggcctttctgtacccgtaggattgagattgctgaggttgctcttagctaccattgaggcttcagtaccggcagaagctctcctacctttttggacggatttgtatcgaaaatcttggggtgtgaagttgtattctgcatcatctgctgaagaagtcttgcagatgcttagtgtgctggaaagtgcaataaagcgagattacttatcatctaattttgaaacgacaactgagttgcttaattcaaacacacaagatgctacccagaattcagttggaggttctggatctgccactatacttccatgggttcctgacaccaccgctgctgtcgccttaagattgttagacttggatacttccatctcatacaaacttcattcaaagttggtttcaaataaggagcaagaagctggagatttcatgaagcttccactgagatacccttctattaataagaacaaacaagaaatagaacagttcatacctattggttttgatcaacaggatggaacattgctaactaacagcaatggccgtagaggtcgtggacggggaggtagaggtggaaggggaagtagaggaggtagcaggggaggtagttctcgtggtggtggtggtagggttcccaggggtattggtagctcatccaggattcagttcagggatgacaatagtgtgccctatgggagagcccctcgaaagaatgtacgtggtgggcgtacccgtggccgcggccgcggccgtggacttcgaactgtcagacctcggcaaccatctgaattcagtgccacatcaattccaaagttaaacctattgggcagctttagcatgttaagtaaggcaaatcacactggcaatatgcattctccagagagcttgggtgcagaagagtgggtcttggagagaagggaatatgtcaaggatgatgatgacaatttggtctctcgatatgatgagtcagaggaggaaaatggtgagcctatgaatgaggaatatgatgagcagatctcaggctatccaagggacaattctgagttcagccccatacagatgatgggtgatgtgagccacgatgaggatgctgaaggggatgagggcgaggaggatggagaggactatgaaactgaagatcctgctggtgatgaggatgatgacgttgagatggattgggatgatgacattcgggacaacgatgatggtaatggagcagccaacgcagatgaggatgaaggtggtacatcatcatattcttcagagtatagtgagtgatgagagtggattgaagttgtgcaggtttgtggtttgccaactatgtaagaggctgccagttctaaactgtgctgtggctatggccctatttctattcatttttaactaaaatttatttagggtcttatcattttgttaagaatcatttggatggtgacccattaccatctctagttgtggctcgttattgcatagaagctagccgacagtggaagatcggctttgtacagggatgttcgaaacttcgaatcaggttatttgtggtgtatatataatgccaaattaccaatcacaagaagtaaaaaaaaagtcattcactgtctgtttttttgttcttcagctacatttttcattgctatatatagggagag

SEQ ID NO: 16641 - DNA, 12272 bp, Zea Mays
ccgggagagagtgcatcagcactgcaggggtctactgaggcactccaagtggggaaatggcggaggcgacgaattcgagcttgggcacgtaggcgtcgctcctgccatcgccgcagcggtcactggactctcacgccgccgccgccgccgccggagaccattagttctcctgcgcggcggctccgcggctcccgccctctcccttaccttcttcccgctagggttttctccgatccccaatcactgctggttcacaaatggcttcatctcagcatgttgagatggaggctgcgaaacttctacataaacttatccaggagtcgaaggatgagcctgctaaactagcaacaaaactttacgtgatatgtcagcatatgaaactaagtggaaaggagcaatcactgccatatcaagtcatatcaagggctatggagacagttgtgaaccaacatggaattgatatggatgcattgcgatcatcacgaattccatttgctggtggtcctcaggcaggggattctagtggtgtcatgtcaaaggacaaggaggtcattggtaaccagtctcccatggtcggaagtgatgcttcccaaagtagtggacaagctggattatggcagcttccatcaggttcaaccgatatgataagacatggggcatctatttcaggtagggtacccacagggccaaataggggagatttctcagcagctgatattcatcaaggctccatgtcacaaaaaagcggtagatcctctggcattgaaagccctgcaagtctgcagatggaggacaccagatctatgaattcacatgattctttgaaatccgatgagaaaacaagtaagaaaacctcttccaagagaaaaaggatggattcaaaaggagctggtgatttgcgttcagaagacaactcaaagtcagatgttatctccactggacagaataccaggaaggggaaacaggttggtaaggctggtagacaaggtcagccttccatgggaattgagcatgagcagcaacctcataaactgcaaggtggtactggtcaggtaccacctatacatggtggtgcaccttttctcaggactcgctcagaaggtccttctgggaggacaatggacaagactaaaccatcaaatccattctcaatgggtcaaattccaaattttcctgaagggctggcttctactggtgctccaatcgagttgcagaaaagtatacagggtggagcaagtttatttaatcctggttttggctggaaccaaaatccacaagttcaaaccttgaagaattctcaaggttctattcataatttagtgaggtctggagttactgttgaagggaaagttaatgtaggggcacaaggagcttttaactctgcctctgcaccacagatggaatttcccacagttcctccatacaacccctcttccttcggagctagctcacagtttctggacaaaggcaaggagttggtttccagcattataagcactgaacctcattcatctaaagttgcatctcagcctgggatttctcatggaagtcccatgcaagaaaggcaaggtatgatcagggtgccacagagaggcgaggcatcatttcaggaacgcaggccatcttcacttccgagtagaagtactgggccaagtccaatgtctcacatttcttccaacacaccatttaaagaacagcagctgaagcagctcagagcacagtgcttagtatttcttgcatttaggaataatttgcagcccaggaaggtacatcttgaaattgctttgggcagagggcctcctgcagaaagtgacagtgcaggtcaaaggggcagcgagggcagagtgtctgatgctctgggaaaggaaaatggtagcagtcgggagaactctggtgtcttttgtaggcaaactgatatctctagacttccagccacatctgcaggaagtattgcagaggatgattccttatcgaaggatccagaaaatgctacaaaaaaaatcaagttagctgaacaggagaagtcattgatggaagtagaaaatgtccagcaagcttctgttatgcaaggaactagttctgaaatgcgttcccaagaaactgcatctcaaaatccatatcgaccacaacagtcatattatcaaggagatacaagaagaatcgcctcggatatccataggactgatgctgaaattttgaaccagaatttaagttggggaggccagggatctactgctttgggtggtactagacagcttctgaatcaggaaactaaagaatcacttgcaccttcaaagtcacaccatatgcctgttgatggttacaactccaatatacaaggaatagatcggactccagagatagctggagctggtaatgatgttgaaaattgtagccacgtagcagatattgtgcctgagcaggctgctgatgaaggagatgaggacctctcagagcatgaggatttattgtcatctccaaagcacacaatgacggaaaaatggatcttagattaccagaagagaatttacaatgagaaacaaaagagaacattggagcagcataaggtacacagcagaatgtcagcaacatatgaggagctaaaggagagcgttaattcatccgaagatctttctgcaaagaccaagagcgtcattgaattgaaaaagcttcagcttctgccacttcaacgtcgtgtacgcagtgaatttttgctggattttttcaagcctaatacatccgacttagagcgcataaaatcactgaagaaacataggcatgggcggcgggtgaaacagcttgaaaaaattgaacagaaaatgaaggaagaaaggcaaaagagaattcgtgagagacagaaggaattctttgctgatattgaagcttacagagagaaactcgaggataacttcaaggttaagagagagcgcttgaaggggttcaatcgatacataaaagaatttcacaaaaggaaagaaagaattcatcgggagaaactggataggatccaacgcgagaaaatcaacctgcttaagaacaatgatgttgaaggttatcttagaatggtcaaggatgcaaaatctgatcgtgtcaagcaactattgcgtgaaactgagaaatatcttcagaaacttgggaacaaattacagagtgcaaagtccacagatggccgctcatcttttgttactgataagagtgacactgcaaacgacattgaagatgagagctaccagccacagcattatctggaaagtaatgaaaagtactatcaactggcacacagtgtaaaggaaactgtaaatgatcagccatcttatcttcagggcggcaaattgcgagagtaccaaatgaatggcttgcgttggctggtttcattgtacaataataatttgaatggtattttagcagatgagatgggccttggtaaaacagtacaagtaatctctttgatatgctaccttatggaaacaaaaaatgaccgtgggccttttctcgtggttgtaccatcatctgttcttcctggatgggaatctgaactcagcttctgggcacctagtataaataaaattgcttatgctggtcctcctgaagaaaggcgcaggatgttcaaagagatgattgttcatcagaagttcaatgttcttctgacaacatatgagtacttgatgaacaagcatgataggccaaaactaagcaaaatacaatggcactatataataatcgatgaagggcatcgtattaaaaatgcttcttgtaaacttaatgctgatttgaagctttatcggagctctcatcggatattattgacaggaacacctcttcaggtcgaaaatgagcttcctgaaaaaattgaaagacttgtaagatgtgaggcatctgcttatcagaaacttctcatgacaagggtggaagaaaatcttggtggaattggagccgttaaggttcgctccgttcacaactctgtcatggaattgaggaacatatgcaaccatccatacttgagccagcttcatgttgaagagattgagggctacctacctaaacattacctaccatctattttgaggctctgcggaaaacttgagatgttggacagattgctgcctaaactcaaagctacgggccatagggttctacttttttctacaatgacaagattgcttgatgtaatggaggattacttggtttggaaaaagtataaatatcttcgattggatgggcacacttctggccatgaaagaggagctcttatcgataaatttaacgatcctaattctcaagcattcatttttcttcttagtatacgagctggaggtgttggggtcaatctccaagctgccgatacagttatcatatttgatactgattggaatcctcaggttgatctgcaagcacaggctagggcccacaggattggtcaaaagaaggaggttcttgttttacgtttagaaacggtccgaactgttgaagagcaagtcagggcttcagcagaacacaaattaggtgttgctaatcagagtataactgctggtttttttgacaataacacaagtgctgaagatcgaagagagtatcttgaatcactcctacgtgagtctaaaaaggaagaagcagctccagtgttagatgatgatgctctgaatgacattctagctcggagcgaagctgagattgacatattcgaatctattgacaagcaaaggagagaagaagaaatggcagcttggcaaaaggtggttcaggatggttcaactagtgggctagaccctggagtattgccttctcgtcttgtaactgatgatgatctgaagcccttctgccatgctatgaaactttatgagccatcaaatgtgaaaacagtaaatgtgaatgtgaggaagaagggtgaacttgggggccttgatacacagcactatggaaggggtaaacgagcccgtgaggttcgctcttatgaagaccaatggactgaagaagaatttgaaaaactttgtcaagctgattctcctgaatcatcccaacctggtggcatgtcgaaggatttggatattcttaataaaggcattaagactgaaattcttgtggagagttcaaaagaaccagaacaaacgaagatggaggcatccccaactgtcggtgactctccaccagccaaacggcggagaggtagacctaaaaggtcagatgtttttgtatctcctactgctggtctgactgatgctgtcaaacaagacacaggaaccacacaggacggtagttctgctacaccagcaagtaccatccactctgatgcaccagctactgcaatcaattcagctgtttcagatgttaatatacattctattccaccagctgataccaagaaacaagagttcagtactgataccaaggtttccagttctgtttctgttttggaaggatctgtgccgaatgaaattggtacaccattacagagtgttcataatgtagcagtttctgcaccaccgcatcaatcagctaggggcaggaaatgccaagcaggagaaacacctcgtaggcgaggccgaaaaccaaaatctctatcttcatctggtgtagatgatgttagtcttaacccaaccttttcaactgttagtggtgtagcagacactagttatgttccttcatattctcaggtctcatcacaaggcactgctgtggcactggcaggaatccagaaggattttgtgacagttaagttggatacattgttaccagatagtggtaagggtgctcctcctgttaatgagggagataaaggtgctactgttacaacacctgtggcaaaagatatatgtgctgggactgtgacaacatcagacaacactgtcaccctgacaccaaatactcttaaggaaaacattggattagttcaagtggcatctgcaccttctatgctcgtggcttctgaagaactaatgaaaatagcacatgttgcggtggccgataagcctgttgagaagcaaactgcttcacgtcgccgcagaaagaaaacatctagtagcgaggatactggagtcagcactagacaaagatcagctatgaaaagatcttactacaacacctctgttgccgttgatgatattggttctgctgtgatcccaaatgaaaaatcaggaataacgaaggaaagagatgtcagttcaattcaaagtacatccaatgaactaccaaatattaactcaccattgtatgagaagtctggatatgattctcaaccaagcacacctatagctgtccccatcaatgaagacactcttcctagtggttttgacacctgtactaattctatgataactcttgccacatctgccaactctgctgaagatgataaaccagttgatttgcaccttaatgcacctgtttctgttgattcccaaaaccaagaacaacacatgacagggaaggaccatttggcagtgtgttctagaatctttgctactcagttacagacggacactgcaaatcctgctattgatcataaaccaggaactgcccagtttgaaccatctgcttccttgccccagaattcaggcaaggatgctactgcactaccttctgaggttgacagtgctgctccaaatagggcatcaagcaggaggaggaaagggtcaactcgagaaccacgcaccagaagtaattctgcatcagctgcaagtgaacgtcgtgcccgacttactggattgaagcaggcagaggacataaagaagttagagatgtcagcaacgccgaccacaacagtgtgtatttcatcggtagagcaacagggagctgcttctttaagtgcgaagattaccaatgcttctgtttctgaaggacagaagaatcctggaaattatatgccttctgccatttcaattcccgtggggagccatgttctgggcctgggcgcaacaagtattgaagaaacaactgccactatgataactcaggctcctgcagtttcaaaatcagaacgaagaaaacttccaggaggcagtcaacaaggtattcagtttgagagttcagcatcaaaaacaaagatggtatcagctgtggaaccagcacctgcaaatgttgaatgcatgcaaggtactgaagttaatagttcagaacagacaatagtttctgctactgaaccagcacctgcaaatgatgaacacatgcaagagcaaccaacaaatatcgtttcatctgtggaatcagaaccttcaaatgatgaagagcacacaaagcatgaagtgtttcttgcgactactggtgataatatgcttgcttctagtgcaggaactgaaatattgcgggatacagttgagcatgctgcttgccagccagaagcagtatgcacagatggaactgcaaggcagtctgaattgtcgcaacttgatagaaaagcctttcatgatgcctcatataaatacactcatgggtccactaaagatgatggtatcttgcccagtgaaggtacttctgttgatgttactggttctaagcaggatgatgtgaacattgttggcacacaaactgatgatgtttctcggggttctagtcattttccagttattttacaatcaactgagtcagatcggcctccaggtcaagtgaagaatttggagagtaggatggagcaggtgaaaacagaagaagctttggttaacagttctggtggcaatcaaactcacagtctgggcgatgaaccttctcataatacatcattagcaagaaattctccctcagaacactcgaatgagcgttgctctgatcaagtaattggtgaaaatttcaaaagtaaagaaaatattgttgaagtccattctggcattaatactgatggccccgatgaagctctgaatgcattgcacacccaatctaaggaggccagcatgacagatattggtgtacctactgatggtgatagatgtgaaggtaaagggactagtgtcgaggtctgtgctgacatgaatactgatgggcctgtggctacccaggatgcttcgtccacgaaatctgataaagagtcctgcatgatggaatgtggtgtgtctaccgatggctgtcccacagtttgcaaaacacacaatgatctccagggtcatgtatcttgtgaagaaacctttgttaggactggtggtgatgacacaacccatatcaccaatgcaaattatggttctaataatgaaagtgaggccaccattgctagtcctgttgaaaccacacaaaaactgatggaagggagcactgttattgtgtcggagaattctgatttaaataagcaatgccacacattgcatactagaaatgatcctcctgcaaataccctgttgatagttgagtctaacaaagttacttgtgatgctgaaattgtttgtgctagcaggttagaatcttctggcattgaggctgaaacagtgggtatccaagagtcagctcttactgattttgagggaacaaaaggaactggggatttgggtgacagaactaacagtcaactgcatgatgatgttcatgggacatcatgttccacgatagctcttgtatctgagaaagaaccttccgaagatcttaccaccggtagccattcagaagcatctaatttacttgctgctgtagaacaaactcaagaaactactgttgagaaccaagagatcatagatgcagtagtgtttatggatgcctgcaaggcagaacctgttggtgattttactattgctaaaggagctgaacagactgtagaaatggttcattatgttgataagcaatctgctgtattagactatgttgagacacagacaaaacgaacttcggtttgtggttctacgctaaatgaatcccctcaggctgcagggttggaagaagactgctctgtactgaagcatggtgatcctacttcatctgagcttcttactgtagcacctaatccaatcggtgaaacttctgttattcaagtggaaccagaggcaagaaactcagatggatactgcacaacagaggctggcagtgctttatctgaaactgtcatgggattggagccaaataaagaaactgcggttccaatgcaagagaatattggagaagctaatgataattttaataattgcgaagcacacaataattcggagattcatgcatttgaagtgtcgatggaaacgcagtcatcagaagtcaaggaagtatcttctattcagtctggtgcagcaaatttgagcacacagacaactgcactgcctgatgtaacaggacaaaccagtatggcatcgactggagaactagtatctacaaatgaacacatacacatgcaaggcactgaaatcaattcagagcaacaaacaaagatggtttcacctgctgaatcagcacctgctaatgatgaacacgtgcaagacattgtgattcttagttcagaacagcaaacaaagatggttttagctgcagagattgacgcattatgcgtccaggagactgcaattattgatcttgggggagcaagaggaacagttgacctgaatgacataagaacacaggttcctgcattacctggaagggatgtgctagatgtggaggcacatattttggagcaaaaaaaaacatcttcaccaggtgatgaaattaagggttcagaacaagcaaaaatcgaatcgattgcagagatcgaaacagtgggcgtcaaggagaatgtcattgctgatcataaggaaacaggtaacaacagtggcgtaagtatacatgcgcctctattagttgaatctggacaaaaggcatcacctggagttgaattgcgtggtattgaggttgatgctcatgttttggaacaagcaaagatggtttcagctctagaaccagactctactccagaagtttgtgctgacaagttagaaccttctggtgctgatgatgttggaatgattgttgtccaggaggctgcttctgttgatgatcacaatagagcacaaggtggtgaggctcattgttcagaacaaataaagatggcttcaattgcacaagcggtgtctagcatggctttagtaggatattcttcttcagaagactcaatggtggatgctgctgcccgagtaactgatgctgattttgtggatagtaaagcagctggtgtttatcgccaagaaactatgcctactcaaaccacctctaccctcccagagaacatggattctcctgcaactgctgctaccatggttgaatcgaagtttgctgcctcgtctgagcacgttgcaggacccgagccaattgatgaaacttctgttatgcaagtggaactggcaacaagcacaggggatggatgtgcagcagatggtcacaatcttgtttcatctgaaactgttgttgaagtgaagcttgctcaagaaattgttgttcctagtccaggtggtagcatagaagctaataatacttctaccatcagcgaagtatacaaagatacccagtctcgtgcatctggtgaagcatgcaatgatggtcagtctcatggtgatgaaaatatgaaacttggtgaagcttacactgaactgcagctggcaccttcctctggtgaggaggccatgacatgtatgtgtagtgagctgcccagccaggaggtggaggctccaagcagtgaccctttggagaataatgaagaaacgaaaaatgaagctgctgctcaaggatcagtaaatgaggattctgctcctcgtgctgaaaatgcaaagattgatgaagctgacacagaacaggaactgcttccatctggtgaggccacggtagacgaatccagcgagctactcagccaagacgaaaaggtggctcgtaaagatgcaaagatggaagagtctgctgctgctgctgctgcacagagacagctaactactgaagttgctcatgcaagtgaaaacgcgaaacttggtgaagatggcacggagctgcaactgccaccaccttcaatggtagacatatctagggagcaactcagccaggaagtggaggttgcaagctctgggccttcaggaactgatgaaactgctgagatgaaacggctaaacactgaacattcacctggtgatgaaacttcaaaacttgttggaactgatctaggactgcaattgtcaccttctggtgatgccatggtagatatatctaataagccacccagctgccaagacgtaaaggaggccccgagcagtgacattttgggaaatgatgaaaattcagacaccgagaagactcctgctgccttgcatggacggctgaacaccgaacttgctcctagtggcagaaatacagaatttagtgaagctgacactggaaaacaagagacacccgtgtctgctgaggctatggtagaatcatcgagcgagcctcgcagccatgaggcaaaggaagctccaacccctgacctgtctggggatgatgaaaaagcgaagtcagcaagggctgctgttgttgcggaactttttggagatgcaacagaaggtggttcggatcagccattgccgtctcctagagaacaaggcaaggaagcagaggccgatggaggcttttagagtaaagttgcaaatattgtatcaagagatactagaatccgtgtaagtaagaactgctaatagtgcttttagttgtaactggtgtaagcttctactcagaatcaaaagcgacgtgctgagattacagcaacagtggcctacggcagtttactactgttttgtgcaatattgctgctgagttttgttgagacaggcaattgatctgtcatctgtctcgtcttgcatcgaagttggcagcaccatggtgaggtgctcccgccttaacctggaagcgctgacagagggaagaacaatactctctggtttcctaatgttttcctgttcactgttttgatttgatgctgcattgcagtagtgtgacttagtaacataatggtgcgtttggatagacggacataccgatccagaatcatctgaacctaaatattgagtacaagcttagattatctgtttggtctgctttatgtctgggtgcaatgctctctgatttctggacggagtggtaccgcaatccaaacagactttaatgtttgggtgcttcaggtcataatcaaccatctaatttactttgcaaatgaatgtttcaaactggactgctcaagcctaccaagtttaatggtccttcctagtattgaatccttttgagtctagcccgtttcctcatttgaattttcactgttagtgtgcctatacttgcctcacgtagaattttgaaagcttatggttgggtgcgttgtactcgac

SEQ ID NO: 16642 - DNA, 2229 bp, Zea Mays
taaaaccgcgcaacctcatctctaaaacccgctcttgtcttcagaagtttcagatcctcgcatcgtccgcaccttatcctctagactttacagtacctgctctcagctcctccctatctcaatggcatccgcgaatgccatctccaccgcctccctcctccggcccctctctcagggcagggcgacgaggtcacagcggttcgtggtgcgtgcgaacgccaaagacattgcctttgaccagaaatccagggcagcgctgcaggccggcgtcgagaagctcgcaaacgccgtcggtgtcaccctcgggccacgagggaggaatgtggtgctcgatgagtacggaaaccctaaagttgtgaatgatggagtcactattgcccgtgctattgagctgtatgatccaatggaaaatgctggtgcagcattgattcgtgagcaagaccaatgattcagctggtgatgggactacaactgcgtccgtccttgctcgtgaaatcatcaagctaggccttctgagtgtaacatctggtgcaaatcctgtatcactaaagaaaggaatagacaaaactgtgcagggcctaattcaggagcttgagaataagtctagaccagtcaagggtggtggtgatatcaaagctgttgcatctatctctgctggcaatgatgaatttatcggatccatgattgctgaagcaattgacaaagtggggcctgatggtgttctatcaattgaatcctcctcatcttttgagaccactgttgaagttgaagaaggaatggagattgaccgaggttatatttccccacaatttgtgacaaacctcgagaaatcaattgtggagtttgagaatgctaaggttcttattactgatcagaagatcacaagcataaaggaaattcttccaattttggagaagaccacacagctgagagcccctctgttcattattgctgaggacattactggtgaagctttggcaactcttgttgttaacaagcttcgaggaattctcaatgttgcagcgattaaggctccaagttttggtgagcggcggaaggctgtacttcaggacattgccatcgtcacaggtgctgagttcctagcaaaagatcttggtttgttggttgaaaatgctacagaggaacaacttggcacagcaaggaaagtcacgatacatcagactacaacaaccctcatagcagatgcagccagtaaagatgagatccaggcgaggattgcacaactgaagaaggagcttgctgagactgattcagtttatgatactgagaaattggccgagagaattgctaagcttgccggtggtgttgctgttatcaaggttggagctgcaactgagactgagcttgaggaccggcagctaagaattgaggatgcaaaaaatgccacttttgcagctatagaggagggcattgttccaggaggtggtgcggcatatgtgcacctatctacggttgtccctaagatcaaagaagcaattgaggaccctgatgagcggcttgcgctgatattattcaaaattagatggtatgaactgtatttgccagaggcattggtagcacctgcttcattgattgcacacaatgctggagtagagggtgaagtggttgtcgagaagatcaaggagagcgattgggaggtgggctacaatgcaatgactgacaagtacgagaacctgatggaggctggtgtgatcgaccctgccaaggtgaccaggtgtgcgctccagaatgcggcctcagtagctggaatggtcctaaccacgcaggccattgttgttgagaagccaaagccgaagcctcaagtggcagagccaccggagggagcccttaccgtttaaaacttaacgttcttgaggctgctgtccagacggttcagatctgttgagagggtagaactttggtttgagaattttggttcagatccactgggagttgtagagtaggattgctattttgcagacgaagagtaattttactctggtctgaacttatccgaattgaagacatttgcatcaccattttttaaaaataagctcatggcgatgctggattgtacgagcaagtacagtatgtttttagcctctcaatttttgcgtctgtctcagcttggtttttagtgttgcgtaatctcctttgactgcgtataggatcgttttacgtaagattgtgttaattgaatgattagtgccttcgttaaaccgattttcc

SEQ ID NO: 16643 - DNA, 2222 bp, Zea Mays
cttttctatcctactgaaaaaatcgcatctttggcgcgtctgggctcttctggtgcgcgattcgagatcagccaagattcgagcgctagggagacgttgccggactggaaccagagcaagagctggaaggagctcaagttcgggcacggcggaggtggccgcagcgcgcgggactccaggtactgggaccgggacgataggcgccgcgacgaggactacacagaggacgaaaaggagaagatctcgggtggaagtgggacctccggcgatgctggcggcagcagcgataaaggtaccacctctgagggaggtggggaggataaaggtttgactaccggcagcgatgctaaggatgttccagaggtgtctgaaggtgggaaaggtgggaccttgtacaatgagggtggcaggaaggagctggagcagtacgaggctgcagccatgggagccacaggaacaggggtgaaggaggttgatccagatgatgagtatgacgatggcatcgatacacaggatgaaatggaggatgctcacctgcattcatctgatggtgggaggaagcttggtggtggcagccatgagggtgctgagaagaaggacgaggtcgctactgagaggcacacagaagcaggtggagggattgcgggtagtcatgatattagcagcccagacaaaaagaaggtttcaggtactggagacaagaagcatgggcccaagaagaaaccgaaacgcaagaagtctggttcaatttgtcaaatgaagtttcttaactcaactgctcagcttgtggagcctgtgaggaatgagaaatttgctagttttaagttggagtatgtagaagttgaagaaagacctattggatcagaattttgggaaccgagatttgccggccaccaaagcctgcaagaaagagaggagtcatacaaagcccatgaccaacagttgacatgcgcttttgttaagggtccaaatggtacaagtactggttttgatatatctgatgatgaccgaaagtacatgagtaaatgccacattgctgtatcatcctgcatctttggaaattctgatcgactgaggactccatttggcaaaacgattacaagcctctcaaagaagacagtttgctttgctatgtttttggatgaagtgacattgcacactttagaatctgaaggccagaaaatggacagcatgggtttcattggcatatggaagatcatattgattaagaacatgccttataatgacatgcgtagagtggggaaaataccaaagtttttggcacacaggctattcccatcatcgaggttctcaatctggttagacagcaaactgagactacaaactgatcctatccttatcctggagtatttcctctggcggcatggctatgaatatgctatttccaatcactatgatcggcattgtgtttgggaggaagtagcacaaaataaaaagctgaacaagttcaaccatacaataattgaccagcaatttgagttttaccaagcagacggactgacaaggttcaacccgtcggatcccaacaagcttctaccaagctgtatgctctgttacctgctagtattgatctactatatgagttctgttgatctaacaatttacgttttctgcagatgtccccgaaggctcttttatcgtgagagaacacacaccaatgtccaacttattctcttgcctgtggtacaatgaggttgatcgtttcacgcctcgtgaccagctcagctttgcatatacgtacctaaaactaagaaggataaaccctgacagaccgttccgactcaatatgtttaaggattgtgagaggcgatcgatagcgaagctattccatcatcgatcagaagagagtcacagtggtgcacaactaacaagatgacacatccttcttggtgatggggggcagaagagggagagatcagggattgtattttttatacagctcagcagtcagctatgcacaagatccattgaaatttatacccctgtcgaagagttcatactttatataatgcaagtcatctttacccttgttactctctagtgctgcagaccagttcccgcctttcatgttttgcagttgacaaaggcagattaggaggttctagttgtttggtttttctttattctccgtaaagctctgtttattctttggataatatgggaaagttgtggctgggcatggacttcccagatgtattatt

SEQ ID NO: 16644 - DNA, 1934 bp, Zea Mays
tctgcacaccgccactcgcccacacgttgaaggcacctagcagccgccactcgccgaactgaggaacacgccgggcgacgggatacagcagcagcgcgcccctctctatcctcgacgcgacggcgccctgcagctgcagataaacctgttccaatggccaaacaaaaagagggtgtggacaaaagaactgctaggaagatgatccgatctacggaaggctgtgcaaagagcattactttcgagaggaacaacaaatcagacgctgtgcagcttcacgatctgccgaatgacatcctaggtagcatactatcacggttgacattcagagcatcctcacagatgggccttgtttctcatacctggcggcggctgtggagaagctgttgccggaaactggtcttcaccggtgccaccatgttccaacccggaaataggagcatcaaacatacaaggaccaactttgccatgagagtcaacagtttcttgcgtcagctacgcactcatcctactcttaataagtttgttattaagtttgggctgcgcaggaagcacactcgccatgtcaacagatggattcgcttctgctccgtgtcgcgagcaaggcacatcactattaatttcactcctggagtgaaagattttgtcatgggtccagccaacagcaagtacatcttccccctgaacgttttcagtggtccagaaggctcctctacacatgtcagaactcttcatctgggctatgtctgtctggacacaacctcgtctgatttcatgatctttgcaaatcttaagaagctcactctgcacaaaatttcctttttgggagacctccagtgcctgatgctgccagaatgcaattctcttgagtgtctgagcatcagcttctgttccttgcctggtttaagcacatgccacccactgcaacgtctgcgatgtgttcgtttgcactactgctatctaaaaaagattgagctggaagctccaaatctaacatcgtttgacttgaccaaccaaccaattccatttgtgcttggtggacctctgaagttaatggaagccaacattaaactgttagctaaggactcaccttatggtgataatctggactacatctacactgagcttcctgctgcgctgtctcatgtgcataaactctcgataacctcggatctcttcatttatgatcagctgcaagggttttccaaaacctcagccagatttatcaatctgaggcatctgaccatgtatttgcctctttatggggaacctaagtcaattagtgggattcttcgcttggcctacctactggaattggccccagctctagaagaattggaattgcatgtgagtggcttactaactctataatctgttatagattttctcaaggtgaatggcggtgacgtggatgttgggtgggcactcagagggaatatgttaccgtactcacacaataggctcaagagggtccttatttcaggagccagtgtatgggaggggctaatggagctggcatactacatttttcggagtgccaatagactcgaaagtatggtcttagatccaaagataaggattggggctcctcagctggatggttggatgattgatattggtagggagacgatcaaaaagctttttgagggagaggagtttcagagcattattactattctgtaagaatggtaagataggccacaggattttagtggtcacaccaagtggccatgtttgattatgccataggtttgaccagtatgctaaaaaatgtttgttgttttcatttccgaccttaggaaatgtaaattaagaccctgttccaatctcgcgagataaactttagcagtttttttagctacttttagtcatttgtaatctaaacagtagagctaatggtggtaattgaaactaaattttagcatttcaattcatat

SEQ ID NO: 16645 - DNA, 617 bp, Zea Mays
tcgcgctctcccggtctcctctcccccgagcatcccaaaaaatactcggccactgcgctatctcgcccaccaagccagcaccagcagcggcgcgcgatggccaccgcgccctacgcctcctccctcttcctggcttcctcccccatctccaccgcgccacgaatccgcgccgggccctgccctccgtccgcccagccatccctgcggctccggccgaggccgtccccggcagccgcggccgccgtccaggcggagcaccagcccgcgttgaccgcggcgccgaagccacccgcgctaccgttccgcgtgggccacggcttcgacctccaccgcctggagcccgacctcccgctcatcatcggcggcatcaacatcccccacgaccgcggctgcgaggctcactctgacggcgacgtgctgctgcactgcgtggtggacgcgattctcggcgcgctggggctgccagacatcggccagattttcccggactccgacccccgttggaagggcgccgattcttcggtgttcatgagggaagctaaaacaattgcttctattttagcattgaagtgcctgaagtctcaatatgcaacactttaagctcctaggattgccat

SEQ ID NO: 16646 - DNA, 2806 bp, Zea Mays
atggttagaggtggcttaagccagcacgatggctgcacacccactggttcgggcctgcgcctccaccgtgcccgcgaggttcgtgacctgacgcagccgccgatcgagttaatggacgccgaggctggcgtcgccggcgccgaccagctgccgcggaggcagtactacatgaatctattgcttttggcttaccagagctttggtgttgtttacggtgacctaagcacatcgcctctttacgtttataaaagcacattctctggaaagctcaatcagtaccaagatgaggagacagtgttcggtgtgctttccctcatcttctggaccttcactctgattcctttgctgaagtatgtcactattgtgctgagtgctgatgataacggtgaaggcggaccatttgctctctattcgcttctttgcaggcatacaaaactcagcttgctgccaaatcaacaagcagctgatgaggaactatcttcatactacagaaatgggtttgcacctagcaatggatcttcaccttggttaagaaggtttctggagaagcacaaaaaaatgagagttgtgcttcttctcatagttctctgtggcgctagcatggtgattggtgatggtgtcctcaccccagcaatctcagtcctctcatctatgtctggattacaagttcgagctactggtttaaagcatagttctgtagttctcctttcgtgcattgtgttggttggtctatttgccttgcaacaccgaggtactcagaaggttgcattcgtgtttgcacccattgtcatcatctggctgctttccattggaggaattggtttatacaacattcttcattggaatccaaatatatatcaagctctctctccatattatatggttaagttctttagaaagacaggtaaagatggttggattgctttaggagggatccttctttctatgacaggcagtgaagcaatgtttgctgaccttggtcactttacgagtgcatctgtcagggttgcctttattactgtcatatacccatgccttatactacaatatatgggtcatgctgcatttctgtcaaagaacacatttcacatgccgacaggtttttatgatactatcccagaacctgtgttttggcctgtattcgtggtggccacactcgctgcagttgttggtagccaagctgttatttcagcaacattctccattgtgaaacaatgccatgctttgggatgtttcccacgagtgaaggttgttcacacatcgaggtggatctatgggcagatatatattccagaaataaattggattcttatggttctttgtgttgctgtcactattgcatttcgtgatactactcttatcggcaatgcctacggtattgcctgcatgactgttatgtttgttactacattcttgatggcattgataatcatctttgtttggcaaaggaacataatatttgccctagtttttctggttttctttggatccattgaagctgtatatctttcgtcatctctcatgaaggttactcagggaggatgggttcctcttgtgcttgctttcatattcatgtcagtcatgtacatttggcactatgggttaaggaggaagtaccagtttgacctacagaacaaagtatcaatgaggtccatcttatctctcggtccaagccttggcatagttcgggttcctggtattggattgatttacacggagctggtcactggtgtaccctccattttctcacattttgtcactaatctccctgccttccatgaagtcctggtcttcctttgtgtgaaatcagtgccagtgccgtatgtttcaccggacgagcgataccttgtgggtaggattggacctaaagaatatcggatgtaccgttgcatcgttagatatggttacaaagatgtgcagcgggacgatgacaattttgagaacatgttagttatgaacattgcaaagtttattatgatggaagctgaggatgcatcttcttcagcaagttatgatgtctctaatgaaggaaggatggcggtcataacaaccaccgatgcctctggcagtccattggccatgagagatttcgacggcctagccgactccatgactatgaggagcagcaaatcagaaacccttcgaagtttgcaatcctcctacgagcaagaatcccctagtgtaagccggcgccgccgtgttcgctttgaggtaccagaggaggatggcatgggccggcaagtgaaagaagaactcatggcgctggtggaagcgaaacatgctggggtggcatacatcatgggccattcttatatcaaagctaggaggagctcaagtttcctgaagaagtttgctattgatgttggctactctttcctccggaagaactgcagaggtccatcagttacgctgcacattccacacattagtctgatagaagtgggcatgatctactatgtttagcctaatgcccatggccaaagttgacatgtggatacccggctgggacaattctgttttcccttcagtcctatctggcagcttgtgctttctgggccaaggatcctcgtgcgcttaagtttcagcttgtagagaagaaggcagactttccttgttaatattattttttagcctaaataaacaagcagaatgttgccggttatgtttctcatttggtatatttgcatgcatgctctgtaattttttctgcgggctatgtgatggaaatatatgcactccttataaactggtcagcgttcctctctctctctcgagcaggcatgaacctgtatttatttcattaaag

SEQ ID NO: 16647 - DNA, 2498 bp, Zea Mays
ggccttcaaaacattctgactttctgatgagacggttaaaagatcaatctccgagacgacgcttgaacgtgtgtcgggattgcttggatctctttctattcttccacaaaaggaacagcccaaaggaactatacgtagacaaagcagcatgatggatgtcaaattaaggagttctgagagtatgagcaacttaacaaagctcagaagaaatgcatctacttcctctgatatgagtagcatggcttcgcaaggaccttcaactagtacagctcctcttaggcggtcaagcagttggacttttgatgagaaaattttagtgcaagcattgtacaaggttctgctttcagtgtcaaagaagtacccagttgtactctatataagagatgttgagaagttccttcacaagtccccaaaaatgtatctcctgtttgagaaactactaaacaagcttgaaggtccagtgttaatcctcggatcaaggattgtagatatgaacagtgatgaggaatcggatgacagattgactgttctgttcccatataatatagaaatcaagccacctgaaaatgaaaaccaccttgtaagttggaactcccaattagaagaagacatgaagatgattcagtttcaagataaccgaaatcatattatggaagtgcttgcagaaaatgatcttgaatgtgatgatttaggttcgatttgcctatctgatactatgtgccttagcaagtatatagaggaaattgtggtgtctgcagtttcgtatcacttgatgaataacaaagatccagagtatcgaaatgggaaattagttctatccacaaagagcttgtcccatgcattggaaatttttcaaggcaacaagataagtgataaggacagcatgaaattggaagcgacagatgacgccttaaaggctgctgaaaaggcaactgctccaaccactgcaaaatcagaaacaaaatcagcaacatcactgccacctgctcgggctccggctgctgctgctgctgctcccgctagtgcccctgctcctagaattgagagcaaaacagaacttgaaaagaaggataatccacctccagttgcaaaagcaccggaagtaacacccgataatgagtttgaaaagcgtattagaccagaagtgatacctgctaatgaaattggagtttcatttgatgatattggtgccttggatgatatcaaagaatcccttcaagagcttgtcatgcttcctctaagacggcctgacctcttcaaaggcggtcttcttaaaccctgcagaggtatattactttttggtcctccaggaacaggcaagactatgcttgccaaggctatagcaaatgaagctcaagcaagttttataaatgtctctatgtcaactatcacatcgaagtggtttggtgaagacgaaaagaatgtccgagcattgttcacgttagcggctaaagtatcaccaaccatcattttcgtcgatgaagttgatagcatgcttgggcagcggaacagagctggagagcatgaggcaatgaggaagatcaagaatgaatttatgacacactgggatggcctcttgtcaagaccggatcagagaattcttgttcttgctgcaaccaaccggcctttcgatcttgatgaggctataatccgtaggttcgagcgaagaatcatggtaggtctgccatcgatgggaagtcgggaactcataatgcggcgacttctgtcaaaggagaaagttgatgaagggctggacttcaaggagctagcaaccatgacagaaggatatagtggaagtgatctcaagaacctgtgcacgacggcagcgtatcgccctgtgagagagctaatccagaaggaaagaaagaaggagctggagaagctgaagtgtgagaaaggagaaactccgtcggatcctccgaagaaggaaaaggaggagaccatcattctaaggccgctgaacatgacagatctgaaagaagcaaagaaccaggtggctgcaagtttcgctgctgaaggcgccataatgagcgagctgaggcaatggaacgagttgtacggtgaaggcggctccagaaagaagcagcagttgacatacttcctctgagcaatatgaaaatcaggcgcaaaaatgtatgaacataatttgagaagtagagtagagcacaaagcagccatgaggaaatagaccgaacatgtaatcgtgtataagaagaacatgagaaaagggtgcgtgttagggggacaaggacaagaaatcaggccgtaaaagccagtatctggtgtaggacaaggaaggacagttttcatctccaccaaaattccagtttgcctgtgctggttgttgttgtattacactaataatggatctgcggtgtagatcgctcttctcttcatcttttcctggtcgcatcatccttctgtatatgtacaaactggtaggttgtggcaacgaaaggtttttaaagcagcttatatatatcttctccaagactcca

SEQ ID NO: 16648 - DNA, 246 bp, Zea Mays
cgaaaacgaaggttaacacctatgtatatttcatgaagaaatatcaaagaaagatgtatggatggagtaagtaataggaccttctttccaaaggtccatggttatatgaccgatgaaaatgggcatgaaccacatcattccttacaagtgaaaatcgacaaaacgaacttcattgatctagtaatagaaacaaaagcaacaaaggatttcataagtatccaaacattggaaaatcaaatgaacaag

SEQ ID NO: 16649 - DNA, 3222 bp, Zea Mays
cacgggcctgcctaaacgctgcaaccctgtctttccttcttccatttccacaagacccttgcgtgctctctctctctcctcttggcgacgactgggtggcaggtgcccaggtcttcttgggacccttcgccggcgacaagcaccaccaggttcagtcatgagtgggcttctcatgagcttccctaagtgatgcttcatatgttttctaacatgtaacatctcccgatgttatccatgtactggatatatccttagaagtcagagatgcagaagtctgatcatcatgagcagaagctaacttcaccaagaggaaacaagcaactcatcaatattctcaaagcaaaaggatgttgatgatgccatcaaggattcagaaaagctgagcacacatactatcagaattgaagatgagaaatctgatttgctagggtctgaaatttattctggaaagcttacattagataacaaaacaaaaagttcatcaaatgaacagtctggatcaggatctagtagcaattgctttgatgctaggctcagcactgaagccctaatatggggttctaacatccttaagcttgaggatattgtatctgtatcatataattctggtctccggtatttcaccgtgcatgcttgtcctcttgaaaaaatatccagtggactatcctgctttatgaagcctagaagaacccaaacggacttgaagttcgtatcctcttctccgcacgaggcctttcggtgggttaatagttttgcggaccagcaatgttacgtaaacctgttgcctcaccccatggcatctagcaagaagcattcttctgaactcattcagtttgatgccatgtttgatccttatgttaaatgtcggtctccaccaaagatacttgtcatcttgaatcctcgatctggacatggtagatctagcaaagtttttcatggaaaagtggaacccatatttaagcttgcaggtttcaagatggaagtggtaaaaactacacatgctgggcatgcaaaatctcttgtatcaactattgattttagtacctgtcctgatggtattgtatgtgtgggtggtgatggaattgtaaatgaggtcctcaatggtcttctatgcagagatgatcaaaatatgtctgcctctgtaccaataggtataatacctgctgggtctgataactcacttatttggacagtcttgggtgtcaaggatccaatttctgcagcattgtcaattgtcaggggaggtcttacacctattgatgttttttctgttgaatggattcaaagtgggactatgcattatggtacaaccgtatcatattttggttttgttagcgatgttcttgagctctcagagaagtatcagaagcattttggtcctttacgatactttgtagctggttttctcaaattcctgtgtttgccaaagtacagttttgaattggaatatcttccagtatcagatgttaatggcgccgagcataaaattttggtaggacaagaaaaggttgacgcgtctgatctatatgatgatgtaattcggagatcaagagcagaatgtttaccacgcgcctcaagtttatctagcattgattcaataatgtctacaggcatcatgtctggggcagagctggaggtttgtagtcctcgtgcaaataatgaaccttctgaggttgttcgtggacttgatccgaaatcaaagcgcttatcgttaggaagagctagtacatttaaagaaccagaagaagtgctccatccccactcccatggtacatctactcccagctggcgtagatctaagtcaaaatcaaggactgaaaaggcaaagccaggcttgtctgctacacacgatgcaaaatcttctaaggttaatgcagacaaagaggacacatcatccacaatttctgatcctggacctgtggctgtatgggattcaggaccaaagtgggacgatgaacctaaatgggataatcaacctaactgggaacccgagacttcaattgagctccatagccctcgcgaggatattgagcttggtctgactaaggagctggtacctagtttagatgaaaggtggacagttaggaaaggacgctatcttggtgtactggtgtgcaaccattcatgcaagactgtgcagagtctgagctctcaggttgttgctcccaaggctgaatatgatgacaattgtttggacctgctgttagttggtggaagtggaagactgagattactgaggtttttggtgcttttgcagtttggaaagcacatatctcttccaaatgtagaatatgtaaaggtgaaatctgtgaggctcaaagcaggcccaaatacacacgacggatgtggtatcgatggcgaactactccatgtcaaggggcaagttcgctgtagtttgttgcctcaacaatgtcaattgatgggcaggccagtgaaaaaccctgtacagtagctgtaaatacactatgcggactgtctgcagctctgaggtcagcccagaatcttgcacctgtggtgtgtacaagcggcgaaccatggattttcgtctgcatccacatgtcagtaattatattcagaagtgagaacatgaacatcctagctggcactcagctccagagatgtacatttgtggttgacgagcagaaggtgctgagtgggtgctgtttcatccatatgtaaagccaaagcctatctcggacagcagcttgttgcgcacctcttgcttttgcctttttctcgtccgatagaatgcatctactatacagccatcctgatgagtgtacttggttgctccagaacatagtgtccacctccaccagccgggtgtctttggaggttccctgatgccggccacttgatactcattgtagggacaacaccccagtgcccgtgtccttgatcagtctgttgtgtttgcgaagtgtgaataagatataggactgtttgattcccggtacagcgcagggtttcagcagaaagggctggatggatgatgttttgtggcgatgctgcctcgttgagtctttaaaacgggtgtaactcttcttcttttgtgagtcgtgatgatgtatgaaccgtgtactgatttgtaaaccttgcctggcaggcatacaactgtttctgaggtgtggtattctctgccggggaataagcagcgtagcttctcctttcgtacgctgccagcaaagcagcgctcgtgctagtatgaacaacttacaccag

SEQ ID NO: 16650 - DNA, 1457 bp, Zea Mays
tgctgaagcaaaaaaaaactctatctgcattataccacaagcagtgatggccacggcacaagtattgttccatcgcttttactgcaagaaatcatttgttcgatttagtgcaaagagagttgctgctagctgtgtttggctggcagggaagttggaggagagtcccaggaaatcaaggcatattatatttgtcttccacagaatggaatgtaggagagaaaacttgccaattgaatttttagatgttttttcaaagaaatattcggaactgaggcatgacctgatacggacagaacggcatctgttgaaggagatggggtttatttgccatgtcgagcacccccataagttcatatcaaactaccttgcaacacttgaagcccctcctgagcttactcaagaggcatggaaccttgccaatgatagcttaaggacaactctgtgtgtgcgatttaagagtgaagtagtagcatgcggagttgtgtatgctgcagctaggagacaccgggttccccttcctgaagatcctccgtggtggactgtctttgatgctgatgaagcaggaattcaggaagtttgcagggttcttgctcacctctacagcttgcccaaggcccaatacattccagtatataaagacaacgattcctttactgttaagagaatctctgatctacaggcttcaaaggaaagtccagcaagggctgttgctagcgataagggtacccctgtaccctcaagttctagccaggagaaggatccagtggctaagactatactgaacaaggtgaaggaaaaaagtgatgacgaaggtaaaccattgcccgctgaatttgatggaaaagaaaacccggtggcaaactcaaaaaatgacaagtctgattctggtgtcgaccggagtcgagaaagagagagatcaagagggcgggaacgtgatgccaggggtagggattctgatcgtgatagcaggggtcgcgagtctgatcgtgagagggaccggagacgctgctctagggaaagaagttcaggacactcagacaaggagaaatcaaggcgccattcatcacgcgaccgggctgactactacaattcgcattcatctcgtgagaaagatcggcataggcaccattgatcaaggtgacgaggatccccggtctgcagggcttcgctgcatggagaccaccacttggcagtgccgaccggatcatgaaaacttgtggattatcatcccactggtggttgtattggcttgattgtgttttgcaccttggattgtaacttgcaagatacgctagccatgagctgtgtgcaacttgaatttataaacacaacatataagatacaattgacgcacgtgcactaactgccattccagcagagcttgtggaatgttataaagaaacagtttgtggaatgttggcactgttagacctagtttggtgactagggaaacgaag

SEQ ID NO: 16651 - DNA, 2446 bp, Zea Mays
ttgtacattcattacgagttttttaggttgtgcgtgaaaatcaagtggttgtggttgttggtgaaactggttctgggaagactactcaactgactcagtatctgcatgaggatggatatactaccacaggagttgttggttgtacccaaccaaggcgtgtggctgccatgagtgttgctaagcgagtcagcgaggaaatggagactgatctgggagataaagtcggatatgccatacggtttgaggatgtcactggtccaaacactataataaagtatatgacagatggagtgcttctccgtgaaaccttgaaagatgctgacctcgacaaatatcgtgttgttgtcatggatgaagcacatgaaagatcactcaacactgatgttttgtttggtatactgaagaaggttgttgcacgtagacgggattttaaactaatcgttacatctgcaaccctaaatgctgacaagttctccaagttcttcggaggtgtgcctgtattccatattccgggtcggactttcccagttaacattatgttcagcaaaacaccatgtgaggactatgtggaagctgcagtgaagcaggccatgactatccacataaccagcggccttggtgatatcctaatcttcatgactgggcaggaagaaattgaggctacctgctatgcgcttgctgaacgcatggaacagttaatatcgtcatccaccaagactatccccaagctagagattctgcccatctactcacagttgcctgctgacttgcaagccaagatttttcagaaggctgaagagggcgctcgcaagtgtattgttgctaccaatattgctgagacctcattaacagttgatggtatcttctatgtcattgataccgggtatgggaagatgaaggtgtacaacccgcggatgggtatggacgccctccaggttttcccagtcagccgggcagctgccgaccagcgtgcaggtcgggcaggaagaactggccctggcacatgctacagattgttcacagaatcagcctaccagaatgagatgctccctaaccctgtgccagagatccaaaggactaacctggggaatgtggtgcttttactgaaatccctcagagttgaaaacttgctcgactttgactttatggacccaccgccccaggagaatatcctcaactcaatgtaccaactctgggtgttaggtgcattgaacaatgttggtggccttacagaaattggctggaagatggtggagttcccgttggatccaactctggcaaaaatgcttcttatgggggagcagctagagtgccttgatgaggtgctgaccattgtatccatgctatcagtgccgtcagtcttcttccggccaaaagaccgagcagaggagagtgacgcagcaagggagaaattctttgtcccagagtctgaccacctgacactcctgaacgtgtatcttcagtggaagtcgaatcagtatcgaggcgattggtgcaacgaccacttcctccatgtcaagggtctccgcaaggctcgtgaggtgagatctcagctgctggacatactgaaaaccctgaagatccccctgacatcatgccatatggaatgggacgtggtgaggaaggctatctgctctgcgtacttccacaattccgcccggttgaagggtattggggagtacgtcaactgccggaatgggatgccgtgccacctgcaccccagcagtgcgctatatggccttggctacactcctgactatgtcgtctaccatgagcttgtcctgaccaccaaggagtacatgcagtgcgtcaccgcagttgatccacagtggctagcggagatggggcccatgttcttctctgtgaaggagacagacacctctcttcttgaccacaagaagaggcagaaggaagagaagacggcgatggaggaggagatggagaagctgaggcggcagcaagcagaggccgcgcgcatggagaaggagaaggaacgggagaagagagctaagcagcagcaacaggttgctatgcccggcctgaagaagggtgcgacttatctgaggcccaagagaatgggtctgtagataagacctgatataacttaactgtctccggtgattttgttactaggctgagggaacttgtaatgtgtagcctgctcaagcagcatgtaaaacaacacgtcaatgtgaatgtatacaacatcgacatgtgaaaaaatgaaaagaaaaatagagtgttgtcgacatagagtttgattttttgctgagttagctcttaaaagtatgcagtcattatgtttgatatggtatgtcctcttaatgaaaaatatgattcttgaaggtctatgaattctgcaggcaagctaaattagctcttaaaacatttcaagaaacaacgtgaccctgaatggactcaaccaatcgtccattgctgattagag

SEQ ID NO: 16652 - DNA, 1981 bp, Zea Mays
tccacgtccacgggtcaatgcacgacataatcgtatcggtccgctgtatcacaagggctggtaccacctcttctaccagtggaacccggactccgcggtatggggcaacatcacctggggccacgccgtctcgcgcgacctcctccactggctgcacctaccgctggccatggtgcccgatcacccgtacgacgccaacggcgtctggtccgggtcggcgacgcgcctgcccgacggccggatcgtcatgctctacacgggctccacggcggagtcgtcggcgcaggtgcagaacctcgcggagccggccgacgcgtccgacccgctgctgcgggagtgggtcaagtcggacgccaacccggtgctggtgccgccgccgggcatcgggccgacggacttccgcgacccgacgacggcgtggcggacgcccggcaacgacacgccggcgtggcgggtcgccatcgggtccaaggaccgggaccacgcgggcttggcgctggtgtaccggacggaggacttcgtgcggtacgacccggcgccggcgctgatgcacgccgtgccgggcacgggcatgtgggagtgcgtggacttctacccggtggccgcgggatcaggcgccgcggcggacagcggggacgggctggagacgtccgcggcgccggggcccggggtgaagcacgtgctcaaggccagcctcgacgacgacaagcacgactactacgcgatcggcacctacgacccggcgacggacacctggacccccgacagcgcggaggacgacgtcggcatcggcctccggtacgactacggaaagtactacgcgtccaagaccttctacgaccccgtccttcgccggcgggtgctctgggggtgggtcggcgagaccgacagcgagcgcgcggacatcctcaagggctgggcatccgtgcagtcaatccccaggacggtcctcctggacacgaagacgggcagcaacctgctccagtggccggtggtggaggtggagaacctccggatgagcggcaagagcttcgacggcgtcgcgctggaccgcggatccgtcgtgcccctcgacgtcggcaaggcgacgcagttggacatcgaggctgtgttcgaggtggacgcgtcggacgcggcggccgtgacggaggccgacgtgacgttcaactgcagcaccagcgctggcgcggcgggccggggcctgctcggcccgttcggccttctcgtgctggcggacgacgacttgtccgagcagaccgccgtgtacttctacctgctcaagggcacggacggcagcctccaaactttcttctgccaagacgagctcagggcatccaaggcgaacgatctggttaagagagtatacgggagcttggtccctgtgctagatggggagaatctctcggtcagaatactggttgaccactccatcgtggagagctttgctcaaggcgggaggacgtgcatcacgtcgcgagtgtaccccacacgagccatctacgactccgcccgcgtcttcctcttcaacaacgccacacatgctcacgtcaaagcaaaatccgtcaagatctggcagctcaactccgcctacatccggccatatccggcaacgacgacttctctatgactaaattaagtgacggacagataggcgatattgcatacttgcatcatgaactcatttgtacaacagtgattgtttaatttatttgctgccttccttatccttcttgtgaaactatatggtacacacatgtatcattaggtctagtagtgttgttgcaaagacacttagacaccagaggttccaggagtatcagagataaggtgataagaggagcagggagcaggtatcgtaaagtatgtctataaagtagtgccatcaaaatctagtacaactgatttttatcgggtcatagtgtgcgctataccgtcctgactaatcattgattgttgcatataaataacaaagagattacgg

SEQ ID NO: 16653 - DNA, 1277 bp, Zea Mays
aggccacttaactatatgtagaaacatcatggtcataagggattttaggcatatttgaacaggctcggcctgggtctcaggtacatttgctcatgtggtgaagagtcaaaatctgttgtctccttatttaatgattatttgaagggctggaacaagattcaaccagggttgccaaaaccacgcttgtttactgtgggtcgtcttgatgttgccacggctggtctgataatagtcacaaatgatggtgagtttgctcaaaagcttgcacatccttcttcaaatgtaacaaaagaatatgtggtgactattgatggtgccgtgcacaaaaaacatctcatagctatcagtgaaggcacaaaaattgatggggtcatgtgcattcctgatttagtagaaccattggctgcccaatcagatacaagaaagacccgcctaaggatagtggttcatgaaggacggaatcatgaagttcgtgaacttgtacagaatgcagggctacaggtttatgcattgaaacgtgttcggataggcaggttcaggcttccagcagatctgggaattgggaagtttgttgagctcaaacaggctgatatcaaggcactagatggcaacaactagagatgacatctgatgtggctaataagcgcatcttgtccaaagatggtagtaatcctcaaagtcacaatacatgagctgctactcaactcagaaagcttgtgaatgttctggatgtccattggtggtggtggctgatgatcaagtgtggcaaacatgttttgccttgaagaacttgtgaactactccatacttcgcctgcgctgcgaatctccacatcatatcaaacggcagaaccaagtccgcgatgcagcagtcgtttggtgaggatggaacattgtcaaatagcgatcttctgttggcatatacattttactctctattctaaattataatttttttagatgcattgtttttactaaattaaaatatcttatagtttagaatgcatcttgtccaacaggtagtcaataatggcagacgagttatatttggccaaattacattgtactccgtgtaccgagaactgtttttttaagaatcctttattgaccaggaatttttttcttgtaattgtggcactgttatttctatagtcatgagaatcccttcatttttagggctagtttgggaaccctattttaccgagggatttttatttttctaagggctactttagtaacatcaaatctccttcgggattggaagggattggggtagaa

SEQ ID NO: 16654 - DNA, 2889 bp, Zea Mays
cgttgatccgcgtgccgtgtcaccttcgccgcgtggtccggaccagtgattgatcctgctaaatgtcgattgatgagtgtggatgaaaagcgagaactcgttcgtgatttatcaaagagcccagaaagtgctcctgacaggctccagtcatggacccggcgagaaattgtagagattctttgttctgatcttggaagggagaggaaatatactggtttatccaagcagagaatgctagattatctatttaggttggtgtctggaaaatcatctggtccagtggaacatgtgcaagagaaagagaaagggagagagaaagggaaagagagagaaaaagaatcaattcctgagcccaatacaactaaccaccatcagtcccctgccaaacgaccaagaaagagtgataacccatcacgattaccgattatcacaaacaactcagcagcatctgatgtaactgggccaactaataattcacggttctgtcaaaatgtagcttgcagagctattctcagggacaatttttgcagacgctgttcatgctgcatttgtttcagttatgatgataacaaggacccaagcctctggttgtcctgtagttcagaccaacacttacaaaaggatacctgtggtttctcatgccatcttgaatgtgctctaaaggatgaaagaacaggtattctgcagagtggacaatgcaagaaacttgatggtggctattattgcactcgctgttggaaacagaatgatttgcttgggtcctggaagaaacaactggtgatagcaaaagatgctcggcgattggatgtgttgtgtcatcggatttatctcagtcacaagatcctcgtctccacagaaaagtacttggtattgcatgagattgttgatacagcattgaagaaactggaggctgaggtcggtcctatatctggagctccaaatatgagtcgtggaattgtcagtcgacttactgttggtgccgaagttcagaaactttgtgctcaagcaatagatgctatggaatcattgttctcgggtgtatctcctgctggttcaagaatcccgcgaccatgtatggtaccaccaaattttgtgaagtttgaagctataacccaaacatctgtcatggtatttttggatttggttcactatcctatgcttgcccaagaggcaacttcatttaatatatggcaccgaatggctgttactgaagcttacctgacaaatccgactggcataatacttcccccatcgaaaaaattacctgtcactgggcttgcaccggctacaagctatatctttaagattattgctttcaaaaactcaatcgagttgggttcatgggaaattagaacgaagacaagctatcaaaaggatgatccaaggggttcaatgccaggtggtactagactaggacataatagtgagagcctgaaggcaaacagtgatggccagtctgatccttcctcagagggtgtggactcaaacaataatactgctgtttatgctgatctaaacaagtcccctgaaagtgattttgagtactgtgaaaatcctgagatcctagattcagataaagcgtctcgtcgcctcagcgaacacatcgatgacttgcaaaatatacagatggctgcagatagggtaacagaagtcactgagctggaagaatcgcctgggctctcagcctcagccttggatgaggaacccaacgcttgtgttcaagcagtgcttctcagggagccaaacccactaggacacaatcaaagaactgtagttcctagatcacagcatgcatctaatgtactgggtggaaatgagttggtgattgttggacctcgatatgctggttctgtgccacccattgcaacaagaggtctggaaaacagcaaggagagcggtggaaggggcttcaaacccaaaccttgtaacaacattttccaaaatggctcttcaaagcctgaaagggaaccgggcaattcgtcaaacaaaagaacagctggtaaaacggaggaccttggtcacaaggatagttcatctgaagtgtcctacgagtactgtgtaagggtggtcaggtggctggagtgcgagggctacatcgagacaaacttcagggtgaagtttctcacatggtttagcctgcgtgccaccccgcaggagagaaagatagtcggtgtctatgtggatacccttattgaggaccctgtcagcctttctggccagctcgttgacagcttctcggaggcggtatatagcaaaaagcggacgccttctggtttctgcatggacctgtggcattgaagcaccacaagcacctaccgtttgctttgtagggagcacacattcgggcccattcttttgttgcagatcgttgcattgattcttcattggaaatttcgctgaagtatttgacttgcacatcttcattgaaacttaacttttcaatgacagtaggttaagttaatgggcaatttctttttttctttttccgttctttacatttgctccatagtaggttaccgtgctatcatctgtaccgtccatgttaaccttagagcatcaatgagccgcatcgttcggtcagcctggggcatagtggattttgtggcgtgtggctgctcgaaggatgattgtcaggctggaccaggaatgcgcctttctgtgggatgaagcagattcgtatggacgttgtcagtgaaatggttgtgctgtacctggggttttgcattttcttgctgactttgttgggaatgggaggaatgacgtttaagatgcagaatgtctgccttattaattaatcttatgttgactcatacttctctatcaactgcgtttatggttcgctggtgttctgtctgagggcctccggttttgtgttgcgcctgtttgaat

SEQ ID NO: 16655 - DNA, 1945 bp, Zea Mays
gaaaaccagttctggcccagaccattaccaggttcctataaaatggccaaaaagtcgtgatgtagtgtggaaagcaaacattccacacactcaccttgcaaaagagaagtcagaccagaactggatggttgaagctggtgaaaagatcaagtttccaggtggtggaacccattttcaccatggagctgacaaatatatatcaaatattgcaaatatgctaaatttcaaggataacaatataaacaatgatgggatgcttcgtacagttcttgatgttggttgtggagttgctagttttggaggatatcttctttcttctaatgtgatagcaatgtctttggcaccaaatgatgtgcatcagaatcagattcagtttgcactcgaaagagggatccctgcatatcttggtgttttgggaacaaaaaggcttccgtacccaagtagatcatttgaactagcccattgttcacgttgtaggatcgattggcttcaaagagatgggattcttctgcttgaactagatagattgctcaggcctggaggttattttgcttactcctctcctgaagcatatgcacaggatgaggaggatctccgaatctggaaagaaatgagtgcccttgtagaaaggatgtgctggaaaatcgcagagaaaagaaaccaaactgttatttgggtgaaacctctggacaatgattgttacaagaggcgagcacatggtacaaagccacctctatgcaaaagtggcaatgatccagattcagtatggggagttccaatggaagcttgcattactccgtatcctgaacaaatgcacagagatgggggaactgggctagctccctggcctgcccgattgacagccccgcctccccgtcttgctgatttgtacattactgctgacacatttgaaaaggacacggaaatgtggcagcaaagagtagaaaactattggagtttgctgggcccaaaggtaaaaccagacactattagaaacatcatggacatgaaggcaaactttgggtcatttgctgctgcactcaaggagaaagacgtatgggtgatgaatgttgtgccacatgatggaccaagcaccctcaagataatctatgatagagggctgataggcagcaatcacgactggtgtgaagccttctcaacctatcctcgaacatacgatcttctccacgcatgggcagtcttttctgaccttgataaaagaggctgcagtgccgaagacctgctccttgaaatggatcgtatcctcaggccgactgggtttgccatcgtgagggacaagggcaccgtcattgagttcatcaagaagtacctccacgcacttcactgggaggcattgactgtcgtggacgctgagcccagcccagaatcagaggagagcgaaatgatcttgataatccggaagaagctgtggctaccaaaagcaggcccgcaggattccggcacgtagttcttctcgtacctgttcctctcccagcacctgcagctcagaagccaggcgcagctgcaccatccaaaatggttcgacacttgtagctcctgagatagagtcagtcatgatttctagccctaccgcccacatgaagataggttgtttacgaggatactgcaagtagtatgtagcaggcttggattaaaaaaaaggcccttttttgtcgcgacagatatggattggtgtttgttatctagtttggttaggaaataaacattctttttcttttaggtgtttcgtgtcctttttttttgaagtctgctatagtctgtagcaagtgtatttggtgttttcttgaaagaactactgcgctcacatttttgggatatgtgctttgccctagagcctcaaggctgcgggtcctcagctcgaaactactcgtgcaaatctcaaccgggagagcacttcaatataaacaggtaattttacagcaca

SEQ ID NO: 16656 - DNA, 1853 bp, Zea Mays
cagaagtggagaaataagatacatagtggaagatgagatcagttgttcggtcacttcgccagctccgccgatttatccagcactatgcagaggggaactcacaagcaaccagattgttcgggctgcagaatgctttaatcatgtgcggatcgacaccccgttcactgagcatgttacgtcgtaatggtgaaattagcagatttgcaagccctggcatggagttgatgaggtccatgttctctaatgtagcggctggttctatcaaagatattggaagaggtggcccgatggtggaatatgagaggagaatagcatcaggagacctagtagatggcgatagctttcaggttgatacaattcaacaattacaagggctctatgaggagttgattgagaatggagaagactgccagctggatagatataagtcatctgagaaatcaggacgtcgatggctatggtcccgcctcattactcagccttctagctttgctccagttaagggcctttacctctatggtggtgttggtacagggaagacgatgcttatggacttgttctatgaacagctgccatctaattggagaaaaaaacgtattcactttcatgatttcatgttgaacgtacatagtcgtcttcagatgcataaaggtgtttcagatccccttgatgttgtagcagctgagatttcagatgaggccatcatattatgtcttgatgagtttatggtaactgatgttgctgatgctatgattctgaaccggctgttcagacaattgttcagcaaaggcattattcttgtttcaacttctaaccgtgctccagataagctttatgaaggtggcttacaacgggaccttttcttgccatttattgacaccttgaaagaaaggtgcatcgtgcaccccattggatctgcggtggactatcgtcaactgggttctgctgaacaaggtttctattttgtcggaaagcattacagtacgcttctgaaacagaagctccagtctttaattggagatgaggaacccagcccacaaactgttgaagtaattatgggaaggaaattacaggtttctctgggagcaaatggctgtgcatattttccttttgaagatctctgtgatagacctttaggtgcagcagattactttggactcttcaaaaaatttcacaccctggcacttgatggtgttccaaagtttgggtctagtaacagaacagcagcttatcggttcgtcacactgattgatgttatgtacgagaacaaagcaaggctgttatgtacagccgaggctggaccagtagaactgtttgagaatatcatgactcttgctgaagcacagaaggtttcaccaagatcttcgcgctcacagaaaagtgacgaccctgacctatgtgtggacaatgagcttggatttgccaaggatcgtacgattagcaggttgacagagatcaacagcagagaatatttggaggacttcgaaatgagattagggcaacagcagctgctgcccttgcaagctctagataatggtggtgatgttgtactagcataataagtagaaggcttctgggcctcatttgaaattcttgtattcgcgcccacctggcttacataggcaactgagaagctatgcttttccaaccgtggtgcatgtaaatgtgcaataaagctatgaaagagtattttttgctaataggtgggtgatctataaaatggctcaatctatagggagacgtgtcaatattgatttttttaattgtgttacatatttccaaacctttagagagacataaaactcaaaaacagcaattatcataactgcagtttaaatccggttgcggcttgc

SEQ ID NO: 16657 - DNA, 837 bp, Zea Mays
aataatataataaagactcgacgtgcgtacgacatggagctgcacctggtgcacgagagctcggcgaacaaggcggcggtgatcggcatgctctacgagatcggcgccgaggacccgttcctgcaagcgctggagccgtccatccaccggatcgccgacaggcaggaccgggaggaggccatcggcgtggtggacccccggcgcgcgcgcggcagggccagcgtctactaccgctacgtgggctccctcaccacgccgccctgcaccgagggggtcatctggaccgtcgtcaagagggtccgcaccgtgtccaggcaccagctggagctgctcagggaagccgtgcacgacggcatggagaagaacgcgaggccggttcaggacgtcaacgacagggacatcagcatcttccgcccaaagccacacaagcactactagtactagctatggtataggttgcacagtccagcagcgcgcgtagttggtatcgatcagtagtgatgcacgagctagctgacgcggttcagtgttggggagaggtgtctgctgtatatggttacggttttgttttataattctttccatctatgttataggacgaaataaacagacgaggatcaccttcaggtccactcttcagaagaagaacaaaaaaaaaaggaaaagagaacatgtcgatgcgcatgtggctcgatcgatttgattattgttgttgagtagttggcactcaaacatgacctatctaactggcacggtcttttgttaaaaaaaatactatgatttgattgtcgtttagcaggacgagtcacatgtgtacagtataagcctatatatatt

SEQ ID NO: 16658 - DNA, 2976 bp, Zea Mays
agcccaggcacacacgactagaaccaggcaaccagctgcggagggaggaaacctagcggaacactgtgcaggtgacggcggcgcgctaccggtgacaggggatacggcggcatcgtcccctcctccatccccggcgcggcggcgccagcagccggcctgcaggcacacaagtggccacccttccaatggcggtggagaagtccagcagcggcacatcaactccctccaccacctccaccatggaccggtttcagaagattgtcctaagctgggattacctccgtctcatcgctgaatccaagggcggcaagcaggccaaggtgctgcagcatgtgaagaacacatacgtctcggtggctgagtaccttggtgtctttgagccactgctctttgaggaggtcaaggcacagatcatccagggacgcagtaacgacgaggaagaatctgggatggactggaggaggggagcagtggggtcgtgcacggagtctgaggggttccacaagctctctgtggcggtggaagacaattttcaggataatgtgtcagagaatgatctactgcttatctccaaggagaaatttgaggagggatcgacccctaatgcatatgcatttgcattagtggagcagcgaggtggtggcatacatatttcacttagaacttttgtggcaggtgaaattcaaaatctgaatgttgcaaagcctgtgaagtctacaaggctgcaacattttgcttccattattgcaagtcaaaacagcttgctgtggatactgaaggtctgcagcttgtctacaataatgcgggagttcacagctatgcattccgtagcttctctaccttttaaggatttgattctttcagctaccgaggcgcacaaggatggtgatgatcaaagtcgtgcgtggaatgtccctgagccacttatggattatctcaaagtgaatcttaatgattcccagctagaagcagttaatgcaggtctttcacgcagatcctttgttcttattcagggccctccaggaacaggaaagacacaaactattcttggactccttagtgccgttctccattctgctcctgcaagaatgcagatcaaaggaggatttgatgttctaaaacatgggccagaactggacattgatggcaagcgtgcacactggataaaggcatctccttggttacttggtgcaaatcctcgagatctgattatgcctgttgatggtgatgatggattttacccaacgggaaatgaactgaaacccgaaatcgtaagttccaatcgcaagtatcgggctcatgtgttggtgtgtgctccatccaactcagcactcgatgagatcgtgttgcgtgttcttaagacaggaattcgagatgaaaataacaacacttataaccctaaaattgtgcgcattggagtgaaggcccttcattctgttaaagcagtttctatggattatcttattcaacaaaaactttctggtgtagatcgcacattagatggtgggagacgaggtgctggtgaatatgatcggattagagcttcaatactggacgaagcagccattgtattttctactctgagtttcagtggatcatcaatttttagcaggatgacccgtgcttttgatgttgttataattgatgaagctgcacaagcggtggaacctgcaactcttattcctttgatccatggctgcagacaaatttttcttgttggtgacccagttcagttgcctgcaactgtcatttcacagactgcacagaagttgggatatggaacgagcttgttcaaaagatttcaagctgccggttttccagtgcaaatgcttaaaatccaatatcgcatgcatccagagattagtacattcccttcaaaagaattttatgaaggggtactacaagatggggagggcctgagcaggaaacgtccatggcattcctacagctgcttcggaccattttgtttctttgacgttgatggcattgaatcccaaccatctggaagtggttcttgggtaaaccaggatgaagtggaattcataactctcctgtaccaccaattggcattgcgctatccagagctcaaatctagtcctgaagtgggtgttatatcaccatacaggcatcaagtaaaactattgaaggacagttttcgatcaacctttggggatcaatcaagggaattgatagatgtaagcacagttgatggattccagggacgtgaaaaagaaatagtcattttttcatgtgtaagatgcaataaggaacaaaagattggctttgtttctgattttcgacgaatgaatgttgccattacaagagcaaaatctgctgtactgaagggcaggcctggtgtagtggttgtaggttctgcttcaacattgaagcaagataaacactggaacaaccttgttgagagtgccaaggagcgaaactgcttattcaaggtccccaagccattgaccgcattctttgcagaggataacctgaagactatgaaggtggaaaggcgtcctccgccagagctgaatgctcgagtactggaagagatcaaccaagaagttgtaaggcaggagctcatgaatgtcgatgatgctgccgaccatgcagacgcaggggacgacgatgatgctgatatggatgctgacgatggaggcggcgatgattgattttaaattgatggggctggagcctggaggttcaccagctccagtatttgtcttcacggattgagttgaggcagtgaagaacgtaagcatgtggataccagctagggaaaacaggcaacagcgttgatccaagcagcgttttacagttacatgcggaaaattgtgtgggttgtatcttacaaacacatattcatctcccaaacacggaaatctctgacttcgaaggagataaacttgtcgtttcaaccagaacgtctctgtgtagtacgaaaataacaaaaaccagctccgtggtgtcatttta

SEQ ID NO: 16659 - DNA, 1391 bp, Zea Mays
tgcataaccaaaggccatgacacaccaacaaaagatgttgctaccctcattcaaagccttgatcaggttttaccagctagaggacaggaggcagttgatattgctctaaaagctgatctggttatcttaaacactgctgttgctggcaagtggcttgaccctgttctgaaagatcatgttcctaaagtccttccgaagattttgtggtggatccatgaaatgcgtgggcattactttaaggttgaatatgtcaaacatcttccctttgttgctggagccatgattgattctcatacaacggctgagtattggaatagcaggactagcgatcgcctgaaaatacagatgccacaaacttatgttgttcacctggggaatagtaaagaactaatggaagttgctgaagacaatgtcgcaagaagagtcctacgggaacatattcgtgaatcccttggagtacggagtgaggatctcctgtttgcaataataaacagtgtatcacgaggaaagggacaagacttatttcttcaagcattttatcaggctttgcagctcatccaacacgagaaacttaaagtgcctagaatacatgctgtagttgtgggaagtgatgttaatgctcagaccaaatttgagactcagttacgtgactttgtggtgaagaacacgattcatgaccgtgtccattttgtgaacaagacattggcagtggccccttacttggcagcaattgatgtgcttgttcagaattctcagggccgtggagaatgctttggaaggataacaattgaagcaatggcattcaagttgccagtattgggcacggctgctggagggaccacggagatcgtcctggacggctcgactggccttctgcatcctgctgggaaggagggcgtggcgcctcttgcaaagaacatcgtcagactcgcaagccacgccgagcagagggtctccatgggggaaaagggctatggcagggtgaaggaaatgttcatggagcaccacatggctgagaggatcgcggcggtgttgaaggatgtcctgaggaaatcacaggagcactccaggtcttgagctttgccgtgcccatcagcttgcgctaacatgttgaactagattttacgggctacgcctacgtggttcaggctgtaaactgtagattgcactctgttggtctactttttcacattcatgttttacctattaggccatgtccgattctattccaattcatataggttctatttcaatccatatagattaagagggattgaggagatttcaatcttagtaagtcaaaatctctttcaatccatatcaatcctttccaatccatatggattgaaaataactgaacgaagcctttagggatagaaccgacgctttga

SEQ ID NO: 16660 - DNA, 327 bp, Zea Mays
accagaaccctcgattcgaggggcggggcacctcgagcggacgctccgcggcgaggtgatcgagcgaactcaccgagcaccaccagcgccgcacccccaacacaccacccggcgggcggcgccgccgcgagatctcgtggccttccacaggcgccggcgcctccgtccgcggcacgaaccccctagggctttcttcctcactactcgcgctgcgcggaggcgatcaggcggaggcggcgatcaggcgaggcggctggagactaagggtttctctctcctctgcccctctcttatctctcccctcgcggtcggctcggtaatggcttc

SEQ ID NO: 16661 - DNA, 2757 bp, Zea Mays
cactgacagattggagcagcagcaaccggcaggcgcggaaggtgcagcggagataagtagtgtgattcaggtttggaccggaccataccaggctgaggcccattaatgatgcaatttgctgggcttctttattttctccgtgcttccatcctcttctccgtcggcggggagaagtgaaatgccgtggagatgggcggcggcggcggcgacgagaaagctcaccgggatctctcagtcgcgagtttcagtagcctttaccggccgtcttctctaccgctcgttcggaagcgactccagtgaaagccgcaagaggtcactgccacggggggtcgtatcgatcggggccatcagccttgctggaggtctcgtgctcagcgccgtcaacgacctcgccatcttcaatggatgcacaacgaaggcaattgagcatgctgctgacaaccctgctgttgtggaagcaattggagtgcctatagtcagaggaccgtggtatgatgcttctcttgaggtgggccatcgacggcggtctgtgtcatgcacattccctgtatctgggccacatgggtcaggatttctccagattaagaggatggtctgctttcgtttctgcggcatcacgactggaagatcctattgctggaggctcatcttgaagcaccatcagatgatgaggaccagagaaagctggttaaggtgaatcttgcaagcagtggccgtggggaagatggcgatccagagagtggttaatcttttgtactgaattccatggtgagtggaagatcgtgtcatctgaatggactccaaatattaaatgacacgtagatctagggaagcagatgttttttgctccaaaaatagcagcagggacggcagcaacctgcaagcacgcgggcaatatgctatttgtggccacattggcccagttttggcgttttggcgggtgcgtatggtcgcaacatgacaaccggatcatttgtgtttgttgttgccgccgctgcttctcccgttgccaagcctccatccaattggatagtcgcttcgtgcggtcccgtcccctcgccggccggcggagctcacggcttgccgctgcattgccatcgtgtcacttgtacacaatccaccaatctgattggattcggggggatgcttgggcaaattcgagaatttgctcaggcattcgttccgattgcggctagctagctgatcgcttaatcactcgacacgggcaaatttgcacggcgacgacgatgggcatcttgtgttgtttccagtcccacaccagcgatcacgctgttgcttcgtccccggctacctcttcgtcctctgccccctcgtcgtgccgaaacaacgatcgccgtgctccccccgagcggcaggcccccggcgaggagaagagcaggaggaggaacgacagcgtcgacaacagcaacctggtcgacctcgtcaacgacatcgtcgccgagtcagtgagctaccgtcacaggcgtgtggccgaggatatcctcaagatggaaaaggcgggcaaggtcacggcgcgcgccttcacgtacgccgagctgtccgaggccacgggcggcttccggccggagtcgctgctgggcgagggcgggttcggccccgtgtacaggggccgcctggggtcgtcgtcgggcccggaggtggccgtcaagcagctggaccgcaacggcatgcagggcacgcgcgagttcctggtggaggctctcatgctcagcctgctcaagcactccaacctggtgacgctgctgggcttctgtaccgacgccgaccaccgcatgctcatctacgagtacatgccgctgggctccctggaggaccacctgctggacctgcccccgggtcgcgcgccgctcgactgggcgacgcgcatgcgtgtcgcgcagggcgccgcgcgcggccttgagtacctgcacgacaccgcgcggccgcccgtgatctaccgcgacttcaaggcctccaacatcctgctcgacaccggcttccgcgcccgcctctccgacttcgggctcgccaaggtcggccccgtcggcgacaagtcccacgtttccacgcgcgtcatgggcacctacggctactgcgccccggagtacgcgctcacgggcaagctcaccaccatgtccgacgtctacagcttcggcgtcgtcttcctcgagatcatcaccggaagccgcgccatcgacaccaccaggccgccagagaagcacaacctcgtcctctgggccgccccacggttcaaggacaagcgacggttcgccgagatggccgacccgctgctcaagggcgcctaccccaccaaaggcctctaccaggcgctcgccatcgcagccatgtgcctccaggaggatgccaccatgcgccccgccatcagcgacgtcgtcaccgcactcgactacctcacggtcgcaggcggaggcgccgctgccaacgaaccaccggctcccaatcccaaccagcagcagcaacaaacagacattatcggccacgccggcgagcaagcgtaacatcatgtctcatcgaaaattgttaattaagcgcagcgtgcattcatacatataatgtgataatgttgcgcgtctcccatcgatcgatgaaaggaggacttgtcataacaaactataacgcgtattgattgttacaaacatacactacaggaaacgcctaaattttcgtgggccaaaaacccacgaaaataagcctaaaccgacgaaaatatagtattttcgtcggcctgccgacgaa

SEQ ID NO: 16662 - DNA, 963 bp, Zea Mays
caagttggatctagaatagcaaaaactatgaaaaacagcaaagattagatacgagttgaaacagatccacaagacaggacccaactgcggctaacagttgcctcgggcgaccaatatttgacattcgagttgaaagagttcatcaaagaacatctggttgatatcccaaggactcaggtcgccccacctcgcgcagcagtccagccacagttgcctactacagcacctgccacatacaatgaccctggtaccatgcttgctggattgctatgagaagtaacccgaaggaatagtgttttgatgtacatgacagttatttaatacgaggatctaacatctccacaagcatcttgctgccaagacgtacacgtggagcaaccaagaaagagctggcggagtgtagtctccatgaggattctaaaccgagaaagagcttagattctttttgtgcggtttgaaggccccctccctctccatgtagcagttgccgtattgtgtaagcgtaacttgttgtttctcattattatcatccccttttggtccatttgtataacctgtatcgcccatgtctggtggtggacaatcggtagtttttgtgtgttaatataaggtgctaggttttcccaccatgccgattgtaaagttgccctggtgcgcattgcactgcgatttgtacggaatagggaaggaaaaatttataggttttgctttgtgcatgttctatggtttgcatagctcccatctcttgatttcctttttcttctgctgctatgtggtggtgtgtgatggttcacgaggctcgattgtataatgtaacctggttggaaccggtgctccttttcttttggagttcccaattcatggatgtacacctgtgtctctctctctcacgcacgactcaatgatggtgcgtgcttggtacgataacaacagctgctagagtagacaggtgatggtgtggac

SEQ ID NO: 16663 - DNA, 1447 bp, Zea Mays
ctttcaccgtggaagagccctcgaccaacaggtccaaccagcagcgagcgaggacctgggcattgttggaatcgcttcctgtctagggtttcacccgcgtgccttatatatcctatcacttcccgcccagccgccatctccgcatttccatcttcccgtgggatcccagccgccgccgcaagaagaagagctcggggacttccaggtgtcgcgagaagatgccgaagcagatccacgagatcaaggatttccttctcaccgcgaggaggaaggatgcccgatcagtgaagatcaagaggagcaaggatgttgtcaagttcaaggtccgctgctccaagtacttgtacaccctctgcgtattcgacgctgagaaggcaaacaagttgaagcaatctctccccccaggtaatcacagctttaattgacatattatttatgttctagtataagaacaccattctggcagtattgtgttgaattaccatccacgctgccgacggtctattcagttatctatttttgttggattgatgccgttttctttgtcttaattagccgttaattagccgtcccagtgaagataaaattttcggtccaaagatggtcgaagaatggttttagcttcaagccagctgacacgtcatcttgattaatgggtggcttgtggctaaaactgttttttagaaccatccatgatggccaataatagctatgagatctgagggacttgtatgatcacttcctttatcagcttccactctgaaccattttgttcttgtttgtgtttcctgtttgatcagtctctgtcccattgaagaaaatattatttgaccatagatgaatggttgattagttttagcttcaagcctctgttgtctctactctttggcatataggcttgtggttaaaaccagtcgactcttaagttcattgatgatgggtaatagctatgagatccgagggacaaaattacctgtgtctttttgatctaatcctaattgtgcttgtatctttggtcatctgttttgtgattacagtttgccttccatttgttgtaagccctgcccaacttgatctgtcaaattttgtctgacatttaacgcacgactccactatgaagttctgacttttttgatgcttaattaatgtcgattgttgcaggcttgagcgtccaggaggtttgattggatacatggcaacgtcgggtcgaacctctagggcatctttatcattagcagagcatgctgtttatgtagttttggaccttaagctattagacatgtcagtgttggatttgtggatcttgaatttttggagaaataccaatttgcctcgttcaaggacgcacctttcagaaaaaaaaaaacaatatgaaaccatccgttctcactgtgttccctatcctgaccaacagcaattgtgaacttggtttaatatgaaattctga

SEQ ID NO: 16664 - DNA, 1521 bp, Zea Mays
tggaattcggttccttgtgggactgagaagaatcagaaaccacccaaatgctcaaagaaatgcaatatacctcgcctttgccgacacaagcttgaatgccggccccacaaatgccactatggagcctgcccaccttgcaagctgatctgcggggaagaatttccatgtgggcacacgtgtaaagaaaggtgtcatggccctatttctcctccaaactccgagttcacactgaaaccgacaaaaaagaaaatgggaaagcacatagaatgtacacctgggacaccgtgcccaccatgcaaagaggtggttttggtgtcatgctttgggcagcatcttggccaagaacgcactatgccatgttgcaaatggaggccttttccctgtgaaaatttatgtgggaatcctctcctttgtggcaaccattattgtacaaaatcttgccatgtgttagaagtcccattgaatcatcctgaaggagatcgtacaacatctatcagtaaagtgaacgcacttgctatgccttgtgaacaatgcaatcttccttgtcaaagggttagggagcctccttgttcacatccttgccctttgccatgtcatctgaacgattgtccttcttgtaaagtccttgttaaaagaccatgccattgtggtgctatggtgcatgcttttgaatgtgtgttttataacaacttaaatgcaaaggatcagattaaaataagatcttgtggtggcccatgtcatagaaagctaccaaattgcccccatctgtgttcagaagtatgtcaccctggtgtatgcccatcggttgatcagtgcatgaaaaaggtcaacacccgttgtgcatgcagcactctgaaacaagagtggcgatgtcaagatgtcctcaaggaataccgtaagtctggccgggatccaaaagaagtacctaaaagtcagtttggagttggcttacttgcctgcggtgaagattgcaagaagaagctgaaggctccagattcagagttgcatctccggaaaagtcaggagaacaagatccctgctgtggaagtcgtaaatgcacccaaacgcaggaagcggcgtgaccgtggacaagaagttaaaatttcgaaattccaggaagtgaagacttttgtgctgagagcgctactgattattttgctgtcaataatcgttgctgctggtctgtacctgttgtggaaaggtattttctggctttctgactggatgaacgaaatggaagagcagagggcgagtcaaaggtatccgaggggtgcaatgttgtaaaataaaacaattactttgagcctaataatcggtattgacatgtggattaattaatggttgttagggattcagttttgcaggatcataaacatgtcaccgttttctcactttttgtcactataaactagaaattgtatgcgtgatgtattgttgtatttttattttgctactctgcattgttaagtgaacaaacgatacaattactacatgattcatcgcttatatctgttaaaatgt

SEQ ID NO: 16665 - DNA, 3276 bp, Zea Mays
cgctgcgagaggggtaaagaacttagaagggcaggcaggagaagcgacacaggaaactgacgtcgccttcggcggcctgctacttaaataaatcccctcgcctcgcctccggctgcctcttccctttttccttccgcgcaaatcactcaggtgccagttgcgcggcggagatcgcgacgaattccggacggcagggaggtggtcgggggaactgggaagtgcatgtgagatccgatggcggcggctgcctgcgccggtgggtgtgcggaagcaggacgcggatgcggagggaaggacgcgctgttcgtcgagctgtggaaggcctgcgcggggccgctgtcctgcgtgccgccgcttggggagaaggtctactacctcccgcagggccacatcgagcaggtggaggcatcgacgaaccagcttgccgagcagcagggcacgcccctctacaacctgccatggaagattccctgcaagctcatgaacatcgaactgaaggttgagccggatactgatgaggtgtacgcccagctcaccctgctccctgataagaagcaagatgagaatacatctacaacagtggaggaagaggaggtggtggtgcctcctgcgctaccagccacaaatgagggtcctcacatccattccttctgcaagacattgactgcctcagacacaagcacacatggtggtttctcagtgttgcgccggcatgcagatgagtgcctcccaccattggatatgagtcaacatcccccaaatcaagaattggtggccaaggacctgcatggggccgagtggcggttccgtcacatctttcgaggtcagccacggagacatctcctgcaaagtggttggagtgtttttgtgagcgccaagcgtcttgtcgcgggggatgccttcatatttctcagaggtgagaatggggagctccgtgttggagttcggcgtgcactgaggcaccaaaccactatcccatcttcagtcatatcaagccacaatatgcatcttggtgttcttgcaacagcatggcatgcagtgaacactgatagtatgttcactgtctactacaagccaaggactagtccagctgaatttgtggtttcgcgagataggtactatgaatcactgaaacgaaattattcaatagggatgagatttaagatgagatttgaaggtgaagaggcagcagagcaaagattcactggcacaatagttggaataggtgcttctgatccatctggttgggctgactcaaaatggcgttcccttaaggtgagatgggatgaaccttcttctatttctcgtcctgaaagagtttctccttggcaaatagaaccttctgttagcccatgtcatgtgaaccctcttccagttagattcaagaggtctcgatcaagcgttaatgctttgccatctgacgtgtctactgtaaccagagaagtcacttctaaagtcatggcagactcgcagcaaaatagtctcacaagagccttgcacaatcaaggaaggacacaattgacagttcgataccatgataacagtgatgtgaagactactcaggatcttaccgtgtggtcttcaggaactgagcaacagagaaacaatattgctgcccagacaaagctatgtctggagggttggacgccaactagaagtcctgaaggctacaatcagatattctcggcatttaaaccactgaaagatatacataacccacttggtccttttcctagtcaaatatctgggactcactcaaatagctgggacacagctgatgctcgttatccagtccaacaagctaattacagcatgttacctggcacatggtctttgaggcctcataacagtggttttaggatgaatcaacaaaattatctagtgatgcctgaaggtgcaaattttacggggaaatcagctttcacttcacttcaggaccatggcactgataaatgctccacaggctgctttggtcatattgagtcaagttcccacacagaccatgcatcctcaagtttgatcaggccccagcctttggtccttggaaatggtgttcagaaaagcaaaggcacttcatttaaattatttgggattccccttggcagcccagaaaaatctgaacctctggtatccccaccaagtgtcgcatatgacgggaaacttcaaacttctccatcagaaaaagggaatcagctagacgtagttgaagtggataattgttctcatccttctaagactgtgaagccacttgatggtcctcagtcagattctattacagagaataatcagccttctccagaagctacccttaatatccagaacaaagtgcaaagtagttccaccagaagctgcaagaaggttcataagcaaggtagtgccctcggcaggtcgattgatctaacaaagttcgcttgctatgatgagctgattgctgaactggatcagatgtttgacttcgatggtgagctgaagagtccatgcaaaagttggttagttgtctacactgacaatgaaggcgatataatgctggttggtgatgacccctggaatgaattctgcgatatggtccacaagatcttcatctacacgagagaggaagtcgaaaggatgaacccaggtgccctgaactcaaggtctgaagatagtctatctgactcgctgggaagaggggtagcttccagagatccccgaggaggcgggtctacttcggctctcgattccgagaactgctagtttgttcagtcagtgaggcctttggaagtgaagcagacaaaaggcgtgaatcttgcggtgtagagtgtagttggtacattgtgtgtatgcctccgggtaagccctgcggtacccagtttgtgtcctggcgccagtttaccatttaagctaagtttttgggtgtgccctgtgctggggtctgggctctagttattgtagcagagcaggcaatgcatgcaagaaactgatgatgcgcctgtttggccctctttcccttcccaagccatgtaaatagccttggctctgaagcgtagtattgtattgtcgacagccgtacttgagatagtactccaagaggcgcgcttgctcctgtcagttgggtgtgcgtatgtagatgtgcgtgtgaagccatgcaagcaagggtttgtggggttgatggcttttcatggtagcggatctgctttcatggtactgacgtgcaggtggcaggctggtgttggctgctatgttttgctgcacgatattggcagaaaacagtagtactaaggggtgtttggtttctag

SEQ ID NO: 16666 - DNA, 942 bp, Zea Mays
gtatggtcctgttgtttggttgtcctacacagcttgtggatgagaatcggtggtacaacttcgatgatagccatgttgcttccattgatgaagatgaggtgaagactgctgcagcttatgtgctattctatagaagggtcagagaacaagacatagcaaggggaactagtaatggatctcagttatatgcaaaaagaagtcacggatatagccataggtaggctgatgattactgtggttcggtgcaagggggattctggaaatgacacccgcacgcctttagtcattgccaggagtatatggcttgctggaaaaaatgctcatcacgtgcagtcaatgcaccgttgtccagttgtcacagaagatatttcgtgcagtgctggtacaagatgggaattttgtatgaggtgagttgaaggagtaattgactctttatgataactgggtagcttcaacaggaacgccggggcttggtggcattttgttcgtctgttttcttctagaagagaaacaaggggaggcaagaaaacatttaggaaacaccttttcgttaatttgattttttatttccatttttagatttagctagtctgtacactgttgttggaaatgggtccgctgttgttggtcgatgcttgtggtggccaataatactacacccaactataccaggctctgcaatggcgaatcatggtgcacattatggtgctctgttgcgggaagaattgtagctgatgttgtacttatatactggcaaaaaggccccagaaatgtaaaaatgtatcgatatgctgacatcttaaaccctattttggattcgtgctctttcctatggatgaaggtgtgcgccatttaggggttgtttgtttgaagaatcaatccattctaggtaggtgattatcacgagaccatttcataaatttggtgaaatgaattcatttt

SEQ ID NO: 16667 - DNA, 141 bp, Zea Mays
acctcatttccataatcagcattgttctatttggcaagccgaacctgcaatcaaatttgggcgcctaccatctttgtttttggcaagaagcccactttcccttacacgcccctcctttccttgttcagggatctgggtgcg

SEQ ID NO: 16668 - DNA, 1633 bp, Zea Mays
gttgtgtgtgtgtgaactctcttctattaatgaaatggtctctcctcttccatgattttattgcaaagtgtcttactaaagaccccagacttcggcctgctgcaattgagatgctgaagcacaaatttattgagaagtgcaatagtggagcttcgaaaatgttggcaaagatcaaggtagcgaagaagattagagccacactagctgtgcaaaatgagctgtctgaccctgacaatacaacgcaagatgtgccttttcgaataaatgaggactatggggaaactgtccctacaagttctcagcaacacatgaaacatggcacatataatgattgtcaggtgattttggtactatgattgttcatactgaagatggggacgaagtgacagaatcacccattttcccaagaacagaattcatacccggccttggtagcatcaattctttcacacatgatccaaagagagcagaacttatttcaagtttttgggcggagaacataggtgatagtgatgccaataaagaccgagatacagattatggtcctgacatgcaggaatcaaaagtgatctcacctttaactggaacagtgaagaagaatattggtgcagaagggactataaggtgccatgataatcaaattaacttgtcaccaggacttgcaaacacaacaactaaattgaacaacagcccaagccgtaaagcgttttcagttcaggataagctctggtcaatttatgctgccggcaacactgtaccaataccatttcttaaggcaattgacatttcaccactagctctagtatcagaaaatgaatcaggaaatggcctggctgggtcaagtacaaatgatgctttggaggcagttagggagctgttcagtggtgatgggcaggcaaagaaaggacggaaagggcaaaacgaagtccctcttcctccgggtgtgcatcacaggctgacgacaagccccacattgatgaacctggcccaagctctagcttatcataaaacgtgctatgaggacatgccgctacaagattcacaagcgacgcaagagcagcaaacgatacaaaatctttgtgacacacttcgcacaatactgaggttgtagatctgcaagagtgaaggctgcaacctttggagttccgaagcctgcatggagccaagggtgaacgtggcactgatcctgctcgtggtggagaactgaggatcgaaggaacgcatgacatgtgcctaccgtggagcaggcctaatggcttctgcgttttagcctgtggacgctttggtcactggaagctgggttgacacaggaatctctacggaagtggaaatttctgtccctgttaatagcctcttggagtttcactatgtagagacggcatcaaattttgctaatcagattttgtggcactaacgcatattgtagcctggttttgtatcgttgtcaatgcatttgttctccaaataaagagaaatagttaagcagaaataaacgaaaagttatttatgttggctattcgaaatcatgggaggcgtgatttctgctgtcttgaccccgtattccttgtgtctggccattgtacgccatgcttcgtgttgttaagtgtcagttttttttagcgcgcgtgtgaat

SEQ ID NO: 16669 - DNA, 4134 bp, Zea Mays
ctcaatttctgttcgcgtataatcgtcggatatctccctctcctcaaaatactcacaacccagagatctcacacccacgaccaccacgagggaaaaaaaacaacaacagaggagagagactagagagagagagagagagagaggagcgttggagtttggaagcagttcctgcgacctgcggccggagccccggggcatattcctcgcccggagatcccgtacccgaccctcccctgataaacagacgcaagcgtcagggagggagggagggacagagagaggtagagagggccggggcgaagggggcaaagatgcgttcttgaggagcctgtgcaggggaggtccaatccagaggccgccattccttttcttttccccccaacctctgcaggctcttcagatccagcaatccggcttgtttcttttgctggcacatcaaagcagtcagctgtccgcaaaccttctcctggaagctctcttaaggatctgtgccttgtttccaaacaagggtcaatagctgaagtagaatctgctttggccttgttgaaaaaaagtggtgggaacattgatggtagaaatgcatttggtcttagtgccctccaccttgcaacatggagaaatcatctacccattgtgaggcgactcctagatgctggcgctgatccagatgcaagggatggagaatctggctggagtagcctgcatagagcacttcattttggtcacctatgtattgctggtgttcttttacagtttggtgcttccctcgctttggaggacactaagggccgtacacctgttgaccttatctcctgtccagtatcacaggccaatggagattttccagatgcagtggacagacaactgctgtgattacccctcgccaggtgacagtaggattaggccgtaaacgagttaatgctgtggctgcagccaaacatcatactgtgattgctacagagctgggggaattgtttacctggggatcaaatagagagggtcagcttgggtacccttctgttgatacccaaccaacaccaaggcgtgttggttcgctcaagcaaaggataatttcagtagctgctgcaaacaagcactccgctgcagttgctgatactggcgaagtattcacctggggttgcaataaggagggccaactaggatatggcacttcaaactcagcatcaaactgtatcccaagaatggtggagtacttgaaaggaaaagtacttagaggtgtttctgcagcaaagtatcatacaatagtgttaggagctgatggagaggtgttcacttggggccatcgccttgtcaccccacggcgtgtcgtagtagctcgatgccttaagaagggtggaaatacaaatctgaagtttcatcgtatggaacgacttcaagtgatttcagtggctgctggaacaacgcacaatactgctttaacagctgatggtgctcttttctactgggtttcatcagatcctgatctaaaatgccagcagatattttcaatgtgtggaaggaatattgtgaacatctcggctggaaagtactggaccgctgtggctacatcaactggtgatgttttcatgtgggatgcaaagaaacgtaaggacgaaacgccaattttcactcgggtgcatggtgttaagcgagcaacatttgtttgtgttggtgaaacgcacatgcttgtgctctcaagtatataccatcctgagtatccacccaagcctaaaagccaaggcttaaaatccatgttagaatggaacggtggaacagaagagctgggtgaagatatcctgtttgatgatgttcagcccaacagtggtttatcaggaagcagtggtgaaatgagcaaaggtgtgcctagcttgaaaagcctctgtgagaaggttgcagttgagtatttattggagccaaaaaactcaatacagcttcttgaaattgctgattccttggaagctaaggagctcaagaagcattgtgaggatttagctattcgcaacctcgattacattttcacagtgggagcttcttcaattatgaatgcttcttctgaaattcttgtgaacttagagaaattgctagatgagaaatcctcagagccttggagtcagcaccgtcttcccacaatgacagctacctatcctgctgtcattgacagtgatgtagaggaagatgaagcaagagaattccccaagacccgtaaatgtgggaaatctgcatcaaggccatctgcgatgtctagtgatgacagcttccttcagaaagactgcaccgctgaacaagccgtctctaagcagatcagagcacttcgcaagaagctgcaacagattgagattctcgaggctaaacaacttgcaggtcatcagcttgacagtcagcaggtagcgaagctcgagtctagggctgcccttgaaggtgaacttgctgaacttggcattccctcagagatatactcaacttcctctgcttgtccagcagaaggtaggacaaacagaaaacctgaggtttctaagaaacagaagagaaagaacaagcagtcaacacagaccccgtcagtgaaaaatgagcctgggcaacaaatccccattacggaacttcaagttctacaagtcaatgtctctgctgaaaagcaggaggcgtatgccgctgatccaattaaacctatggaggctgccgcgttcagcaacacaaaggacaccgcttctccaccggagaagaaaccttcccaaccaactccatcaaagaagaagaacagaaaaggcggcctgtcgctgttcctgagcggcgctctcgacgacaccccaaaaccaagcctccctgcccccgctgtgcctgccacaccgaagcccgaaggacccgcctggggcggcgtgaagataaccaagggacccgcttcgcttcgagacatccagaccgagcagagcagaacaaacgagcccgcgtcggccaaggcgaaggaccgccacgagaactcgccggacagcgccggccgcgcgacaaggctctcctcgttcatccccgacgcgcgttccagcccagtagccgtcgtggcgcctgctcgcgcagcggcggcgccttcttccgaaggtgacaggagcacgccgccgtggtcgtcctctgccacctcgcccaacgtgtcgcagccttcgctcagggacatacaacagatgcagcagaggcaccatggcggcgtctcccacagcccgaaaacccagacatcgggcttctgtataccgccccacggcggagcgccagaggccgctggcggtggcggcgtgaaggacaacgtgcccaaccggtggttcaggccggagaccgacgccccgtcctccatccgctccatccagatcgaggagcaggctatgaaggacttcaggcgcttctacagcagcgtgaggatcgtcaagccgcaggtctagtagcactggcggcggcggcggtggcggccttggcggagagtgactgatggcacaacaaccccctttaggctcaccctcccatttgacactggctcgttgtacattcgagtgtacagttggttctgttcgccataggttccttgagctgaacaataaacaaacaccctttgctgctgttgctgctgctttcgcagtgagtggtctcgtttagttgtaacagaagattgtacaggccatgtgagatcaccaccccccggctttggcttaacagtttaacttgagccaatgcttctttttttttttttggcgccaaaatgtctttggttgttccaagcagaggtcataaaaactgtgtggtgcgtctgcacccaggtacccaacatttttagcttcgatcggacatgatctcactttggggctgtagcctagtgcttctatatgctctcgatctgcttgactggtcggtgtgagaatttggtagatagcggcatacttgtgctgttgtgcaatagtagcactatgcatggtcatctgctaagatcgatggcagctcgtaattaatggagctagtctgcctggttcagtagcttgtcgcctatggctatcggtaataaggccggttgcaatatttttttgtttggtgagcactagctagccatgaggcgatcaaatgtcatgtgctcccatgaaccctgatgacatgtatcttcac

SEQ ID NO: 16670 - DNA, 989 bp, Zea Mays
ccgtgggttcgtccctcgggaaaccggggtagtttaatctcgggactttcaggaacgccggactgttccgtgctgctttgggaacgaattcaattttgcaacaaaaaatctttgggctcactcgtcggaatcttcattggtgccttcatggggatgtctaccgaaagcggcatgttccgcggggctggtgttggagcagtttctggagcagtcttctccatagaggctgttgagtcctgcatcgagatttggaggtccagccattcaggaaaatacagcattctctttgtgctggacatcatctcgagcctcttcagcggaagaattgtgtgggagaaagtcagtccagcgctacagcgtgcagtgcaaagccagatgagtctaatgagcacaccgttcatcgacaacagtgaccttttcgaaaccggcagtacaggaggcatgtcaagggatttgattgataggatcccaaagacgaggttcagtgctgctagcaactgtgatcaggaaactgatagcagctgctgcccagtctgcctccaggatttcggagcacggcaattcgtgagggccctgcctcagtgccaacacatattccacgtgcggtgcatcgacagttggctcctccggcacgcgtcctgcccgctatgccgggccggtgttcacatagaccatatacatatgtaaatgaactcgcagggtggcacctggtgtattttcgtagcgaatacccgtgctcctgttggatatcacaagtatagctgtatacatagggtttttttgctctctctttttgtcacttcttgagacttgcttgtgtggggctatgctttcagctgcacgtttttgtcgaagcatgatgccttgatatgtacatctggaaaatggaccgactaacaagctccctgaattctggcactgtgcttcaaaatctgtgtctgttaactgctgatgctgacatgctaatgcaatggtttgctactgggcaa

SEQ ID NO: 16671 - DNA, 2598 bp, Zea Mays
cccaggcccaagcaagccttttcttctcccgttcacctcctctctctctccccccactctcggcgaccgactgggctaccgccgccgccgacgccgccatccgccagtcgtcaggtgcccaggtcttcacccccgggcaccagcgcgcaatatcagtctcgccagccggttgtccaagttgaaagaggatggggcaggagacggaggtggtgcagtcggtaagcgacctcccggtgcaggaccctccaggagaggagttctccgccgccgacctcgcctgggtcaagtacgccacctccgagcaccaccgggacgacgtcgccctcataccctacgaccggatggaggccttcatcgccggcgagagcaacaaccccgagtgccccacgcgcttccacatcgagcgcggccgcaagcgtgagaggggcagcctcagggagtaccggagtgacgagtacctcctctacaggatgtattggtgctcctttggccctgagaattatggggagggagggacaatcttgcctagcagaaagtacaggctcaacacgaggaaccgtgctgcacgcccgcagtcgatgcgtggctgcacctgccatttcaccatcaagaggctctatgctcgcccttccctgctgctcatcatctaccacgagaggcgccatgtcaacaagtccggcttcatatgccatgggcccctcgacagggatgccatcgggcctggcgctaggaaaatgccctacattgggagtgaaatccagcagcagaccatgtcattgatctacctcggtgttccagaagagaacatactgcagacacatatcgaaggcatacagcgctactgtagcaaggatgccaaggttgataaccttgcctctcagtatgtccagaaacttgggatgatcatcaagagatcgacacatgagttggatctggatgaccaagctagcatcaggatgtgggttgacagaaataggaagtctgtattcttctaccaggattcaactgaggcagatgcctttattttggggattcagacacaatggcaattgcagcaaatgatgcgctttggccatcagagtcttttggcttctcattcctcatttggtgtaagcaagctaaagtatcccttgcacacgctccttgcattcgactcaaggcagcacgctcttccagttgcatgggtcataacccgctcagttactaagaaggacacattgaaatggatgagcacacttactgatcgaatacattctatagattccacatggggaattggtggttttatcattgatgacccggcttcagagctgggtccaatcagggaggtgttcgcctgcccagttctgttctccatgtggcacatcagaagaacctggcttaaaaatgtaatcaagaaatgcagcaatgttgaggtgcagcgggaaatttttatcctacttggcaaaaccatatgcaatatatggagtgagaaaaaccctatggatgccctagggcaattgtttcaagactttgttgatcaaacagcattcataaaatatttcaagtcattttgggttcccaaattggagatgtggatcgactccatccgaaatctgccattagcaagtcaggagtcatgcggtgccattgaaggttaccatctgaagctgaaggtaaaagcatatgatgacgtgcagctggatgctcttcaacgtgtggactggctagtgcataagctcacaacagagctgcattcgagctactggatcaacctatttgcagacgaaagcgggtcatttcccgaggtgaaagcagactatatcgcatccacgtcatggcaaagggcactccagatacctgacgatgctgttaccttcgacgacaaggatcctcttgtagctagagtggtcagccagaaggaaaccagccagacacggactgtgtggagccctggttctgaattctctctttgcaattgctcgtggtcgatgcagggtaacctatgcaagcacgtgctaaaggtcaacatggtctgcggagcacgcaaagactttcagccctcgctgtcgttccagtcgttccagcatgtcctgcttgatctgtggcagaaaccattggacgattcgttctcgcttgacctctcggtagcgcgggtcatgcagatgcaggagaagatcaaacatgtggctgagctcgccacctccagtggtatcgcccaagttgcagggaagttgccgatgcaatggacaaaaaagagagggagaagagtaggcgtcaagcccacaagcgcgctgctgcttcctcgttctaagggcagtttgcagaaggacttgaccccgaagaacagcaggaagaggaagaggctatctagatttaaagggtaaaatgcgccgccttttcttgtggcgtctctgtaattagagtattagacgactactttttttgtttttgtttattttttgcctgctgtattccatttcctcaattacctcggggctgactgagaacttgctcagcgacttccacttcccttatgtctcctagttttaggaacaaatacaatagctgtgcaggctgtaatgcgaagcgactggatgggtggatgttttgatagtt

SEQ ID NO: 16672 - DNA, 1747 bp, Zea Mays
aacaattatgttggtttgcatgacaggcttgttacagtcacaggaacctttgataatcagatgaatgcgatagatttgatactgaaaaagttatctttggatgttcactacccagctaatttgagctccccatttccatatgcaggtcttactttcccaagctaccctggtgttcctgttggttatatgattccgcaggtgccatataataatgctgtgaactatggacctaataacgggtatggaggaaggtaccaaaacaacaaggtggggggttctctgtgggttgctctgcttgttatctcacacttgtggacttgttctgcaggtgcaacatgcatgcattcagttcatctttgttgaaactgagctattctatgttttatttttgttatgcattagagtggtagtctggagcctggagggctgatatgcatgacatgttatctaatagaaacactgtcctgtaatgtaatcatgttatattttctgttctgaacaaattcaaagaaatctcatggagacaaactttgatagtacaagttggaggtctcgaattttaaggtaatatcgtgctagtattttcatttgcagtattgatctttgttggtgcaacctaacattagagtgatgttaatgagctgctgtagatgtttgatttaatctgcatgtgctattttttgtggagtttgatatttatgtgcttaaatttcgtgacttagcaatactggttgtatgctgagatgtctgaaaagctattacgttttctgtgaactgttgtgtagtttttaggtcgtgcatgccgtggaaagtgtgggtgtggcttttggtggaaaacatgaaagaacttcacccactgctacaatctaattgttttatatttttatcatgcatatctatactgttggtctgttggattaatttgagttgtgactatttctgttgatactttgcagcccagtacacctatgagatctcctgctagtaatgaagcccaagaatctctgaccattggtattgccgatgaacacattggtgctgttgtaggacgtgctggaaggaacataacagagattattcaggctagtggtgctcggatcaagatatcggataggggtgacttcatatctgggacatctgacaggaaggtgacgattactggaacatcagaagctatccggaccgcggagtccatgatcatgcagagggtgtcagccagttcggagaggctatgataccagatatgtttgacggactgtgggggccgttgttgagtccgagcagcatgtttgatgcaagttattattgtttgttgcgttgcgccaatggtttagtcgaagatatatatgtgcagcgtttgaatggatttgggaatagggctgagttatatcccgtggatgccacaacaaggcaggcaggcgccgctctgtgctagtggctgagtaggttgacaattcgaaagggcatggttggaagctttcagcgtttcccattcattcttgtgtgcctctccggatggagatcctctgcagtgccatgtcggccagactgcgagcaaaagctgacttttctggcggacgaagataggagtagcatgcatctagctgtcttgtgaaagtactattatttatcaaaatacagaatcggtcctcaaactttggtacgttgttggctccctgaattcaagaaatcgaaaaaaaaaacaagtcttgtaactttgtcgggtctaaaattagatttgtctaaa

SEQ ID NO: 16673 - DNA, 132 bp, Zea Mays
gtcacatctttactatataatagaagttctgtacaaaataaataaataattacatcatacacgattcaacatcccaaagttgactgggagacaacggcctagacctctcacaaactcgtcacagcatcctcc

SEQ ID NO: 16674 - DNA, 2032 bp, Zea Mays
atccagtcgaaacccactcacttgatggcaaagtagcgaatcccacgtttcataatggctcggttccaaatttctcccttcccaagcatggcgtccctgccgcagcccccgcgatccccttctcaagcctggcgtccctgccccccgcgatcgcgcctgccaagcatggcgtcgtcgcggccgttgcccccgcgatccccttccatcgacctgccaagcatggcatcgccccggccgttgccacgcccgccgcacacgccgcgatgagatcctggaccccccgcgacatcctcctccaccgcgccatggccgcccccgacgtcctcgcgcgccgctccccgaggtgggcatggtgcgcacgaccatcgcgggggtcacgacggcggcgcggttccaggagctggtggactggatggaggagtggaaggcggcgttcagggacaacagcaagtggacggagacggtgaacctggggctcgggagcctcgcgctcatcatgtccgggctgcttccgttcgccatcgacggggacctcgggttcgggaagcccagcctcgtgctaccctgggtgcgccatggccggctgggatccgcgtccgtgatggtggtgccctgccccagcggcgacatgtcgtggttcttcggcggcaccaggatgtggctgcggctcatggaggtggtcgaatccgaccctttgatgaagcagacaacgaacctgggaatggcgacagaggcgggatcccgtctgtgactgtgagctcgcgctggcggtacctgccattacggtgtacgggtatcatcgccatcatcatccagatccaggacttctgagcacatggaagatgaaggagacgttgcaactcctttacactttccaaatttttattaaatataccaatatcacgaggtgaaccttcgagtttagtgatttttcatatccatggtttgcaggcaagtaaacttattacatataatccattgaacttcatgtcttggtttgtccaattcgacatcgaagggctcgccatgtggggtgacgtcgacggggcttcacctgtcctattctatcattattgtgattactgactatgccattgtttgtgctactgctgcttatgcttgcagtgccacaaaggcaagcgaacctttgatttggtccatgttctggtctaaccttgttgggtccacactccatgggtcactttcacattactactaccatatctgtgaggtaaccattgttacatgacctactcatatatcttttgcttgtacattcaagtaaagattgtctatttcaaccacaccaaaagtaaagaaaattattaagttggtgaattgacaaaagaaatgaagcaagtttttaggtgttgaagtataagtgattcgcccaacttttcccatcagcttgacttttagtttgggggtaaactaacctacacatagcaggcatcagatatagcatattacaataagctaggtatgtgtttgtattcttagttcttttagtatattacataagctacatccctcgtgatgccttaatctaggttatatctcaatgatgatttctttataacatgctgatcataaagcatttgtagacagtgcattcaagtaacggtacaatacaaagggtggcaaatgataatagcctgaagaatgatggcacaaaatgatctagagtattctttatcttacttagattttgtcaacattccatcatcatataatctcgaatattttcataaactggttgtgtaaaatggggggatctttctccatgaatctcaatggatctgttgtgcactgcatagctgcggagaagaaaaaggtatcaaatatcaagcagctttacggcagcgaaggatcattcactatgagtggatattaaactgttgcaaggaaaacatcttcattttcatcctagatagacttttagtccttttttgtcacccctcaagggactagagactaaaagggtttagtccttcatatttggaaatttggtagtctgatgcatgcacattcg

SEQ ID NO: 16675 - DNA, 965 bp, Zea Mays
ctgggagcgcgttgcggccggagcaagctcgctagtaggtcagcatggtacaagcctacaaggagaaagtttatccaaaaaacaagttgaactgctgcagcatgagccagaagttggttatgaactaccatataaggttcccttccagagtctcccatgctatatcgtgaattttcccaagcaaagcacctgccaggcgccaatatgccaccggggtagccattaaaatacttaaaatcaactccaaggctcatcgaacgttatccagtgcttcaccgtgtttctgaactccctaaagcagatgttgtcatgttggtcagtttggtgttggtttaatttctacgggtgtcgtatatcagagtcaatcaaaaagtttgactagcaactaatggtgcctatacatgtatttatggagcttcttctggtcatatgtgtagtggatctctcctcctgttgttcccttcaatcatgtccaaggtcaagaaccattcaggtcataaacccctacgacaggggccacgagggctcatcttcgccactgcccctactcccaccttctgcatgtcctgctcggtgctgttccattccctagcgatgttctccggctaaagacgcttggagtttgtggtgtggtgacacttaatgaatcatacgagaggcttgttcccacatccctatacgaggataaaagaagtaggcgcaatgaggagtcgtgttcattcacaagctctaacagagaaagttggggcagatgttcatctttaggtgcagccagtgatgaattattctcaggcaataataatgataagcagatatgagcccttgggcctccagttcgggcaacaagcatatggcaaagagagtgagggggcatgatattgttttccaattccaagatctaaggagcaaagactattaattatcataaacaagatttctaattggtgaaagctttttatatatag

SEQ ID NO: 16676 - DNA, 2415 bp, Zea Mays
gtccacgtgcgccgcacacgcgggaaaggggactctacaacacgcatcgccccgagccgagccctctcgcttcccttttataccccttgccacgcgcattcccctctccactgccagctccggtccgcagagggagggaggaggacgccagttgccactgccgcgccgctcccgcctccctctctccatccgacgagctcgagaagccaccatgatctccgcgcgcaccgccgcagcttcccccgcctccctgtggaagcggggaggacaaagtgagggcggcggcagttgcgacggatgtcggacctacaggaacactttgcggagggccgcagcagcgaaggtgcgtgccttgccgtcgagggcggtggaggcggtcaaaatgggctccgccgcggaggtggagcaggaggaggcggaggtagccgcggccgcggacggcgtcgtcgtcgaggaccactacggcgaggacagcgccaccgaggagctgcccatcatgccctgggccttctccgtcgcaagcggttacaccctcttgagggatccacatcacaacaagggtcttgctttcacggagaaggagagggatgcacaccacttgcgtgggctgcttcctcctgcagttgttcctcaagaactccaaattaagaagatcatgcacaacctgcggcagtaccaggtccctttgcagcgctatatggccatgatggaccttcaggagaggaacgagaggcttttctacaagcttttaattgataacgtggaggagctgcttcctgtggtttatacaccaactgtaggtgaggcctgccagaagtatgggtccatctttcgacaaccacagggtctgtatgtcagcttgagggacaaggggaaggtcctagaagttctaaggaactggccacataggaacattcaagttatctgtgttactgatggtgagcgaatcttgggacttggagatttgggttctcagggaatgggaattcctgtaggcaaacttgctctatacactgctcttggaggagttcgtccatcagcttgtttgcctatcacaatcgatgttggcacaaataatgagaaactgcttaatgatgagttttacattggactccggcaaaaacgtgcaactggcgaggagtatcatgagcttatggaagagttcatggctgctgttaagcaaatctacggcgagaaagtcctcattcagggcacagcatcagtggtccttgcaggtttgttagcagcactcaaggtggttggtaggaccttggcagagcacacttatttattccttggtgctggggaggctggaactggtattgcagaactcattgctcttgagatttcaaaacagacgtcggctccaattgaagagtgccgcaagaagatttggttggtggactcaaagggtttgattgttgactctcgtaaaaactccgttcagtcattcaaaaaaccttgggcacatgagcatgagcccttgacaaccttgtacgatgctgttcagtccatcaaacctacagttctgattgggacgtctggagttggaagaacattcacaaaagaagttgttgaggccatggcttccttcaatgagaggcctatcatcttttcactgtcaaatccaacctctcattctgaatgtactgctgaagaagcatataactggactcagggtcgtgtaatatttgccagtggcagtccatttgaccctgtggagtacgatgggaaggtttttgtacctggacagtcgaacaacgcctacattttccctggatttggcctcggtcttgttatctctggagccatccgtgtccacgaggacatgcttcttgccgcctcggaagcactagctgctcaggccacacaggagaacttcgacaagggatcaatcttcccgcccttcaccaacattagaaagatctctgcgcgcattgccgcagccgtggctgcaaaagcttatgaactcggtttggcgacccgtctgcctcccccaagggacctggtgaaatatgcacagagctgcatgtacactcctgtctaccgtaactaccggtagtgctgctgggatcaattctgcagtaataaaatatgtcgacgcagatgatcctgcaatgttgtagtttattttttcatttgttggccctgctgctgaccacctttgtggctgctagacactgtacctgtctatgcatatatgatactggaacatttggcgcgctgtgggcgtccctgtcatgagatcaattgcagaaataaaatgcaatttagatttgagcaccaaaataaaaatagtaataatacacaagtgaggcaagcatatgttgaatctgatttgcttcaccttcgattagagatgacaatgagtaaatattcaccttcgattagagatgacaatgagtaaatacccgt

SEQ ID NO: 16677 - DNA, 75 bp, Zea Mays
caagcacagaaattagtaaatacaggaccactattgtgatgaatacatcaccactgcaaaccaaaccaactgtgt

SEQ ID NO: 16678 - DNA, 566 bp, Zea Mays
ggagccgagacacttgacaacctggtacttgatctacgtgagatgaagaatgctggaaaccgacttatttcagcactttcactggcaaggtatcgtcacctcaaagtattaaaccttgaatttgctcaagatattgaggatcgatattttgttcatctaaaagaaatgagtggcatctcactggaaaatttggaattcctgaacctaaatgcatgtcagaagatctctgataaaggaattgaagctgttaccagtctttgtcctaatcttcagcgccttgctatctattggattgtaggactgacagactcaagtattgggcacattacaaagaactgcaagcatctagtgcaccttaacttgagcggttgtaagaatatcaaggataaaggaatgcagttgattgctaataattaccaaggactaaagagattgaacataaccaggtgtgttaagttgacagatgatgggcttaaccaagttcttctgaagtgttcttcacttgaaagcctaaacctttatgccctttcaagttttactgacagtgtttatagggagataggatc

SEQ ID NO: 16679 - DNA, 1901 bp, Zea Mays
tgtttattcatcaccttcagcgatggaaggaggatttgatttagacatgacatatattactgagaacataattgctatgggttttcctgctggtgatttgagttcagggctttttggatattttgaggtcagtatacaagcgagattttgaagttcccttaaagcatgttgccttttatattccctcgtggaaaaagggaaataatactccattccagggtttctaccgcaaccacatggaggaagtcatcaggttctttgaaatgcaccataaggggaagtataaggtgtacaatctttgttctgaaaggctatatgatgcatctctttttgaaggaaaggtggcctgctttccttttgatgatcataactgccccccgatacaacttgtcatatcattctgccatagtgcctactcatggttgaaggaggatatagaaaatgtggtggttgtccattgcaaagctggtaaggcaaggacaggattgatgatctcgagtcttctactatttctaaagttctttcctactgctgaggagtccattgaatactataaccagaaaagatgtgtagatggaaaagggctgattctaccaagtcagattagatatgtgaagtattttgagcgcatcttaacttacttcaatggtgaaaatcagccacccaggaggtgtatgcttagggggtttcgtcttcatagatgcccctattggattaggccatcaattacagtctctaaccacaatggtgttcttttttctacaaagaagcatccaagaacaaaagaactaatgccagaagatttctggtttagtgcaccaaagaaggggattatggtttttgcattgccgggagaacctggcttagccgaggtagctggtgatttcaagatccagtttcatgatcgacagggagatttttactgctggctaaacacaacaatgatggagaacagggtaaccttgaacccaactgatcttgatgattttgacaagagaaaactgccctcacctggattccagattgaggttgtcctggtagattacgatggctcgcaaccagcaaaaccaaaaccaggcgctggacctgctgctgataaatctcatgctgattcctcggctagcacggttgcaaaagaaaatagtgctgcacctgaagaatccaacaagggaactggaagcaataatgatagagatgaagtcttctctgacagcgacggggaggatggatcttctaacggaaggaaggagaagactgccggcggtggtcaaagcagtgtaaatgctgctaaaccatcccagacaggcaacatggaggaggcggcggcatctgctgctgctagcagactggacaaagtggctataagcagcgaacagggaaccacaaaggcacctgatggtacatctctcaaaactgaagtcagcagcaaggccagctccaccacagcaccacctcctccagctgctgactcttccagcatgagcgaattcaaggcgattgccgcagatgcctcggtgttctcgttcggagatgaagatgattatgaaagtgagtaatgattctatgggtgggtacggtgttgagtttccgctgtacagtttggtgcttctaggaccccccatcatagaatgccaaagtccagagatgttaattcattcttgcatttcgtctccactgtagcagtgtcatcggtctgatgttgtacccagatgatgaaacttgttgtaactcaaccaggtcttgaacctctcctgtttgtttacagaaatgccttgtacacgaactcacttaaacagcgcaactactttttattattgatagttaaaagtgtgggtaatgtgtgtgcagccttggaaattaacaacggaaactaacactttggttgttttcggataaaaaaa

SEQ ID NO: 16680 - DNA, 1220 bp, Zea Mays
tctgaaccgatggaatcttcagatctaaggttaaagatattgaactgaaaggccacacagatagtgtagatcagctttgctgggatccaaatcatcctgatacagttgctactgcagctgctgacaaatctattcgtctttgggatgctcgaagtggaaaatgtcaagttgttgaacttagtggagaaaacatcaacatcacatataaacatgatggcactcagatagctgttggaaacaaggaggatgagctgacgatattggatgttaggacacttaaagttgctaagaaacacaagtctacttacgagatgaatgagattgcttggaataaagctggagatctattcttcattactactgggttagggcacgttgaggtggttaaggatcttgagtttttaaagccctgcaagctgaatgctcatacagcagggtgttattgcattgcaatggatccacttgataggtatttcgctgttggaagtgcagattcacttgtcagtctttggaatgtcaaagagttgttatgcattagaaccttcacaaaacttgagtggcctgtaagaacagttagcttcagtcatactggagaattcattgcatatgccagtgaagatcctttcattgacattgccaatgttgagactggacgatcaattcatcagattccatgtaaagcagctatgaatagcgttgaatggaatcctaagtacaacctcctggcctatgcgggagacgacaagaacaagtatatgactgatgaaggtgttttccgggtatttggcttcgaaacacataattgatgctgacttagactaccctcatatagaatggtttgcattgtagattcactttcgaattttgtttacactgatacattttgtagatgttcagtgtaacttggatgctaatcaatcttctgccggcttgaactgaacgtcattgttgtagtgtatcacaggatacccatgtgactaacgtatttccgggatccaattctatttttattacacttactttttattatagtatggagatgtattcattttctttgaattgattttgatccgcaatactatcgaagtaaaaagggatctaagtaagaactaggctaacttttttattttttaacttctaatttttttagtaacaagtaaatactctgtttggacataagaaacttacaatatcaagtgaataaacaccaactaatcaag

SEQ ID NO: 16681 - DNA, 487 bp, Zea Mays
tttatccatcccagagatcctcctgctggtcctcctggcgctcgggtgctacctgctcggcaggaaaaggggccgcgccgaggcggccgcggcgccgcagcagttcgcgccgccggcacctcctccagggctctcgcccaagtagcagagcgggtggtcttcgttgtacatgttcgttctccagtctccacttgatacccacactactctgttactgttagctcattgtatttgtgcgcgctttttttttatctctccctctctctctctccttgcttgtagtactctgctgttctgttgcatgatgttcatgcgaataattaggtttgctgtccgactgattagaattttctatggatgagattgtatttgtggcaataagttcgattttcattgaattttggccatgttcatggatgtatctgtaattatggtactaaatttctctggctactgtcaaacttgcaaccagaaactttatacggac

SEQ ID NO: 16682 - DNA, 1943 bp, Zea Mays
cttgccgacaatatattgcaaggtgtatctagtagttggaggagatatgcagtttgcacttgcattggacacgaactcaggtcctcaccagataagatcttgtgagggtgatgggattgacaggttggaaaaattaagtattgggggcagaaagcaggagaaagctttgagaaataggtgctttggtggtagagttgctgcaactacacaatgtattcttacctcagatgcttgtcctgaaactcttgtacctgttggaggatgttacaggcttattgatatccctatgagtaactgcttcaacagtggtataaataagatatttgtgatgagtcagttcaattctacttcgcttaaccgccatattcatcgtacataccttgaaggcgggatcaactttgctgatggatctgtacaggtattagcggctacacaaatgcctgaagagccagctggatggttccagggtacagcagactctatcagaaaatttatctgggtactcgaggattattacagtcacaaatccattgacaacattgtaatcttgagtggcgatcagctttatcggatgaattacatggaacttgtgcagaaacatgtcgaggacgatgctgatatcactatatcatgtgctcctgttgatgagagccgagcttctaaaaatgggctagtgaagattgatcatactggacgtgtacttcaattctttgaaaaaccaaagggtgctgatttgaattctatgagagttgagaccaacttcctgagctatgctatagatgatgcacagaaatatccataccttgcatcaatgggcatttatgtcttcaagaaagatgcacttttagaccttctcaagtcaaaatatattcaattacatgactttggatctgaaatcctcccaagagctgtactagatcatagtgtgcaggcatgcatttttacgggctattgggaggatgttggaacaatcaaatcattctttgatgcaaacttggccctcactgagcagccttccaagtttgatttttatgatccaaaaacacctttcttcactgcaccccgatgcttgcctccgacgcaattggacaagtgcaagatgaaagatgcatttatctcagatggttgcttactgagagaatgcaacatcgagcattctgtgattggagtctgctcacgtgtcagctctggatgtgaactcaaggactccgtgatgatgggagcggacacctatgaaactgaagaagaagcttcaaagctactgttagctgggaaggtcccagttggaataggaaggaacacaaagataaggaactgtatcattgacatgaatgctaggattgggaagaacgtggtgatcacaaacagtaagggcatccaagaggctgatcacccggaagaagggtactacataaggtctggaatcgtggtgatcttgaagaatgcaaccatcaacgatgggtctgtcatatagatcggctgcgtttgcgtctacaaaacaagaacctacaatggtattgcatcgatggatcgtgtaaccttggtatggtaagagccgcttgacaggaagtcgagcgttcgggcgcaagatgcgttgtctggcatgctgttccttgaccatttgtgctgctagtatgtactgttataagctgccctagaagttgcagcaaacctttttatgaacctttgtatttccattacctgctttggatcaactatatctgtcatcctatatattactaaatttttacgtgtttttctaattcggtgctgcttttgggatctggcttcgatgaccgctcgacccttggccattggttcagctctgttccttagagcaactccaaggagtcctaaattttgtatcagatacgaaggacttcagccgtgtatgtcgtcctcaccaaacgctctttttgcatagtgcagggggtgtagacttg

SEQ ID NO: 16683 - DNA, 3451 bp, Zea Mays
caaagtttgacgccttccaacattggtgttgcccgaagcccacccgacccgactcctccctcccagttccaaatttccaatcctcctcgatcccaccagtagaaccctccgcttgtttcttgctcccggttcttggatcgcggaactgctccaaaccttttcttggatcgcggaaccactccaaacctgcaaaagtttgatctttgtcgactgcttcgggttctaggacctgccgagtggtatttaggcaaagaaggctctgtcggcagtagccgtccttgtgattggttccgggacttgggttttagctcccaaacgagacccccaggcgcgtctgcggcgagctggttgctaaagaaggtaggtgtctcgggggctattacaggaatctacaacaccggcctcgcaccattggtggacagatacctattactacaggtgcaaaaggggagatggagtgggctactatggtgacaggagctcaggatcaagtgggaacaaaagcataaagctggaaaggtatctccacgactcaccaaggttaaggtgtctcctacaagagaggtcagaaaggagtttgttgctgaaggctgaagctaaagatacaagggaggagccatggtgaagaagaagctgaagaaactgtatggccgggatgctcgggagttctttaaccaggtcatggtggagcaacctttgctgcccttcctgatcccgcttggcctctttgcgtggttcatcgaacggtgggttgtgccattctcgaactgggttcccctcgctgctgccgtttgggcaaccattcagtatgggaggattaagaggaggacaactgtagaagatttgaacaaaagatggaagcatcttatactgaatacaacacccaccacaccaatcgagccttgcgaatggttgaacaaacttttgttagaagtttggcctaattacatggagccaaaactatcgaagaggtttcagtctaccgtcgagagacgtttaaagaatcgaaaaccaaaattaatagataaaatagaattacaggaattctcacttggttcttgtccacctaccttgggagatcagggcatgcgttggattacttctggtgaccagcaagtcatgtgcttgggatttgattggaatagccacgagatgagtgtaatgtttttggcgaaattagcgaagccactgattgggacttgtcgaattgttataaacagcattcacatcaagggagatcttctactatcacccatacttgatggggaagctatactctattcttttgaatcaaccccagaagtcaggattggggtagcatttggaagtggtggaagtcaagcaattcctggtatggagttaccaggtgtctcgacatggctggtgaagcttttgactgaaaccttagggaaaacaatggttgaacctcgccggctatgtttttctttgccatcagtagatctaaggaaacgagcagttggaggtgttctctcagttactgttgtatcagctagtaacctctgtaagagcacagctaatgatatagggaactgccaaagctcaaatggaggggccacgtatggaattgctgataacaaggtatcacagacatttgttgaggtagaagttggcaatttgatgagaaaaacaagtaccagtaagggtctaaatcctacatggaacagtacatttaacatggtacttcatggagagacaggcattgtcaagtttcttctgtatgaattggattctggcggtgtcaaattcaattacttgacaagctgtgagataaaggtaaagtatgttcatgatggttcaacaatattttgggctataggacataactctggtgttgttgcaaagcatactgagcattgtggacaagaagttggaatggttgttccatttgaggatataaatggcgagttaactgtaagccttgtgctaaaagaatggcagttctctgatggatcggttacattgagtaattctctgggcaatggacttcaaagctcatttgatggatcgacaaagcttcagtccacaacaggaaggaaagttagggtcagagttgttgagggcagggcacttacagctaatagtaaatctggaaaatgtgacccttatgtgaaactccagtatggaaaggctctataccgaacaaaaacactgacacatacggtccgaccagtttggaatcacaagtttgagtttgatgagatctctggtggtgaatatctgaagatcaaatgctataatgcagatatgtttggtgatgaaagcattggtagtgcgagagttaatttggagggacttttagagggtgctacccgtgatgtttgggtcccacttgaaaaagtagattcaggagagataaggcttgaaatagaggcaataaagaatgatcacaacaatagcttgcagagctcaagcagtaaagctggatctggttggattgagctagtcataatcgaagccagagatcttgttgctgcggatctgagaggcactagtgatccttatgtcagggtgcactatgggagcaagaagaaacgaaccaaggtcagatggtcatttacaaaacactgtctccacagtggaaccagacattcgagttcctggaaaccggagaacccctgattttgcatgtgaaggaccacaacgccgtccttccaaccgccagtatcggccattgcaccgtcgagtacagcatgctgtctccaaaccaatccgctgagaaatggataccgctccaaggcgtaaaaagcggagagatccatgtaagggtggcactgaaggtatcagtaccaggttcggagaagaagaacatgctcggggcaggtccgttcggcaaggggcacaagatgtcgacacagatgagagacagcctgaagagattcacgggcttgatcgacgacggcggtgacccggaggcactggcactagccgtggcggagatggaaggcatccagggcgagcaggaagagtacgtcgaaaccctggagcgggagaaggcgatgctgttgcacaagataaatgagcttggttccgaaatcattaggacagcatctggtcctccaaggacgccgtactagttagatctgcaaatgcacacccccccactactgaatgaacacgcatttatttatcggcaggcgaagacctggttgtacgtagaactctatagtgtgcatgtacaagtgagcagtacagctcgtgtaagtaggccaggcgtgtaggaagcacaggtgtatcttgtagtgattgataaaaactgctcaagcatcaaccggctggaagcttacagaagttggtcgactttgtacacagttagggcatgtttgggaacaatgtttttttaaaaccacattttataataccacagtttactgaatgttagaacaagactatggtatatattttacatcacctgttttggaggaagtatttt

SEQ ID NO: 16684 - DNA, 2123 bp, Zea Mays
tccacaaaccctataaccctagcaccgccgccaccatgtcctcgtctccatcttcagtgaaccgccgtcccccgggcccgctagcgttggggctggagtccttggcgaagaagaatacacataggaagaagctcaccgtcaaacctcatccagatccagtcgttgccctccaatggtcggatatggaacgtctcgtctcttcctttggattcagcagccggtgctcctcctctggatctggtggtcaactccatcacccgcagcttctatggcacctcccctagtccccctccatcgtcgccttcacccaccgcttctatatcgccacctctctcattgtagaagaagacactgaggatctgggaacctatgcccccacaggattgcacaacacgtgggataggtaatgcaggtattgcccccgctggctgtggctggccggtgtgcaattcactaggctgccaaatgagccctaaaggccccagcatgggcgaccctctccagagtgattcttatcaatcttgcattggaaaaacacggagcctattattatcagggaagcatttgagccaaagtactatgtacatcaccatgcttttatgtgactatatatataaatataacaaataaagttttattggaccagttctttgaccatgccattggtatcaacgttccaaggtcccgcttcctaccagttaaggcgacatcagatttgaagctagtacagtctgatctatataccttggttgatggcttcgttacacgtaattcagccagaacaaatccatcaaatccctcaattgaacttggtcctgagttcaagaaggttgggagcttccttggtcgcttcaagtccatacctagcattgttgagcttgacatcttgaaggtttccggtgatgtttggttcggttctggaattgtactgaaggggaaagtgaccatcactgcaaaacctggcgtcaagctagaaatcctagacggagcagtgattgggaataaggataattttggaaaaggaaagagaaaacaataccagatgccttacaacctgaattagggatgaaactgctaattgcacatggaagtcaccaagaacttggtaaaggtgattcaatgacaaatctaatgattaacatgtgcgatgtggttcacatgttaatgcatgcaactgaagtgcattaccaatgtcccaagagggtaagggtacagtctgatgtatctgaaaggattgctaatggaactagtgttcatgtaaatactcatgttcaaaatttgaatctggatattgaagagcaatcacacaaacactcgatttcacacatcgaggagccaaacactaataattcagaaggatccctggctggtgctgctgtctgggatgtatttcgcaggcaggatcttccaaagcttaatgaatatctagctgttcatcgggaagaatgtgcagctagatgtcaagcagtgtcttctgttaaatatcctatttatgatcaaacagtgtaccttaacgattatcataagaagatgttgaaggatcaatatgagggactgaagacaatcgagcagattacaatggactcagcttcggtcgagaccaatatgttcaagctctgcaaggtgaggtttgttcagtttggccaaaaaggcatcccctacctgaacacctacgatggtcgcgccatccgctacctcgacccgctcatcaaggccaacgacaccatcaaaatcgatctggagaccaacaagatcatggacttcatcaagtttgacgtcgacaacatggtcatggtgactggcgggaggaacaccgagcgtgtaggagtcatcaagaacagggagaagcacaagggcagcttttgctgcttggagctttttgctatgtctagttttctcctatttgttgtacaggaaaacttagaatagaattcaaatttggtggtcacaaaagtgtggagactttaattcatatataaagttaggcttaacattagtgcaaacagttgtattttagtttagatttagagtacacttatgtatgcgttgtttgacaatgcttatttatgatatattgaatggtacttatttatattatattaattataatgttgttcaatata

SEQ ID NO: 16685 - DNA, 427 bp, Zea Mays
atgatttatatgaggatgacaaagataaggaggtggatcacatgtcagtttccagcaaggtgtttggactggaatgcgcacagtctgttactttgatggcaaaacgcaacgaagtaccatgggtaaggatgtgctggagaatgaaagcttctgtcttaaaacaataggatacaagaagcttgcaagtggttttgtgaaggcttttgtgaatcacttgaatcattagttcttttaagaatggttttgtaaagcgttagcaaatatgtgtaaaacacaataagatgtgtggcaaagtcagtgatctagttgtacagttttttatgtttatgtgatatgtggatatttcattgtgcaatgttaatgaactgtgtatgtctatgtgattatgtgtataaaatatatgttttgtggtgcttttgtgataata

SEQ ID NO: 16686 - DNA, 251 bp, Zea Mays
tttgctagcatcgaagctcctcggtgaaaagtttcaacaatctgatatacagcatgaaaaaaatacaaagtgtcgttcctcgacgtccaatcgcatcaaaaaactccgcgccggatagcgagaggaacaatcgtttatgcttcccatttagacgctgcccacaaaccataaaggctaatacgcacaatggagtcaagagaagcctactcacataataacagggctctgcaactactcactgactaaaataa

SEQ ID NO: 16687 - DNA, 3984 bp, Zea Mays
atggagcagaggttgggggcaacgtatcagtggtggtcatggagtcacagtaagagctgtgaatcggtggagcggaaggggcgggagtggctggatgaggcaggacttgcctctggattacagcttgtattggatatgttggtgactgtgggagaacctgagcttggttcaagccgcggacctgtgtcatggggcgtggcaggtttttgtggagtgactgttgctgagaagagaccaatgatgcaatctcgtgatgttgataaatatttgaacaaagctgacaacattaaccatgtgctcatgaactctggcgacatttctaaaattggtggtcactgcctgcatggtacacatggtttggggactcggctagattctgatgctcagagctcatcccctggagaaaatatgaacaacaaaatcagaaggcccatcgaaatatgtacctttgatgctcaaggtcggtgcaagaaaggaaagagttgcatctctcttcatgaaagggagggatttggttctgcaaagactggtctgctcgcaccagctggttctggaaatcatagaggttctgaaggaggttctcaagtacaacatatatctgacttgaaagtgcatcagttcaaggattcagagggtttgtcaaaagatgaaatgtgtcggaatcttatttatgcatttggcaaagataatcagatgtcggtacatcttgctggtaaacacagctctcccattcctggggtttcacaaaggatgcccgtcagcattggtcattcattggctcagaatccattagttcatgagaagaacaacaaacgtttcatgggacaccatattgatgtggctgctgaaaactatttggatgctggaggtacctatccaagattagatggaggtatttttcagtttgacatagacaaggaaagcagtgttagtgattcccatgtctcaagaacttacctttcagattatccatataaatcatttggcttgtctatttcatctgatcctctccagctcagtgagaagctgtcagcatatggtggagtgacaaatactattcctaacatacatcagaaagaacatcactcatgccatgcttcatacagctcacatagcttaacaggatccagaaatccttgctttgctacctctgaacatactttcggtagcccatctcttctagcaacttctcatctgggaatacagtcccatcatctgttcacatctgatattgagaaggctgatctccatagatgccttgatgttggaaagggctatggtacttctagttctggacccgcattgcttgtgagcagtaaacctgaaccttctatgacgccagttgggccccactctccaattaagaatgaggtctgggaaacatcagtgccttttgtaccttcttttagttttcctgatagcacaacagcttcagaaagtcaatatgatccatttgttgactatgttgaacctcctaaagttgggaatacaaataatctcaagccctccactatatcctgcaacattacaagtcagcatacagatcagtacgcagttactgataaatccttgaattgcaatgacaaattgaccaggaatataactgccaaaggatcaaatgaacctgcttactttattgctcctgatagaggatgcagctctagcctggatgatactatcaaggtgaaagcttgtgacagaaaaaaggatgcagttgattacaatgagaaaacaagggatttccgttttcatttggcagaacatataaaggagttggtcaaaccaatatggaaaaaaggtaatctgagtaaagatgctcataaactggtagtgagaaaatctgtcgagaaggttgtggactccattgagccaaatcaagtaccaactactgaagagttgattacgaagtacatagccacatgtggaccaaagatagaaaaacttgtgaaggcatatgttgataggcacagtacatgtcatccaaccatcaaatacagcagctctgagatgggagcttgagcttaatggtgatgacagcttgaaccttctgtcctaccaatctggttaaccttcatttgtaggcccaacaagttaatattgttcatacaaacatgtatgtccatgacttcttgaggcaagtagtcagcgaagttccagatattggtgcatctgatgttattgctgatgataagcttggcaaaggacgtatatctatcctgtagttgataaggttcttacatgtcaaaataatcttctacgaagtgttaataaatgctgaattgtcatcaggaaagctggagatggaagcgaggaggaattaaagaggacaataaacaaaaccatacaggcaatgacaggttgtgcgaggggttgtgtacttgtgtgagaggctgccgcggacgtgtggaacttagcgggtgttgtcatagttcataaacaattcgtggagaaccaatctagcaagctagtagcctaaaagtggagatagccgatgaggtcttaagatgcaactgaagcaaaagaggctactacatcaaggagcagttcaaccactcatttgatggcatagtccatttgatgaggtcttagatgcaactgaacccactccaaggggtttgctcaggaacattgacttgaatttagatccaactgatgaagaagatgagattacagtgccaccccaagcccagtcgatccagcgactagttccgttgcagccactgcgggaccatctgttgcactttctgggtgcttgggaactgcctgacatgaacaatatggagatgggccctgtccagtttgctttgtaaaaaaaatacagattggagagaatgggtattatgacaatcaagactagctctgcccttatagctttcagagtggataagtaggatagcaggacagttgtaggttcatcttaactctttagagattctcatgtatcatgtgtatcatagccgccaaagctgcagatgcagcttataatgtgccagaggtttaaggttggctggctagttgactgtaacgttccgaagctagattcgctcaacacgtagtgctttggcatgtagtaccagttgtacttgtacactcctgtctccagttgctctccagtttaatgttaattatatgcttatgcttcattggatagttgaggaagatcttgctggatgcatgtatggcaaataaaaagcaagaaagagtttcagattacttatcacagctcattccatgacaggagtcaatattttcatatatgatagacctgcgaaaagattgcgagccttcagggataacgcgtcatcatactgggagatgatacctttatttcctgaaacatggttatccaagcacaaggaaaaagttccagcagtgattgcgactcgccagctcaaggtgactgcggaatccaagatgggatcgatgcttctacagctgcttgaagttgttccacaccgcccccaccttggccttgcacagcttctttccgctgccggcatccacctcgacagtaaaatgcatggtcctggcatcacgttctgcacatatattatacatgggatgcatcagtggtggctccaacgatatcaactaggtttatgcagagtgacatgtctttcggtcttgctgttgtgctccgtgaccgtgactgaagcacgcgagctcaatggcctcgaggtcgctctcacacccagtgggtgcgttttggacgtcgtccaccatcccacaggccgttctcgtctcggccatggctgctggagcctgtggagagggagaaaagctgtgcagagggagaaagaggaagctgcggcgagacgagacagacgacgacagacactcctgagtcctgcttgtagtagtagagcaccaacaacgggctattgcataccatcaatgggcaggtctcctaatctagaagtgaatttactttctgccaattcttccattatctgctattgcatagctttttcattacttcacttc

SEQ ID NO: 16688 - DNA, 1361 bp, Zea Mays
aagcattcaagggaacgaaaaaaaaatctacaacgggacaattgaaaggcttgagagtatggtggatggaggaaatttctatgaagctcaacaaatgtacaagtcaaccagtgcaaggtatattgctgctcagaagtattcagaagccttggacatccttcagtcaggcgctttggttcaattgaagcatggacaggttacctgtggtggtgaacttgctgtcctctttgttgacaccctcatcacaggagagcttccatatagtgaacaaatttttgatcgtatcagaaagatgtatgaggcattcccaagggtaactgttccacatttccttggagatgactatgatgatgaggggcatcaattatctgaagctatttctgctgccaaagtgcgggcagagagttgctcatcattcatgaaagctgcaatcaggtggtctgctgagtttggaacatcaagaaatggttcttctgagcttcacgttatgttagcagaatacatatattcggaatctccagagacggacatgactaaagtctcaagtcattttgttcgtggaaatgatccaaaaaagttcgcttctatgctggtgaactttatgggcaagtgttaccctggtgaagatgatactgcaattgcacgtggggtcctaatgtacctatctcaagggaacttgagagatgcaaatttacttatggatgagatgaacgaacaactaaaatctgctaactcggaatttccgaaaacagatttgattcagttcatcaagtatcttttaccaacacttgagagagatgcttaccctctttttagaacacttcgacagaagtataagacaagtacagatcgtgatgctgtgtttcaggagttactggatgaaatagctgcaaaattttacaatatacaacgccagaaccctttagaaggccttttcagcgaaatgttcaagatataatgcacgagaaaagaattttatgtcgatgctttcatctaaaccattggctggaataatacaattggtcaacaaaggtgtttgctcaactatgaatctccaaggccatacatttagcatcatgctgcatgaagatatatacttagctctgcagcaaaatcgtcgattagtgtcagattgttactgagcatgtgtaactgaattttgttttctattacttgtttctctttgttgacttgcccttgattgttattgaccatgcataactgaattttgttttcttttacttgtttctccttgtcctgttcacttttggagatgtattttgtgtacccacagatcaaaactataacctatttaaattcattgattttaatatatggtgttatcagtaaagttcattgaa

SEQ ID NO: 16689 - DNA, 1544 bp, Zea Mays
caaacggtttctgtaaacagttcagggagttgtttactggcaacctcccgagtcagctatggataagatcgaaaagatcatcagggaaccaatagtcagtaaatatggttctgatgatgggcttcctgagcttcgagaagcacttctcgaaaagctaagcagagagaataagcttaccaaatcatcagtcatggtcactgctggtgcaaatcaggcttttgtgaacttggtcctcactctctgtgatgctggtgattccgttgtcatgtttgcaccgtattatttcaatgcctacatgtcattccagatgacaggtgttactgacatattagttggtggctgcgatcccaagacacttcatcctgatgttgattggttggagaaggttctgaaagaaaatgagcctatccctaaacttgtcactgttgtgaatccggggaacccctctggagcttttattccaaggcctatgcttgagaggatttcagatctgtgcaaaaatgctggtgcatggcttgtggttgacaatacctatgagtactttatgtatgatggaatggagcactactgcttagaagatgctcatattgtcaacctcttctcgttctcaaaggcttatggaatgatggggtggcgtgtaggatacattgcatttccaaatgaagctgatggcttccacgatcagctcctcaaggtgcaagacaacataccgatctgcgcctccatcatcgggcagcgcctggcgctctactcgctggaggccggccccgagtggatcaaagaacgggtgaaagacctggtgaaaaaccgggcgctgctggtggaggcgctgtccccgctcggcgaggacaacgtcaagggcggggagggcgccatctacctctgggcaaagctaccggacagctgctcggacgacttcgaggctgtcaggtggctcgcgaacaagcacggcgtcgccgtgatccccgggagcgccagcggaggacccgggtacatccgcgtctccttcggagggctcaaggaagaagacaccaggctggctgctgagaggctcaggcgcggcctgcaggagctggtgaccgatggaatggtacagtgacggctccatgggtgtaagtaaaagctccaattttccaacggtgtaattccgccgtgattaattcgggagaagaaaaggaacttgttttcaagaatgcactgcgttgctcggacgagagacgggacggaataaaatgcgtctggtctgcagagtcacctatgttatgaatcatatgtagtgcatatgtcatgagtgacagagtgagtaattgtttctgttcgacttccagttctacatattactgatcgatggcagcaactgtacacagtcaaaggtataaccgtataagcaagaaccgtgagctgttcttgacgtgcagagcttgcctgttagcaaatatttctgtccagataacgacagcatctgccttcagaaccagcgtcacattctgtaatggcatggatgagtgtctccaagaaagataaatctactatatctacatgag

SEQ ID NO: 16690 - DNA, 779 bp, Zea Mays
gcataattagcttctttcgtaccccgggcacaataagaatattcaatcgctttgttgggattctgctggcgaatatctcgcttctgtcagtgaagactcggtcagaatatggtcattcagttctggacgtgaaggtgaatttgtgcatgaattgaatcgcagcggaaatcaattccactcgtgtgttttccacccaacttatcagtcattgctagtgattggttgttacgagtctttggaactttgggacataagggagaagaacaccatgaccttcaacaatgcgcatgacggtttggttgcagccctggcatcatccagtgctacagggaaggttgcctcagtaagccatgatagaactctcaagctctggaaatgactttataatagcgatcggtgtgaagacgattttctaccaaaaatgaccacatgacgcacatgacgaaaaggtagctgacaagatactctggagccgcgtgggctcaagaactaacggtggtttgtgttgtggttcttgtatgctgttcaatatgctattgaagtttgtaactcctaatagaaacgttcagtcaagactccaagattgtacctcggacaagtagcaaatatttattccccaaaaaaatctgcattttgttttttaccgtgtattttaacgtcgccgagcctgtttggaagctagttttaatgttttgcaaaatttacgtggactaaaaaaatgcctggattaagaaggccagcacagatggagcgatccgacgtgtgtcgattgagcactg

SEQ ID NO: 16691 - DNA, 1707 bp, Zea Mays
ctccctatcctgaaacgccaatccgataaaaagcgcgcaccggcgtggcgcgcttcgcccccaggagccccgatcatctcccgctcccttccttcctcctcctcctcctcatggctctgtcgtccgccggctcgttcgtggcctgcagcctccggccaagcggagctagcatccatgccccgaggtcgccgccgcacctgaagccgggtgctgcggcggcgtcgttcacgaggacgccgcagcgccgggcgaacgcgaccaagggcggcgtgtccaccgtgtgcgagccgctgggccccgacaggccgatctggttccccggcagctcccctccgccgtggctcgacggaagccttccaggagactttggatttgaccctctcggactaggttcggagccggagctgctgcggtggttcgcgcaggcggagctgatgcacgggcggtgggcgatgctggcggcggcgggcatcctggtcccggacctgctggcgcggtggggcttcatcgacgcggggttctcgtggttcgacgccgggtcccgcgagtacttcgcggacccctggacgctgttcgtgtcgcagatggcgctgatggggtgggcggaggggcggcggtgggcggactacctgaggcccgggtgcgtggacatcgagccgcgcttcccgaaccgcaagaacccggtgcccgacgtggggtaccccggggggctgtggttcgactgggccaactggggccgcgggtccccggagcccgtgatggtgctgcgcaccaaggagatcaagaacgggcggctcgccatgctcgccttcgtcggcttctggttccaggccgtgtacacgggccagggccccatcgacaacctgctcgcgcacctcgccgaccccggccactgcaacatcttctcggcgttcacgtcccactgatccgatcttgcttcggagctggcggagagactgcgaaggattaaaaaaaagggcatcctgttgagggagaaagaacttcgcttggtcggtatcattttggccttgctggacatgtcaacattttgtttgtagtacctgcgtagaaatgtcaaaccacctgtacaaacgtacaaataccaccccagggatcgcgatgatgctagccagcagtccagcacacactagcttgtcctgaagatccatgcaacaccgtatacagaggaaatttatggacacggcaatgtaaacatcccccatatcctcgtcgtagcataacggtgtcatctacaatacaaatcctttatttattttacacgatatactgcggacaacattagcggtgttaaggtgattgggttgctaaaattagagggtgttgcttgaggattaaagctagtttgggagtcaaaaaaaccgaagcagatatgagggactagaatctacacattcaattttgtacatgcagccagtaaacaggagtattgacgacaaaaaagaaattatcatccagagaatacgtgggaaataagcaggaatacataaccaagatatttgccaggccatcatgcaaatccttggagttggcggccacaaagataggagtttgttgtaatcttttcctattatttagaataagttagttttatatccagttagagacgggatatataagcactattgtaagctgcaaagacgagagatcaacagttatcattttctttaatctactacatattccttt

SEQ ID NO: 16692 - DNA, 1553 bp, Zea Mays
gttatgatggactttgtcttctctgagtcagaaggtggaatatatgacaataggaatgggatggactatcatattcctgtgtctgattctgttgcaagggaacctccaatgcatattgtacacattgcagtggaaatggctcctatcgcgaaggtcggaggccttggtgatgttgttacaagcctttcacgagctgttcaagatttaggccataaagttgaggttattctgccgaaatatgattgtttaaaccttaacagtgtgaaggatttacgctaccaacaaagttttacttggggtggcacagagataaaagtatggtttggaaaggttgaagatctccctgtttatttcttggaaccacaaaatgggatgttttgggttggatgtgtctacgggaagaatgatgagagtagatttggcttcttctgtcattctgctctggagtttttgctccaaaaaggatcttctcctgatatcatacattgtcatgattggtcaagtgctcccgttgcttggctgtacaaggaacattatgctcttaatgggatcggaaatggtcggattgtatttaccatccacaatcttgagtttggagcgcatcacattggcaaggcaatggcacattgtgacaaagctacaactgtatccgatacatactcgaaggaagtggccggacatggagctattgcacctcactactataaattccatggaattcgaaatggaattgatcctgatatttgggatccatatactgacaaatttattccggtccattatacatcagagaatgttgttgagggcaagagtgctgcaaaaaaggcattgcagcagatgcttggattacagcaaactgatacccctgttgttggaatcatcactcgtctaacagttcagaagggaatccaccttatcaaacatgcaatgcatcgagctcttgaacgcaatggacaggtggttttactgggttctgcaccagatcctcgcatacaaagtgactttacaaatttggccagtaagctgcatggtgaataccatggccgagtgaagctatgtctaacctatgacgagccactgtcacatttgatatatgctggcgcagacttcattctcgttccttccatcttcgaaccttgtggtctaacacagcttattgctatgcgctatggatccatcccagttgttcggaaaactggaggcctgtacgacaccgtttttgatgtcgacaatgataaggatcgggctcaagcacaaggtctcgagccaaatggattcagtttcgaaggagctgatagcagtggtgtggattatgctctcgacagagccataaccacattttatgatgcacgcgactggttcaattccctttgcaagagggtaatggagcaagattggtcatggaacagacctgccctagactacatggagttgtaccattctgctcgcaaaagctgatagcttttaccactagggaaatcaggctcgttttgcccagggttggcatgctatgtggtattttgaggaagaaaatcagggggtttaatttgatt

SEQ ID NO: 16693 - DNA, 1610 bp, Zea Mays
gttttacatactggttcgaccgttgcctacgaaatctaccagcccatcaacaccgaaaagggatcgcggagaggaggcccaagcaacccaagcgcttgcaatccacttgacattttctcctcctcgtctcctcacctctccgccgccatgtccatccccggtaacgggcaccttcccgcgtccgattccctcccggaccactcctccgcctctgactccgacgccgatccggaatccgactaccggccaatcaccgccgccgactccgactccgactccgaccccgacttcgacgccgccttgccccaccaccgcatcgaggagacaggaaacggcgtctccgcgctggatctcgcgtccgacgaggacgaagcggcagaaggcgcggaggaggacgatggggacggagacccgaggcccggggcggcggcggcggcgcgggccttctcggaggacgagcgtcgccgccgcgccccgctgcccgcgggcgccgcggcgcggatcgtggacgcgatgcgcggcgtcgagttccccggcgcgccgccggcgtgggcgggcagcgtccccgaggaccagtggctcgaccgcctccagtctctccgtgccggtcgtcccaactgatgtgttgagcagatcagcagaacacaatgggtcttctttcgcatctgatgtgatggccgatacaacagcgtgcaatttgtatgccaactttgatctagtttattgttattgttatcgtgactggaggactgcagctcatcggccatgaggttcatcatctgttggaactttgatcttctcatcttgaccctctaggagggtcataaagtatatgtttgcaagctcaagactttcagacaatgcaagctttgtgggagagatggaacaattgtgatgattcctggtcaggggacgccacttactattgagcagagccagaaagaagagaagacttgtttgatggtgtttgactgcagaggctatgaacctgttgagttttcttttggagctggctggaaggctgagtctgtgcatgggactccttttgaaattgactgctctgaagatgaattttctgagtatgatgagaagggagaatgcccggttgagctaagcaagctgcagtcaacattcaaagtggtgaagaagcatgagaagggtggtaagacaagatttgtctagatccagtgacttggagtctgtcgggtattggaatcggaggtgtataaatggtacatttgggctaaaaggttgtgcgtaagacgtaccttctctgtctattgattttgtggatgccgtgaaccatgtgaagctttcagtgacagtgtccacagaggcattgccctggaccgattactattgttctgtggtctgaggtcatcggaaccgatctttttatcttctgctaatgcttgaacatgctgctgatttttttttgagcattgtgactgatggctctgaagacatctcacgaattggaggctcccaacgattactagccagattgcttctccaatttatactcatttcgttataatttataattcatttgactttttttatcctaagtttgaccgggtcatcttattaaaaaaatatataattattat

SEQ ID NO: 16694 - DNA, 4549 bp, Zea Mays
ctccttcccgttccccgcagccgcccaaaccctagccctagcccctagccccgctgccggcaaggccggagcgcccggagcccccgctggccggccccggagaagacgtcccatgcggctgtatcgcgcaggggaaatttaggtgaatgttacaagcatgatgactcaaaccctgcaagggaaagttatggcctacacaccgagcagttttcctgttcagcaacagattctgccggaggatcttgaaatgcttcagctggataacatggaccagggtacctctccggttcgtgctgtcatcattaaaagaattgaaacatgcctgagaaatagagaagaattttgtaacttgtgcccagattcattactgaaagcttcagaaatcattgacaacctgctatacaaaattgatccgcagccccaatacatggatcttgacacaatagaagccagggtgaatgatttgctgagatcgttcctgtatggaaaccaaagagacccatggatatcttcagcagttccatcaacaaaagatttgaggcagctgcctgggatacaaatgacagactctagtgtatatcataatagagttgtccctggttttactaatttgcctgcacgcccaggaggcataccttcacatgctgtgttcactgctcagagatatgtaccactgaatcacaacatgactgctgccagttttgctctagttgaaaggcctgaaagctttatgagtaccgtagttgctccatctgtgtcaggacttcctaactgtatttctggccctggtgggattgatagttctggattgcaaaatggctattcaaaggaccattttccaggtgatgcttatcatgttgatagtccacaactgtctatgtccgggagtcccagtcctttatcagccttatgtgatccaatcacaagttcgggtgcaatgataagatcatcaatggattttatccctaaagcaagtgggcaaaaactctttactggcaaaggacaaatgtttcaacaatacagagaatatgagaaagagttagatggtgcatggagccaccccacagagaagccagttcactcaaataggacaactcagagcgatgaaatatatctcaaaggagaatgcggacctgatacactcacagaaatgaaggaaaactatgggcgcatctcagactctagagatccttgtgaccctgagagagaaattgttgagagatctgaacagacatcaaatatcacagtatcaaaggcaacttcaccaatttcagatgaatcttctggcaggcgtccagcaaaacgcctgaaggctgatgctccccgtcttgtcaatgtcaatcaagtagagagtccacaggagcaaaaacctgttgtgaatgagaatcatgtatctggtggtgaaacagtacaatcggaaatcacagaattacctgcaaaaccaccttgcagttcattgggagacattaatgctgagagcaataatatgcttgaacagggtagtgaagatgtacccaacatggatattgttaaggaagaggaattgtcccgtgcaaaaggtgacattgagatgaaagatgctaagactgttgcattggatcatacaccaaaaggggtcaatttaagttcaagacgaaagagaggggcttctatactttatggattaactgctgaggagcttagagatcacatgagtagtctaataaaccggcatacttgtcagagcaaggtgacatctcaagaattcccatcaattgatggattgcctgatcagaacacatgcagtttgtgtgggatggagaagcttctttttgaacctcctccacgattttgtgcgctctgtttcaaaataataaattctgcagggtgctattatgttgaagttgaaaatggaactgagaaatcttctatatgtagcaaatgccaccatcttagcagtttaagagctaaatatcagaagaaatttaattatgcagaaacagatgctgaggctgaatggtgggtccagtgcgacaagtgcaaagcttggcaacatgaaatctgtgctctttttaacagaaagtgtgaaggggcaaaggctgagtatacttgtgcaaaatgttttttgaaggaaaaggatagtggagatattcaggcactggagtcatccactgttcttggggcacaggagttacaaagaaccaagctaagtgatcatattgagcaaagactttcagagaggcttgagcaggacaggcaacagagggcgagcgcctctggaaaagttgctgaagaggtaccaggtgtgaaagggcttacagttagagtagtttcttcagccgaaagattactgcaagtccaaccacgttttcgtggtttttttaaacaaggaaagtatcctggggaatttccatacaaatcgaaggccattctcttgtttcaaaagatcgaaggtgtggatgtttgcctctttgccatgtatgtacaagagtatggctcagattgcccaccaccaaatcaaagacatgtttatcttgcatatattgattctgtcaaatacttccggcctgaaatcaaatctgcaactggagaagctctccgcacctttgtgtatcatgaaattttgattggttatctggactactgcaagaaacgagggtttgtaagctgttcaatatgggcttgcccatctacgaagcgagatgattatgttttatattgccatccaacagtacaaaagatgcccaagtctgacaagcttcgaagctggtaccagaacctgatcaagaaggccattaaggagggtgttgttgtggagcgtaatacactctctgacttcttccttcagcctacaaatgagtgcaaggccaatatttcggcagcatgcttgccatattgtgagaacgatttctggcctggagaagcagagaggctgcttgagaagaaagatgataatgcttcacagaaggaagagacacaggtaggaaggctcttgcgtgttgccaaacgcgacgacagaaaaggaaaccttgatgatattttgcttgtgcataagcttggggaaaggatgcgcacaatgaaagaagacttcattatgctttgtctgcaacagttttgcaagcactgccaccatcctatcctatctggcaaaagttgggtttgcactagctgtaaaaatttccatctatgtgacaagtgtcatgcagaggagcagaatacagcacagaaggacaggcatccggccaccacaaaacagaagcatgcattcgaaagaatggaggtacaacctcttccagagactgatgatggagatccgacaatggaaagtaagtattttgacagcaggatcgatttcttgaagcactgccaagacaatcaattccagtttgataccatccggcgggcaaagcactctacaatgatgattctgtattacctacacaattcaacctgctctgcttgccatcgtgccgtggaccaatgcttggtgtggcggtgcctagagtgcctaggctgcaccttttgtggtcaatgctataaacaaaatggtcaaggcttgcatattcatgaattaaggcagattgacactagagaaacttcacagaagcacactctacaggactacattgatggccttgtgcatgcatcgaggtgctatgatccacgtaactgcacccatccactctgtttaaccctgaagaaactgttcgcccatggtgcacgatgccatgtccgtgcctgcaatagcggcggttgcaaaaagtgtctctttatgtggaaactcctgttccgccactcaaaagattgcaacgacggagactgcgcggttcctagatgcagggatgtaaaggcattcatagctgaaaagatgaagcttaaaatctagtaatggaccccctcccccttctcccccttccttaaccagtcaaattcgttgatgaagatgcaataaactgcggttggccattgctggtggatggaactgcaaggtaaataatgtggtgacttactgcttctggtgtggttgcatgtgctccatgccacagaggatcacccaaccgaagcttacataggcaatctgacattggtttttagtgcccgtacataccttgtacatatagtttttctctccaacacaaataggggtttgttttaatttcttcatcgtcaaagttttgttctccataatgtctgcctcatttttgttcagtgttgcagtgctgcggtggcatccaaatattcaatgaatgggtaactaacaagtcagcgactagatagtttactagggtaaacaagagctaacagggaccagttagtcccatagatcaaacaagacctgacaaccatcctataagcttgttattcaagtggcaatttgcaaggcacggactactaattagtgctataacttgagaagttacacaatgatcttatccagggacccattgcgccgttcattttcttttccattcgaaccattggcttcatagagccgttgtctaaactcacgtatgatagattctagatagctataaaggggtaaataacgtataaaatatttttttataaa

SEQ ID NO: 16695 - DNA, 1651 bp, Zea Mays
gtgtagctgatatgttgtcatgttccaagtgaagaagaaacagttctttcgaaacttcattactattacactgtttggtgcagttggcaccttgatctcttttactgtaatatcccttggcgctctaggactaatatcaaggcttaatatcggcgcacttgaactgggagactatcttgcacttggggcaatattctcggccacagactcggtttgcaccttgcaggtgttaagccaagatgagacaccattcttgtacagcctcgtgtttggtgaaggtgttgtcaatgacgcaacttctgttgtgttgttcaatgcaatccagaactttgatcctggaaatatcagcagtgccaaattactgaacttcattggcagtttcctttatctgttcggctccagcaccattcttggagtagcttctggacttcttagtgcttataccattaagaagttgtacttcggcaggcattcaaccgatcgtgaagtttccattatgatgctaatggcttatttatcttacatgctagctgaattgctcgatttgagtggcattctcactgtgtttttctgcggtatcgtaaatgtcacactatacttggcacaatgtaacagaaaagttcgagggtcacaaccaagcatgcctttgcaacattgtcgtttatctccgagacttttctgtttctttatgttggtatggatgcattggatatagagaagtggaagattgtcggtcaaacttatagcccggtaaagtctatcgctttgagcagcaccattttagccttggtgctggtttcaagagctgcttttgttttcccactatcctttgtatcaaatttgaccaaaaaaactccaaatggaaagatatcttttaggcagcaggttattgtttggtgggcgggtctcatgagaggtgctgtgtctattgcgttggcttacaataagttcacaagatcaggccatactcaacaacctagcaatgctatcatgatcacaagcacaatcagcgttgttcttttcagcacaattgtctttgggctgctgacgaagccactgatcaggctcttgatcccgtcaaggcacctatccagggaaccaagcgccctttctgaaccttccagcccgaagtctttctttgagcagctggccgccaacagccctggacacccggatcttgagaatggcataagcctacgacgcccggcgagcctccgttttctcctagtaagcccggcacggtccgtccaccattactggcgcaagttcgatgacagtttcatgcggccggtgtttggtggccgtggcttcgttcccttcgtccctggttcacccactgagagcagcttgccattgcttcctggcaatgagaactgaaaccagcgtatcgaggggctttaattcagcagaagttttgtaaattggcttcgcttatggttataatatttggtgtaaatctaggtttgtagattcaacttggtagcatgtacatgttgatgtaggctagttaactgaccagcgaccaaacggctgtgcatattgatatctcgtcgctatcaatgagttcgtatttataaaatactctgtacatcggatcactatatatgtatcgtctccaacttaataaatactcatccgttctaaaataata

SEQ ID NO: 16696 - DNA, 2698 bp, Zea Mays
ccacagactgtagttgagaacaagcattccacaagtcttcttttgacaaaagatgaaagcacatctaccactgtcgtccaaggtgcaggctccttaatgtcaccaaaaggtgttcaagaggaagctagctttatgggtaagggtaaaggtggagaacaacagttgggctaccagcccaatgtgtatgtttctcagccacacacacccttttctggaggatactcgaaccatttggatcaatgggagggatacccatatgctgtgagtgcagagggacttgatgctgcataccctgtgacgtatggagcttattcccctttgtcagccattggagatagccatacatatttctctttgctctgccccttgtcaaggccttgctaccagccacctgcttctccaaacatgagatattcaagtcctggtactggaatatctcaattttatcctatgcaccagtattacagtcctgacgaagttcattactcagtgactcctagcttctatcagccttttggttcttttaacggagttccaatgcaaccgagtagttttcctggattttttgggcaaggaaacatacccctgacttctagaatggagtccatgtctaattctggatcacacaaggcattccagcaaggtggtaaatttggaggcagtacacaaagttggagcactgctagttgcaaattcggtaccttcaaggatgagaagtgctctcctgactttctgaatgagcaatgccgtggcccaagggccaccaaaacaaggaaagaagtggggagctcttcaaccgaagacaaaaataagaatgtcttgccaatagctgattctgataaatacaaccaccctggttttgtgactgagtacaaggatgccagattttatgtaataaaatcctacactgaagatcacattcacaagagcataaagtataatgtttgggccagcactcccagagggaacagaaagttaaatgctggttatcatgaggcaaaagcgaaggaagatcattgtcctattttcttgtttttctcggttaatagcagcggtcatttctgcggtgtggctgagatgattggacctgtcaattttgacaagagtgttgattactggcagaatgaaagatggaatggccaattccctgtcaaatggcacattgttaaggatgtcccaaacaacattgtccggcacatcatcctagagaacaatgagaacaagcgagttacaaatagcagggacacgcaggaggtgaaactgaagcagggtctccagatgttagccatcttcaagaaccatgaagcccagacaaacatccttgaggacttcgacttctatgagcaacgagagaaagctatgctagatgacaggcaacaacagaagccagagtgttccgatactggcaagcaggtgcaggccagtgcaccggtggatattgtgactggtatgtcggacgcatttgcacaggcagttcaattggaaaaaaccaatgacaaagaaaataaaccaaggattgaagatgctgatgctgctgataatgctcccgctgctcctgtgaagatcgaagaggacatgctgaaaacagcggaagtgggaggcctcttgaaggaaagcgggtgattgctcgttctccattcatgactaatccagagcagcagctgggcccatttctgaagccatttcagggatgagagaataagagttatgcaaatatttgcagccacaggttcaaagcagcctctccgcatttgttgctcagacctcttatgtggagtctgacactgggcccttttgtacagcatggtaggctagagacataggctttgttttaccttcagttagctttgttttttaccttcagttaaacagactacagctagttacagagattcctaaattgtcaccgttttcctccgctcactgctttgttaactttttttccactgaccccctgaagaattgtgctcaatgtagccaattagccaggaaaaaaaagaaaaatactattttctattagtcccgaccaaattctacatgttagcttggactgacgctatcagaactattgccattggaacaattcattgtcaggaaattatacatgctatatgctcaagcaacgaagtatttgtgcatattccagtaggagggttataacatgaacagaccacctccagtaggaggcacattccagtagcaggatcacaagaacattacaagaataggaaccctgcatgatgtttcgacaggacatagactagccctaaaacatctcaagagtctgaaaacgcgaactaggtatatttctaagtgcaggaatatttcaaagacaacaaggcttacacctgagtatacacacatacagccataaactcaggtgtgctttctacttcagctgagcgaagtttggacacatgataaatacactcaattacgcttccatggagttcatttcaactctcttgtttgattcagtcggtagtcatcggttgggacatgcaacaccgaaatcgggccttgcggacagtgctcaggatctccatctcagcatgctccagcatcctcacaacttcagtgaatggcggacggacatcaggatttggatcccagcacctggtcatgatctcagcaagggtgggcaggcagtcctggggtatagctgggcggacacccttgttcaccacagcgaaagcag

SEQ ID NO: 16697 - DNA, 1405 bp, Zea Mays
cgtcttcgttttgtttcgtttcgtatcggatcgtgccgctcttcccttctcgtctagtcttgtctttctttcctcctctgttactccacctacagacctactactgccatcgggagggtaagctcttcggagccggagccgggtccacgttaacgccatcgagtgctgcgatgggcagcttaggagggagcgccggtgctggggacggcggcaaggtcgggctgccggcgcttgacgtgacgctcgcgttcccgcaggccacgcccgcatcgctcttcccgccagccgtttcggactactaccaatttgatgatttgctgactgatgaagagaaggcactcaggaagaaggtccgaggtatcatggaaaaggaaatcgcgcccattatgactgagtactgggagaaggctgaattcccattccatgccattcccagccttgccagtcttggtttagctggtggtacaataaaggggtatgggtgccctggactctcgcttacagctagtgctatttcgatagcagaggttgcacgggtcgatgcgagctgctccacatttattctagtgcactcctcgttggctatgtccactattgccctttgtggatctgaggctcaaaagcagaaatacttaccatctcttacccagttcaaaactattggttgctgggcattgacagagccagattatggaagtgatgcaagctccctaaggactgcagcaaccaaggtacctggtggttggcatttagatggacaaaaacgctggataggtaacagcacttttgcagatgtcctcatcattttggctaggaatgcagatacaaaccaactaaatggatttattgtaaagaaaggagctcctggtctaaaagccacaaaaattgaaaataaaattggactcagaatggttcaaaatggagacataattctaaataaagtatttgtccctgaggaagacagattaacaggcatcaattcatttcaggatataaacaaggtcctcgctatgtctcgaattatggtggcatggcaaccaataggcatatcaatgggagtttatgacatctgccatcggtatttgaaagaaagaaagcaatttggagctccactggcagcttttcagctcaatcaagaaaagcttgtccgcatgcttggcaacattcaggctatgcttctcgttggatggcgactgtgcaagctgtatgagtcaggcaaaatgacaccaggccggtctagtttaggcaaggcatggacgtccaagaaggccagggaggtggtttctcttgggcgagagctactgggtggcaatggcattttggttgattttcttgtcgccaaggcattttgtgacgtggaacccattttctcgtacgagggcacctatgacattaatagcctggt

SEQ ID NO: 16698 - DNA, 2028 bp, Zea Mays
ctctgcgtccggttcttggaaggctccccccatggatgatggggcctcttctggggcttgacccgtggaggtctggcccaggctgtcaacgtccatccatatataggatcgggtggcagctgctgcaaggggcctcgtggatcaactatccatgcctgagcgcctccacggattctatacaacgtgctggattcgcaagcccaacacctatccaagcccagtcatggccaattgctatgcaaaatcaagatgtagtagctattgcaaagactggatcaggcaaaactcttgggtatctacttcctgggtttatgcatatcaagcgcctgcagaacagcactaggaatggcccaacagtgctagttttggccccaacaagggaacttgcaacacagattctggatgaagctgtgaaatttggaagatcttcaagaatttcttgcacgtgcttatatggtggtgctcctaaaggtcctcagttgagagatttagatagaggggttgatgttgttgttgcaacacctggaaggttaaatgacatcttggagatgcgaaaggtgacaattggaagtgttgattcacttgttgctaatagttctattactcagcatgtagagatcataacaccctcagaaaaacaacggcgcctggagcagatattacgatcccaggattcaggttcaaagatattaatattttgtaccaccaagaggatgtgtgaccaacttgcaaggacactcaccaggcagtttggagcttcggccattcatggtgacaagtcccaaagtgaaagggagaaggttctgaatcagtttcgatctgggcggtctcccattttagtggcaactgatgttgctgcgcgaggtttggacatcaaagatatcagggtagtgatcaactatgacttccccactggtgttgaagactacgttcacaggattggcaggacaggaagggctggtgccactggtgttgcatatacatttttttgtgatcaggattcaaaatatgctgctgacctaatcaaaattctggaaggggcaaaccaacgagtgccccgtgatttagaggatatggcttctcgtggcggtggacgaggtaggaagaggaaccattgggcatcccgccctgacaggggtggttcacgttctgaactggattcaaggtacagcagcagagatggactagcatcttctgggaaatcagagagtggtcgcggcagtcgtggaagggatgataatggtagccgtggcaggtacgaccctggtgaaaccgatgggcgatctcgtaggtctactagaggccgcagtagaagccgtagcaaaagtgacagtagaagccgtagcccaagtcccaagaagtcacgtcgtcatgaaggtagacgtagcaggactaagagcaggagcaggagcaggagccgtagaaatcatggcgctagccacagcaagagtcgcagccctgtcgctagccgtaggtatgaaaagactgcttcaggatctgctcggcctaactcggggcatgcagagcacaaaagccctccaagatctcactctagggatgaccatgtgaaccactctgaccacaaggatgatccgcgtgcaaatgcagctgtgcagaatggtaataactgacggagagtggcctgcatcttctgtgacaaccaagacttatctgttatgcaaaatgcagtcattcccatctgcaagtcctgaatacggaaatgcatttgtgtgccattaaatatctcgtagaacatgtgatactgatgcctctgccatcgatgaaccaaaactgttgatgcatgtcatgtcatgttgttaaacttaatgacattgttgtgttctggtgttttacagccagttctgtaagtgatttatgataaaatatattgtcaggtctggaagtggtagtttatgataactagcaaagttatgttgctacggtttctatttataaagtatagaatataaaatacaaagacatgtgttctgttggttaggtgaatgcgaatatgggtttatagcaaaa

SEQ ID NO: 16699 - DNA, 1064 bp, Zea Mays
cgtactccgtagacacggactcctggattcagagcgggagggcagagagggccggatggcgggctggcggcgatgctggtgcctggagtggaatgcccctaagccaatgcatccttctcttttgaatgaggccttgcgatggacagctacagacggacaaaagaaagatctatggtcacccttgccatatcaggggtggaaaccatgcttaacgccatcagtttctcacaaattacctctggaaccaagtggatacatccaagtatttcttgatggtggattgaaccaacaaagaatggggatatgtgatgccattgcagttgcaaagattcttaatgctactcttgtgatcccacatcttgaagtaaaccctgtttggaaggattcaagctcatttgaagaaatttttgatgtggatcactttatcaactccctaaaagatgaagtttccattatcaaagtgcttccaaaagaattttcttggagcacaagagagtactatggcacaggcatccgtgctacaagaataaaaactgcacctcttcatgcctcagcaaattggtatttggagaatgtcagtcctatcctgcaaagctatgggattgttgcgatcgctcccttttctcaccgccttgcatttgatgatttgcctgtggatcttcaacgcttgcgttgtaaagttaacttccaagctctggtcttccgttctcacattatctcacttggagaaacacttgtgaagcgcttgaggtctccggtccgggttcattccagtaaatctatccatcaagttgtaggagacacaaatcaagctgaaaaatatgcagttttgcatctccgttttgataaggatatggctgcacattctgcatgtgactttggaggtggcagagctgaacagctagctcttgctaagtacaggcaagttatatggcaaggaagggtattaaattcacagctaactgatgaggagcttcggaacacaggacgctgcccattgaccccagaagagattgggctgttactggggaaatcaggaagttttaagagcatctccaccagat

SEQ ID NO: 16700 - DNA, 1993 bp, Zea Mays
ctccactgccgtctcttctgcttcttctaatcctcttgtcccgcgaaccccagtcgctaccgagagcacaccaatcctcatcacctccgagattttcatcgcctgccgcgcaatctcgggatcctagccgtccgcacatcgccgcggccttcctccgcgccacgaatggtgttctctggccgctgtcttttcccgaggacctaacccaaggcggtaggtaccagctaaaagtctaaaggcgaccaccggaccgggcggcaatgacgaccgccgcgagggagaggcgcctgccgccgacgctgcccctggccacgcttatcggtcgcgagctccgtgcggggggctccgagcgcccggccctgcgctacggccacgccggcttcgccaagcgcggcgaggactacttcctcgtcaagcccgactgcgtccgcgtccccggggaccccgcatcggcgttctcagttttcgccgtgttcgacggccacaacggcgtgtcggcggcggtctatagcaaagagcatctgctcgagcacgtcatgagcgcgctgccgccggacatcgggcgcgacgactggctgcaggcgctgccgcgcgctctcgtcgccggctttgtcaaggccgacattgatttccagcgcaagggggaggtgtcaggaaccacggcgacactggtggtcatcgatgggttcacggtcacagtggcgtcggtgggagactcgcgctgcatcctggacacgcagggcggcgagttgcagctgctaaccgtggaccaccgcctggaggagaatgcagaggagcgggagcgcgtcacggccagcggtggggaagtaggccggctcaatctcttcggtggtcaggaggttggtcctctccggtgctggcctggtggcttgtgcctttcaagatccattggggacatggatgttggggagtacattgtgcccattccacatgtcaagcaagtcaagctatcaaacgctggaggaaggctgataatagcatccgatggcatatgggatgcattatccaatgaagcagctgcaaaagcatgcagaggattgcctgcagaactggcagcgaagcttgtcgttaagcaagctctgaaaacaagcgggctaaaggatgacaccacctgtgttgtagttgacattatcccatccgatcatttgacatcaccacaattgtctccaaagaaaaatcataacaagttgaagtcactttttcgtagaaggtcgcatagttctgttggaaagctcgggggcaagtctgcctccattggttctgtggaggagttatttgaagaaggctctgcaatgttagaagaaaggttgggcaggaatttgtctttgaaagcagtttcagcaccttttcgctgtgcaatctgccaagtggaccaagagcccttcgaagatttgatgagagataatggaggtggttactgctcttccccatgcgctccatggggtggtccatatctctgtttggactgtcggaaaaagaaagatgcaatggaaggtaaaagatctagctgctccacagcatgcaggtgaaacagtccttgcctcaagcagaaaagaaccgatgagagaggataataagttgctggacccaagtataattgtttgctgaaactaactgtattgccagcccggtaaaagacatatttggctggtagtaagacctaactagtctgttacctgcgcacaatccgaatggaaaagtttgttgtcgttgaggacatagctcaaataacttgagcttgtagttttgatgtaccctgtagcgtgccttgtgcagggaaaaattgacctgcctattgctgtttttttttataaaatagctatcgagggtgattaatcgtggacatgtttttatttttttggtgggattgaaagaagtacatgcctggtgcaggaacgagagtgaatcgtattactaggtttgttcttttttttttttggttattgaagtacgtactaaagatgtactacaa

SEQ ID NO: 16701 - DNA, 1306 bp, Zea Mays
aacacttgtcagttacaacagaattaatattctctgcgaaaagagggcacttgaagtttgccattcaatctcaagagttctttaggacactgcaacggtactacagtaatgcatatatggatgcttacaaacaagctgcgataaacttatttttaggatacttccagccacaggtgggaaaacctgcactttgggagccagaatctggtgatgagcatgtacttgatgacgagacatgtaaattgatgaagagggcaagatcagatggcagcattcttaataaaagcaaactatcaatatccagtaatggcccaaatggaattttaaagttagcatttactggttcaaaaaatgaagggcagcgtccaaaccggagttctgatacagcctgtgacaatggcatgtcaaagtcaaggtatactccgacactgtctcacattaagcatataagctgtgaactagactattacaatggttctggtgattcaaatttcttggatcttgactggcttacagcttcagacaatgaaaggtcaaaagccataagcactcctgatgtgaatatttcaactgatagtggtgttcgtgatgtaatatctgggacaacggacgatcaagcttctgggatccacgcccaggggttttcaaaggatttcgtgcagtggctcaatcaaggagaggcgttttggtactgacatcgcaaggtgggcttaccatgtaaaaccaagccacacgatggttgcacttgcaacccaaacctggttccaaaagcatcataactctcaaagaccattgcaagcaaggagggcaccatcgacgtgcacgagatttgcttgtcaaccatcagcattctcctcgcggccaaatatgatgacggggcttagagtcgcacacactgttagcagacttgtctagggaagtgtaccattctgttcattgattggagcttgctcaccaggcgggtagatagcgcatcgctgttgttcttctttaaaaaaaaaggaaagaaagaaggtggtaggtagtagtatattcttttgaagatgtaccattgtccagacatcatcgtctccatctccattgtgtaaatatatatgtatgtcccaggtgctcccacctttcgcttcgccgttgtgagagttgaggtgggcaaaaaagcatcattttcccccctcggttgggggtctttcccttctggaatcgtgtacatgtgtcttctgtggcaggcaacaggaggcgagattgttgtgtacttcccatcgtactaaacccctctgttaccgatactgcccccttggaccgttcg

SEQ ID NO: 16702 - DNA, 909 bp, Zea Mays
tttagcactgatgattccgaacatatgcctatttaggattttggcaaaccgccagtcagctgctaggtcgaaagaaagaaagatgcgctacattgcggagcttgaaaggaaagtacagactctccaattagaagcaactacactatcagctcagctggccatgttgcagcgagatacgactggtatgacaagtgagaatagtgatctgaagatacgtgtgcagacaatggagcagcaggttcagctgcaggacgctctgaacgacaggctaagagacgagattcagcagctgaaggttgcaacaggacaggtaaacgccagcattggaaaaacaggaaactctggtatgtcatcatttggaggtaatccacaaagttaccagcgtagccatatacagtctcttctggctgctcagcacctgcagcggctccggatccactcccaacatcagcaacagcagacgcattttcagcagcagcagcagccgcagccgcagctgctgctgcaggaggcgcatccatttccggtggacctaaagatgagaggattttctctgtcatcacatgctcagaacgcaggtgcatcagacagccatgctgccaagagcgaaccctgagatttagcatgtattcatgtgggttgttagaaataataatgtcgctctgttagcgtggtgtctaggtgaacttcaatttgtttgaggtgcttagattttgtgcagcctggagctcccatttggttgtaagcttcagtgctgactgaccggtcatttaccttgcctaatgcttgtacctgggtcctggccatgactttgtgcctggaggatggagccgttcgcgcatctgtgcaagagcagaatgacaattgttctttggttctttgcaatagttcaaccttgagaacctaaaa

SEQ ID NO: 16703 - DNA, 2176 bp, Zea Mays
caccaggcttgtcattcataagaatgtctacttccttaagaaggataaaaatgttaatgcacgctggtggcaaatttggaggttcaaaaagtggttacagtgtctctggagggcttcatggtgttggcttatcagttgttaatgctttatcagagacacttgaagttactgtttggcgtgatgggaaggaacacagacaaagctattcgcgggggaaaccaaccactaggctaactagtagcacactgactggtgaaacaagctctcgtcaagggacgcgcatcagattttggcctgataaagatatatttaccaccacgatcgattttgacttcaatacaatctccagtcgcatacgggagcttgcctttctaaatcctgagctaacaataatcttgacaaaggaagaagggcacacagttcaacgcaacgaatattgttatgctggtggccttgttgaatatgttaaatggttgaatactgacaagaaacccctgcatgacccgattgcgttcagaaaggagttggatggtataacagtggatgtctcccttcaatggtcctctgattcctactctgatacagtgctaggatacgcaaacagtatccgcactattgatggtggtactcatattgatggtctaaaggcttcattgacgagaaccattaataaccttgcaaagaagtcgaagactattaaggataaggatattaccttgagtggggagcatgtaagagaaggaatgacatgcatcatttcagtgaaggtccctagtccagagtttgagggtcaaacaaagacaaggttgggaaatccagaagtacggagaatagttgagcagtctgttcaagaaaacttaacagagtacttagagcttcatccagatgttctggattcaatcctatcaaagtcccttaatgctctcaaggctgcgttggcagccaagcgtgctagggaactagtcaggacaaagagtgtgttgaaatcttcatcactccctgggaaacttgctgattgtgcatcagctaatcctgaagaatctgaaatctttattgtcgaaggtgattctgcgggcggtagtgcaaagcaaggacgggatagaagattccaggctattttgcctctaagaggtaaaattctcaacattgaaagaagggatgaagcagccatgtacaaaaatgaagagatccaaaaccttattcttgcacttggattaggagtgaagggtgaggattttaagaaggaggctctccggtatcataagatagttatacttactgacgctgatgttgatggagcacatatccggactctcctccttactttcttcttcagatatcaaagagcattatttgatgaaggttgcatctacgttggtgtacctcctctttacaaggttgagcgtggaaaactagcacattactgctatgatgatgccgacctcaaagagatagttaacaccttccctgcaaatgcatcatatcatatccagaggtttaaaggtttgggtgagatgatgcctgcacaattatgggaaacaacgatggatcctgagaggcggctgttgaagcagcttagggttgaagatgctgccgaggccaatgttgtgttctcgtcacttatgggcacccgggttgaatataggaaggaactgatccagaaagctgctagcatgatcaacatagatcaacttgacatttgaaggcattaagtaaggctgtcctttctgtgtatgatatagaaggtccgccacctgctgcttttcttgccactccaacaggattctagcgttgcagacttgatgataccttggcaacatctttttggtgctagagtagcagaaaacgtagggtacaaacattggatccaggatgagagctgggtttcctaacgaaaactctgattcatttgtggcggtgctataaccatttcagcttgacagttcagagctcacgggtgtagttccctgctgacatcgttcctccgatacggtgtaatatgcttttatatctatcgcctaatatttgcttcatgattccgtgtctcctttcttaatctggcagttaagtatctgtatgagctatggattcgtctgatgtttaaattggacggtttgaacccagttgacatgtgagcaatatctggtttggtttataggtaccaggtttagagagc

SEQ ID NO: 16704 - DNA, 881 bp, Zea Mays
agggcctcagtttttgctactctacctttccagattctcctgggaagcgtgacaaactacgtgctgtcaaacgcatcgtgcccggtgacagtcgtcaaggggaagtagtggcctgggcagcgtgccagtgatatgaatgaagatgctagcgtgcagtttgtgtgggttatagctaaacactatgttccgtcctgttgctgcatttcaataaagcatgtgtcttctagatttcacaaatctctctgaggctctgacctttgtcttattagctgtgaaactgtccgtacttcattcctgttcagatcgaattcgaggattggttcataccccttttactgtcgtgtcgtttgaactgctggttagtctgctcaatttgtatttctgattgtcttgcaccacgtttggattgcagcacagagtggtccgatcctaaaaccgactcttatcgttttgtttggtttgagtcacgacatgacgacgacgtcctctgaaatttacacagcagcactgttaattttgccggacacccaaactcaaatatgaaaccacccgaacaccagtttgggtgataatccaaatccgagaccaaacctcatggatccccgaaacctaatctcaaaggccaaaaccacaccaagcacagcacccctacagctcaaacggttaaacccaccaaaaggtccatgtttcacaactcaaaagcatgttccagctccacacatttgatctctctaccatacatactgaccatgatctgttgcggcgtgtagtagcgtgtgttactgacttacagtagcatcccagggcggtttctcttgttgccgcttgttgcggcgtctagtagcgtgtgtcaggattggacaccagatgttgatcggatc

SEQ ID NO: 16705 - DNA, 2321 bp, Zea Mays
caacttgttctccagagacgcggcgcttctttgacatgatctgcgacttcatggagatgatatttatttctctttggaagatgagcaggaagacaacactcaacatcaagtgcattctagaactgcgttcagtccaagcagggatggttccatgttgtctcaacggcataatcggtatgaagaattgcctgacacatggtacaagccatatgctgacaaattcaggatatggcacagcaagcttcactcaggtgacaaagaaataccaaagagaacaccagagggaatgtctgactatcttaagatttgcagtgtacataaaaggaagagggctgtgtttatggatgatcccagcatatctgctcccatattggaaaatggcccttccctgcactcaaagaatgctggggaattcagcaattcaacagacgaattaattccagaaattagatttccatctgactgtgttccagaaagcgcaattcctaaaacaagtgggatatctagggctaacaaaatagaagttcatggagttcttgataatttgccagcaccatctagccgcaacactgcaatgcttgaaaggtttggcatggtgcctgaatattacaagacaggaaacaaatatagaggaaaagatggatctagagtagaagggaaatctttaagccaagagcaagcattgctcatgacaaaacagttggttgctcgctacttggcaaattcaggctttgaaagtggaactgtggtctctattgatgttctttcagaaataataattaagcacatatgtaaattgggacgcaacttgaagcttctaactgacagctacaggaagcaattttcatcaattgaactccttaagatgttcctacaaactgttgggtacagtaacattggatccttgatggagatcacaaagatggggaacagagtggccaactaccctattcatcaagatgcacaagttcttcagacacaaaatgcaatttccattcatgcacagcagcttccaaggcagtttcctccgcaaatgcttcagaatttgacaccacagcaacaacagcagcttcaaaatttgacaccacaacagcagcagcttctgcagcagcagcagtggcttaggcgcaaccagttatgcagcccccgtggtcctcttactatggcagacaagaaccagcctatggtgaatgtgaaggtagagaatactatggattctcaaatcgatgtcccatatgggtcttttactagacaacagcaatttaatataagacagcagcagcaactattgcatcagcagcagcaacagcttcaacagcagcagctccagcaacagcaacaacagctccagcagcagcaacaccaacaacagcttaatcagcagcagcagcaactgcagcaacagcagcagcaattgcaacaacagcagcagcagttcactcagcaacagcaattgcaacaacagcagcagcaactacagcagattaatcagcagcagcaccttcaacagcaacagcaacagcaactaaaccagcaacaacttcagcagcaacagcagcagatgaccatgtcaggaaatcagaatgcacaactagcacagcagttcaaacaagtctcatcaatgagtgcatatggcatgcgaatgccacctgtcaaagtagaagctttccatgaattggtgagcggggactcgtcgctgaagcacgataacgaccctaacaaactcacttctccaaagtagctgcggtgtgcaaaggatagcttttgcggtctgttgccttcctgccccccaacatcatgtctcgcctgtttgattgcgcacaacagcaagacgaaccgtgtatcgtaaatgtgaagcatttggctaattcactgccttcaaacaaactgatgtcaaatacgaactgataatagctccaagtttccttacattctgtacatggattaagggtgcgctgtcctctacataattagacctgtgcatattttaagtttgccagagaaagctcattcatttcatgccaagaaattgtggccattacgttcatagtgtgcgttggctcttcattttcaggccaggcctgggcttggatggaccatccgttagtttttagtatgaagacacttcaaatcaatatattagattggacttaggccaaggaaattttacgaatttggtgtttcgtctcatcctctaggttctattatgattttatccttatccttaattttaagccttttgattttgttctcaggattttaaataaaccagctccttgtttatgtaccacggaattaaatgatgaaaaacagaaaaaaaa

SEQ ID NO: 16706 - DNA, 4613 bp, Zea Mays
ctttttctcattcccttttctctcgcgctcgcaacggcggcgggcggcggctgcttctccgtctcctacttccccgcaaacttgtctcgtattcctagcgcagccggggaacactcccggcctccgcccgagcggagcggagcgtttcgtccgcgccgctgactccgaggagttcgtttcgccgcgctgtctccctgaatcctaatcgtccttttcgcgtttggctcgactgacgcgttgattcctgcttctttcgttggtctcccattctttttttacaagaactaaaaaaataaaaattctttgggttgggatggcatcacctggccaaatgacagcaagcaatctgttacggactgaaggctttcctggaaatatggtaaaaatatgtggtttaaatcctgcgagaagtcttggatcaagaagattgcggatgactcaacactccttccatcaacagcatctttgttgcccacgtctgcaaagagtaatgactcataatatccgattgttgtcatctcctggggccgtggcatccaaggggtttgacagcccattagttgagaaacctgatactgcatcggatgttaaaattattcacttgtaccgtataccatttcttcaagaaagtgaaaccatggagctgctcaggaaagtgaaggcgaaggtttctgctaatattgttgatatactgacagagcagtgcttcaacattcaattggacaattcactcactcctgagaaacttacaatgcttcattggctcttagcagaaacttatgaacctgagaagttgcagactaggagctttctggaggatgaagtatctagaaattcttgtactgtcattgttgaggttggtccccggatgacattttcaacggcgttctcgaccaatgctgtctcaatctgtaaatctctctcattagtagaagtgacacgattggagagatcaagaagataccttttgtgcctagagcctggtagtgacccacttgatgaaggtcagctcaaagaattcactgcattggttcatgatagaatgacagagtgcatttatcgcaataagctcacatcatttcaatcagatgtagttcctgaacctgtctgcattgttccagtcattgaaaggggagaagaagcattgaaagaaataaatgtgaagatgggacttgcttttgataaacaagatattgactattatacacacctttttagagatgatatcaaacgcaatccaactactgtggaactttttgatattgcacaatccaacagcgaacatagcagacattggttttttaatggaaagcttgtaatagacggagagaccatgccaaccactttgttccagttagtgaagagtcccctaaaagccaacctcaataactctgtcattggttttaaggataactcgagtgcaataaaaggattcccagtaaatcagctacgcccaacaattccggggttcacttcaccattatccattatcatgcgtgagctagatattttattcacagcagaaacccataatttcccatgtgctgttgcaccataccctggagccgagacaggtgcaggtggccgtataagggacacacatgccactggaaagggttcttttgtcgttgcttccactgctggttactgtgttggtaatctgcgaattgacaattcaaatgcaccctgggaagatccttcattttcttacccagtgaatctggcttctccattgcaaattcttgttgacgctagtgatggtgcatctgactatgggaacaagtttggtgagcctctaattcagggatataccagaacatttgggatgaggttgctaaatggggagcggcgtgaatggttgaagcctataatgttcagtggagctatagggcaaattgaccatgcacacatatcaaagggtgacccagaaattggcatgctagttgtgaagattggtggtccagcatacagaattggtatgggcggtggtgctgcctcgagtatggttagtggccagaatgatgcagaacttgatttcaacgcagtacagcgtggagatgctgagatggcacagaaattgtatcgcgtagtcagggcatgtgcagaaatgggagagagcaatcctatcatcagcattcatgatcagggcgcaggaggaaattgtaatgttgtgaaggaaataatatatcccaagggagctgaaattgatatccgttcaattgttgttggtgatcatacattgtcggtcttagagatatggggtgctgagtaccaggaacaggatgcactacttgtaaaacttgagagcagaagcctcttagaatcgctttgtgagagggaaagagtttcgatggctgtcattgggaaaattgatggcagtggaaaaattgtgttgattgatagcgctgctgtggagtattccaagctgaatgacctccctcctccaacccctgttgaagaacttgagcttgaaaaggttttaggagatatgcctcagaagaccttcgagtttaggcgtgtttctcaagtcacagagcccttggacattgcacctggggtaacactattagatgctctgaagcgagtattaaggctcccatctgtgtgttcaaaacgtttcttgaccactaaggttgataggtgtgtgacaggtcttgttgcacaacagcagacagttggtcctctccaactcccgcttgctgatgtggctgtgattgcacagacgtacacagacctaacaggtggtgcttgcagcattggagaacaaccaataaaggggttgcttaatcctaaggccatggccagacttgctgttggggaggccttgactaatcttgtttgggctaaggttacatcacttgctgatgtgaaagcaagcgggaactggatgtatgctgcaaagcttgatggtgaaggtgcagatatgtatgatgcagctgttgcattggctgactgtatgattgaacttggtattgcaatagatgggggaaaggacagtctttccatggcagctcaatgtgatggtgaagtcatcaaggctcctggaaatctggttatcagtacatacgtgacatgtcctgatataacattgacagtaacccctgatttgaagcttggtgaggatgggattcttctacatattgatctcgctaaaggaaatcgccgtcttggtggttctgctcttgcacaagcatttgatcaaattggaaatgactgcccggacattgatgatgttctgtacttgaagaaggtatttgaggccattcaagaattgctcagtcaacgtcttatttcagcaggccatgacataagtgatggtggccttattgtttgtgttcttgagatggcatttgctggtaactgtggttttaagcttgacatagacttagaagataggagccttattgaaggactttttgcagaggagcttggcctcattattgaagtacactcgaaatatctcaacattgtgaagcaaaagcttgaaatagcaggcatttctgctaatgttattggagaagttactaactcaccagaaatagaagtttttattgatggcaatctgcatctcaaggaaaaaacttcagatctcagggatctgtgggaggaaacaagcttccagcttgaggagttacaacgtctgaaatcttgtgtaaaacttgagaaagaaggattaaaatgcaggacatcaccatcatggtctctgtcttttaccccaaaattcacagatgggaaactgttgactgcttccttgaaaccaaaggttgccatcattcgtgaggaagggagcaatggggacagggaaatggctgctgcattccacgctgctggatttgaaccatgggatattacaatgtcagacctcttggctgggaagtcttctctcaaggagttccgtgggattgcatttgttggtggtttcagctatgcagatgtgctggattcagcgaaaggctgggctgcatcaatcaggtttaaccaacccctcattcagcaattccaggacttctaccataggccagacacgtttagccttggagtgtgcaatggttgtcagcttatggctcttcttggctgggtgccaggatcaggtgttggaggttctcttggtacaggtggagatatgtcccagccgaggtttattcacaatgaatctggtcgttttgagtgccggtttaccagtgtgtccattggcgattctcctgctattatgttcaaagggatggaaggttccaccttaggtgtttggagtgctcatggtgagggaagagcttttttcccagatgaaaatgttctagctactgttgtgaagtcaaatctggctcctgtgcggtattgtgatgattctaacaatattactgagacctatcccttcaaccctaatggttctccactgggtatagcagccctttgctcacctgacgggaggcacctggctatgatgccgcatccagagcgttgcttcatgatgtggcaatatccatggtatcccaaggaatggcaggttgagaagagtggccccagcccttggctgcgaatgttccagaatgctagagaatggtgttcatagtgcagtataacagaggttgttatagaacggagaatgttattaa

SEQ ID NO: 16707 - DNA, 294 bp, Zea Mays
gcgggccgaccgctccgcggggcaggaggtagtactggtgttccttggcgcccggggcgccgtgggttctttttcgcggcaccccccttccccgcgggaggttcgggggggcagcgtgccgggccggagcccggcggcacgggtgactcgttcgcggtctgttttgtttaagggtcacggcaatgatccttccgcaggttcacctacggaaaccttgttacgacttctccttcctctaaatgataaggttcaatggacttctcgcgacgtcgggggcgggggaccgcccccgtt

SEQ ID NO: 16708 - DNA, 8578 bp, Zea Mays
  misc_feature (8577)..(8578): n is a, c, g, or t
gttcgagaccggtccttgtataaccagaggcccatcgccctcgtcttcctccaagtccgtccccgtctctacccccaccccaaaccctcggctcgcgagcgcgagggagaccccttcctccgagtccataacacggggttgccattcgcgtcgggggaaacgagcccgcgcctcctgcccctgcactcttacggtcctacctccagccatccgctcctccgcccagctcgcggagtcttcccagcgccgatcttcaaaaccctaagctctggcgcggtaaggttggagccggacgcgcacgggcggggcgcccgccatggcgcccatcaacagcggcaacatggagcagcactcgcagcggctcctcgagcccgacctccctgtgcaagtccgactgcagcttgccatggaagttcgggacagcctggagatgacgcacactccagactacctcaactttcttcgctgctatttcagagccttctcagcaattctcaccgcttacaccaagccacaggccacagagaatgctgagcacaagctacggaatgttgtgatcgagatactcaaccgccttccacacagcgaggtgctcagaccatttgtgcaggatctgctcaagctttctctccgtgtgttgacacaggacaacgaggacaatgctctccttgccatccgaattgtgtttgacctcctccgtaacttccgccctactgtcgaggcggaggtgcagccatttcttgactttgtggttaacatataccataaatttcccacaaccgttagctacttcttcgataatcccaacacaagtgccagtatggctgcctccatgcccatgcagcatttggaccccactgccgatgcctcagtcatgatgcaagtgcctggtggtggtcaactcaacccaagcgcacgttccttcaagatagtcacagagagccctcttgttgtgatgtttctcttccagttgtatgcaaagcttgtgcagacaaatatcccgcacttgttgccactcatggtggcggccatctctatcaagggtcccgacaaggtgccgccacaccttaagacacccttcaacgatttaaagggtgcacaggtcaagaccttgtcatttctgacgtacctcctgaagagcaatgcagattacataaagtcatatgaggaaagcatatgcaagagcattgtgaacttgcttgttacgtgtcctcctgattctgtctccatcagaaaggcaagatacgacctggagctattggttggtctgaaacaagttctcaacaccgagtacaagcgagggctgttccccttgattgacacacttcttgatgaaagggttctgattggcacaggtcgagtttgcatcgaaactttaagacctcttgcttacacccttcttgctgaattggtgcattatgttcgagaagatatttctcttccacaggttgagcccatatatcaaaaaggtgttgaccagcaaagcatggacgaagcacgagttttattggggcgcatattggatgcattcgttgggaagtttaggaccctgaagcgaacaatccctcagttgcttgaagaaggtgaggaagggaaggaacaaccgaatctgagaatgaagcttgaagtcccattacagactgtgctgaatttgcagcaacctttggagtatactaaggaaatcaacgattacaaaagtctgataaagactcttgctgtcggaatgaagacaataatatggagcataacccatgctcactggccacgcccccagcaacaaaatcaacagtcttccaatttgtcacttcaacacttcagggggctgagggaggatgaggtgcggaagacatctggtgttctgaagtctggcgttcactgtctggctctttttaaggaaaaagacgatgatagggaaattctgcaatcattttcgcagatgctggctataatggaagctcgtgatattatggatatgttctccttttgcatgtctgacctctttgattctatgataaccaacaaccagctattgcacatattttcaacccttttgcaagctcccaaggttctgcggcctttcacagatgtattaattaatttccttgttagctcaaagcttgaagccctgaagcagccagattcacctgctgcaaagcttgttttgcaacttttccggttcttgttcattgctgcagctaaagctccagaaagctgtgaacgcacacttcagccacacgtgccggttataatggaagtctgcatgaggagtgccactgaagttgagaaacccctaggttacatgcaccttcttcgaaacatgtttcgtgcattgaacagtgctaaatttgattcattgatgcgtgatcttataccatctctgcaaccctgcctcaatatgttactctccatgcttgatggtccgataagtgaagatatgcgggacttgattttggagctttgcctgattttacctgcccgcttgagttctttattgccccacatacctcgtctaatgaaacctcttgttcttgctctaaaaggtagtgatgaccttgtgagcttagctctacgtacacttgagttctggattgatagtctgaatcctgactttttggaacctagcatggcaaatttaatgtcagaagtcattcttgctttatggtctcatttaaggcctcctccatacacatggggcacaaagtctttggaacttttagggaagctggggggacgaaataggcgatttttgcgggagcctcttgcacttgaatccaaggaaaatccggagcatggattacgtttagttctgacttttgagcctgcgacaccttttttggttcctctggacagatgcatacaccaagctgttggtgcagttatgcaaggcaatggcttggaagcattctacaggaagaaggctcttcaattcattcgggtgtgcctcgattctttgttaaatctgagggaaaatgtacctggcgagggtgtgagccctggtgttctcggtacattgctaatctctaacctggatccctcaagacgtcggaatgatgcttcagatatgaagggagatttaggtgtgaagacaaaaacacaactactggctgaaaaatctgttttcaagactcttcttgtagctatcattgcagctaatgctgacaccagtcttcatgatgagaaggatgattatgttgtcgatatatgccggcattttgctatgcttttccatgttgactcaccatcctccagccaatctggatttatgcatcctattggttcttcactcccatctatcatcatgggatcaagatcaagatgcaacacttcatctaatctccgggagctggaccctttaatatttttggatgctttagttgaagtgctatccagcgaaaatcgtcaacatgcaaaagctgccctatctgctttgaatatttttgccgagacattaatctttcttgcacggatgaaacacactggtatgctaaggggaggtcctagcacccccatgctagtctctagtccatctttaaatccagtatattcacctcccccaagtgtgcgggttgctgtatttgaggaattgttacctcggttattgcattgttgctacagtagcacatggcaagctcagatgggtggtgtaatgggtctcggggcattggtcggtaaagtgtctgtggataccctatgcatttttcaggtcagagtcgtgcgtggtcttctttttgttcttaagaggttaccagtgcatgcaaacaaagagcaggaggagacaaatcatgtcctaacacaagtacttagagtagtaaacaacgcagatgaagcaaacagtgaacctcgacggcaaagttttcagggagttgttgaattccttgcacaggagttgtttaacccaaacgcttcaatggttgtgagaaagaacgtgcaggcttgcttatcactgcttgcaagcagaactggcagtgaggtttctgaattgcttgagcctctctatttgccattgcttcagcctctgatttcacgacctcttcgttcgaagaatattgagcaacaggtgggcaccgttactgctttgaacttctgtcttgcactcagaccaccccttctaaaactatctcctgaacttgtcaattttttgcaagaagcactacaaattgccgaggctgatgaaactatatgggtcactaggatgatgaatgcgaaagtagttctcacatggaacaaactcagaaccgcatgcattgaactactctgtactgcaatggcatggggagatctaaaagctcaaaatcatactgaattgcgagcaaagattatttcaatgtttttcaaatctctaacatgcagaacaacagagattgtcaatgttgctaaggagggacttcgtcaggtggttcaacagcaaaggatgccaaaggatcttctacagagcagcttaaggcccattctagtaaacttagcaaacacaaagagccttagcatgccattgctacaaggattggctcgcctgcttgaattactgtcaaattggtttaatgtcactttgggtgccaagctattggatcacttgaaaaaatggctggagccagaaaagcttgtccagactcaaaaatcttggaaggctggagatgaaccaaaaatagcagcagctatgatcgagctgtttcaccttcttcccccggcagcaagcaaattcttggatgaccttgttaccttggtaattgatctggaaagggcacttcctgaagatcagttttacagtgagatcaacagtccataccgtgctccactggcaaaatttttgaatcgttatgttctggaggctgttgactattttcttgctcgattaagccatccaaagtatttcaggaggtttatgtacataatctgctcggatactggggacctaagggatgcacttgcaaggtcacctcagaaaatacttgcaagtgccttttctcagttttactctcaaagtgaagcatctgctgctcaattatcttctgtaaaggatgaagcccttactggggctgtatctgagagtattactgtacaatcttcatcaaacatggttactacttctgagagttactttaatggattagagcttgtctcagcccttgtgaaattgatgccagagtggctccgtaacaaccgggttgtctttgacaccttgctacttgcttggaaatcacctgcaagacttgcgaggttgcagaacgagcaggatttgagtttaccccaggtgatggaaagcaagaggctgatcaaatgcttcctgaattacttaagacacgatcgaactgaagttggtgcactctttgatatgttatcagtattcttgtaccgcagtcgtatagattatagctttcttaaggaattttatgtcatagaggttgctgaaggatactccccgaatttgaagaaaactatccttaatcattttctgaacattttccagtcaaaacaatatggacaagatcatttagttgttaccatgcagattcttatacttccaatgctagctcattcatttcaaaatggacaaagttgggaagttgttgatcctactataattaaaactattgttgagaagcttcttgatcctccagaagaggtcagcgctgaatacgacgaaccattgaggatagaacttcttcagctagctacattacttttgaagtatctacagactgatcttgttcaccatcgaaaggaactcataaagtttggttggaatcatctcaagcgtgaagataactcgagcaaacagtgggcctttgtgaatgtttgtcatttcttagaggcctatcaagctcctgaaaagattattttacaggtcttcattgctctgctacggacatgccaaccagaaaacaagctgttggtgaagcaagctctcgatatcctcatgcctgccctacctaggagacttcctcctgaaaaaaatgatagccgcatgccgatatggatcagatacaccaagaaagttctcgtagaggaagggcattcaattccaaatatgattcacatattccagcttattgttcgccatgcggacctcttctatagttgcagagcccactttgttcctcagatggtcaactctcttagtcgccttggattaccatacaacacaacagcggaaaatagaaggcttgcaattgaacttgctgggttggtagtggcatgggaaagacagagacaaagtgagatgaaagtggcgcaggaaagtgagagccagaatcaattaggtgacatgcttaatccttctgttattggtggtgatccaaaacgctcctctgatgttccgtcgtttgctgatgatttgagtaagagagtgaaagttgagcctggtttgcaacctctttgtgtaatgtcgccgggtggggcatctatacctaatattgaaacacctggatcttcaggtctacctgatgaggagtataaacctaatgcagcaatggaggagatgatcattaccttcctaattagggtatcacttgtgattgagcctaaggataaggaatctagctcaatgtacaagcaagctcttgatctactgactcaagctctggaagtctggccaaatgccaatgttaaattcaattatctggagaaattacttgggaatctgtcacccactcctcagtccaaggaccctgcatcagccctcgcacaaggacttgatgttatgaacaaagtcttggagaaacaaccccgtctcttcatccgaaataacatcaatcatatttctcaaatactggaaccttgctttggcaacaaaatgctggatgctggaaagtcactttgttccttgctcaagatggtgttcagtgcttttcctcttgaagcagcaacaacgccacaagatataaagttgttgcatcaaagggttcaagaactcattcacaagaatcttgctgctgttacaactcagcagatagcacttgagctcaacaatgctcactcaatcattagcttttcattgtttgtcctcaatgcacttgcagaagtacagaagaatttcattgacccgttcattggcttgcttttccgtgttctgcaacgtcttgcacgtgacatggggtcttctgctggcagccatatccgacaaggacagaggcctgaactggattcatcagttaactcacggtctaccatagattctactgtcatatctaacatgaagactgtcttaaaacttataagtgagagggtgatgtcctcttctgaccacagaaaatctatgggccaaatacttcaagctcttctttcagagaaaggcactgattccagcattcttctgtgcatgctagacatgataaaaacttggattgaggaagattgtaggcttgcttcatcaactggttctgttagttcacttaacccaaaggaaataataacttatcttcataagttatcattagttgacagaaaaagctttcctccagctgcacaagaagaatgggatgcaaaatacttgcagcttctttattcactgtgtgcagattcaaccaagtatccgttgtcttttcggcaagaatttttccataagattgagagacagtatatgcttggacttagagctaaagatccagaaatgaggaagcgattcttcaagctttaccatgatacagtgggaaaaacattattttctagattgcaatttataatacagttacaggactgggaagctgtgagtgatgttttctggttgaagcaaggtcttgatctcgttttggcaatattagtagaaaatgaaccaattacacttgcagcaaattctgctcgagtaccaacgcttatgatagctgggcctgttccagatcgcatcaccatgccacagcaggttcctgatgctcaggaaagcatggatggtacaacactatcgtttgactctcttgctgcaaggcatgctcagttcttaaatgacgcgaacaagcttgtggtggcagatatcatggctccattgaaggaacttgcatttgctgatcccaatgttgcatatcatttgtgggtgcttgttttcccaattgtttgggtcaccttacataaagaggaacaagttgccctagctaagccaataatcgcgcttctatcgaaagattaccacaagaggcagcagggctgcagacctaacgttgctcaggcacttcttgagggtcttcatttgagccatccccaaccacgcatgcctagtgagcttatcaaatatattggaaaaacttgcaatgtgtggtatattgcaattgcattactcgagagtcatatagtgcatatgaatgaggccaagtgctccgagtcattggctgagttatacagacttcttaatgaagacgacatgaggtgtggattatggaagagaaaatcaatcactgcagaaacaagggctggtctttcacttgcccagcatggttactggcaacaagcacaaaatctattttaccaggctatgattaaagctactcagggaacatacaataataccgtcccaaaggctgaaatgtgcctttgggaggaacagtggttgtcctgtgcgtctcatttaggtcagtgggaagtcttagctgnn

SEQ ID NO: 16709 - DNA, 1554 bp, Zea Mays
tttttattttgggggcgtccagccggcggatggttgctgatgtgaagaggatcattgagaccactcaaggtcagagtacctaccgggcggaccagcaaatgctcatataccaagggaaaattctcaaggatgaaaccactttggaaagcaacggagttgctgagaacagcttccttgttataatgttgtccaaggctaaggcatcatcgagtggagcttctaccgctactactgcaaaagctcctgcaactctggcccaacctgctgcccctgtggcccctgctgcatcagttgcaagaacaccaacacaggctcctgttgccacagctgaaacggcacctccaagtgtccaacctcaggctgctccagctgctacggttgctgctactgatgatgctgatgtgtacagtcaggcagcttcaaaccttgtatctggcaacaatctagaacagactatccaacaaattcttgacatgggtggtggtacatgggaacgtgatactgttgttcgtgctctacgtgctgcatacaataaccccgagagagctatagactacctgtattctggaattcctgagaatgtggaggctcagcctgttgcccgagcacctgctgctggccaacaaacaaatcagcaggccgcatcacccgctcagccagcagttgcattgccagtgcagccatcacctgcctctgcagggcctaatgcaaatcctttgaacctttttcctcagggtgttccaagtggtgggtccaacccaggtgttgttccaggtgcaggatctggtgctcttgatgccttgcgacagcttccacagtttcaagcactccttcagttagtccaggctaatcctcaaatcttgcagctaggtaaacaaaacccacaaattctgcggttgattcaggaaaatcaagctgagtttctccgcttggtgaatgaatctcctgagggtggtcctggagggaacatactaggtcaactggcagctgctgtgccacaaacgctgacagttaccccagaggaacgggaggctatccagcggctcgagggaatggggttcaaccgtgagcttgtgctagaagttttctttgcatgcaacaaggacgaagagcttacagccaactacctcctggatcatggccatgagtttgacgagcagcagcaatagacgtggggtggatggaggaaaccgaggcagttgcagaacagcgagtgtcgttcttatgccctctgcctgacgagagatactcggtcgtctatgctatgctgctgactatcttttatttccatatatatttgttcggaatgctttctaagtacatattaattcaatatcaagcgttacaccgtgtatgaaagcctgtcaaatcgtggcctttggtttggagggaaggattcgattgctcacttgttttctttgctctttttcctggcgtattgttgcattgtatcaatattatgagttttagggcgttttggattttctataatatataatatacataaagtatagtgcattgtaaaactaagaatctataaaagctaaaatgatc

SEQ ID NO: 16710 - DNA, 1549 bp, Zea Mays
cttcttctgctgggtccatccagttcatcactacggcgcccgcaaccaaaccatcggagacgctcaacatgttcttggggatgggccgaccggcgtggagggaggcgcgcgccacgctacaaaaaatcctctcagccgacgagccagtcttgcgtgacaacgaagccctgaggaataaatgtcttattccaatgagtgatatcgagatggttctaccaatcacggttggaggttacacagatttcttttgttctgtgcaccatgcaaggaactgcggattcatcttccgagggccgcagactccagttaatccaaattggttttatcttccaataggatacaatggacgagcatcatctatagttgtgtctggaaccgatgtaattaggcccagaggacaaggacatccaacaggaaactccgctccttattttggtccctctcagaagcttgattttgagcttgagatggctgccattgttggtccaggaaatgaattaggcaaaccaattgatatcaatgatgctgaagaacatatttttggcctaactttgatgaatgattggagcggtattctattattttcaattttcatctgtttaagattaagatgcatgatgtgattatactgagctgcatgatgtgattaatatgtcagccagagatattcaggcttgggagactatacctcttggacctttccttgggaaaagcttcagtaccaccatatcaccatggattgttactcttgatgctttgaagcctttcatgtgtgaggctcctaagcaggaacccgaacctttaccatacctagctgaaaagaatcacataaactatgacattcctcttgaagtcttgattaagcctaaagatcaaaatgttgcactaattgtcacaaaaactaatttcaagcatctgtattggacggtgacgcagcagctaacacaccacactatcaatggatgcaacatgaggccgggggatatatttgcaactggcacactcagtggacctgaaccggactccctcggatgtctattggagctaacatggaacgggcagaaggagataccagtgggcaatttgacccgcaagtttctagaagatggagatgaggtcatcttgacaggatgctgcaagggtgaaggctacaacattggttttggaacttgcactgggaaggtcctgccggcacttccctgagccaacacgtctttacatcagttctcgagtccaaacactcaacaatctagcaagatgctatgtaactgaacaacgggggttgttttcgcataggaaactgatactctgttgtggaataaaatcggttcaccattttatacacattttctctctcaagaattgtgttattaaacttgtaaaaatgcaatgtctctcatctcttcatccatcgcccagtgagatttgaattctgtgagtatctgtgtatatgggcctggccgcccactagggttccatatactcttgtactcctgcagctagggtattgtattctatactgcaacatggtatcaaagctttatgtttc

SEQ ID NO: 16711 - DNA, 149 bp, Zea Mays
ctgccaccaggttggacggtcgagtgggatgctactccagcaggagaggagcaagaggagtagtgggctaggccttgcccaattcctccctatcgacgatatcgattatccgctgcatcttatttttgtgaacttatatccgctacttg

SEQ ID NO: 16712 - DNA, 1456 bp, Zea Mays
ggaaacccagcggcggccgcgggcgccccaaacccagggcagagtcgcagggtgacgcggatagcccatcatggcgccgcagcagccgtgaagcacaagagctttgctgcagcacgacggctttgtcctctctcctttaaagcggactgctctcctcaattgtcaggcagtagcatccatttgattgttctatcctcttctctgttctcacccccttgcaagcaacaatcgttcaccgatcgatccagtgcgtcctgcatggaaactgccgccgtcgccgcctccagtgccgggcgccgcatcatggtggccgtggacgagggcgaggagagcctgcacgcgctcaactggtgcctcgccaacgtcgtctccccggcaggaggcgacacgctggtgctcgtccacgcccgccgcccgcgcccggtctacgccgccatggacagcgcagggtacatgatgacctcggacgtgctggcgagcgttgagaggcacgccaacgcggtctcggcggcggcggtcgacaaggccaagcgcgtctgcgccgaccacccgcacgtcaaggtggagacgacggtggagagcggggacccgcgggacgtcatctgcgacgcagccaacaagatggccgcggacctgctcgtcatgggcagccatggttacggcttcatccagaggtgagctgatactgacactgatcatacatggtactagaccctttccgtcttgtccaaaaatcaacacatcggacaaggattacacaagttgagtcacgtcaggagtctgtcgagggcgacaagtgcttcagatcctttttttttcttggcctgcaattatccctgtgaggcagcaatctactcactcgtttatcttcgtttcaaatgaacattgctgcagggcgttcttgggcagcgtcagcaaccactgcgcgcagaactgcaaatgcccggtcctcattgtcaagaggcccaaggagtagaaggttcctcgcatgtaacgctgcagcttagccaataatgtttcatggcgaccatataggcatatatgtacacacttcacatcccattgcatggcagtgtcttccctagttcaacaactagctttctgctggaataaggtgttcagagttcagacagagtatgtactgtacatactatcttcttgcatttggtactcttgtttagtgaaaagcgttccgtaaccttcggttgcctagctgtttgtttctgctaacacgattagcttatcttaaaaccccgctgcacataacaaatgtggcaacttttaacagttacaggcctccatcaagcagaggtatttcagtcccgtcaccaccaaaatttcacaccttttaatttatcatgtaactgtttcgcgagcacctaagcagcagcggtatcgacaagctgtagaaacccaacttagtgggtgtttggaagtgaaatttttttatagtttt

SEQ ID NO: 16713 - DNA, 693 bp, Zea Mays
ttagcttttactcatgagtcatgatagctatgagtctttttaaaagcctcttgatgatgagaaaaaagtcactgctatcattttagatgcacttagagaaacaggacaaaggggaatcattagccgtggttggggagctcttggaagtttttcagaagttccagttgatgtcttcatcttggaggattgccctcacgattggctcttccctcggtgtgctgcagtggtgcatcatggtggagcaggtactacagcagcagggctgatagctgggtgtcctactactgtagtgccgttttttggagaccagttcttctggggcgagagagttcatgcacgaggagtgggtcctgcacctatatctatcgcagaacttactgtagaagcactatcaaatgcaataatattcatgcttgatccagaggtaaaatcacgaacaatggaactggcgatagcaataggcaatgaggatggtgtggcagcagctgtagatgcatttcatcgtcacctgccttcagaattgccgctgtcgccgcccgcacatgtggaggaagaacgcacagacttcttccaatggttttctcgaggcctggagaagtgttgtttcccattcagtttttagtctttgattttcaaaactactcccaaatatggtggagtagcaaatatcggtgcccaagcaccaaagtgtca

SEQ ID NO: 16714 - DNA, 1358 bp, Zea Mays
ctgaaatgcaacatatctggtgaaagatcgccacaatgggaatcttctaattgatgaggaaggacatattattcatattgattttggtttcatactgtcgaactctcctggaggtgtaaacttcgagagtgcaccatttaagctaacgagggaactccttgaagtgatggattctgatgcagagggaactcccagtgagttctttgattactttaaggtgctatgcattcaaggtttccttacttgccggaagcatgcagaacgtattatacttcttgtggaaatgttgcaggattctggctttccatgtttcaaaggtggccctcgcacaatacaaaacttgaggaagaggttccacttgagtctaactgaagagcaatgtgtatccctggtgctctcactgatcagtagcagcatggatgcttggcgcactcggcaatatgattactaccagagagtattgaatggaattttatgattttccccacaggagcaacggattcattcagaaaccaattttcttgtatccttggagcaaaccatgggattgcataggtcagttttgggctgatctatgctggcaccccatatcagatttccaggagaggactaggttattgatcactgtgttttcatgtggcattgcacatttgtggtcaactagggaaacagattggtgccgcattgtactttcatgggaccccccctctgaaagagttgagaagtgtacagtcatcggcagtcatctagttagcgctttgtgctaggaggttgtgaccagtggagctctatttggcatattggaatttggaatccggctacattgttgtacagacctttgattgacgtagcttggagaggatgtaggagtgaacagggccatgctttgaagcgaacaagttataggcatatgggagctggggatcatccgagacagatgccgctcgaagtgtcactgtacttgttgtgtggtatccctatagcaccaaagtagatggagatgtgctttgctaaaaaaagataaagacccagtgttggccgctctcatatgtcactaggtctgaaaggaaattggccgctaatttgcgcgaggcctgtccttcagagaggtgctttgctgcatttgtaaattatcattactgtacagggaccatactgtcttagcattctgtttttaagttgttaagattttaattccttctttgtgggtgtcttggtcttcgaagatctaggtgatagcttgtttgactagcactatgatcagtgttcgaaagtacagttccatgtgtcatgaagaaaaacactgcaagatttttaatacatttttgatgtactatgagagcaaatttctatttcga

SEQ ID NO: 16715 - DNA, 188 bp, Zea Mays
tgctaagcattcctcgttgaataccaacaattgcaatgatctatccccatcacgatgaaatttcccaagattacccgggcctgtcggccaaggctatatactcgttgggatacatcagtgtagcgcgcgtgcggcccagaacatctaagggcatcacagacctgttattgcctcaaacttccgtggct

SEQ ID NO: 16716 - DNA, 5468 bp, Zea Mays
tgtacgagttcagattggttattcctttcgtgctgctggataaggacgtggtaccatcctcatcatgtagcctggaacgagctgtcactgtgaaagatttcaagtggttaaatcatgcctctgcagcatatattgtactctcaaatggtgggttgctgtgtcatgggaatttgggtgaaggcctgaaagatgtgatggaaaacgtcgatgcagttgactgttgcaaagaaggaaatcatattgctgttgcaagagggaacaaacttaccatattatcaccagattttacggaaacatgctccatgtccctcttgttccagttgtggtctgacggaagtgattcaaagggcactaccatcaaagtggattctattggctgggtacatggtgatagtattgttattgggtgtgttcgattaaacgaagatgacaatgaagaaggataccttgttcaagttataaggactgaagaaagcacattttgtgagagcccaggcaagacagatgtttatacctataacgattttttccatggcattatggatgatgttttaccacccggagctggacctaatcttcttttgggttatctgcatcgctggggtctcatggtggcttccaataaaaagagcgtcgatgaacacattgcccttcttaagtggccatctgcacatgatgatgaaaaaactgtaacatatcttgaaatgttggaggataaatacagtcctaggattgacttgcaagagaatggcgatgacaatgtcatactagggtttggtgttgagaatgtttcattatttcaaaagatcactgtaccagttggacctgaacaaaaggaggttgcccctcaacatattctcctatgtttgactggtgagggcaaagtagctgtatattacctcgccaggatttcggacccttctgatttacctcatgctactgtgtctaccaatgaggactatggtgaaaaacatatttcacctgcaactgtatctgaaaaggagttgactccaagtgttgcaggctcagtatataagagtactctcacagaacatggtgctgagccatctagtgcgcaaacaggtagcaaccagcaggaatcaataaatgtgaaaaacagtagctcagcttcaaaagaacaggaaacaactgacaattcattgtttatctcttccaataagaagcccttagacaccaagcaagtgaatgtgactggtccacctgcagccttgcgtagcttagcgttaacaggaaacacaaaacctacaatattttccagcttttctactgaaggcatgaatccaacaggaggcaatgcacctaatgaattagcttcttccttgcaaccaagcagcagaagttttggaaacaaccaaactggtaaagaaggcctggattcagttcaatcagtgggaatatttggtggatctcaaaactccaataaagatggcaatgtctatggtttcaagtcttcattattcacctctagtggatctgtccctgccaagatcggagaaaggaatgaggttggttttggagttccttcgctgcaaaccagttacaccgctgatagaaaagtttttggtgctccagttgccttaagctctgtaccttcatcatctatatctccggctaaaccttccccaattggatattcatcaagtggatttcggacagcaaactctgaagcacctcaatcattgcgtggatcacctccgtcacagcaatctatgggcaaatcacataacagcaggacacaagcaccggcagaatattctagaaactccaagaagggcacaggattcgattctgaacaagacttgtctaaaaaattttacagtataaatgaaatgacgaaggagttagatgccctactagcatatatagaaaaggatggtggttttagagatgcctgcataaccatccaacagcgtcctctttctatgtttgaggatggcttacaaaactttttgcagctgttgcaggtcttcaagggcaaagtagaggagcaatgttcaaaaattgaagatctgaggaacaacatgtttcaagtttctgctaggcaaacttacatgaaaggaattgttagccagtcttcagataatcagtactgggatatatggaaccgtcagaaattgagtccagaattcgaagtgaagagacaaaatattctcagagctaaccaggatttgacaaatcagctggttgagctggagaggcacttcaataatctggagatgaacagatccagtgaaacaggaagagtggcttctaatcgaagagctgtttattctaacaagacaagttcgagtcagacacaattatccagtgtatatagtgcactgaactcgcagttggcagctgctgagcagctatctgaatgcctttcaaagcagatatctgtgttaaatattggttctcctagtaggaagcaggggatggtgaccaaaaagttgtttgagtcaattggtttagcccacacaactgatgcaaccaaattttcaggcagcactcctaagccagttaagcggtttccatcagtgaatgagcattcaaagggaatattagggtcttccaagggtggtgagcctgagactgctcgaaggaggagggaatcactggatatgagcctggctagtttggaacctcagaaaacaactgttaaaagaataacacagcaacaacgcctcaagatcagcagtgatctaccattcaggtcaaacaagaaaatatttgattctcaaatggcagcaatatcacaggaaaagtcaagcgatagctccaattcatctatagtagaatcatatgtaagcagactgcgttctctgagtgaagatgtaaacgataaactgtcaggaccccaacagaaccctttgttcaaatgggtaaaggaatcaactgggtcatctcaaacctcagagcaaaagcatttcgagttaccagggcaaatgaaaagtactgcacagtcttcaaaactgacaccatcttcaccaccatcattcagttacacacgtatgggtgcacaagatagtatcaacccatccagtgttccatcctttggaacaaaacatactgtgtctaagccaaatactctaaccttcaaaaccactataagccctaaaagtaatgccaacacagagccaaatatattaccttctataacagctccaaaaacttctctaagtccactgtctgtaaaaactgctggggagtctggagatttgcctacattaactatgaagaacagacaggatggtcagtcaatgccatctttggggaacataaaaggaccgggtgcttctctgcagaacaagggtggcatatttagagatctcgacaaatcgtcttttaattctgaacattccaagcctgctgcattacatgagaagactgaccagctaagtggggttggcgatgctgtgcagaacactgtgaaagatacctccaaaatggcacctcaaccttctgctttcttgccagctcctgttactcagaccaattcatactccttaaggccgactgtttcttcttcagccacatcaggtgcgaaaacttcagatgttttatctagctcaatgcagaaagtttctccaatagtacctgggggtactgtgtctagctcagtccctactcctgctaaggattcatcaactggattgagtcaaaatgcttccaaacctgaaacgctaatatcaaaggtaactagtaccatagtttctgcaagttcgacttctgtcatatcagtcactgaaagcaaaccttcagtgcctccaacaactggcgccagcttgccttctactcatgtctctgctcctcaaacagcaccaacaacatcggaatcagttttcacttccacaggaaaaaatgtaggaccaaacactgacaccatctcaaccgatgaagatgacatggaagaggaggcaccttctgcaagtgccgaactgaacttgggagcccttggtggattcggccttgggtcccagccttcttcaagtcctcaaaagtctaatccttttggtgcctcctttggtacatctggcaataaaagttcaggcacaccatttactttgacaaccagtccaggacagcttttccggccagcgtcgctaagcattccttcagctcagccagcccaaccatctcaatcaactagttctagttctttttctaattcgttctcaagtgggcttactggatttggacagcctgcacaaattggatctggccagcagtcagcttttgggaagcctgcacagattggagctggccagcatgcaggatttgggcagactgcccaaattcaatctggttttggccagcctgcccaaattcaatctggttttggccagtcagcacaaatcggaactgggcaacagtcaggatttgggaagcctgcacaaattggggctgtccagtcaggatttgggcagcctgcacagtttgctgctcaacagacacttggatcagtgctgggttcttttggacaacctccccagttaggaggcataggttctggaggatttggtggattttcaagtgcttctacatctgctggttttagttctttatcttcaggtggtggttttgctgctgctgctactggtggaggttttgctgctcttgcttccaaaagtggtggttttgttggtgcagcttcatctggtggtggttttggaggtgcctcccagggaggtggctttggcagtggtggtggtggattcggatcctttggtggtaatcaaggagctgggttctcggcatttggagcaagtggggctggaagaccggcagctgatttcttgacgcagatgagaaagtaggctccaggcaaatccccagacaggtttacgcattagctatagcatacacatgaggcgagttacttttatgttccactcttaagcgttgtttcggcacaggagctgtagcataaacatgaccgcagtataccctggactggatgagccctcgcttcgctccatctattgatgatggaggggggctaccatttgggagccttattgttttctcttcttttacaagacacagcaggtgtcaacagcagcatcgacggttggtcttggattccctactggtttctctccagggcgaccaacttgctaaggctttcatggctctctcttcaggttccatggctgcatgaaatgtagaagaaaaaaaaagaggtcgtgtaaaggtcattgcttggacgtgattcccctccagctttgtcaatacaattcccagcctctttcccacaatattccctgtcacgagcctgcccgcgcatcaagatgaaacccgccaccacaccaaagagcttgctgcgatttgcaaaggcatggagaagaaagggatcgagagaaacaaaagcataagatacccagacacttaaacaagtaacaaccgaacacaatctttcgccaaatatatatatatacacgatataatataagaacggaacaaag

SEQ ID NO: 16717 - DNA, 865 bp, Zea Mays
aggctcccccctatcttcaacaccgcagccgctcgctcccctcttctcctggtcctcgtgcgcgcgcgcgagacagagagaggcgagtggcaatggcgagctctggcagctgccactcgctcctctcttcagcctcaccaatctcgcctgcgctcttctcgcgacaccgagcggccgccgtcggtggaggagccagccgggcgagtaaagtgcaatcgcaggtcaggtgtcttgctagagatgaggattcgaaggggtgcgcaaacgtttccaaggccgagactaatgaagaaaaagaaactacgccttcatcaagacgaagatgtctggtctgtctcggcgctgttaccttgatcagcgcgacaggaccaccaaacggactcgctgcggatgcgatgaacaaggccggggtacagaaagctgtttgcaggaactgtaatggcagtggtgctgtgatatgcgacatgtgtggtggcacagggaaatggaaggccctcaatcggaagagggcgaaagatgtttatgaattcaccgagtgcccgaattgctacggccgcggaaagttggtgtgccctgtctgtctcggaactggcctgccaaacaacaaggggctcctgcgacgcccagaagccaagcagctgctcgacaagatgtataacggcaagatactgccgaggtcgtagagcactctttaccacgcccaggattttgttgagtcgtcgagtaggaatgacgctcggatcgatgtagccctagtagagtgtaaaattgctgttagccgttcaagaaagattttttacacatacatgtactgacccttttttttaccaaaaagtcaaagcaagattgatgtggtcaaaaaaaa

SEQ ID NO: 16718 - DNA, 3625 bp, Zea Mays
aaaaaaaaagagaagtccctcccattcgtcgctaatcacaatcccgatctccaagcaaacccacctcccgtcagttccctactcgccgatccagatctcctacagctttccactccgccactccaaccggacgcctccgccgtcgccggcggcggtcgagccacgcgcgcacgccgctgaggaacccggagagggcggcggcaatggagcagctgcggacgttcgggcgggagctggcgatggggtcgcagggcgggtgggggcagtccaaggatttcctcgacctcgtcaagtctatcggcgaggcgcgctccaaggcggaggaggaccgcatcatcgcgcgcgagctcgagcacctcaagcgccgcctggccgaccccgacgtgccacgccgcaagatgaaggagcttctcctccgcctagtctacgccgagatgctcggccacgacgcttccttcggccacatccacgccgtcaagatgacccacgacgagtcgctaccgctcaagcgtaccggctacctcgccgtcgcactcttcctcgacgagcgccacgacctcgtcatcctcgtggtcaacaccatccagaaggacctcaggtcggacaactacctcgtcgtctgcgcagcactcaccgccgcgtgccgccttattggtgaggaggccatccccgccgtgctgccccaggtcgtagatctgctcgtgcaccccaaggaggctgtgaggaagaaggccgtcatggcattacaccggttctaccagcgatcctcctcctccgtttcccacctcgtctccaacttccgcaagaggctatgtgataatgatccaggggtaatgggtgcaactctatgccccctctatgacctgatttcggaggaaccaaattcgtacaaggatttggttgttagtttcgttaacatcctcaaacaagttgctgagaggaggcttccgacttcctacgattatcaccaaatgcctgcaccatttattcagataaaactattgaagatacttgctgtgcttggcagtggtgataaacaagcaagtggacatatgtacactgtattgggcgacatattcaagaagggtgacactgcgagcaacattggcaatgctatactgtatgaatgcatatgctgcatttcatccattttcccaaaccctaagatgctagtggctgcagctgaaacaacatcaaagtttctgaaggttaataaaaataaatccagatattgcagaagagcaccagctggctgtcattgattgcttagaggacccagatgacactttgaagcgcaagacatttgagcttctttataagatgacaaagtcaacaaatgttgaggtgattgttgataggatgattgagtacatgatcaacataactgatcatcattacaagacagaaattgcatcacgttgtgtcgaactcgcagagcaatttgcgcctagcaatcagtggttcatccagaccatgaacagagtttttgagcatgctggagatcttgtcaacatcagagtggcacacaatttgatgcggctaattgctgaaggctttggagatgaggacgaaggtgctgacagtcagctaagatcatcggctgtagattcttatgtccgcattgtcggagagccaaagcttccttcttctttccttcagataatatgctgggtgttgggggaatatggaacagcagatggaaaacattcggcttcttatattattgggaaattgtgtgatgtggcagaggcccacctcactgatgacactgtcaaggcgtatgcaatctcagcaattctgaagatatttgcgtttgaaatcgctcttggaaggaggattgatttgctgcctgagtgtcaaacattggtagatgaattgttagcttcacattcaacagacctgcagcaacgggcatacgagctacatgctttactaggcttgggcaaaaatgatgttgaaagtgttatgcctgcagatgcaagctgtgaagatattgaggtcgacagaaacctctcatttctagacagttatgtgcagcaagccttggaaaacggtgcatcaccttacattccagagagtgaacgctctggtcttacaagtgttggcagctacagaagccaagaacaacaggaaacatctgcccatactcttagattcgaggcctatgagatgcctaaaccttctttgccactagcaacttcacaaaccagcatgtccacaccaaatactgaccttgttccagtttcagagccaggctactataaggaagaccatcaaacatcaaggcctcaaccaccaagcgatgcggtttctggtgagtttggtgtcaaactccgccttgatggggttcaaaagaaatggggaaggtcaacatattcctcttccacaccctcaagctcgatgtccagtcaacaaacaacaaatggggcctctcattctgatgggggagggccaagttcacagccacgggagtcctcatacggttcgaagagacagcagggcacagaagtctcagcagaaaagcaacggctggctgcttcgctttttggttcggcagcagctagagctgacaggaaagcacaagcttctcgaaagacagggaaggacagtccctcaactgagaaagtagctaccactaatgtggctgcccagtctgttaaggagcaagtaatcccagctgctgcaccaccgcctgatctgctggatctgggtgacgagacagttccatcgagccgtccatcggctgaccctttctcacagttggtgggtcttcttggaccagcatctgctgctccggcgctttctgggactccggctaccactaccagtacttccaaagcaccagatcttatgtcaatcttctcagatgatgtaccaactggagtgactagtagtgggtccaccgatcccactccaggtgatgctatttcggtgagctcccacaaaggagcgacggcagtggcaccaaagaagggctcgagccttcaagatgccttgcaaaaggactcgactgcacggcaagtaggtgtgacaccgacagggaacaaccccaatcttttcaaggacttgctaggctaaaggggacagtaaggcacaccgtatgctccgcgtggcctctttgggtagatggagttcatctccgacatgtctcgatcactgaaacagcgatgatctcgctgtttgatcagcgtaggaaaagggttgcaacttgcaagggctatatttgttctcgagtcacaagacacgacctgtcctccttccagttgggaggggggttgcgctgttgagatctgtgaatggttgcgggtatttttcctttaacctcttgtgattttgtgctgagactattgtacatgtgtttacatgacgtgtaatctgtacatgagaccgtggtacagaagcgtgtgccggcgcatttttgttcagctgggctagatacactacaattgctgggcactggaaagtaaaacaatgaaagaattggtgtcattctctggctggaataaaaatataaaacggtaaatgtgtagtgttgtttattgttgatgaaaacagtcgcagatttgtttttgcaacttttaactgttgagaagtaatgcaattctttttttttcgtaaaaaaaaa

SEQ ID NO: 16719 - DNA, 2843 bp, Zea Mays
ggccgagccacgtccccgcagtaggcaaaagaaaccggccctacgtgtcggcgacagccgagtaagcacgggccggctcctcctcgcccaacaaccaccgcggcgtgcgccgaccgtaccctctccctccggcgcaccgctctggttcatctccaactacatccaccgcgccccaaatcgcaccccgcctcccccattcgcgccgatcgaaccccaaatcggtggcgatgagcgtggtcggcttcgacgtcggcaacgacaccctggtggcggcggcggcgcggcagcggggcatcgacgtgctcctcaacgccgagtccaagcgcgagtcccccgccgccatcgccttctcccgcaacgcgcgcctcatcggctgccacgccgcgtccgcctcgtccgcgcacgcccccttctccagcgtcaagcgccttctcatgggcgccacggggaggcacccggactcctccctactccgcgacctgtcccgcctccccttccccgctgccgtcggtggcggcgctgtcgtccacgccgaccacatcggccgccgcatcgcgctctcgccgacccacctcctctccatgctgctggcctacctcaagcagctcgcggaggccgacctcggcggcgcccccgtagccgactgcgtgatctccgtgccctgctacttcactcaagcgcagcgccgagcctacctcgacgccgccgccatcgcggggctcaggccgctccgcctcatgcacgacctcgccgccaccgcgcttggctacggcctctaccgctccgacctcggcggctccgggggtcccacctgtgtcgcgttcgtggacgtcggccaatgcgacacacaggtcgcggtcgtctctttcgacatgtcggggatgaaggtgctgtctcacgggttcgatgcagacctcgggggcagggacttcgacgaggtgctgttcgagcatttcgccgaggagttcaaagacaggtacatgattgatgtcacaggaaatgtcaaggccagtatgaggttgagggcagcctgtgagaaggcgaagaaggttctgagcgcgaacgcggaggctgtggtgaacattgagtgcctgatagaggagaaggatgtgaggggggtgatccgaagggaggacttcgagaagctatgtgccaggctgctggagagggttgttgaaccttgcaacagggcggtgacagattcaaggattggattggagaggctgcattctgtggaactcgttgggtcaggttctcgtgtgcctgccattgccaaggtgcttaaggaattcttcagaaaagaacctagtcgcacactcaattcaagtgagtgtgtggctcgggggtgtgcattacaatgtgcaatgcttagtcctacgttccgtgttcgggaatacgaggtgcacgatgcaatccctgcttccataggattttatactagtgacggcccagtttcaacattgtcaagtgatgcattgttccggagaggcctgccctttcccagtgttaagatcattactctacagaagaacgacagttttagttttgatgcctattatgtggatgcgaatgaattgcctcctggtacctcaacagacatcggtagttttcagattggcccattccaagcacatatggaagcttctaaagtcaaagtaaaaattcgtttgaatttacatggtttggtttcagttgaatctgctgctttgatagatgattatcaaaggaatgcaacttctgctgaccatatggaggtggataccagcggtgatgacatgggtcacaagtcaagaagtgaaaggtctatccagcggcaggagttgccaatcactgagtacatctgttgtgcaatgagcaagcaggaactgctggaagctcaggagcaagagcaccaattggcttatcaggataaacttatggaacggacaaaggacaggaagaatgcattagaatcttatgtatatgacacccgtaacaagctttctgagaggtaccggagctttgctactgattcagaaagggaacaaatctcatttaatttacaacagactgaagattggctttatgaagaaggtgatgatgagacagaagtggtttacagtagcaaacttgaggagctgaaaaagcttgtagatccaattgaaaatcgttgtaatgatgacgaagtgagagctgaaatcgcaagggagcttttgaagtgcattgttgaccacagaatggctgccaagtcattatccgcacctgaaagggatgctgttgacaatgagtgcaataaagctgagcagtggctaagtgaggggtccaaacttcaagaatccttgcccaagaatgtggacccagtactttggtcctgtgaaatcaagggaaaggaagaagagctggatatgttctgtcgaaacataacaaggcacaagggctccccagcaaggacagatggcagcaggggttcagatcacatgcctacacctgatagagattagatatattcacaaggtttcttcactgtacgactgataacaccgtcatataattgactctgtaccacactaggcccgcattaggtgaccgcttcttggttctccagggtgttgtgcagttttcacttgagagcctactaatcatggttattgatacctgttaattctttttctgtactcggaccatgggtattgtctgcttcagtttgtgctgaatgaacaggaaaactaaccgcgtgtttggttggtggacgagtgcgtgcagctgtatgcacggagcgttgaagcatggtttgtttggttgccgcaccgcacacacgcaaactaggatgggttgaatctatgacaactaagatgtgattgtac

SEQ ID NO: 16720 - DNA, 2945 bp, Zea Mays
gcacgctccctcgcttccctgtccctgctcacctctgaacccaatctaaccgccgtccgccaccttcgcgcgcgaaaactccccccctcccattcgcgccgccgccgccgaccaccacccatcccggcgacaagggctccccatccggctgatccgtcaggaacctaatcttctcggcgcgagaaacgccgggcggggaacaaaggacaggaccccattccggtgcggcgggaccaatgggctccggcgaatagctcgagcacctcgagctcgccggaaacaaccgaggcggcgcggcgtctgttctccccggcgtgatggcgatgcaggggacaggcaacggatctccaagccgacccaacatttccgtgcccggtcgttgaacgcagcggtggtcccgtctcgtcctccaaggcattgggaacctgagaggcagaggctcggccagcgacggtgggtagcgaactggcgcctggttcccgggttgctattctccgggaggaggcgctcccgttgccatgggtgcgcggcggcggcttcgccagggctctggacggctccagctgctgttttccttcctcgtgctgctgctccaggcacaggccagcgtcggcgcggcttcgatcaacggtgaaggattggcgttgctggaactgaaggtgagggtggaagctgatccccatggcgtattccaggattgggaccccatggacagcagcccatgcagctggtctggcgtgcgatgctttgacgataaagtagagattctgaacttaacaggccggcaattggctggaactctcgcacccgagatcgggagcctccgagtttacttccaaagaacaacttccgcgggcaaatccccagagaatttggagggctgtctgctctagaagtgctagatctgagcagcaacaacctggatggaacagttccagaagaactatgggctatgccactgctcaaacaactatcccttcatgataatcagctccaagaaggcgtccaagcaatagctgatgatcaggcaggatgcttgagcagaaaactagggtgctggtctttgctgtacaagtgggactttaaggattggatctctctcggtggtctccgagagaaagataacaccaatgtaccaaatttcagtgaggcagacgtaatgcataatttgcagtcatttgcaagtgtcatgcgccgcaggcttcttagtgaaaatgacaacctggctgctcttttgggaaatgatgacaaatcttctgatctgcaaaacctaaaagaaattcagagatctgttgacgtgaattctgtaggaagtggctcgttctctgcatttccgggaatatatggccaagctctggcacctttgcttcctgaagatattgatgctaccacagttcagcagctgtctacagatgtgacccagaccactaatgtagagatgtctggtacaacgtacagcaagtgggcatatattatcacaattcctgctgcaatattgctcattagtctcatagttctgattttggttttgcggaagcgagggcgtgcaccagtagccccttggaaaacagggctaagtggccctattcagaaggccctcgtaacaggtgcccaaaaactgaacagagctgaactcgaagttgcctgtgaagattttagcaacatcatcaatacttttcctacctgtactgtattcaagggcatattgtcaagcggggttgagattggtgttgtctccactaccatatcgtcgagcaaagactggtccaggagtgcggaatcatgcttcaagaaaaagatagatagactgtcaagggtcaaccacaagaacttcatcaacctccttggctattgcctagaaaatgagcctttcacgagaatgatggtgtttgagttcgctccacatggtagtctctcacagcaccttcacgtcaaagagtttgagcatctggactgggctgcgaggatgagggtcatcatgggcgtcgcatactgccttcaatacatgcaccatgagctcagtccacctatggcgatccacgacgtgcggtctgacacaaccttcatttcagatgattatgctgccaagattgcagatgttggtgtatggaacgagcttgctgccaaagcgaaggctggaaaggaggacggcagcagccgtgctgaagctcctccggatctcccaagcaacgcctactgcttcggcgcgctcatgatcgagaccatatccgggagggttcctgacccgtatgatcacaaacccatatgcagctgggcttctgagcatctgaaagacaagaactacggcaagctcgtggacgcgtcgctgaaggagcacaaggaaagcgagctggaggccgtctgcgaggtgatccaagagtgcatcgaccctgacccgacgcggcggccgtcgatgagagacgtcgtgggcaagctgcgagacgctctcggcatctcgcccgaggcggcggcgccgcggctgtcgccgctctggtgggcggagctggagctgctgtcggtgaagtcaacctagtgtggagaacgctgtgtatactgatactgtaccaacatgttccaacgctcctctagctgagctctaacaggattcgtataggggcttcaattcgtgctgctgatgctaccgacatttgtactggccgtaagcggtcgtaatttatgcagagagagagagagagagagagagagacgttgtgaaaaaatgcgattgatgatgtaactcatgtacatgctgatctttatcaaggaggggaaatacagtgacttgtataaatatctgtaatcccaaactcgtgtgactgtatagaaataaaacaaatagctggcgttcccagttgccactcacttaccatcagtgtttcctctgcgtgcgatggtagctcaagttgagccatatgttcagttcggcccatatggtgctggcaact

SEQ ID NO: 16721 - DNA, 1716 bp, Zea Mays
gctatacccacttgccgcactggccatcctccggccccaccggccagtgatacgcactcctcccctcaaagccctagccagacgccgccgccgcacccgatctggctgcctcggtcgatttctaattctcctcgcgagcccaaaccctaaacctaaacctttcacccgccgccgccgccaccaccagcactgccactccgccaccaccgtcccgaagccccctcccagcgccatcgacttcatctcggattgaagcaatgtcgtcggacgatgaggtcagggaggagaaggagctcgacctctcctccaacgacgttgtcaccaagtacaaggctgccgccgaaatcctcaacaacgctctgaagattgttgtgtctcagtgcaagccaaaagtcaagattgttgacctttgcgagaagggcgactctttcataagagagcaaactgggaatgtttacaagaacgcaaagaggaagattgaaaggggtattgctttcccaacctgtgtatccgtcaatgacacagtttgccacttctcaccgcttgcaaccgatgatgccgttctggaagaaaatgacatggttaaaattgatatgggctgtcatattgatggctttattgctgtggtggcacatacacatgtaattacaaatgggcctgtcacaggaagggctggtgatgtgcttgctgctgccaacacagcagcagaagtcgcaatgcggcttgtgagacctgggaagaaaaataaggatgttactgaagcaattcagaaagttgctgctgcttatgattgcaaaattgtggaaggtgttcttagccatcaactgaaacaatttgtgattgatggtaacaaagttgtgctcagtgtctccaatgctgatacaaaggttgatgatgctgaatttgaagaaaatgaagtatatgcaatcgatattgtcaccagcactggggaggggaagcccaagttattggatgagaaacagaccaccatctacaaaagggccgtagacaagaattatcacttgaagatgaaagcgtcaaggtttattttcagtgagatcagccagaagttcccaatcatgccttttactgctagggcattagaagagaagcgtgcgcgtttaggcttggtggaatgcatgaaccatgaactattgcagccgtaccctgtacttcatgagaagccaggagttaaagcccaccaaatccattgaagacaatgcagagataaaggcatggcttgctttggggacgaaatcaaagaagaagggtggtgggaagaagaagaaaggcaagaaaggagatgcagcagaagcagatcccatggaggaggcgacaaacggtgctacaagccaagaataattctgatttttggaattactgccaccagcttttttcttgtttcttcgctgcatctgatggtgttatattacattcagttgtggaaaaattgagtactatttctagcttctaagaaatgaagcatcctattatcgcatctaatggcgcaaagataatcgacaaggcatgcccagtgttcgttctctgttcttcgtgacgacgctcgtcacttggatttttcggagttcctcccagcccggaaatttcttcctggacattgccaactgctgagatgtagcatccggatacaaatgttcgaattacgtatacaatgttactgtgtatgttttctcggctaacctctctctgttgtct

SEQ ID NO: 16722 - DNA, 368 bp, Zea Mays
cccagatccaaatcacgcagaagctgtcgtccctgcacatggcggttctcggttgcctttggtgcaatctatgctcaggtagagaagaaggcgtcgaggcggatctccaggagttccaggactttgacgagttctaggcgtgggttagcggcaacccctagtcggttgcctgtgaaggccgcgtttatctacgtttcgttttcgcactttgattattgtaaagactatatggatgtcttagacatatgatgtaatcgactattattcccctttttaatactatttgagcactgtgtgatgatgtccatgttatgtaactgttgtgtacgtgaactgctgatcctggcacgtacatggttcgcattcgg

SEQ ID NO: 16723 - DNA, 1784 bp, Zea Mays
ttgcactgcacttttgcttggatatagctacaagggtggttgctgaggggcttagggtggagcaaaccatcatgtccaagatcatgacacgaaatcctgtttatgtgatgtctgacacgctcgccattgaggctttgcagaagatggttcaagggaaatttagacaccttcccgttgtagaaaatggtgaggttattgctatgctggacattgcaaaatgcctttatgaagcaatagcaagactggaaaaggctgcagaacaaggaagtgcaatagcagctgctgttgaaggggtcgaacgtcaattaggagggaacttttcagctccttctgctctcattgaaactctaagggagaggatgttcaaaccttctctgtcaaccatcgtcacagagaatacaaaagtagcaattgtttcgcctacagatcctgtgtgtgtagcagcacaaaaaatgcgagagttttgtgttaattcagtggttgtctctacaggaaacacattgcaggggatctttacctcaaaagatatacttatgcgtgttgtgtcacaaaatatttcccctgagttgactctagtagaaaaggtgatgactgttaacccagattgtgccacattagaaacaacaattcttgatacattacatataatgcatgatggcaaattcttgcatattcctgttattgacaaagatggacagattgctgcttgcctggatgtcctgcaacttacccatgcaactattcaattggttgaaggagggaatggaactgtgaataatgtcgcaaactcggtaatgcagaggttctgggactctgctcttgcattggagcctccagatgaggaatttgatagccatagcgaggtatccttactcctgcagtcagaggctggagatggaaagagtagtgtttatccccctgtggttggcaattcgttttcctttaagctccaagaccgaaaaggccgtgtgcacagatttacttgtggctcagagagcttggacgagcttgtgtcttctgtaagacaaagattaagtattgctgatgaaaaagaagctgtgcaactcttgtatgaagatgatgaaggtgaccgagtgctgctgacaacagatgccgatcttgctggtgcactgctgcatgccaaatcatctgggttgaaggtgctgaagttgcacatcgaagaccctagtttgaacactgaagtgacaaaaccatcccaagagctggcaccacctcccctcaagagtgggatatcgatggttcatgttgggttaacggccggtgtagtcgctctcagtggcgcagcagtgatggtttacttgaaacgatctcaactgtgatttcgaaaatcggaggatgttttttaggagcttgattatctgaaacaagcattgccatcagctaatgcattctgaagctttgccttcactcggtgccatttacaagctaagaactgaaggaatgtacagaaatgaagaccacatctgtgatcttttgatgagctgaaagtccgtacaggccacgggacaagatcactgtttttggaggtgaatttctgggcagaacggcgtgcctatctttgttcattcagcacaagccgtggcaatttcacgactatgatgtaatgtgtaaacattacatatttgttcctattcatactgatgtatttgtttgtagataaaaactcatttcacatgacactattgtttgagaattgagaggggtctggtagaatgtcacctgattttgaggatagaatcgaatacataacatatatgtgctag

SEQ ID NO: 16724 - DNA, 6125 bp, Zea Mays
atggacgttgaaatgctgccgtacgggattatttcgacgtttcattgcttgagtgtccgtacttcgccgctaaacatggcgttgttaccgtgcgtgtacatgcagatggacggcgtcactctgcgccacctgctccgccccttcgccgcgcaggaggccgcggcggccggccgagtggcagcagcgccagagcagctgttcgcaagtcattcgaccctgcaatccgggccgcctccgagagtggggccgagcaatgagttgcttactcaagttccggggaactattgcactttcgatcttgcgccggacctcactcgggcaaatgcgagcaatgctgctggtaccattgattttactcgggctggtccctccagcagtgctgccactctgcccaagtatccgagacatggattgccagctagcagtagcaatgagcagtcctcttttggagcgcttttcccgaacagaagtgctaatggaatgggtatttttacttgtcaaagttcggctaacgaaggaatagcaaatgttggtgtgcagtttcaggactcaagtgtccatggactgcagaaattgccattcaaatcgatgactcatcagcatcctacactgcctggtgatcgaatccgtgtcacctgtatgaatgttggcggagagttttttgtgggcgaagctgggctttttggagttatctgcttgtgtcatcggttgcgaatgtctgtagctaaattctgcgagcatgctggaggaattccagaaaaagctggtgaaattgtctgcttggagaatggcatgagtattgcacaatggttcaaattctgcataggggtcggaggatctattgctaacaccaggtgggattggccggaatgggcacatatgaaaagttctccagaagagcacatattgaaaagtcttgcatcaagaaacagtggaacaggaaaaatggggttgttaagtagatatggaaaaatcactggacatatgaacaaaccggcttattccaatgatctgtccgttgagggtggagggcacactaatgttgagaagctagtaaacaggacagatgaaacatattacagaaagagtgttgatgtgcatgaaacttttacaaagaactctgctttacttcagaattccgctgtggtgaatttagggcccgctaaaaaccatccagttcatgcattcgacttgaacccacttaccactcctagtggaagcccacactttgaagcaagcatgggaagacattacaatggaaatcatttggcccatagtcatggaatccatttggagaaaaactttgatgcgtcattttgtaatcctatgccacgttttacaggagttatgaaccatgatagtagggcgtgcagaccaaatttctccaataaaacattccaggacactttgagcaatgcttcaaacactgaattaaagcttgggcaatcttcttatcatcaatctatgactactctttccccattggggcaatcaacgatgattgaatttcagaaaccccaaacacataggcctccgataaatcaaaatccttctccaaagcaagcaacaaagatcagcaaaagtctatccgaacataatgaaccatccattagtaccggaaataagaagcaaccacttgaagttgttaatggcatgaagcgttctgaaggtgatgagcttacagatgatacatccaagaattcatttatctcattatttctttcacaccttgagaggaataatacacccgaacccatcgatgacattctcaacagtaatgagcactatcttcctaaggccctggatgttgcatgtggttctgatcatccagaaagtgccactagacagattgaaacaagggtgcctaatgataagcactcaaagttggcctcagccattgttcatacgaaaaggagatcagagggcatttctctttcagtggcttcttctggatataatcctcaagatgcatcccatgctaatagtcaggaacacttgattcatggtgattccttgtcacatttgctgcctagtcaacctaacaccggaatctcgaaaatttctgcaagggtttcatgtcatgcaaattgcatgagctgcattcacgtgggtaataaatcccatcaggttgcacatggtgagattggggttccctgtttctatgataaaatggccaggggccatggtacttttgagcgagttgatgactgcacacatagaagtttgagagctttcacaaaaatcagttgcgataatgggaaatcttgttgttcttctcgtgagcttctacctagcttttgccaaaatgatcagccaacattgggaaaatcgatttgtggatgctgttgcaaaattcaggaagatgcttccaagcttggttttatacctggtcacatgtgcagaactcatttttctagtgatgttggtccagttctagccaataagcctactattgaagggctagatgaattttgtgcttgcagttgctccacttttacacaacgatcatcattatgttctcgggaatacgtcttgcagtcttcctgtgactcatgtcccattaatggactgcactgcagaagaacgaggttcttgttgcaatggaagatgctgctactctgtagtcccaaaatgtttgtctagttgtgactttacaaaacactgtgatgtcataattgaccaaataggtcatgctgcacctaaagataaccatcagctgcaaatgcctaccagatgctgcacactgggggagaatgagaagttaatatgccaatgcttaagcaataaaatagctgtaagaaacttgcctcaaacttctcattgtaaagatgtctctgagaaagtaatgaaccagccttctattgctataacggagagactggagaatgtatcagaaccttcagtggctgatgacagttcatccaaagctgtagcagagaaaaaggatgcttatagagattctgcagtatctaaaggacagccaaattttggtttctcatctgggtcgtccagcattatagtgacaaagttccagaaatcacctgaatttaacaatgtatcctctactgctaaacatagcaaacataaaaatctgtgtgatgaaggatcaagaattgagaaaagttcagcatccagctatgtgcctaccagtacaggatgtgaagaacccctaaatagttctgccaaatctgagctgggtccatcaagagtgaagcgcaaatgtaatcagatttctgagggaaggagactggaagaaacagataatgaggaacattgttctgaactgctaaaaaagactagaacactgaggtgctctgttaaaggttctgaatcagatgattgtactagggctagttcccagtcgtcccagaagggggtttatcaaccacaaaatgaggttaactcattttcttgcagggtgttgagaaccaagcgaaaacatcctattatgcatctaaataagcatgtgaaacagcttcacagacagaccaagttttttgaaggtgatgagcaaccagatgccaagggcaattttcttggtggattagattcctatgatagaaagaggcaagtagaggatatgagcactctggataaaacaagacatcaccaggaagggagtcgagcatttgtccgcaaacttcctaaatatgtgtctctgaattgcattgttaatgaaccgaatactaacagtgaaggtgcttgcagtgggagtggtgggattgattctagtttaattgctacagggattacaaacgataacaggaaatctcccaaaattgttcctctcaatctggttcttaaaaaggctaagagatgcaatgctgttaaactccgtaagacagaaagcacccacttgtatgaggagaaaagctcagattgttctgtgaacagctcagattattctatagaaaagtattccgttgatgatgaaaattgcagcccacaagctgaatatgaactgcaggattccaaaaggagtaggtattcatctaatgatctgaggtcacatgtggctctccacaaaagaacatctggtgtcattggagaagatgactctcttggtctaacagatgtggaaataaattgcctgtcaatatcatcatcaagtaatggaaccaagaatcgaagaacaagtgtatcccttgccaggattaagaaattcgggagcaaatcagtatgctattctggcagtgacaaagacaatgctgtgctagcccatgaagtgaatgctaggagatacagtggaagactcagctcaaattctccatgctgtgtttgtgggatctcagacctggagccttgcaatcgattaatagagtgcagcaagtgctatatcaaagtgcaccaagcctgctatggtgtactaaaagttcctaggggtcaatggttttgcagaccgtgcaagaataataccatggatacagtctgtgtgctgtgtggttatggaggtggagctatgacaagggcactgaaaaccaagaatattttgaaaagtttgctccaaggtttgatgaatttagaaaggtcagaatattatgttgattccttaggaaatgcaagcagtgagtgtacaagcttgcaaaatccagtagacagtgcacatggggataacattatgaatgcgaagaacatcaccagcaattcctggacctctggaaaatactattcgagtttacttggaccacaaccaatgcagtgggttcacatggtctgtgggctgtggacacctggcacaaaatgcccaaatgacaccacaatgagcgcttttgatgtttcaggtgcttcacctgccaagagaaatactgcatgttcaatatgtgacagaactgggggctcatttgtcaagtgccgagctgtaaattgtttggtattctttcatgcttggtgtgcacatcagaggggtttgctgcaaagtgagcctgaaggcgagcacaatgaaaatattggcttttatgggcgatgcgtgtctcacgccattgttttttctagtcacgttaatcctaagaaagaatactttagaaacaacaattggacatgtgcacgtacagagggttttaaaggccgaaagggagaaggcttttctgatagtagccataaaaaatatgaagagtacagtggcgagttcggtgtttcccaagaacagataaatgcttggttacgcataaatggttcaaagccctgcggacgaggacagaaggagtacatccattacaagcagttaaaagggtggaagcatttggttgtttacaaatctggcatacatggacttggtctctacacatcagtctttattccacgcggctctatggttgtagaatatgtgggtgaaattgttgggcaacgggttgctgacagaagagagatcgaataccagtccgggaaacggcaacaatataagagtgcatgttatttctttaagattgacagggagcatattattgatgccacccgcaaaggtgggattgcaagattcgtcaatcattcatgccagccaaactgcgttgcgaaaataatctcagtcaggaatgagaagaaggtaatgttctttgcagaacggcacataaacccaggggaggaaattacgtacgattaccacttcaaccgggaagatgaaggccagaggatcctttgcttttgtagatcaagatactgcaggcggtacctcaattagtttccggtgggcgtaacatgtctatatataacttatatatctatatgtatatcttatatatttacaaattacaattgcgattcatgcctgctgtatatgtaggaacttgcatctagaactgcctgtttatcttttgtgaagtcaaatgagttatcagctgttcatgtgacactgaataacaaaagcataaaaagtgtcactatctcgtttatgagaaatcatgcgcctaatctgaatgatggatgatccagtgatctactttggcaagaagggcttgaggtcagacttgtccacctgaagctttgttgagatggcctcgatctgctgattcctgcaaatccaagagccatccatctttgggaaacagaatatataaaaaaaaatgaccaataacagagttctttctttgtgttttccaccaggaccttcacttcagtaattccagatgaaa

SEQ ID NO: 16725 - DNA, 1822 bp, Zea Mays
cgttttcatccctatctgtgtggacggtaaaggtggcgggggcaacggtgccacaagattgtgggccctcttagattggcccacatgtcagccactggctaacccatggccggttgtcgttatccatttaaccgaccaggcccatggccatccactccactagtccacttgcacttgcgacagtgcagtcaatcgcttcgtctccgcgtctcgcgcgccccgccgcataggcgccagtcctccacagaaattcccacacctccacgccgtacggccagagtcgcggtccccgtcgaatccattccatggctccacccgccgcccccaccgcaccgcaccaccgcactcctctctttctcccccgccgcgccgccgccaccgcgcgcgctgccagggccgcttccctcgccgtcagggcccagccgaacaccgccgccgcctccacctccgcccccgagccgccggagaagttcaagccgcctccagggttcaaggtgcccgagcccaagaggttcgagatcaagtccggccagcagagcagtgtcctcggcgctttgctcgccatccccctccgcctcggcaccggcgtcttcgtcctcgggtactcgccatcacttgtttctccatcagagataccatcggaccaatatgcgcttgaattcggagcttggaaggtgaaggaggaatcaaaaataggacagtgcaaacgaccggaaaagccgatcgagatatatgaatttgaaggttgtccattttgtcgaaaggttagagagatggtatcagtcttggacctagatgtactattttacccctgtcctcgaaaaggcccaacattccgacctaaagtccttgaaatgggtggaaagaaacagtttccttacatggtggatccaaacactggggtcgccatgtatgaatcagatgacatcataaaatacctagctgacacatatggtgatggaagtgttccaattatgctatcgcttggtctgttgacagcaattacagcagggcttgctactcttggtcgtattggaaagggaaattcctatactgcttcaagaatcccaccgcagcctatagagatatgggcattcgagggatctcccttctgtagattagtacgagagacgcttgttgagttggaattgccacatctgctacacagctgcgcacgtggcagcctcaaacgacaagaagttttcaagaaaaagggagttttccaggcgccttacatcgaagatcctaacacgggagtccagatgttcgaaagcgcagaaatcatagactacctgaaggcaacatatgtcctgtaccaaagctcatagtgacgttatctccaatagtcattgtaaagttgcatggaccgtgtaaattcaattctttccggtaataaaaggaaaagataaagtaaaccacaagttctgtatgatgcacagccgatttttatctatgcaagtctgaactttgaagttacttcaaactccgttctcctggttaatctagtgaatgagtgagttcccttgtgctggagaagttcggatcttggactggtgttgattgtagactcgactgttctgttcccttgtagttcggatcgtgaaattcgtcatcagtgtttggccatctcttggaagttcaactcggagcgtggcaaatcaaactgttggttcacgaatcaacgtcaagactcaagactcaagagtcaattatggatcaagttgccgtcacggcgtcaccgaagcatcgctacacactgtttgtagctttttctgacgagtttttcgagaatctgactgtggggaacaaaataagagagtcc

SEQ ID NO: 16726 - DNA, 333 bp, Zea Mays
tttgtttgaaggttgttccggacggacaatggttatcgcaaggcaaagagaccattgaggagcaagaagtgaagaagaagaagaatctgtaaagtgttgaagctgctcatcaacaggactggcgatagagttgcgcctcagcatggaaggagagaaaatggacgcagtcagttattgcctcattgcctgacgaccgatactataggctcctgagatgttgatttctctgtgttttctatgatcaagaacgaggtcctggcgaccttggtctgtcatgaactgaatttgataaaaaaaattgtcatattttctcgggggttttgatctgcgttt

SEQ ID NO: 16727 - DNA, 2276 bp, Zea Mays
gtccgcatcaccatcaccacctatcgtcggagaaccacagaatccaccgcatcgcagagacgagtagaggttagatttaggctgaggtaagatggtgtgcatccggcaggcgaccatcgaagacctgctggcgatgcaggcgtgcaacctgatgtgcctgccggagaactaccagatgaagtactacttctaccacatgctctcgtggccgcagctcctcttcgtcgccgaggactacggaggcagcatcgtcggctacgtgctcgccaagatggaggaggacccctccgagccctgccacggccacatcacctccctcgcggtcctccgctcccaccgcaagctcgggctcgccactaagctcatgtccgccgcgcaggccgccatggaccaggtcttcggcgctgagtacgtgtcactccacgtccgccgatccaaccgcgctgccttcaacctctacacctctaccctcgggtaccagatccaggacatcgaggccaagtactatgccgatggggaggacgcgttcgacatgcgcaagctgctccggcagccacagcccaagaagcaccaccaccaccaccatcacggccccggtgggtgctgctcccacgacgcaccagttgcggcgactggttcttctccccagtcttctggttcacccgataagaaggctatcacttgatgtagggtaagccttttcctttcaagctctagatgttatgctctctactaacatattgctagtcaccaccgcgttttcggtgtgattatactgtgattttgtttgacagatcaaactagtagtttcgttgtagaatgtgtagtatgtaaatgtgcctctcctcacctttggtttcttgagaatgttcactctcaaggcagcccagtcatggaggcacatagcaattattggtgagtttaacgtggaagcttactgttttgttgtggtattgcttctaaaatctctcactaaatcagccaacgctgcggttgcttgtccttagcttgtttagtgttcgctggttattgttatgataagttattttcttcagctttcacttacctttgttattggcaacatacttctgtatgctccgcccttctggcttggtaggagttgcctgcacggagcctgcccaaacacgatcttagttggggttccacatgagtgcttttacgacattttgaactagatgcgtgatttattcttcttgacttaaattttcaatatttatatatttggcagatcatagatggaaaaatgtgcttaaaattttcttgcttttgatgatgtgttgcttaattgtgaggtgcagacaactccaagtcgctgctctccagggagaacctacttggagtcctacaatcaaatgagatctgaggcattttctgatatgtattttttgcgtgcactgtagttcttgtttaaattttcgctgatgttatgttcagctctttcttatctttcactgttacatttgaaagattgtgaaacttggacgccttcaattttcaccatcacagtagccaatgacgagttgtcccaacatgtgaggtgtaggtaactccaagccctgtttcagggagaacctacttggggtcctacattcaaatgagatacctgggcatttactgatgtttataaataaggcctaatgttttgtcttggtttgttgcatgcattattctgtttgagaattgttctttgatgactgatttagtatgcttaggtagctgtgtgttattgttcatgtaatgattatttgttgttgagatgtttatgccttttcttgtgtctagtgttttatcagcaaaacaaattactttgtggcactgccagtgatgatttgtctgcaaaatggatgtcctgtggactcaagtcccctgtttcagggagaacctactcgaggaaacatgactcgtatctacagagaggaatcaccaagccaattgtactcatctttcctctcactgggtatacaatatagtagttgtagcggtctttccgtagtagaacggagaaagacctgtgcagtgagtatttgtgtacttggccgatggctcgaatcgtctgacctaatcagcgagaatggcaaccaaatatgcttcgtacttgaaacctgtgttgtttttagacatgtgcgaattttcacagttcatttgattggtgatgcctgacaatttggtcagatctgataccgcggaatatataatgcaagtttgaaacctgtaatgcaattgttttgttattggatcacttacagaggaagagt

SEQ ID NO: 16728 - DNA, 685 bp, Zea Mays
aaacaccttccgtcccctggccattctgtcacactactcagccagcccgctctatctctttcctctatccaagccagaaaggtagaaaccccccggaaacaatttccggccatggcgaccgcagcccaccaggttgccgccaccttcctctcgttcctttcctcctccactcaccacctcgccccttcctccgtctccctcgggacaacctctgtcctacccgtctcccttcgggccgctggcacacgtggcccacggctcgcctaccgcctccggggccgccgcgtcggtgccgccgtcgcccagctccccaccacgcatccagaggtagtttctggggagaagaagatcagatggtcatcaagggctgtgcggtcttttgcgatggcagagctggaggcccggaagatgaggtaccctacgacaggcactgaggggctcctcatgggcattcttgttgaaggaactagtggtgcagcaaaacttttgcgggctaatggaatcacacttctcaaagtgcgtgaggaggcagcgaatgtgcttgggaaatcagaaatgttttactttagtcccatgcatccaccattgacagaagctgcacagcgagcccttgattgggctgtcaatgaaaaattgaaatcaggcggccaggcgtggtactattcacatgatcagtaagtgccga

SEQ ID NO: 16729 - DNA, 1500 bp, Zea Mays
agcgtgaggagttcgaaagaaagggagaaaatgttatgcttgcttgccttgagggaagcgtcgccgtctgcccacacccgcaccgcacccaaccgcagcggagccgggagccgaaggccgagggagcagggaccaatcatattgaactcagatttggagcggagcaggagggggagccattgccggtgttctgattgctgctggaggtcgagggatggtaggggtgctgtcgaatcgcgtggatcgggacgacctcaaggccggggatcacatctacacttggcgggccgcctacatctacgcccaccacggaatatatgctggagatggcatggttatccattttacaagggcagctggacatgagattggaacaggaacattcttggactggttcctttatagctcctctccggcagcaactgagggtcctccctgccagaaatgtgggcacctagtcaagtccgatggggtcatcacctcttgcctcgattgcttcttagatgggggcagcctgtacctctttgactacgctgtgtcgcctgctttcttcctcgccaaagcacggggaggaacgtgcaccctggctgcctctgaccccagtgacgttgtgatccaccgtgcacggtacctcctggacaatgggtttggcatgtactccctgttcaagaacaactgcgaggacttcgccatatactgcaagactgggctgcttgtggagaccgctttcagtgttggccgtagcgggcaacttgcgtctctgactgctgccttcagcgccgtggcctcgtcccccttgcgtttcctgacaaccagtgctggtggcctggcaattgtgaccagcggcatgtactgtgtcgggcggtatgtgtcggatattggtgtccggcgtgatgttgtcaaggtccctgtcgaaaggcttgtggagcagaatgttacttggattcctcagtgtgtggctacagagacagatatcgcggcaggagcaccgcagcagcagttggaggttccttgtgcggttgccgaggaagcatccgttatacagcccgcggcaccgtgatccattgctgaaatgtcatcatgtaccaggtgttggcatgagacaggacaactggaactacgtacttgtgtggaagtacatgtaatgatgtatctggtggtgttatgcaatccattgctgctgctgctaatgttgcaagcaatgatgatgatgatggatgtggttccatgaccgctattattacagaattgagaagacctgtatttgcccttgatgattaatgatttctgttatacagttgcttatggatgcatctgattgtgcattttccgagtcgccatacattagcaatcttgacacgctcttcactcagtccaaaaccacaacttatatctagattaaagtaagcatcacgagcaattctcttggaatagcgcaaaatgaactgattctagacgttgcagtgtacgccccttcagggcttgttcggttctacatcc

SEQ ID NO: 16730 - DNA, 3607 bp, Zea Mays
cggcaaaccactcgctctcacagtgagacggctgtactgtactgatcactcctggcctctgcgaaggaaagaagaggtgggggaggctggtttggtggcctgtaccgatttgcagcagctgatggcggcgcctctgctcccctcttccgtctccgtgctcctctcgctccacatcgcgctgctgctggtcctctgctccagccaggtaggagattcctgctcctcagtgcgggactgcggcacgggcctctactgcggcaactgccccgccgcaggcaggaccaagctctcctgcatcagggacctagccatccagcccacctccattgtgaaggggctacctttcaacaggtactcatggctcgtcacccacaattccttttccatcctcggggagccgtcgcgcactggggttgagagggtcacgttctacaaccaggaggactccgtcaccaaccaattgaggaatggtgtcaggggattgatgcttgatatgtatgacttcaacgatgatgtatggctctgccactccctgcaagggcaatgctataacttcactgctttcgtaccagcagttgacacactaaaagaggtggaagcatttctctccgagaatcccacagagatcataacaatatttattgaggattatgttcattcaccgatgggactgagcaaggtctttactgctgctgacttgatgaagtattggtatccaatctcggaaatgccaactagtggcaaggactggccaagtgtcacagatatggttgcaaaaaaccgcaggttgctggtgtttacttctgatgcttcaaaggaggctagtgaaggaatagcttaccaatggagctacttgctagagaatgaacctggagatccagggattgtgcctggttcttgtccaaacaggaaggaatcgcagccactgaactcaaggccggcatctctatttctgcaaaattacttccccacgatccccgtgcagaacgaagcatgtaaagagaattctgggctaccacaaatggcccaggcttgttatgccgcagctgggaataggatcccgaacttcatagctgtgaatttctacatgcgaagcgacggtggtggtgttttcgatgttcaagacagaatcaatggccgcaccttatgtgggtgtgacaccattgctgcttgccaggctggagcaccaatgggtgcatgcaaggacacgggggcaccaaatcagactacatcgccctctgtaaatggaaatgtctattcaggaactatagaattcaagacgcattccactagtgctgctagcaataacaacatccggagtagatctgtttttctgctaaggctgcagttgactttgctgctctttttctctttcaggctctagttttcatatatctggacctttttcccacctactgtatagctgaaagtaacatcagcttttgttgtgagcttgctttctctattgggatgacgatatatgcatgcgtgttgcacctagaccgaaattttgttcacatcaatggaaaccgcgtcttctctgtgccctctactgacgggtgggtcaccacgggtcccggactcggttggacacagggtccagcactccagcagccagccgtccaggcaccaggctcatccagtgttcgagtcctcgtcgacttcgctttcccgattcctaaccccgcaggccgcaggctcgcatcgccaagcatcttccgcgtctcttcggagacatctagtaaaagcatcttccgctactccgccctccgcctcccccgtctgcttcgcaatccgatccggcgaccggcggccatggatcctgcgccgcagacgcacccgatcctctcttacgtgctctcccgcatccccaacctctccatgaccaagacccccaccgccgagttcgacatcgagcagccgcctgtgcacaccccgtccccgcggacgccgtcctccgcgggagagttcgagctcgtcgagcgcatgccggggctgcgccacccgtccgtgctccgcgccatgacccgcgccgtcgccgacgtctccgccgcgcgctccgcgctgcaggtgctcggcccgcgccccgaccacgagctcgtcgactcctcccgcgccatagtggccgccgccgaggccggggattcgcggatccccgcgggcgacgtcgaggcgtgccgcgcggtggtgcgcctcgatgagacccacgacgcctacgaggccctgctgcacgaggccgagtccaggctcgagagggtgtaccgctccgcgatggaggggacggacctggatgacgaggcggcggagagcgtcaaggatcaagggccggtcgcggggcctgagggcggggacgcggcggtgggggaggaggtggtggcggtgctcaagcaggccgaggagggcaagccggtggacagcgtgcgcctcgtggatcgccagcttcgccatctgcccgaggcgttcgggaggatcctggggctccgtgtgctcgacgtctcccgcaaccagcttgaggttattccagatgctataggaggacttggtcatcttgaagagctttttcttactgccaatgatttggtatctctacctgataccattggactgctatccaatctgaagattttgaatgtatcaagtaataggcttagggcactgccagatagcatctccaagtgcaggtcgctagttgagcttaatgtgagctataatggtcttacttatctgccaaccaacattggttatgacttggtaaatctgcgaaaactctggattcatatgaacaaattgcgttctcttccatcatctgtctgtgagatgagatcgttgtatctcctggatgcccattttaatgaactatgcggtctaccatctctcttcgggaaacttagcggccttgaaattctcaaccttagcagcaacttcagtgatttgaaagagcttcctccctcgtttggtgacttgctaaatctgcgtgagcttgacctaagcaacaaccagattcatgctctccctgacacttttggtcggctggataaactggagaagcttaacctagagcagaaccctctagtcatgccaccagaggacattgtgaacaagggcgtggatgcagtaaaagagtacatgtcaaagaggtggctggacatattgctcgaggaagaacaaaggcgcattgcggcagagaccccagaaatgtcatcgactcctaaagcttggctgactcgcagcgtctcctgggtcacggacgtttctgagagtttggcagggtacctaggtgggaacaagtcagagaaagatgcatatctggaccagcagttttgatactttatgtttcttttgcctaatgtgcattcgccccatgtatacacaaataacgtttaccaaaaatcttcattacagatgtgttcctggtgagtataccgtacggttttgcttaggaaatggatgtgttcctaatgggtctgtcgtacggttttaccgtggtccattgaataatagtatctcacagcacttgagagtacactcaagataaacattgttcagagatcgacctgtcttctggtatttggctttcgcccttcgctgtgaatttttgttccatgta

SEQ ID NO: 16731 - DNA, 2178 bp, Zea Mays
ctcttccccacgcacacaacaaaagatctcagagccacacagcgagcgcgagcgagaggcgcgctgttgcggaaatgccgctcccggcgttcctggcggcggcggcgaggctcgccgtcctgctggccgccgccgtgactgcggccaacgcggtctccttcgcgcgctaccggcgccgccacctccgccgcatccccaaccccatcgacgagtccgccgaccccgtcgccgacttccgcgccctccgccccgcctcggccgaggacgccgcagaagatgacagcttcttctttgggctagcgaccgcgccggcacatgtggaggacaggttggaagacgcttggcttcagtttgcggtggagcactcctgcgacgacaaggaggccatgcgcgaccctacgacagcagatgcggtgatggcgtccgctgcaggggacggaggtgctcagttggcttctcgtaggtcgtccagaggggatgatgatagggatggtgatggagagttgaggaagcctcttaagatcgccatggaggcgatgctcagggggtttgaaatgtttgctgagggtggtgagtcaggttctgctgctgctgctggtgacagttgcagccacaacgttgcggcttggcacaatgtcccttgcccgcaagaaaggcttaagttttggtctgatcctgatactgagttgaaacttgctaaggaaactgggatcagtgttttccgcatggggattgattggacgagggtaatgccgaaggaaccaatcgaagacctcgagagctcagtcaattttgcggcgctcgagcggtatagatggatcgtccaaagggttcgtgactatggaatgaaagtgatgcttacgctgtttcaccactcgcttccaccttgggccggagaatatggcgggtggaggatggaaaaaacggtcaagtactttctggactttgtgaggcttgttgttgatcgtgtatcagatttggtggactactgggtggttttcaatgaacctcatgtgtttgtgatgctgacctattgtgccggtgcttggcctggtggtgaccctaatgcaatcgaggtagcgacgtctgctttgccgactggtgtatacaaccaagcattgcattggatggctattgcacatgcggaagcctacgattacatacattcaaaaggcgaaagtaaaaggaagccggtcgttggtgtcgctcatcatgtatcatttacacgaccctatggtctgtttgatgttgccgctgtcacactggctaattcattgacccttttcccttacatcgatagcatatgtgacaaattggattttattggcatcaactactacgggcaggaggtgatatcaggccctggcctaaagctcgtggacaatgatgagtacagcgaatctggtcggggtgtttatcctgacgggctgtttcgtattctgattcggtttaacgaacgatacaagagcttgaatatacctttcgtagttactgaaaatggagtttctgatgagactgatctgatccggaaaccatatattctggagcacctgttagccatttatgctgcaatccttatgggtgtgcctgtgcttggttatctattctggacaacgtcagataattgggaatgggcagatggctatggtcctaagtttgggcttgtggctgttgatcgtgctaacaacatagcacggaaacctaggccatcatactatttgttctctaagattgttacaactgggaaaatcacaagacatgacaggttggctgcttggagggagctgcaacaggcagcgtttcagaagaaaacacgcccgttttttagggcagtagataaacatggccggatgtatgcagggggtctggatcggcctatccagagatcattcatattgcgggattggcgatttggtcattatgaaatggaaggcttgcaggatcctttcagccgatttataacatccattatttcaacaattttgtggaagaagaagatcagttacattgaggatgaggatatttcttattctctttcttgttgatgcttcttactctaggtgttatgtctaagagaatttgaggtcccatttttttttactttcactgtatatggcctgtataaaattgtttgcccttatttttatatgtaagtagcatgattcattcaaaaaaaaa

SEQ ID NO: 16732 - DNA, 151 bp, Zea Mays
tggtataggagggtatgcgcgagagagaggttacgagttcgaatctcaccatttacaaagtatctaagtttgattcaaaataatagtgaaaaatgatagggcaacggataaggtaataggtaggattggagagttgttcctagaatttaaa

SEQ ID NO: 16733 - DNA, 335 bp, Zea Mays
ggtgcatcccctaatggaatttcagtcaaacgtgaggagggagagagcaaaacgacctgatcctccttgcaccatctgcaagggcacagggagaatagactgccgcaactgctttggccgaggaagaacaaaccatgccgatgtggccatgcttccgaacggcgaatggccacaatggtgtcgaatttgtggtggtagtggactggattactgcctccggtgccatggaactgccttcatcacaaaagccatggaaagaagcaaaaatgtgacctcaacgtgagcagcaggcgcagccgcgcagccctcgcacacggcacgcatgggaaggtggt

SEQ ID NO: 16734 - DNA, 670 bp, Zea Mays
attgcatcgacagcaactgaggaggagatggggaactggctatcattcgtggcctcaaggaacccgacgtctttaccaatgcagtaacatcagcgaaagcacagtcgaaaacgaagccgtcaaacatgggtctcggaaacaaggaggctatggccatccaaccgaacgtaactgctggtcagtccacactggaaggtggtcacgagaggttacaggcaaccgtaagaaagatcttggaaatggtggacgcccaggaacaggaagaagcaatgccgccgaggccgtcccctggtttgctcgagctctcggaacgcgccactgctttgtcatgacgacttgacgacgctgtgaggttctggaggcgttattaagcatggactcgggttgtttaaccatgctaggtgatacagcgcccgatagggcgctattttttctagtgagacgtgtagaggaggcagtcgagtcatttcgcaggatacaagtcgaagacatcgagcctgacggtatgccattattgtcagtacttgcggcatgtagggatctaggtgcggttagtgggtgtatgtatttgaaggtatgaataggagtgttgtgtacgacttggatggcactaattactgttgatatgttttggcacgtgcaggtgaaaaatatggcgcttactaatatc

SEQ ID NO: 16735 - DNA, 203 bp, Zea Mays
caaactagtcaatccttaggttaggtaatgaaatgcgggacagtgaattataaagtacgtaggacataataggtcagaggacacttgccttcaccaggttgttgctcagggaggtctccaacaatacactcgggaacctcggactgctcgttgtctaaataaagcgaacatgcattcaatacatttggaaagtacaaatgaat

SEQ ID NO: 16736 - DNA, 2301 bp, Zea Mays
taccccttatcctcataactatgggccaaagtgtaatttgctccggccaaatctccgttcccctccttgtcccctggggttttgctgttcctcgttgctgagcagtgattggaggggctaccgggatttttgctacttgcctccattgatggcttatcttcttctccatcctcagttcacttgctcccagcccccttctcatcgattgaggggtcaaatacattacaagacaaacaatatggggaagaacatggctaaatctacagtgagtttgcttaaccgcagtgctaattttgcatcaaggacttcacaagatgccgtggatgggttaagcgatgaaagtgacggtgaaacctcaacaaaaaagaagagaaccccaagacgtggaagaaagaaagccaccgttgaaacatcgagagatgtaggagaagaaatcgaagtcatcactgaacaaacggccgctgaagagactaaggaagttaagaggagaggccgcaagaaagctgctacttctgcaagctcagaagaggagaaggataaggccaaggaaccgaagaagaggggacgtagaaaagttaagactgtagaggaacctattgataatgctggagagcatctgagcaaagatttgatgctctataatgaaagagaagatcagactcgtctacagaattctgccagtgttctggaaagtaaaatagcgtcagtgctacatgaggatattggagaggttgacgatttaattccgctcgtgtgctgctttggacctgccaaatactcctttattccttctggaagaccagcaaataggttgatagaccatgagattcatgatagaatgaaggacatgttttggtctccagacaaatttgtgagggcaccaggagggtcttcatccaatgttgctctagctttagcagcgattggtggaagggttgcattcatgggaaaattaggtgatgatgactacggtcaaagtttgctgtatcacttaaacatcaatggagttcaaactcgagcagtttatatggacccttcagcaccaactgctgtgtctttgatgaaggtcagaaccgaaggaagtctgaagacaaactgtgttaaaccttgtgctgaggattgtttcctgccgtctgatatcaacccggcagttctaaaagaggctaagatgttttactataattcttcagctttgcttgagcccactacagagtcatcattgttgaaagctattgatgtttcaaagaaatttggtggtacaatattctttgaccttaatcttccacttccactatggtcatccagcaaggaaaccaagtcactcattaaggaggcatgggaagctgccaatatcattgaagtcacaaaacaagaacttgagttcctttgcagcatcaaaccttctgagaaatttgacacaaatgataatgataaatccaaattcacacactatagttcagaagttattatgaaattgtggcacagtaatctcaaggtcctctttgtgacaaatggtacctccaagattcactattacacagaaacacacaatggctgggtccgtggtacagaagatgcaccgatcactcctttcaccggtgatatgtcacaatctggcgatgccattgttgcagccctcatgaggatgctggtaattaaccctcacctgatcacagacaaggtttacttgcacaaggcagtcaaacatgctattaaatgtggtgtcatcgaccagtgggtgctcgcgcgagaacggggcttccttcccaaagagagagcagatccaaccagcgagcagtacgaagtgaagtccatcacagagagggaataccgcacacttcctgatgccatgcaatcagaaaacacgtcaaccagtgaacttgcttatgtggagtgaaaggacaggccattggtgtctgtacactggattcctctatttatttatggaaactgactggtgctgcagttggtattcagaagaattagtttaaacatgcagattttaggtttgtcgagtgtaggttaatagcccccaaagtaagactaacatattgataacatagagacaatgcaaatgtggctgatgccaggaatttttcctacaatgcaatatttgttcattcttgatttctctgcaacaccactatcaattgtgggatggaggtcatttgatcttatcggttatgcaccaaatgttattatcatatatccagtgtatcaaaaatatattacatgactgaactcaccagtctgtttccttttcaggtaaaagaattttttccttaacactgaatgaaatat

SEQ ID NO: 16737 - DNA, 2292 bp, Zea Mays
ctcatcagggaggcttgtctctgtgggctggttctaagcgtaagcgggccggccagcacttatgccgccgccaatcccttcccgtgctccgcaaccgctgagtgagaagaagagatggccggcaagggcgatggcccggctatcggcatcgatctcggcacgacgtactcttgcgtcggcgtgtggcagcacgaccgcgtcgagatcattgccaacgaccagggtaaccgcaccacgccctcgtacgtcgccttcaccgactccgagcgcctcatcggagatgcggccaagaaccaggtcgccatgaaccccatcaacaccgtctttgatgccaagcgtctcatcggcaggaggttcagtgatgcgtctgtccagagtgatatcaagttgtggcccttcaaggtcatttctgggcctggtgagaagccaatgattgttgtccagcacaagggtgaggagaagcagtttgcagctgaagagatctcctctatggttcttatcaagatgcgtgagattgctgaagcttaccttggtagcacgatcaagaatgctgtggtcacagtccctgcctacttcaatgactcacagaggcaggccacaaaggatgctggggtgattgctggccttaatgtgctgcgtatcatcaacgagccaacagctgcagctatcgcctatggtcttgacaagaaggctaccagtgtcggtgagaagaatgtcctcatctttgatcttggaggtggtacctttgatgtctccctcctcaccattgaggaaggaatctttgaggtcaaggccacagctggtgacacccatcttggtggtgaggactttgacaacaggatggtcaaccacttcgtccaggagttcaagaggaagaacaagaaggatatcactggcaaccccagggctctccggaggctgaggaccgcttgtgagagggcgaagaggactctgtcttccactgcccagaccacgattgagattgactcgctgtatgagggcatcgacttctactccaccatcacccgtgccaggtttgaggagctcaacatggacctgttcaggaagtgcatggagcctgttgagaagtgcctgagggatgccaagatgctccaggacttcttcaacggcaaggagctgtgcaagaacatcaaccccgatgaggctgtcgcctatggtgctgctgtccaggctgccatcctgagcggtgagggcaatgagaaggtgcaggacctgcttctgctggacgtcacccctctgtccctgggtctggagactgctggaggagttatgacagtgctgatcccgaggaacaccaccatccccaccaagaaggagcaggtattctccacctactcggacaaccagcccggtgtcctgatccaggtctacgagggtgagaggacccggacacgcgacaacaacctgctgggcaagttcgagctctccggcatcccccctgcaccccgtggtgtgccacagatcaccgtgtgctttgacatcgacgccaacggcatcctgaacgtgtctgccgaggacaagacaacggggcagaagaacaagatcacaatcaccaacgacaagggccgtctctccaaggaggagatcgagaagatggttcaggacgctgagaagtacaagtctgaggatgaggagcacaagaagaaggtggaggccaagaactcgctggagaactactcctacaacatgcgcaacacgatcaaggacgagaagattgcgtccaagctgccggccgatgacaagaagaagatcgaggacgccatcgacgcggccatcagctggctggacgccaaccagctcgccgaggcggacgagttcgaggacaagatgaaggagctggagagcctctgcaaccccatcatcgccaagatgtaccagggcgcgggtgaagacatgggcggcgctggcggcatggacgaggacgcccctgccggcagcggcggccctggccccaagatcgaggaggtggactaagcggtttgttgtcagtcttgagtgtgctgcagttgctggctggcccagttgctgccgagagttatcgtcagttggtgcggtgtgtccgcttaaactttatttgtggttggttggtacttttgtggtggttatttttttggacctcgtgatagtcggtcggttcaatgttatcgcggctactggcaaaccttaagtgatacggtattcttcttttcgactaaaatagaataaaacatagagactaaaacttagtctctagaaaccaaactgttacaagatctaagcagttactcccag

SEQ ID NO: 16738 - DNA, 562 bp, Zea Mays
gtgcactggtgctcattgtgcaggagctgctgtagcatatgtcgctgacatgttctcgacaccagcgatctttgtgaaagctgtgactgatatcgtggatggggtgaagccaacgtatgaggagtttctgcagaacctgattgccgtgacgacggcactggagctggcagtcaccaaagtggtggatttcatcagcgggaaacgcatctccgatctttgaaagctcgtggtcacgaaatccaacatccccctgctctgatgcacgatgctaggctaggatacaatacaacgttgggtcaatgattttttttggaggtgttctatacgtgaggttttaccccttttgcaatggctcttgatctattcctgaataccgaccagagcagttgtctcttgctaaacagaaggaatgtaaagtgagcaaacatgccattgatcgttgcgaccaaactaacaatgtctgtgcgctgctaaggcacgcatcggcgactattctagagacgattcaaaaaatgtccacaataatgctggctagcagagccgattcgacaaaaagtggggg

SEQ ID NO: 16739 - DNA, 629 bp, Zea Mays
atggcggtgtgctgggctgttaagatgggcccagtgtcagactcgtcttctcatgtggggtgcgaccgaatccaacagaagagccgaagaggaaaggggcggttgctttatattccttctcggctgcaatctgcgtccatctatccagccgtctcggggcgtcgtgtgcgcgtggatctctccgtagaagggatgaagatcacggcgctccttgtgctgaagccgtcgacctccggagccggtagctcctcgtccggcggccagtcgggcccggaggcggtcgtgctcgcgaacgcgacggacgtcagccacttcggctacttccagcgcagcgccgcccgcgagttcatcgtcttcgttgcccgcaccgtcgctcagcgcacccagccaggccagcggcagtccgtccagcacgaagaatataaggttcactcccacaacagaaatgggctttgtgcggtggcatttatggatgatcactatcctgtacgaagtgcattttctcttctgaatcaggttcttgatgagtaccagaaggcttttggggactcctggaaatctgctactgcagatggaactcaacagtgggctttcctgacagacgccttggcaagatttcagcataaaac

SEQ ID NO: 16740 - DNA, 2528 bp, Zea Mays
cgagttatgaactgaaaacgaagagatggcaactcaggtgaggagtttagcaaagattctattgagcgtgatgatagacggcttatagagctaggctggaagacattggagctttttgccttgactcatatatttagccgaatagaagtggcacatcaagaggctgtggctttgaagcgccaagaggaactcattcgtgaagaggaagcagctgggctagctgaaattgaacttaaggcaaagcgtagtgctgctgaaaaggaaaaacgtgccaagaaaaaacaggcaaaacagaagaaaaatagtcgaagaagtaataaagggaagagtggcaagtctgacatcaataaggaaatacttatgtacagcagtccttcaggtgatagaatcctggatgatttttctggacaaacggaagaaatgtcctcaaatgctgacaaccctgaagaagtttctgatatatctgacagcagagacgataattcagatgcgcttcatgttgatattgaagaccgtgaaagtagccctgttaattgggagacagatgcttcagaaactcaagctactgtgcctggaagtagtgaggtgcaaaatgaccatgcagggaagaggacctctactgtagatgatagctcatcgacttgttcatcagactcagtcccttcagttatcgtgaatggatcatatacaggaggtgcctggacaagcgtcagatccttatccaataggggaaacaaccggaggaataaggatactgaagcacgggcagcacttgcacaaggtggatcaagttcagcgcataatggttttataggatctggcggcagtgcctctggccactcaaaggaaagatacgaacctgaggatgataaagttgtcatgcagaggaagcaacatgcacggcacattgatgtcattagcccctctaagtcaagaatggcagtgtcttcattttcttctgtgagccctgttaagaagcaacctaacttgtctcatcagccaaaatttttgctagaaagcaccaatagttcaaatcaccgtgcaagcgaagtttcaggcgccgtgactgccactacaacagcaggtgcctcttcaaccctggcagctcagttagtttcaaataaaggacctgtatccagtgctgcaacccggaatgagaagccagttctagttacaaataaacccctgcaggttcttgtaccatcaaaatctgaagcgcagaaacaggcttccctaactggcagcgcaagcactcaggtcgtttcggtatcaaggcccttgagtgccccgcaagtccctgcagcaaaacaaagtgtgccagccacaacagctcagaacgcacctcttctttctcgctcagtgagtgctgttgggcggttaggaaatgagccctccgccaatgctcctagcttcattccccggtcacgaacctatcgcaatgccatgatggagaaaagttctggtggcgtaagcagtctcacacatcagcaaggttcatctgagcaggccgtcgcaccatcccaatcgatgtttacatcgcagccttccattctgtcatcggagaccttgtctatgaaagaggaaacgtcgttgagacctgggtttacatttggaaccgtaaagcccgagtcactgaacccttaccagggcagagaagagaactcactgcaagcgagcagcagcagcagcagtgactgtacgccatcgagttcgaacatcagaagtgagatcgcgaagctcagtttgaacggaagatcacggagcaagcaactcctgtctgaaatctctaccagatttactccctaccagccacaaggcttggtagctgacgagttcccacacctggacatcatcaacgacctgctggatgaggagcagagtgacaggagaagggttcttcagcctggtttcgtccagcaattctctgtgcataacggcgtcagcgcgcctgattatggcttgttcagtgagccgtacctgttcgaccggtccgagcagtactttgacgaggagcctccaaggttctacagtccattgagcagcgctcctcggaggatgagggaccggagctactcgcacttcgatctcccttcatactccaggagcagccagcttgatggtctattgatgagccagtggccgccatacagccgcgccgacctcgccatgcctggttttgggtcagacacaggtggctactcctatcagccgcagggtttcccgagtccagcgagtgcagcaagcagatacccgtcgtatcgccctgccaatgggcattgagagttttagcgattgcaattggtaataatgtgtggtggagtccatgctgctcgcttctgagctgagtgtaattgtaatagtccccccatagcagtgatataaagaatggttcctctgttttattcaatccatagttatatcatttgcctctctttttctatagttcagttttgctcagtggcaataaatctcggctaaaatgatctggacaatctaggctcagttttccctagttttgctgagtggcc

SEQ ID NO: 16741 - DNA, 1299 bp, Zea Mays
tgccgaattcaagaaccggaacacagcatcggcaccttccttcttctccgtcgcgtcccttataaatatcctcgaccctttcccatttcctctcccatttatttcctccgcttcagctcccattctccgccaaataaacccccgaaaagcaggagaggcgagacccggaagtggaaggctagggttagggtcccagctccccgttgcctgggcgagccgagtgatggccgcccctgccccctccggcgcagctagtgccgccgcctcaccgtccccgctgatgcagctgccgtcgccgttcgcggagctcgtcaagggcccctccggcctcgagaaggtcgtgcttcgcggcgctcgcaactgctgtgccgagatttatctttatggaggtcaagtaacatcatggaagaatgacaatggggaagacttgcttttcctcagcagcaaggctattttcaaacctccaaaagctattcgtggtggtataccaatctgctttccccaatttggatcacatggaaatcttgaacaacatggattcgctaggaaccggttttggactattgacaacaatccacctcctttaccattaaaccctgctattaaagcttttgttgatctgattctgaagccttctgaagaggatttaaagatctggccccacagttttgaatttcgtttgagagttgctcttggaccttctggagatttgagtctcacatcacgaatcaggaacaacaacccagatggaagacctttctcttatacatttgcatatcacacatacttctctgtttctgacataagtgaggtgcgtgtcgaaggactggaaactatggactaccttgacaacttaaaggcaaaggaacgtttcacagagcaaggcgatgctattgtttttgaatcagaagttgacaaagtttaccttgctgcaccctccaaaattgctatcattgatcatgagaagaaaagaacatttgtcgtgacaaaagaagggcttcctgatgctgttgtttggaacccttgggacaagaaggcaaaagcaatgcaagattttggggatgcagaatacaagagcatgctgtgtgtggagcctgcatctgttgagaggcctattactctgaaacctggtgaagagtggaaaggaaggcttgtgctctcagctgttccctcgagttactgtagtggacagttagatccattgaaggtccttcagggctgaaaatccttactttctgcctcttgtacagagtggagtttgaaatttcaatatgaggatgtggatgagtaagctgctgg

SEQ ID NO: 16742 - DNA, 969 bp, Zea Mays
cagcacggtgcatacccaatcagttcccgttcccctcgtcgacacctgcagtgccaagttgcatcgactcctccccggtcctccaccgcccgccgccgatggatgtggatgtggacgaggccaccgccacccctgcctccgcctctgccaagcccgcttccaacggcgaggccccctccggcgcccgcgaggtggatgtcggcgaggagtacacgctcgccggcgttctgcgcagcttcgtcgacggcgtctggtacccggacgagccgctgctccggcggctccgggcggcgtcctgcgaggccgcgccgcggctgaagggggcgtctcggaactcagcgcgggatctgctcgagtggacaaggcagggcagcggcctccgcgccatcctcgtcatctcggtcgggacaatcatgcctatagcattgactggccttttaatcttcatgttctttctgctaattgccactgctaatgcgatcatcgtctcagccctgatgtcactggccgctgctggcggattcttggctatcttctttgcttgcttggttgcagtgtatattggagcagtaggagttgctatctttgccatttctgccattgtcatctcatcagttgttggagttatgattactactggttgggttgggttcttctggatgatctggttcaccgcaaggaagagcatggacctgacgaagcattccatcagcatgacgagctcggcagtccaatcctattccgcgtcccgccaagtgaagcagaagcatgtcgactgaggctagttggttgcgtcttgcgtcctgtatgaagaagccctcgggtcgatctgggtgaattacggtagacgacatgcttgttttggcagttctgtttttcacggacactaggtatgcagtatgtacatgccgattcatgagttgataataaaactatcactatattttttttcctttttccatttcttcc

SEQ ID NO: 16743 - DNA, 450 bp, Zea Mays
aacatcctcagggcggcatgtcaaatgagatgtacagcaccattgccagagtgacagatggtatttatgaaggaattgcaattggaggggatgttttccctggatcaactctgtcagaccacattctgcgttttaataacataccacaggttaaaatgatggttgttcttggggagcttggtggaaaagatgagtattcactagtggaagcattgaaacaaggaaaggttgagaaaccagttgttgcatgggtcagtgggacatgtgcacgtctattcaaatcagaagtgcagtttggtcatgctggtgccaagagtggtggtgagttggaatcagcacaagctaagaatcaggcactaagggaagctggtgcagttgtgcctacatcatatgaagctctagagagtgcaattaaggaggtatttgacaaactggttctgaggctcaaat

SEQ ID NO: 16744 - DNA, 1370 bp, Zea Mays
cttccttcaagtggtcgtcgtgcaggagcagcagcaacagcaagtcgaagcggcgaccaagagcgccgtcccgtcgagcaacaaggccagcggcggcggcggcggcaccaagcttgaggacgggtacaactggcgcaagtacgggcagaagcaggttaaggggagcgagaacccgcgcagctactacaagtgcacgtaccacagctgctccatgaagaagaaggtggagcggtccctggccgacgggcgcgtcacgcagatcgtgtacaagggcgcgcacaaccaccccaagccgctgtccacgcgccgcaactcctccggcggcgtggcggcggcggaggagcaggccgccaacaacagcagcctctctggctgcggcggcccggagcactccggcggcgccaccgccgagaactcgtccgtcacgttcggcgacgacgaggcggagaacgggtcgcagcggagcggcggtgacgagcccgacgccaagcgctggaaggcggaggacggtgagaacgaaggcagctcaggcgccggcggcggcaagccggtgcgcgagccgcggctggtggtacagacgctgagcgacatcgacatcctggacgacgggttccggtggcgcaagtacgggcagaaggtggtgaaggggaacccgaacccgcggagctactacaagtgcaccacggcggggtgccccgtgcggaagcacgtggagcgcgcgtgccacgacgcgcgcgccgtgatcaccacgtacgagggcaagcacaaccacgacgtgcccgtgggccgcggcgccgccagccgcgcggcggccgccgcgccactgctgggctccggcggcggccagatggatcatcgtcatcagcagccctacaccctggagatgctgagcggcggaggaggagggtacggcggcggctacgcggccaaggacgagccgcgggacgacctgttcgtcgactcgctcctctgctagagggagaggctagagctggcgagggggatgcggagccggtccaccaatctcggtgcggcggcggtgtctgtagcctgctgtacgtgtacggcgggggtatacgtagcgtgcacgctcgccttcgcattcagaattcagatacgtgcagtatacacacacgcacgcacacacaacacgctgtgtgcaccggatctaggttagctaggaatgggaatttgttgattcgttggaggccttcctgccacgcgcgcacggcacggtactcgtacagacagtcatacggttgtgtcgttttgtagttgtagcaacggtgccgctaacgcctgtgtggaaaggccctataccgtatatatagtgtgacaaagtcaataaagctgaaaagatcgcgttattt

SEQ ID NO: 16745 - DNA, 6182 bp, Zea Mays
cgcaactgccatcgtcctctgctcgtcgcgtcgttctcctctcgaccgcatcgcgcccgtggcggggaacgagccatcgacgccgcgtcgcgtgcctttcttcttcgtcccccccctgcctgcctagctgtctcaggctgccgcccgcccagccccaaaacattcggcagccgagtcaaccgagaacacgagccatccacccaccctgtcccttccccggctttcccccgtcctcggctccaccaattgctctcgcgtcagtggaaggaaaaaccaagggcgagggagggaggagcgcatctccgccccgcccgcgttcccgtaccccgatccgccacatgatctgacaccgcattgccgccgaggtgacccctcccgcccccagaatggaggcgctcaacgagctctgcgacctggtggccgcgcacccggatctcctcctcgccgacaagcttgcatggctctcctcccgctgcgccgccgccccgggtgccgccgccccgcagcgtgcgtcgagggcgcaccttcattcgctcctcgcgttggcgcgcctcctcccggcgggtggcgccggtgccggtgccgaaggcgatgcggcgcccccggccccactcctattcttcctcgcgtcccacgccttcctctcgccggccttctggccccagtctttcgccccggcgccgtttctcgctaggctcctcccgctcctcgccgcggccccatcctcccccgccctttcttccgcgctctccgccgccctcctcgcggcgctcgacgtcgccgacccgacctccgcgccgctcgcccgcgcgtttctctccgccgccgctgccgcggcgcccctgccgctcctccccgcggatgccgcgcccatcgctgcccggctgctcctcgagtttcttggctccgaggaggagccgatcagggccaaggggaagggagaggacaccttgggcgaggaaaacggtggggcaaaggaggtagtgcggaggttcgaggaggaggaggtcgatgagctggagcggaaggaagtcgcattcagactgaccgtgcatatgcttgggggcgagggtgggctagagaccgagcagattgggaaggtcaggaatgctgctgcgcgacaggtccgatcactcacggattttctcaagattagaaagcgggactggagggagcagggtacacagctcagggcaaggataaacaccaaattgatgtgttgtcaagctgcagtgggggtgctggtgcgaagcgtttccaccatggatactgatatcaaatcttcgaaggatatgctccagcagactctagcttggttcatcgaggccaccaagtcgtgcatcctgtcatcctggcggaaactgaagatatgcgaggagctattttgcacactgctcaatgggatcagccagataactgtctcacgtgggggccaacttctgccggtgcttttgattcccttaaaaccgcttgttgtgagcacatgttcgcaggctgacatggcaggcagtagtcctggggctctatttgaagcagttgtgaagttgagctgtgagatcatagagtttggctggacaaaggatagggcccttgttgacacatttgttatgcgtctagctgcttatgttcgtgagcggaatgattacgaggaggaggatggcaaaggaaaagaggcagttccagttattcgacttaatgtcatacgccttttggctgagttatgtgtttgcttgaaaaaatgggaagttgtggacatgattttaccccttttcattgaacatctagaagagggtgatgcttcatctccaagttcattgcgtttacgagagtggtgctgatttgatgggtccgttacttcctgcagttgctgatatatgttctgattttgatccagtgtccactgttgagccatcattattgaaactattccgaaacctttggttctacgttgtattgtttgggctagctccacccatacagaataatgaggcacctacaaaaccggtttccacttcattaggtacagcagaaagcagcagtgctatagcccttcaagctgtagctggaccatacatgtggaacagccaatggtctgtagcagtgcaacgtattgcgcaaggaacacctcctctggttgttagttctgtaaaatggcttgaagatgagctagagttaaacactctacacaacccaggtagtcgtggtggtaatggtaatgaaaattctgctgttgggcagagagctgcactttctgctgctttgggaggtcgagttgaggtagcagcaatgaacactatttcaggggtaaaagctacgtacctacttgcagttgctttcctggagatactacgttttagttgcaatggtggcatactctcggctacatctacattgaatagatcaaacagtgctttcagttgtgtatttgaatacctgctcactccaaatttgacaccagcagtaactcagtgtttgacggcagttgcacatagagcttttgaaacagtgctgtcgtggctggatgatcgcatatctgacataggtgaaggagctgatgttagagaatcggttctttctgttcatgcttgctttctgataaaaagcatgtcccagagagacgagcatgttcgtgatgtgagtgttaagcttttaacgcagctgaaggaaaagttcccacaggtcctctggaactcttcatgcttggatttacttcttatttctgttcacaatgagttgacttctggtccagtcagtgatcctgcttgggttgcaactgtacgctcactgtatcaaaagatcgctagggaatggttaacaagtgctctttcatatgctccatgtaccacacaaggccttatacaggaaaatttttgcaagccaagtggagtacaaagaacacaacatacagcagatgttgtttcacttttatctgagatacgtatttgtagtggaaagaatgattggaacggtattaggacggccaatgttcctgcagttatggactcagcagcagcagcatcgggagccaaaaaagaagcacctgacttcactttggaagtactctctactgcagtagtgagtgcaactgtgaagtgcaatcatgctggtgagattgctggtatgagaaggctgtttagtactatgggaggcataaacatgggcatgtctcctcctgggacacaatctttgcacccccatcagtcatttgatgaagtttttgtctccaagtttgtcagtcttcttcagaactttgttgttgcagctgagaaacaaccaatagataattcacaatttcgtgaaacatgttctcaagctacagcattacttcttgatcatatggtgtctgattctagagcaaacctggaagggttttctcagcttatacggcttctatgttggtgtcctgcttatatttctacccctgatgcaatggaaactggaatctacatctggacatggctagtatcggctgcgccttctttaggtcctcttgtgcttgcggaacttgttgatgcatggctgtggaccatagatacaaagcgtggattgtttgcatcagatatgaattactgtggcccagatgcaaaattgaggccgcatcttatcgctggtgagcctgaggcaccaccagaaaaggacccagtagaagcaataatagcccatagactctggcttggcttcttcattgatcggtttgaggtggttcggcatgacagcattgaacaacttctacttctaggtcgaatgttacaaggaacaatgaagtctccagctcatttttctcaccatcctgctgctactggcactttctttactgcgatgctccttggattgaagttttgctcatgccagtctcaatctaacttgcagaagtgtaatatggggcttcagttgttagaggacagggtataccgtgctgctttgggatggttttcttatgcgcctgagtggtatgaatctccaaacaaaacttatgctcagagagaagctcaatctgtgtcagtatttgttcattttctacaaaatgagcgcaccagtggtcctgtcgattcggtttcaaagttacagggacgtgaaggtgaacctagcatggcagatcacattcatcctgtttggggctgtgttgacaactacacaaatgcaagggaaaagcgtaaacagttacttctgacactttctcagaatgaggcagacagacttgaagtctgggcacaaccaatacatacaaaagatacaacgacttttcgcggtaaaatcagctcggataaatggattgatcatgtcagaactgcttttgctgttgatcctcgaattgctctttctatgcctttgaggtttccaacgaatgctacaatgcaatctgagattactcagttggtacagacacgattactggagcttcgtacaattcctgaagcattaccctttttcattactccaaaagcagtagatgaaaattcagtgctgttacagcaactaccacactgggctccatgttctgttacacaggcattggagtttcttactcctccttataaaggacatccacgtgttatggcctatgtccttcgtgtcttggagacttacccccctgagactgttaccttttttatgccacaattggtacaatctctcagatatgatgaagggaaactggttgaagggtacttgcttggagctactcgaagaagtaatatatttgctcatatcttgatatggcatctgcagggagaatatgttgatgaatctgagaaagatgcagctgctctgaagggcagtgcattccagtccttgctcccagctgttaaggacaaaattatagagagttttactccagaggctcgtgacatgtttgaaagagaatttgatttctttgacaaagtcacatctatttctggtgttcttttccctctccccaaggacgagcggagagcgggtataagaagggaactggagaagatttctattccaggtgatgacctctacctacctactgcaacaaacaagctagtacggggtatacagttggacagcggtattcctctccagtctgctgcaaaagttccaataatgattacttttaacgttgttgaccgtgacggggacccaaatgatgtaaaaccacaggcttgtatttttaaggttggtgatgactgtagacaagatgtgctggcgctgcaagtgattgctctattaagggatgtatttcaagctgtcggattaaacctgtatctttttccatatggtgttttgcctactggaccaggccgaggcataattgaggtggtcccagatactcgaagtagaaatcaaatgggtgaaacaactgatggtggtttattagagatatttcagcaagattatggtcctgtaggttcaccttcttttgaaactgctcgagaaatgtttatgatcagtagtgctggatatgctgttgctagcttactccttcaaccgaaggatcggcataatggcaatcttctctttgatagccatgggagattagttcacattgattttggttttattttggagatttcacctggaggtaacatggggtttgagagtgcacatttcaagctaagccacgagatgactcaattgctggatccatctggaactatgaagagtgatacatggaaccaatttctcaggttgtgtgtcaaaggatacctagcagcaaggaggcatatgaatgggattttaagtacagtcaacctaatggtggacagtggccttccttgctttagcaggggagatcctatcaataatcttcggaagcggtttcatccagagatgaatgaacgtgaggccgctaacttcatggtacgaacatgtgctgatgcttacaacaagtggactaccgcagggtatgacttgattcagtacttgcagcagggtattgagaaatagtttgtttctcgttttttaagtggcgttcgtgtacatcaattgtatgtagccactatctttttatgtagaatttattttttgagttgtatcatcgggcaaggatggaattcatgtgattaacgtaggatgcttggtgcaaagaggcaattctttttttttcttgcactgtaaaactgccaagaaagtagctagtaagttgatcaagattctgtattgctgtcgcagaatgcattttcgtttactagacatgtatgattcgcatttttatc

SEQ ID NO: 16746 - DNA, 2700 bp, Zea Mays
  misc_feature (1)..(2): n is a, c, g, or t
nntcttgaaacttggagacttcgtacacccaatgaatgggatcatatgactgtttggtatgatctgctccaatggaggaatgagatgtacaattcagtaatagatgcattcaaggactttggtcaaacaaatcctcaacttcatcatcttggctaccgagacaaggcttggaatgtgaataagctcgctcacatagctcgcaagcaaggtcttcctgaagtttgtgtaactatacttgataagatgtatggtcatgctactatggaagttcaggaagcatttgtgaagatatgtgaacaagctaaggcttacttagaaatgaaaggagaactagtcagtggtcttaacttaatcaataataccaatttagaatttttccctgtgaagaacaaagcagaaatatttcgtctgagaggtgattttctgttaaaaatgaacgaatgcgagactgcaaatcagtcttattcaaatgccataactctttttaagcatttgcccaaaggatggattagctggggaaattactgtgatatggtttttaaagaaacaaaagatgaggtttggcttgagtatgcagtcagttgttttttccagggcatcaaatatggagtttcaaactcaaggagccatctagctcgaattctctaccttcttagctttgatggacaaaatgaacctgttggaagagctttggataaatatcttgagcagctgcctcactgggtttggctttcatggatacctcagttgttgttgtcgttacagagaagtgaagcccaacactgtaaattggttttgatgaagatagctcaagtttacccgcaggcattgtattattggcttcgtacatacttgatggaacgccgtgatgttgctactaaaactgaaataggaagaaacatgttggctcagcagcgcatgcagcaagctatgatggcaaacaatgcggccaataacttacctgacggaagtgcaagggcatctaatcatgcaggtagtaacatgacttctgacaaccagtctcatcaagcctcccaatcagttggtgctgcaggttctcatgatggtggtaatgtccaaggacaagatccggaacgatctacccctgaaggtggcacaaataccagccatgatcaaggtcaacagagttctacaggtgctgagggctcacaagttccgcttagacgtaatagcggacatgggtgggtaacttctgcagcaagtgcatttgatgctgcaaaagacataatggaagctcttagaagcaaacatactaatctagccaatgagcttgagcttttactgtcagaaattggatcacggtttgttactctgcctgaggaaagacttctagctgtggttaatgctctgcttcatcgctgctacaaatatccaactgcaaccactggcgaggttccacagtctctcaagaaggaactctctggtgtatgtagagcttgcttctcacaagatgctgttaacaagcatgttgattttgtgaaggagtacaagcaagattttgaacgtgatcttgacccagagagcgctactacttttcctgcaacccttgctgaacttacggagagattgaaacactggaagaacattcttcagagtaatgtagaggatcggttcccagcagtattaaaactggaggaagaaagtaaaacacttcgggattttcatgttgttgatattgaactcccagggcagtacttcacagatcaggaaatcgcaccggaccacactgttaagttggacagagttggacctgacattccaattgtccggaggcatggcagtagctttcgacggttgacactcattggttctgatggttcacagcgccattttattgttcagacatcactgactccgaatgctcggagtgatgaaaggatgctgcagctattccgtgtgctaaataaaatgtttgacaaacacaaagaatctaggcggcggcatctggctatccatactccaataattattcctgtttggtctcagcttaatcaagccgtttcagggcagctctctcctgaagcaattgtggagctacgtctgcaagcatacaatgagattacaaaaaatattgttaatgataatattttctcccaatatatgcacaagattctgccaactggcaactacctgtggaccttcaagaaacaatttgcaatccaagtggctctctcctgcttcatgtcgtatatgctgcagattggcggcagggctcctaacaaaattctatttgctaaaaatactgggaagatcttccagactgacttccatccagcttatgatccaaatgggatgattgagttcaacgagcttgttccatttaggctgacacgcaacttgcaagctttcttctcgaattttggtgttgaaggtctcattgtgtctgccatgtgctctgctgcccagtcagtggtttctcctaaacaaagccagcacatttggcatcatttggctatgtttttccgagatgaactgttatcttggtcgtggaggcggcctctgggcattccatcagtccctgtcgctgctggaatgatcaacccatcagatttccaacagaaggtggtaaacaatgtggagcatgtcatcagtcgtatcaagtcaatatcgccacattgtctggctgaggaggaagtgtttcttggtgggattaatattgtatcattatggtgcttctga

SEQ ID NO: 16747 - DNA, 1374 bp, Zea Mays
atatgtgtgatttatttgtttctaaatattttccatgcatattctttccaaaccaggcggctgacatcattgctgtttctacctcgttgttggataccttgccagcagtcacaacacctactgaaagggcagatgatgatgatgagacacccatggatgttgatattaaaattaatcttgatgttgatttggaaagacagataactgcagcaattgatccaaagctacttcaacatttggtgaatgctctcttcagaggtacattaagcataaatgattctgatctgtctgaaccatcagatgctgaagtggatgctgtaggatgtatttgtgcttttcttcatgtcacattcaatacattccctctagagcgaattatgactgtactggcctaccggactgaaattgttcctgcactgtggaacttcataaagcggtgccatgcaaaccgaagatggccatttttttcgaagtttgcatcttcattacctgctgatgctcctggttggctccttcccatgtctgtattctgtcccatatacaagcacatgttgaagatcattgataatggggagttttatgagcaagagaaacccctttcccttaaagatttgaagtccttggttcttattttaaagcaggcattatggcaacttttgtggattattccatcctcttctactcagaaagtgtcatccaacccttcaggccttaagaagttgtcagtggagaatgtcaagatcagagctagggttgggttgtctgaattgctcacacagttgcaagactggaacaaccgacttccattcacttctgcaagtgatttctattcccaagaagcaacaagcgaaaattttgtgtctcaggcaatacttggtaatactcgagcatcagagatcataaagcttgctccttttttggctccatttaccagtcgagtcaaaatattcacttcccaattaacgagttctagacaatcaatatcacattctgcattgacaagacaacggttcaaaataagaagaaaccgacttctggaagatgcttttgatcagctaagtttgctttctgaagaagatctcaaaggaccgattcgagtttcatttattaatgaacatggcgaggaagaggctggaatcgatggtggtggaattttcaaggatttcatggaaaatattactcgagccgcttttgatgtgcagtacggtctcttcaaggagacggctgatcatcttttgtacccaaacccaggatcaggattggttcatgaactacatctgcaatatttcaattttcttggaagtctacttgggaagttgttactacatttttttgtattgggtgctgcatgaagctagctatagcatagtttct

SEQ ID NO: 16748 - DNA, 681 bp, Zea Mays
cgattcattagtgcatcatttttttctcgttttgagtgacgatccagaagaagtgaaggcgaggttgaagtattgggctcaagctgttgcatgcactgtcaagctctgcagctaaactaaaggtcggatagaggctgaagaatctggttatatggttttgggatacagggagcggaagggggtgcttctgctctctggcatggaagcgacatgagtgatctcatctgcttctacaaaaaaacttgggaagggggaggaaccatgatacggaacagcgacagacctcgattcagaatttgagatccatggtctgagcttctacgaaagggttcggaagccttgccattcctcagggtgggtggtccgcatagtgcagcgtttccaaatgcatgacctgctggttctttttgctgtttccttgtaatgatcaataggtgctctaattgtcgcactcttgtaataatgtactgaatcgaattttgagttttggccttttgggtactgatccaagggttgattagttccaacattggtttattttgtgctactctgatattgccatgtgcattatgctgttctacacgttcgtagaagttaatagcgcgtttggtttcagtaatgatgtaatctatcatcttcttactcactttttgtttgatttgtaaaattgaataagttgat

SEQ ID NO: 16749 - DNA, 3654 bp, Zea Mays
ctaataaatatgttttttccagactagaaatgctatatctgggacttactcagcacctcagaggtccgcaagttctgctgctcttttggttggagatcctgctcttacattggacagggctgggaactttgtgcttcctagggctgatgttatgaaactgagagatcgtttgagaaatgaagaaattgctgcaggatctttcttatgtggagtaaaagattgtttactaatttgcccccagtccctgtcaaacatagattatcggaggaatatgtgtgcccatgcacgtattttggctttggaagaagcaattgatacagaatgggtgtatatgtgggacaaatttggtggttatttacttctgttgcttggattgactgccaaagctgaacaaatacaggatgaagttcgtctaagactctttttggatagcataggcctttccgatttgagtgccaaagaaattaagaaatggatgcctgaagatcggaggcaatttgagcttattcaagaaagctacataagggaaaaagaaatggaagaggaggctttgatgcaaagacgagaggaagaagggaagggaagagaaaggaggagggcattgctagagagagaggagcgaaaatggaaggagctcgaaatatcattgctttcttccattccaaatactggaagcagggatgctgcagctatggcagcagctgtcagagctgttggaggtgattctgccctggaagattcttttgcaagagatagggtctcttcaatagccaatcacatacgaaaggcacaattggctcggcgagcagaacagactggtattccaggcactatatgcatactcgatgatgaaccgaggagtactggtcgtcattgtggagaacttgacttgtgcctctgtcaaagtcaaaaggttactttgtctattgctgtcatggttcagcctgtatctggcccagtgtgtctttttggaagtgaattccaaaaggtttgttgggaaatcttagtggcaggatcagaacagggtatggaagctggacaagttggtcttcgattagtaactaagggtgaaaggatgactactgttgctaaagagtggaatattggtgcgtctagtattgcagatggcaggtggcatcttgtcactgtaactttagatgccgacctaggtgaagcaacttctttcattgatggagtttatgatggatatcagaatgggttgccgttgccaacagataacggtatttgggaacctggaactgatatttgggttggtgctaggccacccatggacttagatgcctttggtaggtcagatagcgaaggttctgactcaaagatgcagatcatggatgcttttctatggggaagatgtctcagtgaagatgaggttactgttttacatactgccatgtctcctgctgagtatggattttttgaccttgcacccggcgatgcttggcatggaagttattctgcaagggtggatgactgggaaagcgaagaagcttatgagctttatgatcaaggggatgtcgaatgggatggacagtactcaagtggtaggaaacgtccggtacatgatgctgtagctattgaccttgactcctttgctaggagaccaagaaaaccaaggtttgagacacgtgatgaagtcaaccagcgtatgctttctgttgaaagggctgtcagggatgctcttatcgcgaaaggagagagaaacttcactgatcaagagttccctccagaggatcgttctttatttgtagatccgatgaatccacctctgaaactgcaggttgtttctgagtggatgaggccttctgacatagcaaaggatatatctatcagttgtcagccttgcttgttttcgggttctgtgaattcctcagatgtgtgtcagggtcggttgggagactgttggttcctaagtgcagtcgcagttttaactgagatgtctcggatatcagaagttataatcactcccgagtacaatgatgaagggatttatacagtcagattctgtattcagggtgagtgggtggccgtggttgttgatgattggattccttgcgagtctccggggaaaccagcatttgctactagtagaaagcaaaacgagctttgggtatccattcttgagaaggcttatgcaaaacttcatggctcttatgaggcattggaaggtgggcttgttcaagatgctctagtcgatctcacaggaggagctggtgaagagattgatatgcgaagtcctcaagcccaacttgatcttgctagtggaagattgtggtcgcagttgttgcatttcaaacaagaaggttttcttcttggtgctggaagtccttctggatctgatgctcacatctcatcaagtggcattgttcagggacatgcgtactcaattttgcaggtaagagaagttgatggccacaaactcatccaaatcagaaatccatgggcaaatgaagttgaatggaatggaccatggtcagactcgtcaccagagtggacggaacggatgaagcataagctcatgcatgttccacagtcgaagaatggggtattctggatgtcttggcaagattttcagattcactttcggtcaatatatgtttgtcgtgtttatccacctgagatgcgttactctgtccatgggcaatggcgtggctacaatgcaggtggttgccaagattatgactcgtggcaccaaaatccacagtatcgacttagagtaacaggacgtgatgcactataccctgttcacgtttttattacccttactcagggtgttggtttctctagaaagacgaatggttttcggaactaccaatctagccatgattcttcaatgttttacattggaatgaggatactcaagacacagggctgccgtgctgcttacaatatctacatgcatgaaagcgctggtggaacagattacgttaactcgagggagatatcatgcgaactggtcttggatccttatcccaaagggtacacaattgtgccaactaccatccaccctggggaggaagcaccttttgttttgtcagttttttcaaaagcatcaatcagactagaggctgtttagttcaagattgagatcccatgtgtttgatggtagctgcgtctgctgggcacccgtgcacgcaggatccagctgtgggttctcgggaactagataatgggtataggaattgcctcctggacaacttcaatcaatcttgctgcatgcaagtacctaagttcggttgcttgttgcagatctgacaaacggcaatgcttcttgtgctgaagggaaaggagagaaggcatgatccatggttctttggtagctgcgcaaagtgcagggtgagaggcttggttcaatgtttgtagatagccgtggtaactgacctggtagcccatcctatgtataggtgtcccgtttaccctgtaaatgctatagagttaggttaggtagcctgtcgttcctgttaacgcatagggctcttatgcagctgtgaaatgtcttgttagcaagctgcagttttgctgatttgagcgtggagtagtcggccatagctgttcccattggtttgccctgtatgtaatcggaatctgatgtcattcaatgaacctattttttgggtgccatgcgaagctgtctaa

SEQ ID NO: 16750 - DNA, 3702 bp, Zea Mays
tccagcaacacactaaaaataatcctggaaaagggtcatgtgctctcgccgatgaggggtgcccggccaggtgtactacccatctacccccaggagtgcagacaagcaagaatttcatatcacggggaattcaaagttgaggtctgcttccagtataatgaaggggcacaaatcaggcataccttcaattttggccatttgcctattatgttgatgtcaaaactgtgtcatctgaggggtgctgatccccataaattagttttccatggtgaagaggcaactgagatgggggggtacttcatatgtggtgggatggagagacttgtgcgtattcttgttttacaaaagcgtaactatcccatgggattggtacgcaattcttttcttaaacgtggtgctggatacactgacaaagcagtggtcataagatgtgtccaacgtgaccagtccagtgtgacaataaagttgtattacatcctaaatggaagtgcaaggcttggattttggttgggtggcagagagtttctgcttcctgttgggattgttctcaaggcccttattgatgcaagtgaccgggaaatctttacaagcttgacttgctgctacagtgataaacatggaagaggaaagggagttgtcagtactcaactaattggtgaaagggcacaaatagttcttgacgaagtcagaaatctgtccattctgactcgcacacagtgtttggtgcatattgggcaatacttccgatctgtgatggaaggatttgaaaatgatgactatataactgttgctgaagcggttctaaaggactatatttttgtgcacttggaaaataaccatgataaatttaatctattgatatttatgctgcagaaactttatgctctggtagatcaaactgcttcacctgacaatcccgacgcgctacaataccaggaggctctattgcctgggcacttattcacagtttttctgaaggataggcttcaggagtggctaagaaagtctaagcgtttaatccttgaagaggctgcaaagaacaaaggttttgaccttggtaatgcgctggagataaggaaatttcttactaaatatacaacatctgtcggaagagctgttgagagtatgataaaggttgggaacgtgaattcacgatcaggattggatcttccacagagagaagggatgaccattcatgctgaacggctcaactttcatcgttatatctcacacttccgttctgttcataggggctctgcttttgctaaaatgcgtacaacatctgttagaaagttactcccggaatcatggggtttcctgtgtccagttcatacacctgacggagagccttgtggtttactgaatcacatgacttctacatgccgtgtttcatcattctacaactcagaaggggtgataaaaaattttggggaaatgaagaagttgctttctgctgagttggttcgtgttggaatgaacccagtgttaccgaagattgagcaaaccggtcccccagaagtactccatgtccatttggatgggtgcattcttggtactattgcttctgctatgattgagaaagcagttaattatcttcgtacattgaaacttctggcacactcagggattcctgaagatctggaagttggttatgtcccacctagttttaatggagcttttcctggcctgtacctttttaccaatccggctagatttgtccgacctgtcagaaatctttttattctatctgatggaaagcaaagtattgagctcattgggccattcgaacaggcatttatggagatacggtgtcctgatggtggggatggtgggagacaagaaccatttcctgcaactcatgaagagatccaccctacagctattctcagtgtagttgccaatctgacaccttggtctgatcacaaccaaagtcctaggaacatgtaccaatgccagatggcaaagcagaccatgggtttttgcggacaggccctaaaattccgtactgatgtaaaagcattccatctacagacccctcagacaccaattgttcggacaggtacatataccaaatattgtatggatgaatttccatctggaacgaatgctattgttgcagtgctatcatacacaggttatgacatggaggatgccatgattttgaacaaatcagctgttgagcgtggtatgttccgtggacatatttaccagactgaatgcattgacttatcaacaaaaagcagagataatgttccagaaacttttgcaaagagtatattaacaagggatacaagtaatgtgattgattcagatggccttcctcggcttggacaggctgtacatccaaacgagcaatactatagcgtccataatagccttacaaatgtgataaggcctgtcaaactaaaaggcacagagccagcatttattgactatgttgctgtcaacgggacaggttcaaaatgtggcctgcagaaggcgaacattcgtctgcgtcgtgtaagaaaccctataatcggtgacaagttcagcagtcgacatgggcagaagggtgtttgctctcagttgtggcctgacattgacatgccattctctgcaaatactggcatgagaccagatctgatcattaatcctcatgcatttccttcaagaatgacaatagcaatgcttttagagtctatggcagctaaggctggaagtctacatggaaagttcattgatgcaacaccttttgcaaactcactcaaaaaggacaaggactccgacaagcctaattcgattgtggacgaattgggtcccatgcttgcatcttatgggtttaattatcatggaaacgaagtcctttatagtggagtttttggcactgagatggactgtgagattttcatcggacctgtttattaccaacgtcttcgtcatatggtctcagacaaattccaggtccgcactaccggtcgtatagaccagataacaagacaacccataggaggaaggaagcatggtggagggatccgatttggtgagatggagcgtgatgccctcctcgcccatggttcgtcctacctcttgcatgacaggctccactcctgctcggattaccacatcgcagatgtgtgctccttctgtgggagcctgctgactgcgacaatgatcaaatccgatacccagaagaaagtcaagcacgagatgcttgggctccccactgtgagaccagcgaagaactttgcatgccaggcctgcaaaacaagcaaggggatggagaccgtggcaatgccgtatgtgttcaggtacctggctgctgagttggctgccatgaacataaagctggagctccggttgagcaacaaatcaggattgcctctcagctaagaatcataacaccagaattagcgcttgttcatcgcgggggctgcttcgcaggagaagcttaaatgtaaccattggtccggcgtgtagttgtttcatatgtcggtgtgatgtaccaatgtaacttgtaagaaaaacataaatgacaacacgagttattatagtttgaatggcggttctttttcattgtcatgtcttaactagtgtttgaatataccagaactgagcttagttagctgttaaaattagggagtgtttggtttttagagactattttttagttcctccattttattctattttagttattaaattgtcaaatatagtaactaaata

SEQ ID NO: 16751 - DNA, 1630 bp, Zea Mays
gttagtacacctggttttaattcctgaaaataagaggcctgaggattctgattacacggttgatgtccttaccagatgttctgtaactaaggacaacagtggtaagaaaacaatgaaggttgttcctctgaaagcgcgtggagaaccagttgtagtttcattgtcactttcacagattgatggactaagcagcatacggatgtacatacctaaggatcttatacctgtagaagttcgagaaaacaccttgaggaaagttgaagaagtccttttaaggtttgctaaagatggtgtgcctctattggatccagaagaagatatgaaagtacaatcgaaatcatttcggaaagctaccagacgaatagaagctcttgagagcttgtttgagaagcacgatatccgtaactctccacatatccagcaaaagctgaaagtctttcatgctaagcaagaactatcagccaaaataaagtccataaagaaaacaatgcggtcttccaccgctttagctttcaaggatgaactcaaggcccggaaacgtgttcttcgcaggctggggtatgttacgagtgatgatgttgtggaagttaagggcaaagtggcgtgtgagataagttcagctgatgagcttacattgacagagcttatgtttagtggtgctctgaaggatgctacagtagagcaggtggtggcactgctctcttgctttgtttggcaggagaagctccaggatgctccgaagccaagagaggagctcgatttgctcttctaccagctgcaggagacagcaagaagggttgctaaccttcagcttgaatgcaagatccagatcgatgtggaaagttttgtgaattctttccgacccgacataatggaagcggtgtattcatgggccagagggtcgaagttctaccaaatcatggagatgacccaagtgttcgaaggaagcctgatcagggccatcaggaggctggaggaggttctgcagcagctgattctggcatccaagtccattggggaaacggagttagaagcaaaactcgaggaggcggtcaacaagatcaagagggacatagtgtttgcagcatctttatacttgtagtgtcttggatgtctggttttatgtcaggggctaggtcaaaagctcatagggatttaaattaatcttaaattgctgttcatgttgagtgttgttggcatgatgaagctgtctgatttgctgttagcggtgacatggcagtgaaagttttgttaggtttcttcaccgtgtagggtctatttgacattcaagaattttgtaggaagcaatacaattctggcagacctcacattaacagccttagcatgtacgatagatagctatttatctcatctgtcaggaatagcccagagatactgcgtgtttgtggagtataagcagtgtaagttaagtgatcgtgcttgtgtttgtaagtgcagttcaaagcaagtcggccgatggagatgtccctggatgaaaacttgtagtatttgtcttgcactcttgcttgtttgaatgttattggccggctgatggtcacgtgcatgcatgcgtgaataattcatctctgtgtatatgagcggcatgcatggtctagtcggtcaaagtttt

SEQ ID NO: 16752 - DNA, 3308 bp, Zea Mays
atcgaagcatctggatgttcacatgagaatgatgcagatttgcttgttctcccctgcaaaagctcaagtgtattggcgcaacagtagtggatcagctagatattatgcagccacacaagctaatggaccagaaagtgccatttagccttgatgacaagttgttggatgttaagctgccaccatcttcctggagagaggatcaggatccagcaaaccaactcgattcttttcccaagccattggtttcacctctagaaggtagaaggggaagtgtaaatgggacccaatatgaaagtggacttttctctagctcccttccagaattttttgacaagaaaataagattaactccaaagaacagagttgttggtcatctggttggaaaagttaaccatgctgatgatgaaccatttgagttgacaaaggaaatcgaggcccaaataattgggcaacctgctccctgatgacgacgacttattgtcaagtgtttgtggtgatattgggtataataccaatgcgaataatcaggatgagattgatgatgatattttttgtactggaggtggaatggaattggaagcagatggaaatagcaaattgttaaactttaatggtggagccagtcagactaggtcaattgtccaactcaatggtgagcgatcctcgagaatcctttttgtcggaaacattgatagcaacgtcgaggattctgaattgaaattcatgtttgagcaatatggagacatgcagacacttaatgcttcttgcaaacatcatggttttgtgatggtatcttactatgatataagatcggcagaaaatgctatgagggcccttcaaagcaagccactcagatgtaggaaacttgacatacgttactcgagtccaaaggactatcctttggataaagatatcaacctgtccatggtaatagttaatcttgaagcttcgataactaatgatgacctgcaccagatatttggtgtctttggtgaaatcaaggagattcaccctacttcagataatgaccattacaaatcgatagaattttttgatgtcagagcagctgaagctgcacaatatgccttaaacaggagtgaaatttcaggaaataaaaacaaattggagcctagctgtctgggtggtactgaacgtttgatgcagcagatgtctcgtgcattggaacatgaacagtttggtgcatgtaaactcggaagcccaaacagtccttcaacatgctttggttctgtcaatatggcacccatcagatccactagcacagaaagtggaactgttcaggttttatgttctagagttcagacaccgataaaccaattccgagagggaaggaattttctggatcttccctcaactaccataagtagatcctctcctgttggaattacacctgcaggattacaaagcggccaccacgctcttgatgagcacatccattcacttggaaagatgaatgtacagaacaagggacgaatggattgtggatttcaagagagtactgctttccatcctcattctctccctgacttcaatgacagactaagaaatggtatctcctataactgctcaatacctcccatcggtgttaagagcaatgctagagctgctgaagcaatggatgtcaggcacatttacaaaggaggttgtgggcatctcagcaatcaatcttctgctcatactgaagcacttgggttttcaagaactggtagctgccctctctatggtcaccaactagcatggagtaattctaataacctacaccagcagccttcttctcccatgatatggcctagcatgggcccatttaccaataatatgccatctcgccagttgatgcaagtgcatggaatttcaagagcaccattgcgcatgcttgaaaataatatccctatgaatcaccaacatgtgggatctgccccagctgtcaatccatcaatttgggatagacgacatggatatgcaggggagatgatggaaacaccaggattccacccagggagtgctggaagcatgggtttccctggcagcacacatctgcatcagttggagaccaatggtatgtttcctcacaatggagggactttcatggacccagctatgtctcctgtgcacatgagtgctcgctctcctcagcagagggggcatattttccatcgaaggagcaatgtggctcctattccatcctctttcgattctgctggtgaacggatgcggagccgaagaaatgactcgaatgtaaatcaatctgacaacaaaaggctgtttgagcttgacattgagcgtatagtccggggcgaggactcccggactacactgatgataaagaatatcccaaacaagtacacatcaaagatgcttctggcagctattgatgaaagtcaccggggaacttatgattttatctacctgccaattgactttaagaataagtgcaatgttggttatgcattcatcaacatgatcaatcctgacaatattgttccattttataagacatttcatgggaaaaggtgggagaaattcaacagtgagaaagtggcctcacttgcttatgctagaatccaaggaaaatcagctctagttgctcatttccagaactcaagtttgatgaatgaggataaacgctgccgccctatactcttccactctgatggtccgaatgcaggagatcaagaaccattccctgtgggatcaaatgtccgttccaggcctggaaggtccaggattttgagttgggaacaaaaccaccaggacattgtgtctgatcataccaaaggtggaactccgagcagggctggtggcactccaggttacatcgccacggatactgatcatacggctgttgattgacgaacttgcgacaacacccgacattctgacaattgcaatccagttttttttttttttgaaattgcatcctctcctacctcttttttccttttgttatgttgtatctatatctacttccgcgtgatattttggcaccggaggctctagacggctgcagatttggtcgctgacaagtagcgaggagatggatgttgtgccgtcagtttctccttactttggcacagacccctcagcgggattttgttggacagtttgaccccctttcaccaggaaagatatccatatttgggggagtttccctattgctgtttggcagtgctgtcatgaacattttcctaatgctgtggatgtgaaatttcagaatgatcaaatcgaatgacggatgaatgagagccaataatatttttttacgctcaagcaatctttattcttaacaattc

SEQ ID NO: 16753 - DNA, 1921 bp, Zea Mays
gtgccgcacatcacggatgagatacaggactggatcgaacgcgtcgcggtggtcccagtggacggcaaggaagggcctcctgacgtctgcgtcatcgagctcgggggcactataggggatatcgagtcaatgcctttcattgaagcgttaggtcaattctcgtaccgtgttggacctggaaacttctgtctcgttcatgtcagtcttgttccggttctaaatgtagtcggtgaacagaaaactaagcctacacagcacagtgttcgagggcttagagggcttgggttagcgccggatgttttagcatgtcgcagtactgagccattggaggaacatgtgaaggccaagctttcacagttttgccatgtcccggaccagaaggcccatgaagcgattctgaaggttttagacctccagtatgatggaaaggtgcctcgggaacctgagctaacaaagtggactaaaagagccaccaagtttgacaagttgaagactccggtcaagattgccatggttggaaaatacactggcctgtcggattcctacctgtctgtcataaaggctcttttgcatgcatcggttgctatggaaagaaaacttgtagtcgagtgggttccttcctgcgacctggaagattcttcagctaaagagacccctgaagcccataaaaaagcatggaaattgctgaagggcgcagatggcgtactcgtccctggagggtttggggacaggggagtccagggcaaaatcctcgccgcgaaatacgcacgcgagaacaacgttccttatcttggcatctgcctgggaatgcaaatcgcggtgatcgagtttgcccgctcggtgatgaagctacgaggtgccaatagcacggagttcgatccagctacgacgtcaccctgtgtcatcttcatgccagagggctcaaaaacccaaatgggagccacgatgaggcttgggtcgaggaggacctatttccatgtcagtggctgcaaatctgcgaagctgtacggcaacgccagctctgtagatgaaagacatcgccacagatacgaggtgaaccctgacatggtcccagactttgagaaggccgggcttcagttcgtgggcaaagatgagagtgggaaacgcatggggatcgttgagcttccctctcacaagttcttcatcggtgcacagttccatcctgaattcaagtcgagaccagggaagccatctccgcttttcttagggctgatagccgcggcgtctgggcagctagaaccattgcttcagcgcagcaatccgacaacgaaagcatgttcgatcagtaaagtcccgaaactgaaactgtaccccactgggcctgtgaataatccactgaacagcttggtgaacgggtactacccaaatggcactgggatccacacctagaagcgtagcgcttagcgatggtttggttggtatttgctgctatggtttttttgcttgtacccctcctttttcatgtgttcctttttttcagtttgttatttgtctctgatcaactgagagaagagaaggctaagattcagcaagcccccagctccagcgacacatggttccgacatttttaacgaggaacgccttccagtccgttgaagcgagctagccatagggtggtgaggtctagtgtgatgttgttgttgtttttttctctttcctttttttttggcctggaactaaggcgcgaagtgttttgagtagcgctagtagagcctggaagaagttatctaaactatttgtacattatggaagaacttatctaaggactgaatacacaaatgcttggccatgattgctttgttgccacaatatgaacaaccacgctcagatgaagagtattggtgttgttaaaaaatgccagtgaaattgttgttgttaatgtttgtgcctgtgttgccct

SEQ ID NO: 16754 - DNA, 2212 bp, Zea Mays
ttttctggggactcgtgaatgaaggccaactaggatatcaactaggaggagttgaggaggaatggctgttggcggaactcaaccggtcctcaggaagtacctaggtgccctcaaggacacaacgactgtgagcctggcaaaagtgaacagtgattataaggaattggatattgcaattgtcaaggccacaaaccatgttgagcgtccatcaaaggagaagtacataagagaaattttccattccatttctgctgctaggccacgggcagatgtagcttattgcattcatgcccttgctagacgtctttcgaagacgcgcaattgggcggttgcgctaaagacattgatcgtcattcatcgtgcccttcgggaagttgatcccacttttcgtgaagagcttcttaattatggcagatctaggtcacatatgttgaacatggcctactttaaggatgactctagtgcagaagcttgggactattctgcatgggtgcgcatttatgctttatatttagaggagagactcgaatgtttccgagtgttgaagtatgatgtagaaacagatcctccgaggactaaggatcttgatactgttgatttgcttgatcatctgccacaattgcagcaactcctttttcgtcttcttgcttgccagccacaaggagcgtcatcttacaatgttataatccagcatgcactctcaatggttgctttagagagtgttaagatctacactgcaattagcgatggaacaatcaatctagttgacaagttcttcgagatgcaaaggaatgatgctgttagggcacttgatgtatacaaaagagcaactaaccaggctgaacgactttcagaatttcatgaagtgtgtaaaactatacacattgggcgtggtgagaaattcctgaaaatcgagcagcctccagcatcattcctgcagactatggaggactatgttagagatgctccaacaggtcaaaaacaaaagactatactagcgatagaatacaaaaaagagccagaggaggaagaaaaaccggcctcccctcctcctgctccagaacaggaaccggaacaagagcctgagccagaacccgaaccagtgaaagaggaagcaccagaagccgagccggacttgctgggtctgaacgaaccgagccctgctgcgaccgcgatagaagagcagaatgctttggcgctagcaattgtcccgatagatgatgttccgggagctgctcctacttttgagaacggagtcacaggctgggaactggccctggtgacagcaccgagttcgaccgagaccgccgttgccccaagcaagaaactggccggtggtctggacttgctgacccttgatagcctgtacgacgaggcgaaccggagagcgagccagccggcgagctacaacccctgggatgcaaccgcgtctgccccgatgatgaccaccatggcgccggcgatgcacgatccgttctacgcctcgaacgggtacgcggcgccgcacggcgtgcagatggcggcgatggctcaccaccagcagcagcagcaggttttcatgctgcagcagcagatgatggcgccggcgccggcggtccaccacccgatgcagatgcagcagaaccccgcgaaccctttcggcaaccccttcgcggccgccggcgcgcatccctacggcgccgccggcatgccgctccacgccgggcccggcaacgtctacacggggctgatctgatctagtaccccacgcggccacgcccggtggccagtttcttggttgcgttagcgctactgttgccccaccattcattctttttgtccaagttttcttggtgccattgtgagaaggaaatttgtagcacagacaggcaggcaggcaggtagaggcggtcacggttggttatttataaatagcagcgtcgggtggtgtcctgtacgtaggaggtgagtgcatgtatattatacaacatagagtttggccacttgttcgtgtgcacatgagagtcgattctcgtggcggcgagactcgtcaggacggcccgtcgagattgagattggattattcttggtgaacatacgctggatacggttgaataatgcaggcattcttttttttagcagctgactttgtgtgatccaatggaaacaagtagatcgacatctcatcatgaagctggaaagtcgatcctgctcttgccggtgctagtgtgtg

SEQ ID NO: 16755 - DNA, 803 bp, Zea Mays
gacacgttcgcatcgcacgtgaacgccgcagcggctacctcgcctctgacaggcagggcccaccagaagtgggggagggagaggaagatatcccgtgcccagtgccctcgccgtcgccgacctaccacacccgtttccgggaggagagagagggcgggggcgaaggggatggcaaagcgccggcgccacgagttggcgccggtcgtggaggagctgatttcgccgatgaacagcctggacgacggctgcctcatgcacatcttcagcttcctgagcccaatcccagatggcgcttccttgcatgccaccctcggctatggctgcgtgtcgagaggccaatcagagatgcgatggagcctggagtttatccagatctcgaggctgctgtttctgctgctaggccgggtgacaccattcttattgcggctggtggttcccatgttgcatgtaacatccaaataaagaagcctatttgcatagtaagttttgcctaccatgtccctgcgtcctggagatgtcaagtcgtcaacggagatttgatctgacaaatgcttcctgcacttggcgccaacatttgttttttgtgtggctgcaactgtgaacccatttaacttacatcagattggcgggggcgatcttcctgatgacactgtattgacctgctcacgtggtttcgacaagttcaacgaagacttccagagacaccagtgcctagtgggatcctaaggcacaatagtaatggaaagagaggcatgtgcaggatgaagttgacatgggaagataccgtaaaaagaagacttaag

SEQ ID NO: 16756 - DNA, 1703 bp, Zea Mays
ggaacaagtgccgtccaccagatccaggctcggcatgttcgtgatcgaggacaagggcggcgccatcgcgctgatgctggcgtcgctcctgttcctgggcacctggccggccgtgctcaccctgctggagcgccggggccgcctgccgcagcacacgtacctggactactccatcaccaacctcctcgcggccgtgctcatcgcgctcaccttcggccagctcggggacagcaggcgcggcatgcccaacttcttcacgcagctcggccaggacaactggccctctgtgctgttcgccatggccgggggcgtcgtgctcagcgtcggcaacctctccacccagtacgcttgggcctatgtgggcctctccgtcactgaggtcatcagctccagcatggtggtggtcataggcaccacgctgaactacttcctggacaaccgcatcaacagggcagagattctgttccctggtgtggcgtgcttcctcgtcgccgtcatccttggctccgctgtccattcctccaatgcagctgacaatgagcagaaactcggtgcctccacgaatgcctacaaactcgggacaagtggaaatgtggaaccaagcaaacaagctgtagacagagaagaaagaacaaatctaatttcagatgctcccaaagacttggaggagagtggagcctctggaatccggcaacctgacaaagctgaggcaggcactgcagagtacctcattgagcttgaagaacggcgatcaattaaggtattcggttcaaacaccttcatcgggctggggatcgtcttcttcgcgggcgtgtgcttctcgctcttctccccggcgttcaacctggccactaacgaccagtggcacacgctcagggacggcgtgccgcacctggtggtgtacaccgccttcttctacttctccatctcctgcttcgtcgtcggcgtcggactcaacgtcctgttcctctaccgccccatggccggcgtgccccgctcctccctcggggcctacctcagggactgggacggccgccagtgggcgctcctcgccggcctgctctgcggcttcggcaacggcttccagttcatgggcggccaggccgcagggtacgccgccgctgacgctgtccaggccctgccgctcgtcagcaccttctggggcgtactgctcttcggggagtaccgcaagtcgtcgcggaagacctacgtcctgctcggcttcatgctcttcatgttcgtcgccgctgtcgccgtgctcatggcttcgtcaggtcacaggagcacagagtgaattgcaagtcttgttcgtcctctgcttgttgcaagcccttccacttgcgattgatccacggaaagatccatcgtcttcgtgaagcaggggaaatccattccttccagccattaatgagatcttcagaacaatggaatggagatgtacaaaaaaatggttgttgtatgattgatcaaatgtatagaactatttatattctttccaagacaattggctgataggataggaactgttccaggggtggaaaaaatctctatctttatgaacagggtaaaagcaatgttcagaaaaaagtagtttgtgcctagtatgacagattcagaatggtatcagtactcccgctgttttggaatgttcaagagaaaactagtggatgctctaaatcttataatcttgcaatgcttctcgg

SEQ ID NO: 16757 - DNA, 1735 bp, Zea Mays
cgccgagcactatatagcacgtgttcgcgtgcaccggcggcaaccacagcccaggctcgagactacaacgttacagcacaacacactgctgcacgtacatacgcagatagagaccagcagcaagctcgatcgagactcgagaggcatggggagtgtaccggaggagaaggccaagctgggcttcggcggcctggtgggcgacctgagggaggtgtacgagagcggcaggacgcagggcctggagtggcggcagtcgcagctcaggggcctcgtcaggctcctggaggagaaggaggaggagatcttcgacgtgctccacgaggacctggggaagcaccgcggcgaggccttcagagacgaggttggggttctgaagaagtccgtcgtcgacaagctgcaaaacctcaagaactgggcggctccggagaaggctcacacgccgctcgttgccttcccggcgaccgcgctggtggtgccagagccgctcggggtcgtgctcgtcttctcatgctggaacctcccaataggcctagctctggaaccgctctcgggagccctggcggccggcaacgccgtggtggtgaagccgtcggagctcgcgccggccacctcggcgttcctcgcggccaacatacccaagtacctggactccaaggccgtgaaggtggtggagggcgggccggaggtgggggagaagctcatggagcaccgatgggacaaggttctcttcactggtagctgtgaatcgcatcatcggagcgaaatggtccacctgttccggccaagcctgcatcgccatcgactacctgctggtggaggaggagtttgctccgattctgatcgagatgctcaagtcgacgctggagaggttcttcaccaagccagagtacatggcgcgcatcctgaacgagaagcagttccagaggctgagcggcttcctggccgaccgcagggtggcgtcttccgtggtccacggcggccacttcaaccccaagacgctgagcatggagcccacgcttctgctcaaccctccgctcgactccgacatcatgacggaggagatattcggcccgctgctcccgatcatcacggtgaagaagatcgaagacagcatcaagttcctcaggtccaagcccaagccgctggcgatctacgccttcaccaggaacgagaagctgaagcaacgcatcatagacgagacgtcgtcggggagcatcacgttcaacgacgccatcgtgcagtatggcctggacagcatcccgttcggtggcgtggggcacagcgggttcggccagtaccacggcaagtactcgtttgacatgttcagccacaagaaggcggtgctcaagaggagcttcctcgtcgagttcatgttccgctacccgccgtgggacgagaccaagatcggaatgctcaggcgcgtctaccgcttcgactacgtctcgctcttcctcgcgctcatcggcctcaggagatgaagcagacggcggagagtgcgtgaacaatcgagccaacagaatttgcacccacacccaacacacagttgctagtggtcaattgtcgttcatactgatcgatgaatatgtaattgtcccttctgtacaccaaaacgtctgtagtgtcgtttactcgttttatacgtgtctgtctatttatcgcaccaaaagatatttaataataatggattattatctttctagtttgtgctcttcttgaacaatcgccacattccgac

SEQ ID NO: 16758 - DNA, 2365 bp, Zea Mays
ctcggagaaacccgcccgaaccctcatttccccgtccgccgccagagcgggagaacacccgcgccgcctccagcagcacttggcggagagggcgcgacctctcttgccgacaaatcggtcctcttcctccgagcgcctaacgaggaataggtattcaagttttgtatcaccaagatggtgcaatacaatttcaagaagatcactgttgtccctcccgggaaggacttcattgacataatcctgtcccgcactcaaaggcagacaccgactgttgtccacaagggatatgctatctcccgcattcgccagttttacatgcgcaaggatcactacaagcttgcgctgggtcaaatcaacacagctaggaatatcattgcaaagatatccaaggactacttgaggctgctcaagtatggagactccctttaccggtgcaagtgtttgaaggtggctgcactaggtcgcatgtgcactgttgtgaagaggatcagtcctagtttggcttacttggagcagatcaggcagcacatggccaggcttccatccatagacccgaacacccgtactgtgctgatttgtggatatccaaatgtggggaagagttcgttcatgaacaaggttacaagggcagatgtggatgtccagccatatgcctttacaacaaaatccctgtttgttggccacacagattacaagtacctgcgctaccaagtgattgacacaccaggtatacttgaccggccttttgaagataggaacatcatagaaatgtgtagcatcactgcgctggcacacttgagggctgcggtgttgttctttctagacatttctggatcttgtgggtacagtatcgctcagcaagctgcactcttccacagtataaagtctctgtttatgaataagcctttggtcattgtgtgcaacaagactgacttgcagccacttgaagggctttctgaggatgacatgaagttagtcatggagatgaaggcagaggctatgaagactataactcaagctgttggtcctaatgaagagggtgttttattgactatgagcactttaacagatgatggtgtaatggctgtgaaaaatgctgcatgcgagaggcttcttgaacagagggtggatgtgaagatgaaatcaaagaagatgatggattgcttgaataggtttcatgttgctgttccaaagcctcgtgacaacaaggagcggcctgtttgcatccctccggctgttctggaagctagggcaaatgctgctgctaaggaaaagaagaagcttgagaaggacattgagaatgagaatggaggtgctggggtatattctgcaagtctcaagaaacattatatattggctaatgatgaatggaaggaagatattcttccagagatactggatggtcacaacgttgcagattttctggatccggatatcctagtaaggtgtgaagagttggaaagggaggaagggcttcgcctggaagaacaagctgcagaagatgctttccagattgatggccatgaactaactcaggaacagaaggagattctggctcagattaggaagaagaaggcattacttatccaagaacatagaatgaagaagagaactgcagaaagccgtcctattgtccctagaaagtttgacaaagataggaaattcacaactaataggatgggacggcagctttcctctatgggtgtggatcctattgctgccatcaatagagctcgtagccagtctaggggccgcaagcgtgagaggtcagtgagcagagctgcagctgatggtgacggtatggagatagatggccagcaatccaacaagaaactgcgtcgtacatcaaggtcgaggtcgaggtcacgggctcctgaggaggtcattcctggagaaggattcaaggactctgagcagaagaagaaggctatcaagaaagcaaaggcctctacaaggaacaggaacaaggatgctcgccgtggagaggctgaccgtgttattcctactttgaaaccaaagcatctgttctctgggaaacgcactcttggaaagacaagcaggcgataagctcagcacctcactgcatctggtaataaaggactggtgcactgttggtttgatcaatttgatgaaacgggtgttttttttgtgttcagccagcacttatttatgctactatttacgaaatttgtcttgatgtctctggtcctcttgatatatagttttagtgtttaattctgttgaatggtacaaagttatccatgtcccctactcaacatgtttgtagtttgcccatgagattttactatcgatccttgctcctctgtgctgctgtgtcgctgcaatttctcttaattatgatttc

SEQ ID NO: 16759 - DNA, 2410 bp, Zea Mays
ggctgctcctcctcctctcaggctctcacaccaatccccactctccctccttccgtaattgcgtctctcaccacctcggcaactccaatcccaaacggccacaccctagctggtctggtggcatcggccggcacacggcgatgcctgccacggtcttcgcctccccctccatcgccgcgtcgccgtcgccgtcgctgtctccgtggtccccacgtccgcctcctcgtcgcgtccacgtccgtgtccgcgtccgcccgcccccgccgagaagcggaagcagcgggggcgacgagccctctactgccaccccgtgggcgagccccgactggctcacgtctctctcgcgcgcggtcggccggagcggcggcgacgactcggggatccccgtcgcgtccgccaagctcgatgatgtgcgggacctcctcggcggcgcgctcttcctgccgctcttcaagtggttccgcgaggaagggcccgtgtaccgccttgccgcggggccacaggactttgtcatcgtcagcgaccccgccgtcgccaggcacgtgctgcgtgggtacggctcgcgctacgctaagggactagtcgctgaagtctccgagttcctcttcggctccggcttcgccatcgcagaaggcgacttatggacggtgagacgcagagctgttgtgccttccctgcacaaaagatttctgtccattatcgtggacaaggtattttgtaaatgtgctgagagactaatagacaaacttgagccatatgctttgagtggggaacctgtcaatatggaagcgaggttttctcagttgacattggatgtgattggtttatcattgttcaactacaattttgattccctcacaacagatagtcctgtcattgatgctgtttatactgcactcaaagaagcagagcttcgttctacagatcttttgccatactggaaggttggtttcttgtgcaagataatcccaagacagataaaagcagagaatgcggttatgattataaggaacactgttgaagagctgattatgaagtgtaaagaaatagtggaagctgaaaatgaacagattgagggtgaggaatatgtaaacgaaggggatcctagcattctacgcttcctacttgctagccgagatgaggtaagcagtgtacaattacgtgatgatctcttgtcaatgttagttgctggtcatgaaacaacaggctctgtactgacgtggacaatctatcttctcagtaaggatccgactgcactgaggagagctcaagatgaagtagatcgtgttctacaaggtagactacccaaatatgaggatgtaaaggagctgaagtacttgatgcgctgtataaatgagtctatgcggctgtatccacaccctcctgtgctgttacggcgtgcaatagttgatgatgttcttcctggaaactataaggttaaggctggtcaagatattatgatatctgtgtacaatatacacaggtccccagaggtttgggatagagcagatgagttcattccagagaggtttgatttagagggacctgttccaaatgagtcaaacacagatttcaggtttattccattcagtgggggtcctcggaaatgtgttggagatcaatttgctctcctagaagcaatagtggcacttgcagttgtgttgcagaagatggatatgcagcttgtgccagatcaaaagattaacatgactactggagctacaattcatacaaccagtggactatatatgaatgtaagcctgcgtaaagttcagcaagaagctgagttagcgctgagcgaatcgaaatagatggaaacgacttcagacaagaatagagctcctgaactggatacaatcatacaaatatgaaatatgcttctccagtttctcgttgaaagctctactgtactatactagatgtcaatgcgtcggcatacagattacagattcgcttctcttgaaacatgaaaggatccttcgctggctgattcgtttggctattcgtgagtgtaaaatttatcttaggctttatttagatactcaagtattgacctcaatcaacatgtgttgatgtggatttggatgtaattagttcaaattacacctaaatccatctcaatactcaatacatgtggatttaggtcaatactagaatatccaaactaggtcttagtggtaatccaagaccgaacagaaacatgtttctacttagctgacggcggcacaaatatagtattagtgctagtttgggaacttaaatcccctcagtgattggagggattgaaaaagaaattagtttattttcccctaatcttctctaatcatagaggagatttgagtttccgaactagcccttacatacacatattttgtctggttttctccccgaaacataaatccagttttaa

SEQ ID NO: 16760 - DNA, 112 bp, Zea Mays
gaaatcagggctgctcctctgctctagaaatactgcccactgacctgctgagattttatattttttcatcgggtctaggcctttctttgcaaactttgtattcatctcagac

SEQ ID NO: 16761 - DNA, 538 bp, Zea Mays
tggggtttagagttgaggattaaaactatgccaacaccaggagcatatctattagaagtgaatggtggcatgctatggtgaatcggtcacaaatacagctggtgcaagagttgtcatgttcttagatcaaggcagacagaattttgagcaacaacggagagagcatcctgatgttgtaacttcggatttgcccagtatagccttcctggagaaggctgcatctgggaacaagtatgaaataacagagttcgttgacgagcctagcttttaccttgctgttttgcagtttcaaggatgatttgttccttttttgcaatatttgtgaagcaaattgtgactgtctgtaaatttgcaatatttgtgaagcaaattgtgactgtctgtaaattctgatggacgtagtttgtgggtggcttatgtcgtactagcctgtttggtttgctgtctaatttatcacactttaactaattttttgtgtctaaggttagttcttctatctgaacgactaaccttaatgattaagtgtggaacaattagc

SEQ ID NO: 16762 - DNA, 139 bp, Zea Mays
caagttttcgtattaaactgcaacgttctacgaagtttcattaagcatgatatatatggtgagaaagcttataaagttagatttccaatgcaaccagtcccacatcatttgaaaattcctagaagaagttattgccaaa

SEQ ID NO: 16763 - DNA, 1309 bp, Zea Mays
gcttggccctagcatggaacatggagaaacagagaaaaggggaggataattggtcctgcaatgccatctcgtgaattattggctgcagcagctgaaatgacagaggctcttaggtgccgggatgctgaactggaagccaatgatgatttgctcataggccctccaccgcctgccgtagttgctgaagctgcatctgcaaatgaagctgagcgatttgaagaggttactagaatattggcagctgacacaaattcaccttatgaggttttgggggtaaattggaagatgtcaactgataacatgaagaaaaggtattggaagttgtctcttttagtgcacccggacaaatgtccacatccttccgcacaagaggcattcgtgaaattaaataatgccttcaaagacttacaagaccctgataagagaggtgcaatagacgagaagataaaaaagaaagaggagatggaacaatttgaggttgagcttaaagcaatgcgtgaggctgcggaatggagacgaatacaaggtgtatcactcgcaggtgatgatgaacttttagcaggtccaaaagagtcacagagacctacgagagatgaatggatgaccacattgccacctgagagaaaagcaggagtgccaatgcattcaactacatcatttagtatgaatggtaaagaaggacgtggagacacaagtgtctggactgatacccctcttgatagagcacaaaaagcacaacaaagctatctagaagcctacaataagacaaaggcaattgcagaaggcgacgacgtgaagagcaagaacccggatgcttcaatcgtagataaatacaacacctccaaacgatcagtgtcccttgtgcagaagcaccgagagagtaaaaaggagaaaaagaagcaaaagcagcaggagaaagaggaatgggagggaagccacccatggaagccatgggaccgggagaaggatctgtctgctgggcgccagaatgtggccttagacgcagagaacatgtcgcaaggattatcttcccgtttcgcatctggtgctgttcagcggaacttcctgtgagctgtgtggaaagatactcctggagcttggtctaatcgatgattaatgtccagttattacatcctggtcggcagatggcaaagataatgctgacatataaaaacgagttatgttaccaaggaccatcgtcctgtaatatcgatcgtgcttgttgtgcttattttctcagtgtattatcgggtgagctaaaatggtgccatagtttgttcgtacgatacaattactttttttttcaaac

SEQ ID NO: 16764 - DNA, 2353 bp, Zea Mays
caattgcttagctttaggatgatacggtgcttgatctgaaacggctgcagagatatgcaagagatggcccgtctgatacttatccattggcaaaatggcgcatccttaacagattgcatgacagaaatgaaacgatgtactacaaggtactaatagataacattgaggagtatgcacctatcgtttacacaccaaccgttggacttgtttgccaaaactacagtggtctgtttcgacgccctaggggaatgtactttagtgcagaagatcgtggggagatgatgtccatggtgtacaattggccagctgatcaggttgacatgatagtggtgactgatggaagcaggatattgggtcttggtgatcttggggtgcatggtattggcattgctattggaaaattggatttatatgttgctgctgctggaataaatcctcaaagggttcttcctgttatgattgatgtcggaacgaacaacgagaagctccttaaggatcctctttatcttgggctacaagagcaccgtcttgagggagatgaatatgtttcagttattgatgaattcatggaagctgtttttactcgctggcctaatgttattgtacagtttgaagatttccaaagtaaatgggcctttaggttgttgcagcgttacagaaagacttatcgcatgtttaatgatgatgttcaggccttttaggagctgtacgggcacaagggaggccaatgatagattttccaaagcaaaggattgttgttgctggcgctggcagtgctggtattggagtggtgaatgctgcaagcagaaccatggcaagaatgttgggaaacaatgacgttgcttttgagagtgcgaggagtcaattctggatagtggatgcccatggcctaataacagaagaccgagaagatatcgatccagatgcacggccttttgctagaagaaagagtgagcttggtcaccagggcctaagtgagggggcaagcttagttgaagtggttaaaaaggtgaagcctgatgtcatacttggattatctgctgttggtggtttgttctcgaaggaggttctagaggcactaaaagattcgtcctcgtcaaggccagcaatttttgcaatgtccaatccaactaagaatgctgagtgtacacctggggaagcattttcaattctaggtgaaaaggtcatctttgctagtgggagcccatttcatgatgtggatcttggtgatgggaagattggccattccaatcaagggaacaacatgtacctctttcctggaatagggcttggaacccttctgtctggtgctcgggttatctctgatggaatgctgcaggctgcagctgaacgtttggcttcatacatgaaagaggaggaggttctcgaagggataatttatcctccaatttccagaatacgtgacatcactaaggaggtggcagcagcagttgtgagggaggcagtagcagaggatctagctgagggataccgtgacatggatgcacgtgagcttgcacgactcagtgaggaagaaactaatgaatatgtcaagacgaacatgtggagtcctgtctatccaacaataatatacaagaaggactagatagctctatttgctattttgcatatgttcaatgatcatgtatgatatactttaggctgcgttctggaaggcactccagaagtgtaggcacgttagttataagaaaacagccttcattgttcattgaccttacttttaattgaatttagtacacgagacaccttaggccacagttcctgacgtactccatggtgctgaaacatttcccatctcaaatatcatcaactgtaccactactggaactgtagtccaatccctctcagatgttaaaatcctgtgtgtaactttgaacacagaccaaataacaaagccagaaatttgccagaggaaatctgttctggcaacttgtttgcctgaaatcgtttgatggttatctctcttatcttacaatgtatttgtgtcatctgaaatgtcagttctgagtttttatttgttgttgttgaggtttttttttttttttttttttgctactgatatttgagaagattgtcacttacgtttttgtcaaagattattctacagtgaatttaggataagtcgtgtagtcaagaactaaaggtaaagacacgaggatttatacatattcttgtagcagtgtttattgtctatgcaatacaatcaggtcatttgtttaaatagggattctcagtccttttatggtccaagaaggggtgggatttatagaatgtgtatctaggccgattgcaagatatagataataatcaggcctaacctagtttatcccga

SEQ ID NO: 16765 - DNA, 354 bp, Zea Mays
gggaccaagtctcacacatatgatgaatgatggtacaaaaacgaatgtcacatctttactatataataggagttctgtacaaaataaataaataattacatcataaggagacaacgatccagcaacccaaagttagctggggaacgacggcctagacctctcatgaactcgtcacagtatcctccatgcgcctcatcctgcgacacctgttcttgacctgtgggggtgtgagacagcaagagtgagctcacatacgttcatcgctccacaagttcgtggggaataatgtgcatgaactcgctaaaggtgtgagctcatgtgaagtgtaaggcttaccaaagaggatggttagag

SEQ ID NO: 16766 - DNA, 636 bp, Zea Mays
ttggaaaccaaaatcccctagggatccttgcattttcctaggatgaaggcagtggagaagctcatcagtggcaccgagattgatctcacagaactggaaagaagagcaaaccagccacagatcttgaagcattacaagatacctccccaagaactatcgatatctacgttgccggacgcaattgtatgcaggattgctgctcgagatgctctctgaagtctcaataatcaccgtaagctatgtggtttcaggatgtaggtctctctctaccacatgtatggtgtgacattgacagcacaagtgcacaactagaattaggtatccgaaataccattgatgttcgcattccctgcaagcaacccagaagcacattgcgtggttaatttttcttgctaaactgtgctgcaaagcaacagttatgttaatttctcccttgaattcgatgaagcttatatgatacaatctagcaaaggaatgtatgatgtatctgatgtggcgtgtaagtttctggtgcatagtgctttgtctataggcgagatagttccctgtttttgtatggaaattggagttagattgtgattgctgtggtaattccatcgattgcatgtgtgtgttgtgtagcaaaacaaaaatagg

SEQ ID NO: 16767 - DNA, 1855 bp, Zea Mays
ctgctgcacgaagcgatgaacgcactctgacggtcttgccactacaaataagccgcaccgcatttcggaaggccacgcgaccgccacctccccgaagctgccgcgaccgatcgagcgaagcgtcgctccccgcgccgccgccaaaaccctagcttctcctactccatggccactgtctcgctcaccccgcaggctgtcttctccacggagtccggtggcgccctggcctctgctaccatcctccgctttccgccaaactttgtccgccagcttagcaccaaggcacgccgcaactgcagcaacatcggcgtcgcgcagatcgtcgccgccgcgtggtccgactgccccgccgctcgcccccacttaggcggcggcggcggaggtcagcgcaattcccaacgctaaggttgcgcaaccgtccgccgtcgtcttggccgagcgtaacctgctcggctccgacgccagcctcgccgtccacgcgggggagaggctgggaagaaggatcgccacggatgcgatcaccacaccggtagtgaacacgtcggcctactggttcaacaactcgcaagagctaatcgactttaaggaggggaggcatgctagcttcgagtatgggaggtatgggaacccgaccacggaggcattagagaagaagatgagcgcactggagaaagcagagtccacagtgttcgtggcatcggggatgtatgcagctgtggctatgctcagtgcacttgttccggctggtgggcacattgtgaccaccacggattgctaccggaaaacaaggatttacatggaaactgagctccccaagaggggaatttcgatgactgtcattaggcctgctgacatggatgctctacaaaatgcgttggacaacaataatgtatctcttttcttcacggagactcccacaaatccatttctcagatgcattgatattgaacatgtatcaaatatgtgccatagcaagggagcgttgctttgtatcgacagtacttttgcctcccctatcaatcagaaggcactgactttaggcgctgacctagttattcattctgcaacaaagtacattgctggacacaacgatgttattggaggatgcgtcagtggcagagatgagttggtttccaaagtccgtatttatcaccatgtggttggtggtgttctaaacccgaatgctgcgtaccttatccttcgaggcatgaaaacacttcatctccgtgtgcaatgtcagaataacactgctcttcggatggcccagtttttagaggaacatctaaagattgcccgtgtctactatcctggcttgcctagccaccctgaacatcacattgccaagagtcaaatgactggctttggtggtgtggttagttttgaggttgctggagactttgatgccacaaggaaattcatcgattctgttaagataccctatcatgccccttctttcggaggctgtgagagcataattgatcagcctgctatcatgtcctactgggattcaaaggagcagagggacatctatgggatcaaggacaacctgatcaggttcagcattggagtggaggattttgaggaccttaagaatgatcttgttcaggccctcgagaagatataagctccaatccatttgcattaataaagttatgaggtgatggttgtctggatcttgtagagatttgtgatgatacatgagctgttgactgcgattaagttctcttgtgcttattttattctttgaattcaataagctgtggttgctgcatcttgcatgtagtgttggacttaattttacttgtcaaattacaatagtttggtcccataataagaaaaaagtacaaatgagaag

SEQ ID NO: 16768 - DNA, 2197 bp, Zea Mays
cacaattccaacccaagctctaacctacgacctccgccgattccgctcgcgtctgcctccgccctccgcccaaaacccaatccagggccaggccaggccaggccaaccaaaccctaggcactgcgccacgcctagcgcgcgtggtatccatgggctgaccgcgtcccggtggggagcccggatccggagctagggttccgtcctaggcggcaccaccatggagtgggacagcgagtccgacggcgccggcagcgtcgacgccggctatgaggagcaggaggaggaggaggaggagcggggaggcgagggtggaggtggcgacgccgggggcggcggtgggatgttcacgttcgcgattgaaggcatgctgcgctcctccgggccctgcgggctagtcgtcaccgacgcgctcgagcccgattgccccatcatctacgtcaaccgcggcttcgaggaggccacgggctaccgcgccgaggaggtcctcggcaggaactgccgatttctgcagtgcagagggccattcgctcgaaggaggcaccccctagttgatgctgcactggtttcagagattcgaagatgcatagacaatggcattgagttccgtggtgatttactaaatttcagaaaagatggatctccagtgatgaacagattgcatctgacccctatttatggagatgatgaaaccataacccattatatgggcattcaattcttcactgatgctaatgttgatttgggaccattgccctgttcaatgacaaaggaaccagtgaggtcaacacggtttgctctagataacacatttcgacccatttctacgaggccagagcacagcaatttctgcccgggaatattctagtctcttccaattaacggatgaagtgctttgccaaaagtatactgtcaagattgtcaccaagagatatagcatctgtgagctctgtgtgcaggcgattgtatgatttgacaagaaatgaagatctttggagaatggtttgccagaacgcttggggtagtgagaccactcgagctcttgagacagtgcctgccgcaagaaggctgggttggggtcggctggcaagagaactgacaaccctggaagctgttgcctggaggaaattgacagttgggggtgcagtggaaccatctcgatgcaatttcagtgcctgtgctgtagggaatcgtgttgttctctttggtggggaaggtgttaacatgcaaccgatgaatgacacatttgtattagatttaaacgctagcaatccagagtggaggcatatcgatgtgagtgcagctcctccaggtcgctggggccatactctatcatgcttaaatggctcctggttggttgtttttggtgggtgtggaaggcagggtctgcttaacgatgtattcatgctggatttggatgcaaaacaaccaacctggcgtgagatacctggagttgcacccccagttccacgttcatggcacagctcctgcactttggatggaacgaagttggttgtttctggtggctgtgctgattcaggtgtactcctcagtgacacatatcttcttgatgtagccatggataggccagtttggagagaagttcctgcatcctggaaaccaccttctaggctggggcactcaatgtctgtttatggtggcaggaagatcctgatgtttggtggtcttgctaagagcggccctctgcggctccggtctagtgatgtgtacacaatggacttgagtgaagaagagttttgctggcgatgcctcactggtagtggaatgcctggggctggaaatccagctggtgcaggcccacctcctcgcctcgatcatgttgctgtgagcctgccaggcggaagaattttgatatttggcggctcagtggcaggtcttcactcagcgtcacagctttatctgttggatccaactgaagaaaagccgacctggagaatattgaatattcctggtcgtcctccccgtttcgcctggggccacagcacctgtgttgttggaggaacaaaggcgatagtgcttggtggacaaactggagaagagtggatgcttacagaaatacatgagctttctttggtcagccgctcagtttgagttctggaatggtttgtagtcatgttccttgcaaattagatgcggcttcttatgcaacctgaagtttgattgcctgacaaatacaaaa

SEQ ID NO: 16769 - DNA, 1965 bp, Zea Mays
ttagactgtgacaagctattggtttttcttgttattttggttctagacgagtgaaattcgcttcctctaatacatacgaatggttcggccgtcagggatgacctttggggttcaaagcttgctagcaaattttatgggtgcagcaactcaagcagcaggtttcttgactcaaatattactacccaaccagagcgctatttgatgattgttacaagtggaggcctgaatcaacagagaacagggataatcgatgctgttgttgctgcacgcattttaaatgccacacttgttgttcccaaactagaccaagcatccttctggaaagattcaagcaatttttcggatattttttacgccgactggttcatctcatctctatcaaaggatgtaaagattgtgaaagagcttccacatataggaggtaaacttcgggctcctcacagaatgcgtgttccccgaaaatgtactgagcggtgttacttgaaccgtgttttgcctgcacttcttaagaaacatgttattcggttgacgaagtttgattatagattagcaaataggttgcaaactgacttgcaaaagttgagatgtagagtcaactatcatgcattgagatttactgctccaatacaagagatgggtgaaaagctaatacaaagaatgagggagaggagcatgtattttattgctcttcatttgagattcgaacctgatatgcttgccttttcggggtgctattacggtggtggagagaaagagaggagagaacttggtgctataaggaagaggtggaaaggcttgcatcctaacccagagaaaggaagaaggcaaggtagatgccctctaactcctgaagaggtgggtttgatgttgagagcgctgggctacagaaaggatgtccacatttatgtagcttctggagagatatatggaggtgcaaggactctggcacctcttaaagctctcttccctaatctccacacaaaagaaacaatatctagcaaagaggagctggctccattctctaaatattcttctcgcatggctgcacttgatttcattgtctgtgatgaaagtgatgcttttgtggctaacaacaacggcaacatggctaaaattttggctggacgaaggagatactttgggcacaagagaacgatccgaccaaatgccaaaaggctctatcccttatttttgaacagaggaaacatgtcgtgggatgcattctcctcaaaagtacacatggttcagaaaggatttatgggagagcccaaagagctgaggccagggaggggagagtttcatgagaacccttctacctgcatttgtgaaaggactgatggcaaagcagtagccagagccaaatctcaagatgatcaagtattgaatagtgttgctgaccaaggcaaaggcattggcgagccagctgttcccaatcatacggatgaagaggcgggcgaacctgatgatgacgaagatgtccctgctgacaaagaggttgttgacgctgaaatggttgacgatgtattggccggggatcctgagttagaacagattctttcagactagtatccatcatcagagatgtttgcacaaaccaatttttggccgagtgattgatgaattttgccacgtccctcgaaattgtacatactttttttttgcgatgtaaatgtacgtatacatccaatctactctagcttagctcgcagcctccttacacagtagctcttttgtaacgtttgtggattgttatagcttgtatcatgggttttgctttttgtgtagcaactctttgacgccctttttgtgtaagcatcttttggcatgtaggatgtgaggtgcttaagcacggataattaaggagagaacgttgttataccattttcataaatgagttacttgcctagatagatttagccatcttgttaacacaaatgaaaaaattggtcttaagtaatatttgag

SEQ ID NO: 16770 - DNA, 75 bp, Zea Mays
attcggggaatctgctggggccgtggcccgtgggtgtgcgtggacgctggacggtggaccagcagtccaccacca

SEQ ID NO: 16771 - DNA, 1283 bp, Zea Mays
atcacgcgtattatgctgtgactagttcggatccgtcttcctcccctgtggtagctgttcgcggagttgccaaaccggaggcagctgcgacgccggcgaggcgctcgcgccccatccctctggcttccgtggccgtgtggagtctggttgccactggcgccgcaaatgctgccgagctatgggaccccttggccctgcacggatcatcaggactcgtcttggctgaccttggtattggagattggtttgggggtttgctgttttcagctgggcagcaggctaatgaggctgtccaagatcagttgtctgctcttagtttctctagcctagcagttatttttggtgctggacttgtaactagtttatctccttgtacactaagtgttctaccactaactctaggatatataggtgcatttggctcagggaaaggccgatccgaggttgttgggaattcaattgcattttcactaggactagcaacaaccttagccattcttggtgttgctgcttcttttgctggaaaggcttatggtcaggtaggacaagggctcccagtggctgcttccggtttggccattatcatgggattgaaccttctggaggtacttgaattgcaacttccctcatttttcagcgattttgaccctcgagctgctgcagctaacctcccttcaggtgtacaagcataccttgctggtcttacatttgcattggcagcatcaccttgcagcacacctgttcttgctacccttctgggatatgtcgccacttcaagagacccaattattggaggaagtttattgttgacatacacaacgggctatgttgcgcctcttcttattgcagcttcatttgctggagcactgcagagtttgttgtcattcagaagatattcggcatggataaacccaatcagtggtgcatttttacttggtggaggtgtttataccctactggacagggtgtttccagcaacatcaatggtcatgtagaccatggttggacaagaattgctaggcaccagtctgtttggcgtgcgaatgatatttggatgtgaagtagtgaaatgatggcaacaaagtttagccagatctctcagcgttgtataggcacgcaggacattttgatcgggacaagcaaagcaccttgacctaagtacagtagtctgcatcactgtatctgtatgggcctcgatacttggggccggtctaccctactaaaatgtatttctgggacagattgaaagagtatgaaatttatataagaccttgttcggttaa

SEQ ID NO: 16772 - DNA, 1780 bp, Zea Mays
atttgcatgcatcagtattgaatctagattcgtttcttacagccttgttgcatacttgttataccgtagcatgtttgtgctcaagcatgctgtgagggtgtgacctcgacatacaaatccaaaccaccagtttctgttgtatgaatttctgtttcttcggtgtttaactttgttctgagtgttgatcgttgtacagggccctcctatctgtggtgtgccgccggactcgaagatgagcaataagcttgaacctgttgatgctggcgatgaagatgatggtgactctgggcagggtgaggagggcatctcagcgggcggagggatatgacaacctaaagggcaacgagaacaggagaagcgaagaggtgatgccaaggaaaacggtgaagaggattgaggaagaagtggaagaccaggaagatagtggcggcagcggcgacgacaatggggatggccatgacgaggaggaggaggcagcaattctggataaggagctaaagaaagagaaactgaagaatgctgctgcattaaaggaactgcaagaaaaagctgaacaaaaattgcaggatgagctgcagaggaaggatgaagaaacaagccaacaaattgagaaggcccaagagatagctaaagctgaacttgctgcagctgttgcaaaagagaaagcatcccagattgaacagattgctgaagcaaaccttaatattgatgcgctgtgtatggcattctatgcacgatctgaagaaactaggcagagtcattcagttcataagcttgctctgggcactcttgctttggaacacgctttatccagtggatcaccaatccgatcagaagtggagctattgcgtaaatctgttgaaggcatcgacaaagattcactgttagaactggctctttcatcactcccagaagatgttttagattatggatcagataccatgatggggttgaagcaaaagtttaactccttgaaggaaactatcagacacttcagccttctaccagcaggcggtggtggaatcctggcacatactgttgctcgagttgcttcttcaatcaagattaaaggcgataactctggagatggcattgagtctcttatcaacaaagtagaaaggttgattgtggatggagacttgattacagcggccgatgccttggagcaagggttacatggaactgaagcagaggagatagctaccgagtgggtgaagcaagccaggaaacgagcgatcgccgaacagacccttgctctccttcaggcgtgtgcttcttcgaccacgttctcatgattttggccagacttttttttttcttccttttgtttgcttggatttgccggtttcagtactctgtgaaaaagcttgtttttcccagaccatgttgaaaatgcgtggatggtgaacgagaaaaatcagatacaatactatagcagccagccagccactgggtctcaaagtgggggccctgcctaagtttttcatcgtgtaaacaaagctaataagttttgccctgtagctacttgctgttcgtgacattttagtgtccagttaaagcaatgtttttttaatgcaattgctgaaggattccttgcagatgtggtcatgtagcagttctacaaagggtcagtggacactgaataagtctagttacagcttgttttgttccacccagctcaactaaagtttagtttctgtcactgaatgttttaacgataattacgaatattgaatatagtctaattataaaattaattatacaaatgaaaactaaaaga

SEQ ID NO: 16773 - DNA, 1847 bp, Zea Mays
catttcaaacacagaacgaacgaacgaatccctctccacggatcaaaaaccgaatccaacgctgcctagggtttggtccgcctttcacttacccaccccgcgacgcccacccatggccgccgccgccgccgccgccgccgccgccgatgtgcccgccgaggccgccgccatcgcgcggcgcctggcctcctgcaacaccggcacccgggagcgcgctgtccgctacctcctctccgacttcctgccggcctccgcgcggcgcctttccgccaccgacctcatcaagctctggaagggcctcttcttctgcttctggcatgccgacaagccgctctaccagagctccgtcgccacgcgccttgcctccgccgtctccgccccgccgtcccccaccgacggcgccgccttccttgccgcctacctcaccacgctccgccgcgagtgggcacacatcgacgtccaccgcctcgacaagttctacctcctcaaccgccggttcctccaccacgccttcctgctcctcagcgccaactccttcgcccccgtcgtcacctcccaggtcgtgtccgtcctgtcggataaggccctgctcccggaagccgacagcgccgccgccggcacctcccggggcctcgggtaccacgtcgccgaggcattcctagacgagctcttgcctgtgctccccgttaccctggagacggtggacgccctgctggctccgttcttcatcgtgttggcgaagtcgaccgatcgggtgatggtgagtaaggtgaagacatgcgtgtttgagaggttactggagagtggcagtcgtttgcttgagatggtgaagaaaggggaggaggtggacaagggtagcgctgaggagaagctcgggaaatttgggttactgtttggatttagcaagaggttcctggatattggtgcgaatgcagcgacggtgcaatggaaccggaaggtgctctttgggttgagggatgcatttgtgaagattgagaaggctttgcagctatctggtctcgagatccctgtgccacagtttgaggctgctgagctgtccgtgcaaccaaatgcgggcgatgaaaaggcacaaaagaagaaaaagacgaagaatgttgcattggctgaaggtgagatgggggatgccaaggatttgaagcgtgagaagaaggtaaagaaagacaagaaggtgaagaaagagaagaagaaaaagaggaaggtggaggttgttgatgaagggaacaccaccgataagagtactgatgctcctgtagatgatcagcagatcggtgatggtgctgatggcattacatttgatgagacattaaagtccaatcttcagaagcagtttgagatggctgcagcagaagctggtatggtcaaagggggcagcagctcaagcgcttcaccagtgacaccagtcagtgggaaagtggcaacaaagaggaagcgctcaaagtctgccgataagctgtctgaagcttctgatgggggtgatggcagcgaaggtaatcttcttgcccaggatggagagaagagtggtaagaaggtgaggttctcgatgaagaataatttagtttggaaacctcacaatcctttgccaccgcagtgtttgaggctgccaccttcggctactccaaggggaagtgctctaaaaaagggcgtaaagccaggtcccataacaccgacaccattgaggaaggcgaagcctaaggcaaaatctgcaaagaaggtcttgaagaagcaaccttcatctgctgtgaagcgcttgcggaagttgcagagtttttcagcatgagcttttccacggttgaaggttagaatattgtttcatatgttatgtcact

SEQ ID NO: 16774 - DNA, 997 bp, Zea Mays
gaaggacaaataatcttctgatgttcaatattatttagggaatgtcgttctgctggatgccgcacacttgctgaagcaaagatacacatagagcaaaagaggaaaaaagaatacgagctgaatgcccaaaaagctaaggaaagtaaccaccttattgcaaatactaaattggtgcagaagatgaatcgacctatgaagattgagtctgatgggaatttggatccaaagaaaggtggtgttggcttagattctcctaaaactacaggacttacaagtgttaagcagtgggatgactgggatatagttggtcttcctggggcggagctattaagtgctagcgaaaagcttctatgttgccagaacagactgctacccagtcattacctgagaatgcaggaggtgctgatgcaggagatattcaagggtagtgtcctaaagaaggaagacgcacacgtcttgtttaaggttgatcctaccaaagtagatagtgtttatgatatggtaacaaaaaagctgggcaaccatgtggagttgcctacggtctagcttatgcctttgggcttgcctgctgtgacatgccgaagaaaacaagtcttggtttcgccccttgcagcgtgtctgaaccatagctgaaggtggaactgtactagatcaaatcggccatagttaactgaaattcgtatcagttgtcagaagcacaataaggcattccagccaagttgtaaaattattgcccttagcagaatgtgtagcgtgagttgtcatttcctttctgccattgttgtgcactgtttcagctgtggtagtgccttgtagtaggtataggtgcctgagtttatatgtatcatcgtgtatgtaccattgggagctcaattatatgccattgtaccaaccccagacattgattattacaattcatctagcagccagattcttgtctctaatggaatgcatggcgtcaatatatttttttttctgttggtttggttgatgagca

SEQ ID NO: 16775 - DNA, 486 bp, Zea Mays
aatttgaggattgagaggctaaacctaaactagactagaactactcctaggataaaatgcgaataaaagttgtattgattcgattgttgattacaaatcggccgtatacctctctatttatagaggaggggggctggaccctttacaaactaatttccgagcttatctcctgattttagctaacaaccgtagcacaaaactcggaaccctaatctgttctgcgcacgcgcggaccgttcggcccacaggcgcgggctgtccggaccgcggaccgtccggcctcagggccggaccgtccgcgcgctcaatttggtgctcaacaaaaagtaataattgttggggcaggcaggagatcggctaccattcatgtccccgccggccgtcgttcctcctccccggcgtggcgacgaccccgcggcctcggcctgggaggcatttgtgaatgtagaggggcaaacagaaataggtcacccgaaaaactgggac

SEQ ID NO: 16776 - DNA, 1294 bp, Zea Mays
aaatcctaaccttctctccttccttttgatcttcccctctacgcgatcgaaaccgaagctcgaatcaatcctccacccgtttccagcccctcgtcccggagccccgatccgcctcccgtctcctcctgggcaggtcccccttttccgcgtgtgcgttggccggccggttcccgatgagggggttgctggcggtggaggccgcgggcgcggcgtcggtcccggcctcggtactccacggcgccgtggactggtggcgcgacgtcaacgagtcgccgctgtggcaggaccgcatatttcacgcgctcgccgtgctctacggcatcgtctcggccgtcgcgctggtccaattaatcagaatcgagtgtagggtgccagagtatggatggacaacgcagaagtgcggtctgtcgtgtttgtgctgcggcgaaatgtgcaacttgtagagcctgagataatacaacatgtgcttctggatatgcccgggcttgcattcttcacgacatatgcacttttagtgctcttctgggctgagatttattatcaggcacgtgcaatgtcgactgatgggcttagaccaactttctattggatcaacggtgtggtctatgcaattcagataattctatggttggttttatggtggaaaccagttcgagttatggtcattttgccaaagatgttctttgcaggtgtatcactatttgctgcccttggatttgttctgtatggaggaaggttatttctgatgttgcagcgttttcctgtagattcgaaaggaaggagaaagaaattgcaggaggttggctatgtgactaccatctgtttttcttgtttcttgatcagatgtgtcatgctgtgcctcaattcatttgataaagaagcagatcttgatgtcctgaaccatccaatcctgaacttcctctattacctgctggttgagatagtgccttcggctctggtgctcttcattctacggaaactgcctccaaaacgtgggatcacacaatatcacccaatccattagagagcaggccttggtggacaggcaaatgttttctggtggattgtcttatatagcgtggtaaatacagaaggcagagtgaaaagtaccacctttgctctcgagcttgcccagcttttcatacgagggaaggctttagaatctcaggtttagaaaatgcgatctctttctctcagatttagaaaatgtaaaatgtaatttatataactttaatattctcagtgcatatcatttgttcacatctcagtaatcgtttgcatgtttcatttggta

SEQ ID NO: 16777 - DNA, 881 bp, Zea Mays
agaaaacccaaacaaacgcagtctacctcgacagtcgacactcgagagtcgagaccctctcccagcatcaacccgccccgcgctgccctcgtcccgatctccgacccaaatacccgatccaccatggccggaataaggcttacgcccgaggaacccgagatgcccgttggcacgccaccccgcccccagctcccacccttcgtcgccgcggcaggcggtggcggcggaggtctggaaatggcgtcggacgacgagcggtccattgcggcggattcatggtcagtgcggagcgagtacgggagcacgctcgacgatgaccagcgctacgccgacgctgctgaggtgctcgccgcttccgcgtcctccgccaacttcccctccgccgcctccgattactgctctgataaggatgatcaagatcctggtgatgttgaaggatcaatgctgggtcttcaaagttattgggatgcttcttatttggaagatcttgcaaattttcaggaacatgggcacactggagaaatatggtttggtgcagatgtaatggacacagttgctgtttggacgaaaagtttgtgtaacattattgaaggcaagattccatctggtcaagacaacatcaaaagtgaagtcaatgaaaatttattctccaactaccctgttcttgatgttggaactggaaatggtcttcttttgcaagcattggctaagcaggggtttacagacttaactggaacagattacagtaaaggagctgttgaacttgcaagaaacctagctgctcgtgatggcttctcttcaataaactttttggatttgatcatttggctgtgcaccctccaacacactagttcctgaatttctagatctcccaggtgact

SEQ ID NO: 16778 - DNA, 1173 bp, Zea Mays
agtagatgattgcccgtttctagcttcagtaactccaaagtgaatgctcactacagtgacagattttagtttgtcataaaaaagatgaggaagggagaggggtggtgacttgagatattgccagaaatgttgccactataaacctccacgtgcacaccattgccgtgtttgcaagagatgtgttctgaaaatggaccatcattgcatttggattaataactgtgttggacatgagaactacaagattttcttggtctttgtattatatgctgtggttgcaagcttctatgcattgattctgatcgtagggagcgttttgcatagtgttcctaaagatgagcagccaggcagcgattcttctcgaacatccattattatctgtggggtcattctttctccattagcgttagcgctggcagtgctcttaggttggcatatttacctcatattacagaataaaactacaattgagtaccatgaaggagttagagcgatgtggttggcagaaaaaggtggagacctctatcatcatccatatgaccttggtgtctatgagaatcttatttcagttcttgggcctaacatattttgctggctctgccctgtattgaatactgttggaaatggccttcggtaccgtacatcctatgatattccggtatctacaccaccaaaaaaaatagcagcacattcacaataggtagtagttgctaatttgtgaaaggatttcccattaagctgctagaacgtgtttggtctgaacgattccgaaggcaggtcgtgtaactctgcaacatacaggagatgatgactaccacagcctctcgccaggtgtttgtcctgaatcgagacatgaactcttaaccttgttttttatttcattcttgacatacttgataatgtctcgcttgtaatctggagtaggctgttcttaccaaaaagaaaaaaaaactgcaattctgttgtaaagttagttcgtatgtttgggggccatgtaatgtagccaagggccatgaaaccgattttcccagagtatttgtgtacatttgtttaaaatgaaatgtaacatctggtgtacttttgcgcgcctaggcatacgtaggtaaccactgagagctacttcagggctttcggttatctccatcgaggagattggtatgaattggaagaaat

SEQ ID NO: 16779 - DNA, 272 bp, Zea Mays
taggatgcaaaccaaacggtagcaaccaccactgtatttacttgcctttaccggaagttcgggcaaatccctaagtacgatccggaagtccaccaccttggattctccccctttccttcctcccttcttccctccaccaaaacgattgaagactcgcaccacgacgacgatgatccgagcggcaaggattggcaccttgggaggaggggattgagaggggggcggctagggtttggtggctgcaagaattgagagaggaggagatgggtagg

SEQ ID NO: 16780 - DNA, 1113 bp, Zea Mays
atttgtggattgtggcatgtgataaatggccctacaaaattgtttggtgttcctattgaagctactgtacaacgagagcaatctgatagagcggtgcccctggtgcttgtgagatgtgcggactacctggttatatcaggtttgaataatgagtacttattcaaatctgaaggtgacaaaaaagttcttcagcagttagtttctctttacaatgaagactcgggtgcatctttacttgaaggtgtaaatcctattgatgtaggtgcactggtgaagtgctaccttgccagtatcccggagccacttactacattttcgctttatgatgagcttcgagctgcgagggttagcattcctgatcttaggaacatattgaagaagcttccaaatgtgaactacatgacgctagagtttgttacagcgttgctgctgcgagtcagccgtaaatcatcacttaacaagatggactcccgcagccttgctgtggaatttgcgcctttgatcatgtggcggcaaggtgacactggcacagatttgcgtaaccacctcaagtttaccctgaaaccgcctccaaaaattgtggatacaacatcaaatgctgccacatgggacctgttagatgaggatgacgaggatgcttcatcccagatccccttagacgatgcttcaccaccagactacagctccattgaggttatccagtgtctgatcgagcatcacaatgccatcttcaccgacgcaaatgaaaccgtgtggagatgatcggcatctcctctagatctctctggtgttagatcgtgctattgtacaagttccaggtaggaaggtgggaaggtggattagcgctcgctattgttagggataagcattttggccggaatatttttgaagtaggtttgtatatacactagtgttaactgttaattctccacgggactagaaccgggtcatgccatatcaataaaaatatatttggatggatgtaaacgaaatgtgttgtttccatcattgattgtattcagatcatataataataacaaagcctttgtccccagttgggctagactaaagttgaaatccaataaaagccacaaattatggtttagtcatata

SEQ ID NO: 16781 - DNA, 1991 bp, Zea Mays
cgcctctactgctgacgagagggaagcgagcgaatctggtgatccgtgataacgtagttctcaacaaaacgaaccggtttcatcgaccgctctcgcttgcaaagaaaaagaaataaagaaattggtccagtagccctggaagaattgttctcctggattgaattcacaaaacaacttcccagctgctcaggtctccatcggcctcgagccctttgccggcgacgagcactcacaacaccagggtgtaacaatgtcttcttcaatggaatcgtcataccttcctgctacaactgagtcattagcccaagctcaagaggctaaggatgcttcagagtccatttcaatcctttaccgtgtcattcaggacccatcttcttctgctgatgcactgagaacaaaagaagttgcaattacaaatcttacaaactacctcactaaagaaaacagagctgaggagctgcgtaatcttttgacccagctcagaccattttttgcagttattcctaaggcaaagactgcaaaaattgtccgtggaataattgatgctgtcgccaagatacctggaacatcagatcttcagatttcactctgcaaggaaatggtagaatggacccgtgcagagaagcgtactttcctccggcaacgtgtggaggcaaggttggcagctctcctgttagagaatcaggagtatactgaagcccttaccctgcttactagtcttatcaaggaagtcaggagacttgatgacaagttacttcttgtggacattgaccttttggaaagcaaacttcacttctccctgagaaatctgccaaaggccaaagcctccttaactgctgctagaacagcagcaaatgccatttatgttccacctgctcagcaaggcactattgatctccagagtggaatcctccatgctgaagaaaaggattacaagactgcttacagctacttctttgaagcatttgaagctttcagtgcactggaggacccgaaggccatctttagcctgaagtacatgctcttgtgtaagataatggttaaccaagctgacgatgttgcaggaataatctcgtctaaggctggcctaaaatatctgggtcctgatgttgatgctatgaaggctgttgctgatgcatactctaaaagatctctcaagtattttgaaactgcccttcgtgattataagtcccagctggaggaggaccctattgtccacaggcatctttcttctctgtatgatacactgctggagcagaatctctgcaggttgattgagccctactcaagggtggagattgcacatatagcggagatgattgaattgccgattgaccatgttgagaagaagctgtcgcagatgatcgttgacaagaaatttgctgggacactagatcaagggtggagattgcacatatagcggagatgattgaattgccgattgaccatgttgagaagaagctgtcgcagatgatccttgacaagaaatttgctgggacactagatcaaggtgctggctgcctcattatctttgaggattctaagaccgaggaaatcttccctgccactctcgaaaccatttcgaatgtcgggaaggttgtggacagcctttatgtgaggtcggccaagatcatggcttgaaagcagctagtcttacctgtttgctctgatttcatttccagtctgtcgatgtcctcagacatttattccttcaatattgacagtttattgtgaccgctacaggttcatgtgaccaaaggctagctatttttacgactgaatgagttatgcatgtattggtcttttaatatcagcgtgcagagtcggacggatgttattgtgtgttaattaatctaccatgttatcgaaatgcatgtctttagctccactgcggcttctgtctacagatggacaattagcacttatacgatgtgctgaattaggcacaacacaaaaaagcaccaggctaaccgtcatctcggcccgagcac

SEQ ID NO: 16782 - DNA, 2457 bp, Zea Mays
atcgggtcctcccccgctcgtgagttgtgaaccggacccatcccaattccttgtcgagctcctcgaaactaccaccgccccctcgtttttttcacagcttcacccgacgaacacggcaccacgagccccgcacggccgcaacccacccagatttagactctcccaccgcggctgcatatctctcccccacccgcactccggtcgtcccattaccctctggcattggttgtcgatttcttcgttcgtgcttgcttgcgtaaaatatttaaataaatgaaggcaaatatgggcacaaaagctcgtccaccatctgctgatgcagaaaaaggggagattggcgaaatagatacaagggctccaattcaatctgttaaagctgcagtgagtttatttggtgaggtccgcttttcatctgacaaatcagctgaaagaaagcccaaggctcctcaaacagagagggttttagccaaggagacagagttgcacatggcccagaaagagttgaataaatacaaggaacagctcagtaatgctgagacaacgagagtacaggctctctctgagctagagaaagctaaaaaaactgttgaggagctaacagccaagctggatctgattaacaagtccaaacagttggccatccaggcaacagaggatgcaaagactcaaatcaagcagcttgaaggtggcagcacaagtgaaggtctaggaacagatggtgctctgaagcaggaactggaaagtgcaagggagcagtatgctgttgctttggcagaccttgatgcagcaaaacaagagcttagaaagctcaagaaggattttgaaacatctttggatatgaggttgtctgctgcccagcaggaagaggaatcactgcatacaactgaagccaacatagaaaaagctaaccaacttcgtagtgagattgccgaaattcaagaatcccttatgcatgttaaggcagctaccgtgcaagcacacgaagaagaggcacaaatccttgctgagaaggatgttgctaggaccacgtataaacaagctttggaagaaacacagaagaaacttttgtctttgaggaatgattttgaccctgctgcctacgatagtctgaaacaaaaactagaacaaaccaattctgagatcgcatctatgcaaaaaaaaatagaagaggctcgggctcgggatttagagtctgttgccgttgtcagcacagagttggatgatgctaaggaaatgttgcaaaaagtagcagaggagaaaagttctcttcgaagtttggtggaatcactgaaagtggaattggaagctgtaaaacaggagcacaatcagctcaaagagaaggatacagaaaccgaatctattgtcggagatttacatgtcaagcttcagaaatgtaaatctgagctggaggctgctgtggctgctgaatcaaaagctatgtcagcttctgatgacctaatgctggcccttcagcaactgtcctcggagtcaaagaatgctttgcaagaagctgaaatgatggagaagagtgcagcagagctaagagaggaaggcgaaaaagctcgggttgaactagcagaagccgaacaaaagatgcaattggctttaaaggaagcagaagaggctaaagcagctgaagcaagagcccttgatcagatcaagcaactctcggatagagcaagtgctgctagatcctcaacatccgagtctggagcaattatcacaatttctaaagaggagtttgtatctctcagccgaaaggttgaggagtcagagaagttgagtgatatgaaagttgctgctgctatggctcaagtggaagccatcagagccagtgagaatgaggcaatcaagaaactagaaactgcccgcaaggaaatggaggacatggaattggcaacagaagaggccctaaagagggcagagatggctgaggcagccaaaaaggctgtagaaggtgagctcaagagatggcgcgagaaggagaagaaaaccgcagaggctcagccgtcggcaggggcagaagaacttggaagtggatcgcctcctgtacctcagacttcagctgggaaagcttctgagaagaacgacgggcataggaacagcagaacgctactgaggaggagcttcatgctgccaaacatcacgagcatgttccataagaagaaaaaccaacctggcagcagttctccctcctaccttcctggggaaaaatctgtgtaatctataggaagctcttgtctgtgaattgaaatttccaaacttgaacgcatgcttttacattataatctgtataaaaccgtgtgcttccttgcgccttgcagtaaatttctgacataattttaaatttccctgtatccctatttttcgtcacttcctggacttccggatgagtgcatgaacactaaaatggcagctgacaagtcagacggtccaaacatgtggcctgaatagggg

SEQ ID NO: 16783 - DNA, 704 bp, Zea Mays
ggtttctcaccatcacttccacttggggatttcaatcgaatggatccggcagctcctcagcctaaggcaacggccatacctgcggctgggtgtcaaagcgcgaggttgcaacggcctctcctacaccctcaactatgccgatgaaaaggggaagttcgatgagcttgtcgaggagaaaggagttaaagtactgatcgaccccaaggctttgatgcatgttataggcaccaagatggactatgttgatgatccattaaagtccgagtttgtgttcataaacccaaattccaaagggcagtgtggctgcggtgagtctttcatgactacaggcagcaaagggtcgacgtcatgaggcgtttttcagtgtaaatgcttagccaagtgtctgcaggctccagctacagattttcttgtgtctgttgcgtcgcagttcattcatatatataataacacagcagtgggtttgtactggatatgcaactaactcgcatttacttgtaagttcacctcaaatgttgttattacatggtctgactctgattatccatgttgtgtatatttgatcgctcgcgatttaagacctcgaaatttgcacgctgcagttggttatttgtaatcgtattcagccgctctgcctctgcataactgcaggagaagagattgtatatatctgactgttatttactgcttagcaaaaaaaaaaa

SEQ ID NO: 16784 - DNA, 923 bp, Zea Mays
gtaagcttttatcccaatggtacgtgatggtaacttgattgttaatggagtagttcaggaggaagaatttgtgttggaaccagccgactacgaaatggatccgctgactgtgcctgaaggctatgtctttgtactgggggataacagaaacaacagctttgattcacataactggggtccacttccagttaagaacatcctcgggagatctgtgctccgatactggccaccatctaggataacagatacaatatatcagcatgacatggtgcagcacacagctgttgcatcctgataatacattgtggcaataccacgtggtgcacgccaatttctcctttccctgcatagctttattgacaattgatatgcttagccgtggggttctttatttatttgttgtagccttgcctcaaatgtcgattgggcagcttggctgacagattagtttttttttccctccctacgggcagatgcttgtttaaagacagcaattcttgtactccgtagctaagaatgaatgccatataaatgttgcagtagataagcatcaaggagtgtaggatgaggatggcagttcttttgttttatgagatgagatggtgctctaaacttacgtaaaggaaatacgaagcatagaagagtgcccaagttgtgttatgtatttttttcattccttgatcttggatcaaagattcaaggcaaagtcagcctggtgcaaaggttttggttgaatccttgtatcctgccagataaggttttttgatggtgcaattttggattagcatttgccctagtatttagtgttttttagttctgtattcatttatgatgtaatacaactttgtgagcatagttctgtttggcctgctttgttcaatcgcagtgcgggttcaatactacgttgcctgatgttattgtct

SEQ ID NO: 16785 - DNA, 4267 bp, Zea Mays
gagaaaacaccacacgcggatacgagggcaaaggggcaacgcgtccaaccggccggacctcaccggctcatccctcatcgccctagtccccaagggccaagtccccaaccccggctgacgactgtgcccgtctccttccctgattcatccgcaagcccacccgtcggcgatcgtccatgacggaggatcgagcgcacaaggtcgccgacgagcccgccgcctcaggcaggcaaagacctgaaaggaagaagaggaagtgggatcaacccgcggaggacttggtctccgcggcggtgacggctgctgccgtgtcggggatgcctgtgatgaatttcggtgctcttcctggcgttgtactgcctggcgtcaccgcatatggagctgctacattgccaagtgtagtccctgttccgtattcattgccgccccatattgcaccatcggtgctccagaatgctgctgcagcagcccagaaattgagtcaggcaaaaataccagatgaggtcattgcacgggaaattgttataaacgatgcagatccatctgtgcgatataagcttacaaaacgacaaacacaagaagagattcagaaatgcacaaacactgtcatcattaccaggggaaaatatcaccctccaaatttacttcctgatggtgagaagcccctctatctacatatctctgctggatctcagttgaaagatactgctgagcgcattaaggcagttgatcgtgcagcttcaatgattgaggaaatattgaaacaaggaacaacctcagagtccatatcggtccctttctcctctagcactggacaagctgttcgtccttttagtgcctcagtttttttgggttttgatgcagatccatcattgaatatcacagctcgaatccgtggtccaaatgtatgactatgtgatcctggttttatttgatcattttgttactagcacatctcagttaattttgttaattactcaatttatgtgctgttgtctttcaattttttgaaagatctaatcataaagctttctctggcatcccaatttggatgggagaaactgcttttctgctgttggtgcttgtgctcttttgttattatataggatcagtacataaatcatatcatgaaagaaacaggggttactgttgtactaagaggaaaagattcggagaatcttggcagttgtcatagtgaagcctcacaacaacctctacacctatacctcacaagtatgcatttaaagaacctagaagctgcaaaagttttggcagagaacctcctggatacagtagcagcagaattcggtgcttccagaatttcttcttcaaaagtatatggtgctgttccacctcctcagcagttgttagctggtgtcgacacctcaggaacgaaatcagatgttcactatattgtagggcccaatgtgttatcgggagctacacattcctttgcatctactggagttattgctcctgttgttgctcctgcagtgacagtgcaatcaggggctccaacatattctggggttccactacccagtaacatggcctatcctattccaccagcaaacggtggggcattttacagtggttatggggacatttatccccaagcaactccgttgcagcagctggcattcacactcaagcatgcctcatcgtcggcaactcaggctgttccagtgacgtccacaccaacaagcatggctacaaaggggaactcaatcttggatgcggagatggataaacgatcccgaaggaaattccaggaactaccggtttcgaagggcccagcaacagaaagtcaggtacagtttttttttctggtatagcctcgactagttcttaactacaggagctacagcagcctcttcttttgtacttgttctgctgtctcctctattcacctagttttctctgtattacctctcaggcgattaatctaaattccatggcaaccccttccttccctgtgctgttcactagatgcctatcctgatttgatgagatcttccatatactcacatccttgtttgttctctcctttcttagcttagcttgtgccatctttttataccccatcaattcttaccaacacaacttccaaggcgatttcaatatcaggatttggaatttctggcatatttgcttttgtttgtaaattagatgtacactgttgctgtcaactatactaaaaactttgtatgccattgtgagtttgtgacatctattaacattaaaatattctgcataaaaacatttgcccttttgtttatgatggcaccatcaaacatgggaagcacttctaattatccaggagttttgatacaacacagcacatattccacatgcaattcatgatcttatgttttatacgtgtacctgaaagaatataatcatcttattgtttagtccttgtttagcactttggaaattaataactactgtataaatctactttctttgaaggaactttgcttgctcttgtagttcttgcagttccctcaacggagactacaattcaaatttgacattactattaaaaacaatagttggattgtcagattggcatcatcatgtttgttgtattcttatacctgcttctaacatctcatttcattccaggtattttctctgaccttgtctgaagctcacaggtggcaatagatatacatgtgggtttttcacaggcttgtaacaaatcggagtttgcattggctgtggagtgtaactgacaagatgcagagctcttcaaatatcttgttacttttttcagcaaatagaaatttaacctttgtgttttatctgtttctgtttgcttacagagttcactgatgttgattaacattgctagcatgccttaagttttgaaattggttggttggtatagtcttgttattagttgttgttagtaggttttgatacattttatttctttccactctttagagaaagttttgcatttgcaaaatcttcacattcagtggaagctccaagcaatataaatatacaaattacacaaggtccttccatatgaaacttcacttagttaagcagactcgactcatctttgttatgttattatagactctcccaatatgaaaattatatttacagcgcatctgcttctatattaagataacattctgaacttgtcaagggtcatgctaactagtattgtgcttccatgtgagatatgcttatatttgttctgtgtgcaaaattgtttctgatttcattcttatgcatgccattgcgttacctactctataacacaagaatttgatggatgaatcttcttgttttctttcatctttccagaactcacaacaggggtccaaatttgttaagacaggtttagatagttcaggtaacattgggagctcatcaattgcacctccgaagaaagttcaccctggatcaaatggaatgcttccgcaagaagaagcggatatgccatcacatctctctatatccactaagatgctaccaccacccctgaagagcatgctgccactgccacccagaagcatgcccccaccaccacctaagagcatgcctccaccgccaccaaaatttccttcagatgagtttttgtcaagaaacgagaacaagttttttcctttaaaggagccaacagcacctccaaggtcctttgatgcaatatcagtcttgccatctgaacgacgaccaagggagcctaaggaggaaaaaacaaaaggcacacctgtgtctgatactttgctgaaacttattgattatggagatgacgacgatgacggcgatattgatgtgacagacaacacacctaagggcaatccaactcctggttcagagcagaaaccattttgggctgtttaaaactgggtctgctaacgtagtctagtgtgaattcttgttgataaggatgcttgctgccttggtgcatcttctgaattgaagaggcaatcgagctccttgttcgtgtactgtagtaattctaacaggcaatgagatttctttgaacttgtattcattctggcctagtcaaaatgaaccgtttgttgttttggttcagatacgatgatgtttcgtttttagattcgacgttggttgctgaactcgtagcattttaatgtcggtattatataattgttagagcctatgtcaattttgtatccactgtcgtgcaaatttaatttttgtaatcagcctaaggtcacgacattgcttggaaacactttttttaatgaaggaaaatggcaggacatatggtatggtaatt

SEQ ID NO: 16786 - DNA, 1494 bp, Zea Mays
cccaaggtggtgcgtcggcgagtatggtggaattgatcagcagcctcgacaagaccaagctctacgtggtgggcgcaggcatgttcagcggggtcaccgtggcgctgtaccctgtctcggtggtcaagacccggatgcaggttgcctctggggacgccatggggaggaacgcactggctaccttcaagaacatccttaaggtggacggcgtgccagggctgtaccgggggtttcctactgttatcattggggctgtaccaactaggatcatcttcctcacggcgcttgagacaaccaaagcagcctctctcaagcttgttgagcccttcaagctgtcagagccggtgcaggctgcctttgccaatggccttgccggtctgtcggcatctacatgttcgcaggctatttttgtcccaattgatgtgatcagccagaaattgatggttcaagggtattctggtaatgtcagatacaaaggtggaatagatgttgctcgcaaggtcataaaggctgatggcattagggggctctacagaggatttggactctctgttatgacctatgcaccatcgagtgctgtgtggtgggcgagttatggttctagccagcgcataatttggagtgcccttggccatttgcataacaaagaagaggctcctagccaattgaaaatagttggtgttcaagcatcaggggggatttttgctggtgctgtgacctcttttgttacgactcccatagatacaatcaagaccaggctgcaggttatggataatgaaaataagccaaaagctggggaagttgttaaaagattgattgctgaagatggatggaaaggtttgtacagagggttgggtccaagatttttcagctcatcagcttggggtacctcaatgatagtatgctacgagtacctgaagcgcttgtgtgctaaagttgaagaggtctgacttctgttcttactatcctggaagttttgtattagcagaagtgaaataatgctgtatgtcgacaacattgacaccaccggaagcttcagttcttgctgacgtaggtgaaagcattcaacatggatgtttgatggtgtacttcatttgatgctagacaatagtctttacaaactttgcttctctgggctatattctcaaaaaaatggaggggcctatatttttttgctcatatgatgaatatgggttaggcggattattttaggtgagtataaacgatatcagatgtacacacttctcattcttttatacatgaaggctgttttagcgaggctgtatgattatgaccagtctggatgattgagaccagttgtaatgacacggaacgatgtttccgggagatgctgttttgaccttttttttttcctcatgcggtttcagttatctttttgatctgcccttggaatgcaaaaatgctgaacacgttgctgcacccatattttgagaagcaaatcgtaagcaaactggaaaaccgtttctgacagac

SEQ ID NO: 16787 - DNA, 1435 bp, Zea Mays
acgccgatgagctctcctctgtcgtcgtggacatgcttcacgatccccttgccatatgattcacggttcctcgcctcgcgactgcaacaagtcgtggtggtggctggtgtgctctaggtgctcgacgaaaggtcgcgcagcaaagtagcaaactcctgcgaccctacccaccgcacctaccattctggagaggagaggaacagagccaagaaacaagcccggaagatggcaggcggcggagtggtgaagcacatcctgctggcaagcttcaaggaggaggtgacgcaggagcgcctggacgagctcatccgaggatacgccgcgctcgtcggcgtggtcccctccatgaaggcgttccactggggaactgatgtgagcatagaaaacatgcatcaagggttcacgcacgtcttcgagtccacgtttgaaagcacggaaggaatcaaggagtacattgagcaccctgcacacgtcgaattcgcaagtgtgttcttgcctgtgctggagaaggtcctcataatcgactacaaaccgacgtcggccaattagcggtagaacatgctctgtactggttcctcggaggatccagtttgattctactctttattttgctaaataaactcggtctgctttgtcccttgttaagaatgagctttgagttttctgtagtgcaattgttgtagcttcgcatgttttcatatgggaattacgttcctaaagaccgtatttgccacttggaagcagcaaactgcttgaacttcttggagattggacgctggtttgtttcttggttcggaaagaggaagtaggtggatggcgtgagactgctctagttattttttttgtcggattatttactcgttaatatagctcccatcctaaaatataattcgttttagattagacatatatttattaattagtatatgattgtagtttgtatgtatatctatattcactattattcgttcgaatgtggagtgaaaaaatgctagaaaaaactatatttcaagggttagtttggaaactcattttttccaagtgatttctgttttcctaagaaaaaataaactatttctccttaaaaatggaaataccttaagaaaacaaggttttcaaactagccctaagaaaaacagagttcccaaacttcccaaactatggaggaagtgtaaccgtggtttttttgggtttacttgtaaatactgtcgttcttcgttattgtattatgtggggaaaatatcctatgcaatcacttatcctggtgcaagcatgcaatcaagcgatctggtgcatccgatctagatctaatgatgactgttattttatatttaaccccttccacctaaaacatagtacctattttacttttaaccccttccatatgaaaccgttggatctagattggatgctctggatagtttgattgcacgct

SEQ ID NO: 16788 - DNA, 743 bp, Zea Mays
atccctctctagtctctaccctttccgcctcggcacctccccacccctctcgccttcgcttcgtcgccacggcgagccccacgccgccgatcggggcgccgccagcggcggcggcgcccgatccgatggaagcggaggtggggccgccgaatccgccgcggccggagccagccggatcggagcccgacgacgcgcgcctctccccgcctcctcctgctcctgctccgccgcctccgcccccgcctcctcccgccgccgaggctgccgccgcgcccaccgcctccgcggccttctcgctgcaggctccagctccggcgccggcggaggcgaacggcagctccgacaggaagaggaggaggaaggcggaggacggggacgggtgcaagacctgcagctgcaagaagtccaggtgcctcaagctttactgtgtgtgctttgcttctgggttacattgtactgaatcatgtggatgtgaaccttgtcataacaagccacaattgcaaggtactctgcggatggcaacagttttacctctgaaacctgtccaaacattcgaagctggccaagatatagtggaacaagtcataaggtctcctatggatcttattagaagaaaatgcacatgcaagaagtcaggctgccttaagaagtactgcgactgctaccagggaggggcaggatgctccatcaactgtaaatgcgatgattgtagaaacccatttgggagaaaagatgatggcttg

SEQ ID NO: 16789 - DNA, 1020 bp, Zea Mays
taactcttcgcttgttcttccttgcatccggttcaaaataatcggtaaacctgggttgatgacattcatcccgttgccatgggaagcccgaataaagatcatgaaaggagttgccaaggggatgtctgtcctgcatgaattcagccccaaaaagtatgtccatggtgacttgaggccaaacaatgtcctccttgggacaaatatggagccgttcatttcagatttcggccttgggcgacttgcaaacattgctggcgcatcaccatttttgcaatcagaccaagttgaattagaaaaggagcagattcagcaaatagatgcctcagtgagccctctcatgagcaaagggtcatgctaccaagctccggaagcgctgaagacactgaagccctcccagaaatgggacgtttactcctatggcgtggtgttgcttgaaatgatcactggccggtcgccctctgttctcttggaaaccatgcagatggatcttgttcaatgggtccaattctgcatcgaagacaagaaaccttctgccgatgtgctggacccttttcttgcccaggattctgaacaggaaggtgagatgatcgcagtgctgaaagtcgcccttgcatgcgttcaggcgaatccagagcggaggccgtcgatgaggcatgttgcggagaccttggagcgcctcaatggttgacgctaatgaagtgttcccctgataaagttgtgcgattttcggtggaatgggttctagaactcagttgttggacagaagcctaggaggagagggcatgatgctgccttagtgtactccatgtaaaattatcatttccctagtggccactgactgtactggactactgggttgttaacgtgtgaggtagtagctagttaaggtaattagtttgctgttgagacttggaaggtggtagtatcgcgtgcttacttaatattgtgggtatatgaataatgaattagtttaaccatttgtgtgctctctgttatactaattgtgtatcatcttgggca

SEQ ID NO: 16790 - DNA, 2082 bp, Zea Mays
gcggaatcagattgcccgcgaggccgcgggcgcagccgtgaccagcgagccgaaggccctggcgccatccacggccgccgacggcgtcaattcgagttcgcaagattggaaggcccaattgaagcttccacctcctgatacacgctacaggacagaggatgttacagccaccaagggcaatgagtttgaagactattttctcaagcgtgaactcctaatgggtatttacgaaaagggatttgaaagaccctctcctattcaagaggaaagcattcctattgctttaactggtagtgacattcttgcaagagcgaagaatggaactggcaagactgctgcattttgtattcctgcactggaaaagattgatcaagaaaaaaatgctattcaagttgttatattggttcccacaagggaattggctctacaaacatcacaagtttgtaaggagcttggtaaacatttgaagatccaagttatggtcaccactggtggaaccagcttgaaggatgatattgttcgtctgtaccaacccgtgcacttaattgttggaacacctggccgtattttggatcttacaaagaaaggtgtttgcattttgaaggactgttcaatgcttattatggatgaggcagacaagcttctctctcctgagtttcaaccttccatagaacagttgattcgctacctccctgctagtcgacagattttgatgttctcagcgacattccctgtgactgttaaggagttcaaggacaaatatcttcctaaaccttatgtgattaaccttatggatgaacttacactgaagggaattacgcagttctatgcttttgttgaagaacgacagaaagttcactgtctcaacaccctcttttccaagcttcaaatcaatcagtcaataatattctgtaactctgtaaatcgtgttgaactattggcgaagaagatcacagagcttggttattcttgcttctatattcatgcaaagatgctacaggaccaccgcaatagagttttccatgatttccgtaatggagcgtgcaggaatcttgtttgtactgatctttttacaaggggaatagatattcaagctgtgaatgttgttatcaattttgatttccccaagaactctgaaacatatctccacagggttggtagatctgggagatttggccaccttggtctggccgttaatttgatcacctatgaggatcgatttaacttgtataggattgaacaagagcttgggactgaaataaaaccaattcctcctcagatagaccaggctatatattgccaatgatcaggcagttttcatctttgttcatttctccgtgattaataaggagacaacttttgtaaataccagctcatcaggttttatggtgttgatctcatttggtgcatcggagacaattctaagttggtggattacgtgagacgaggcacccgacttttcctgatcaccttgtcatgctgacactattatggctatatgagggaaaatgtcctgccacactaggcacaaagtagtgtatattactaggacattttaaccctgttgctggttctgggcgtgtggcctgtgggtgccgcgcacaagggtaaaagacattttagcccaagtggaacttggggatgtgcgcctcagattggttaatgggtgtgacaagtcggccatcacacttgaggtctggagtctgaacggtagtgaagtgattttaagtttgccaataatcagtggtaagctgcaccgtgctgtgctgtcttttacccttgcaaccatgtccctttgcttcttggcatggtcgccatttagattctgtccggcgaatgtaacgctgggataaaacgttcttgtcgtttgtgatggatttatgtgtttggcacaagcaacttggccaggttatgggtaccagaactgtctacttgtttcttccataataacaaactttgcagttcttttgtactcattcttttttttttcgtgattgacctcgaccccttgtttaagtgatgtttttccgcgccccagcaatggatgccttttattaatagggatgtttgtttatttatata

SEQ ID NO: 16791 - DNA, 2112 bp, Zea Mays
gcttgtcgatgtcaagcaatttttatgtactctagagattagtttggccgcatcctccgtatcttctacttcttgaccagggatggagcttgtatacatggaaaggagaaacggatcgtacgacgatggcgcggttccagagttcagtggaaggggggctggaggggatcaggatcaggacccgcccgctgctgcatccgaggtccagtctgactcgcgtcagacaccggacgagaagaagagcaagggctgccaatcatgccgtgacccattctgttcatgcagcggcggcacgccccactcggaactgttccccccacatcccgccaagatgatgatcctggagttcctcatcgcgagcctcaggcacccgacaagaacccacaacgtcagtgatctcgacgacctgatcgccgacggggtcagccaagggagcgtggtaaacctcggcccttctgagaagaaggtgctggaatctctgcacgccatggtaaacgccaagacgaggccgaagagcccgtcgccgttcatggcgggatctaagctgaggaaaatccggtccaagtcccacgtcataacgcagtcggaaatactgaagctcatctctcctgagacgtgggaagcctcctccttccctggggcgtctccgatgatcggcggaggcacggctgaggacggcgtccatgggaacaagccgccgccgccgtgctgctcgtctgtgagctcaaaccagcatgttctgtcacggtgcccgtcgtccctcagcgcatgccttctacagtgcatatggaaggatggcctgcctcattttgagctgtcactggacgatcatcccattgcggtgtacgctgcaagtccagtcagggtgctggagaaggacagggccttcgactacgtctacatgatccattcgggagagcaaggaagaaaagactggatgggccactcgagcaacgtgtccagacttgtgggcaaggtgaaggtgtcaagttctcttgttcttaacccagacaagtcaggtcttttggaaaccgagtttgttctgtatggttctccggacgactatcttaggcagatgcgcagtccctacagcgtgccgaaagggaagggccttgtcaggagggtgacagagatcatgagagcaggcaatgtttccgctagcccgagacatccctggaagctgggcaaatcttcctctcatcagttcgacgacttggctggagtacttgaaggtgaaatgatcagtgctggaggatcagacctggtgagtctcaaggccgacgatctgccgtccaaccaagaattagcagcgattgtggtgagggaacagcggcgcagacgacggaaagagcctgtttcgggtggctggggcctcaagttccttgagaaagcaggactgaatcgcccacaaggcactgaagaaactgatgttcagaacagtgatggtgccacacattgtgtaactgttgttgtccccagaggctaccacggcggcgtggtatcaaagagtagtcgcccgtcaggcctcgtcgagagatggagatctggaggacgctgtgactgcggcggatgggatcttggctgccccatcagagtgctcaacggtgatggatgtggctccttgcctgaaggagagtcacgggacagaaggtcggtagagatatcgatcaagggtgcaaagaatgagacaatgttgaagctcgtgaatatcacggaggacttgtacatcctctacttcgactcgagtatttcaccattgcagtgcttctcaacagggatagcgattgtgcacagccgagcgccagagctttgccccaaactgtgaattgcgcacagccaggcacgcacccgagctttgccccccaaactgtgaattgcaaagcttggtgtagctgaattacaaagattcgtgaagcactatgtacatgtagatagtagaatgggaataattcttgttatttttaacttatataattttgagagagaaaagcaggcagctgttttcagactgcttttaaatcatcaatctgttggtttggccgattgagcgaaagctaagaaacatgaattacaaatcatgtttcgttaacaattacgattttttgaatccct

SEQ ID NO: 16792 - DNA, 1127 bp, Zea Mays
cttgaccctcccagccgcaaaaccgcaggccgcatcccgcccgccgcccgccgcccacctgtggcaaccgccgcctacataaacgaccaatcgaccactcgccgaaccaagccacccacccaaaacccaatggcgtccaacctcctatccgcggtggcaatcgagaaggagacgccggagagcgagctgcccccgacgttcctccgcgaggacgggcgcggcgccgggtccgtgcgggcgcggttcgagtccatgatacggcgggtgcagggggaggtctgcgccgcgctcgaggaggcagatggcggtggggcgcgcttcgtcgaggacgtctggtcgcgccccggcggcggcggcggcatcagccgggtcctgcaggacggccgcgtcttcgagaaggccggggtcaacgtctccgtcgtctacggggtcatgccacccgacgcctaccgcgccgccaagggggaggccggcaagaacgaggtcgccgcggatggccacaagcctggccccgtgccattcttcgctgcgggtattagctcggtgcttcaccccaaaaatccatttgctccaacattgcattttaactaccgttactttgagacagatgcacccaaagatgcacctggtgcaccaagacagtggtggtttggcggtggtactgacttgactccctcatacatcattgaagaggacgtgaagcattttcattctgttcaaaagcaagcatgtgataaatttgatccaagttttcacccaagattcaaaaaatggtgtgatgattatttctatattaagcaccgtaacgagcggcgtgggcttggtggaatattttttgatgaccttaatgattacgatcaagaaatgcttctcaacttcgctacaaaatgtgcggactctgtacttcctgcctacataccgatcatagaacggcggaaggacaccccattcaatgaggagcacaaggaatggcagcagttgaggagaggtcgttatgtggagttcaaccttgtctacgaccgtggtacaacattcggcctaaagactggaggaagaatcgagagcatactcgtgtcccttccactcacagcacggtggcagtatgatcatgtcaagaacaagtacca

SEQ ID NO: 16793 - DNA, 1345 bp, Zea Mays
tagtttcaacttgtcaggaaccttatccacactaagagcaaatttcagtacaagcccgagtggatcaatgttattgagggatctcaagaaggatcatacctatgggttgctctgaattatctgttggataaattgggaggggactactcacagacagtagctgtgcttgacatgggcggtggatcagtgcaaatggcctatgccgtttctgcaaatgccgctgcaagtgctccggcgccgactcatggggaagacccctatgttacaagagagtatcttaaaggaaaagattacaacatctatactcacagttacttgcactatggtgcttttgcatcacgagcagagattttgaaggcaaaggatggaccattcagcagctgcatgttacgtggattcattggtcaatacacctacaatgaggagcaatatgacgcgactgccgcgccggaaggagcagtctatggcaagtgcagggaagagatcggcagagcactgaacctgaacgcgccatgtgaaatgaagaactgcaccttcaatggcatatggaatggcggcggcggagcaggccaaggcagcatctatgttgcatccagcttctacttcgtggcctcagaggtcggcatcgtagatggcaacgcaccaagcgggaacactacccctggcgcattcggagcttccgcggagaaggcttgccagatgagtgttgaagaagccaagatcgaatacccaaacgtcaacgatgtcgatgtgccctacctgtgcatggaccttgcctaccagtatactttgctagtagatggctttggtgtggagaggaccaaggagatcacagtggtggacaaggtgaagcacggagagtactacgtcgaagctgcatggcctctaggctctgctattgaggctgtgtcgtcaaccaaagaatggcgtcaagataaatgatctgttggtccaatctcatatgctagtattgtatctgacatgtacagtactggcacaacttatgaaataaacgaaaacgtctgtggtctcacgctaatatacgcattaagcactcggcaaagatgattttgccgagtgtctgtcaatgatgagtgtctcacgctcggtaaacattattgttgtcgagagtgttatttcacgcaccgagtacccgacaaaaatgcattcggcaaaaaaccggattccgacagtgaaatgcatattccttgaatggttatatgcaccaccaaagaaaactaagcattttcttcaatgtttgtcaaggaagaaaattacaatatgatcatggcttgtaaagttcttatattgatatatgaattcaatatcatggttgcaatccata

SEQ ID NO: 16794 - DNA, 2898 bp, Zea Mays
aatagaaaagcgacggggaaagggtaggaagaaaaaaagagaaaaaaaaacgccggaggccggagggatcacggaatctgagcccaccactcccccgcccccacttgtataaagcgaccccgataccagcccgtcatgggaagaaaaggaaggaagaagggcctcctgtatcctctcacttccctcagtcctcgtccgtctgctccctcctctctctacctagctctagctagccttcctgtagcgcggcagagatggctgcccctgcctccaccacggcggcggcggcggcagcgctgctgctgctgctcctcctgtcgctcgccgcggcggcggacatgtcgatcgtgtcctacggggagcgcagcgacgaggaggcgcggcggatgtacgcggagtggatggcggcgcacggccggacctacaacgccgtcggcgaggaggagcggcggtaccaggtgttccgggacaacctccgctacatcgacgcgcacaacgccgccgccgacgcgggcgtccactccttccgcctcggcctcaaccgcttcgccgacctcaccaacgacgagtaccgcgccacctacctcggcgccaggaccaggccgcagagggagaggaagctcggcgccaggtaccacgccgccgacaacgaggacctgccggagtccgtcgactggagggccaagggcgccgtcgccgaggtcaaggaccagggcagctgcgggagctgttgggctttctcaacaatagcagctgtggaaggcatcaaccagattgttacaggcgacttgatctccttgtctgaacaagagcttgtcgactgtgacacttcgtacaatcaggggtgcaatggaggtctgatggactatgcatttgagttcatcatcaacaatggcggaatcgacaccgagaaggattacccttacaagggcacggacggacggtgtgatgtcaacaggaaaaacgcgaaggttgtcactattgacagctacgaagatgtaccagcgaacgatgagaagagtctgcagaaggcagttgcaaaccagcctgtcagtgtcgcaattgaggctgctggcacagcatttcagctctacagctcggtaattggcgctcaccttgctgctgggttcatctgtggaccatttggttaaagtccgagatgaatgattcaatcatctagtgtttgattattagttggtggccatgaaagaaataaaatccatctgccttgaacaagacatgcccatgttaggtcgaggtcacctaattgctttaaaattgtctctttcatatcgctttactcaagattattttctctggaaagaatgattctgttgtcaccctgcaagctgcaactgttacacaccatacccctgacctagtttacttcgatccagactatatatttagcaacttttacagtacgatagtccttcagtgccccaccactgaatcatgctcccttgtttttctcaaagactatcctgccacttcctgtgaagcacttttaatggtatacaactttgatgtgtttctgtgaggccttttggaaagacgtgctttggtaatatagcggcgtgagctatcctccactaattaataattatcatttcaactccatgaatcatctgcctttgtactggtgactaattatcgtttcctggcctcagggtatcttcactggaagctgtggaacagcgctggaccatggtgtcacggccgtcggctacgggacagagaacggcaaggactactggatcgtgaagaactcatggggcagcagctggggcgagtccgggtacgtgaggatggagcgcaacatcaaggcgtccagcggcaagtgcggtatcgcggttgagccgtcatacccgttgaaggagggcgccaacccgccgaaccctggccccagcccgccgtccccgaccccggcgcccgccgtgtgcgacaactactactcgtgccctgacagcaccacctgctgctgcatctacgagtacggcaagtactgcttcgcctggggctgctgcccgctcgagggcgccacctgctgcgacgatcactacagctgctgcccccatgactaccccatctgcaacgtcaggcagggaacctgcctcatgggcaaggacagcccactgtcactgtcagtgaaggctacgaagcgaaccctggccaagccgcactgggctttctccggcaacacagctgacggaatgaagagcagcgcatgagaaaacgcagcgtggcattaggtcgtcagcaacctgggtggtcgattagagcccctgcgtgggaaatggtcacctggccccctgattgacgacggaagcatggctcggcggccgctatctacctatatcgattttagtaggtactcactcctgtacataaaccctgcagaaaaaaagagggttcagttgtttatggaaccctggcaaatttgctttcgcgcacaatgtaaaactcagctaagctccccggcgtagctcgacacagctgcgatctattattatttgatgtaatggggactgatattgcaacgaccagcaatgttatactacattcattttcttggacgcgctctgttatgtgtcggcggtgataccctctgatggtttttgtatttggttcttttactaacggagagtggacaatagattctagcttcattgcatcacatcagtggcagcagataccagcacgagtgcacgagttacacgagcccaagaggccagccaactgttggaggtagagatggcaatgggtaaatacccacgacaaaaaaataaccccaccgggtcacccatatacactggtgggtatggatttacccccatacccatacccacgtgggtatgggtcacccgtacccacaaaaattaaacatctatcaaaata

SEQ ID NO: 16795 - DNA, 2135 bp, Zea Mays
ggttgcattcggaccgtccgtagcgcccagctgacctctaaacccttgtctccctcccccaagtgaatccgtgttgtacctctcgccgccgccgtaccatcgcccgaaatcctagccccattcaccgcctcgctcggaatccaagccccattcggcgccgccgcgaccgccggacaggaggtcatggacgacgtgtgcgaggggaaggacttctccttcccggagcaggaggagcgggtactcgagctgtgggcgaagctcgacgccttccacgagcagctccggcgcacggagggcggtgaggagttcgtcttctatgacggcccccccttcgccactggtctgccccactacggccacatactcgccggcaccatcaaggacgtggtcacccggcaccagtcgatgcggggccgccatgtctcgcgacggttcgggtgggactgtcacggcctccccgtcgagtttgagatcgacaagctgctcggcatcaccaaccggcagcaggtgttcgacctcggcatcggcaagtacaacgagacgtgccgcagcatcgtcaccaagtacgtctctgagtgggaggccatggtcacacgtacggggaggtggattgacttcaagaacgactacaagaccatggacctcaacttcatggagagcgtctggtgggtgtttgcgcagctctgggagaaggacctcgtctataagggcttcaaggtcatgccttacagcacaggatgcaaaactgcactgtcaaactttgaggcagcactggactataggactgttcctgacccagcggtgatggtatccttccctattgttggtgatatggacaatgcagcttttgttgcatggactacaacaccctggacacttccaagtaacctagcgctgtgtatcaatgccaatctcatgtatgcaaaggttagagacaagtcaaatggaaaagtatatgttattgcagaatctaggcttgggcagttaccagttaaggccaaagcttcaggaaagaagcaggcaccttcaaagggaagcaatgctgaagctgctcaggatggtttggataaggaatcatatgagctgctggtaaagattcctgggccatatttggttggcttaaaatatactcccctatttgattttttcattgaactacaagagactgcctttagagtgattgcggataactatgtcaccgatgatagtggaactggcgttgtccattgtgctcctgcatttggtgaagacgaccatcgtgtttgccttgctgctgggatatttgagactgctggacttgttgtcgctgttgatgatgatgggtgctttattgaaaaaatatctgattttaaagggcgatatgtcaaagaagctgacaaggatatcatcagtgctgttaaggataaaggaagacttgttagtaaagggagcattgaacactcttatccattttgttggcgatcgggtactcctcttatttatcgggctgttccaagctggtttgtcaaggttgagaagattaaagaccaattgctggaatgtaacaaggagacttactgggtgcctgactatgttaaggaaaaaagatttcacaactggcttgaaggtgcacgtgattgggccattagcagaagtagattctggggtactccacttccactgtggatgagtcaagatcgtaaagaaattgttgttatggattctatcgaaaagcttgaaaaattatctggagtcaaggtcactgatcttcaccgacactatgttgatgatattacaattccctctaagaggggacccaagtttgggacgctcaaacgtgttgatgatgtttttgactgctggtttgagagtggatcaatgccatatgcctacattcactatccatttgagaatcgagagctatttgaaaagaattttcctgggaattttgtggcagagggtttggatcaaacccgtggatggttttatactctgatggttctctcgacggcactgtttgggaagcctgcatttaagaatcttatatgcaatggccttgtcttggctgaggatggtaagaaaatgagtaagagtaaaaagaactatccttcaccaaaagatctcattgacgagtttggagcgtttgttctgtttca

SEQ ID NO: 16796 - DNA, 1269 bp, Zea Mays
gatctcaattttcatgctaccgaggaggatcctgtgacaaaaacggctgtgagaaggttaattttgaacattaaaccaaaggatgttggttctttgtttccgaactttcctggcgaggatccaaaaatgctatccagttttaaggatcttcttgataaaatatttacattagatccagaaaagaggataactgtatcgcaagcacttagccatccatttatcactggcaagtgacacaagatgacgattcctcttgaccttgaacttagcatcttcactgtaaaatacattttgggttcctcttgtctaatcatcaacgtttctgtcttgtgtcctgggagctctgagaaaaagtacatggatgaagcacggaacttcggaagagatggctatctgcagaccttgttgcatgcacttatcatttggatatattctgttgcttgattctgccagggcctctgctatgtgcacattttatatgcttaagggccaacataagaaggtcctgggatggaggtcgctggaccctctactcacttgccatgtattcaagtgcaggagagatgcgtatcatttcattgagtaaagaggctacagggaaagaaatccaacatagcccgcccctcctccctctaagcacacaagacctgaaaggttctcagcctgttagcaccatggaatgctcttatttgtgattgcctgcagcaccgccatcataacacttgcaatgatgccattaaaaagacatcatactgatgtttccagatctctcaagccaccaagatagtgagttcaggcctttcttgctatatcatttggcacttgtcagcctagctcaaaccggcttgataacttattgatgataggttgaggcgcaatggaaataatccaagcctgccagattggtaaccattctttagactgccatttagtaagtcaggttgaacctattaccatctataaggacttgttcggttagctctcaatccatgtggattgagtgggattggatgggtttgaatcccaaacaagtcaaacttcttctcaattttttccaatcccatccaatccatatgtattaggaataaccgaacaagccctaagtgggcatgcaaatggcattgtgttggattggaccattgtaaacggtttctcgtgttggatgcaagcattctgtagttgttttgagttgttttttattatctgtagtacttgctgggtaaatctaaagaactggatttgtgtcaggcctggttcaattgatatgga

SEQ ID NO: 16797 - DNA, 2182 bp, Zea Mays
caagaaaagccgaagcccaagaagcccagtgagcaccttctccactagccgccaccgcgtccccaagcactccagcgcccccgtccccgatcgacgccatggtgtcggaggccagcaagaagaaggccgcccagaagaaggccgctgccgccgcaaagaggggaggcaaggcctcggtggcgtcctcgtcgtcttcatctgcggccgcggccgccgataaggtggcgaacggcgtcgtggcgcttaagctatcagaccgcacctgcaccggggtcctcgcatctcaccccctttcccgggatatccacatagagtctctttctttaacattccatggacacgaccttattgtggattctgatttggagctgaactacggaaggcgatacggtttgcttgggttgaatggctgtggaaaatctactcttctcacagcaataggctgcagagaacttcctatccctgaacacatggacatataccatctaagccatgagattgaagcttctgacatgtctgcactgcaagccattgttagttgtgacgaagaaagagtgaagttggaaaaggaagctgaaattttggctgcacaggatgatggtggtggtgaagcattggagcgtgtttatgagcgtctagatgcaatggatgctggaactgcagaaaagcgagctgctgaaattttatttggtctgggttttgacaaacaaatgcaagcaaagaaaactaaagatttctctggaggttggcgtatgaggattgctttagcaagagcactgtttatgaatccaacaatccttttgcttgatgagcccacaaaccatctagatcttgaggcttgtgtctggttggaagagacactgaagaaatttgaccgcatacttgttgtcatatcacactcccaagattttctaaatggagtgtgtactaacattatccatatgcaaaacaagaagctcaagttatacaccggtaactacgatcagtatgttcaaactcgctccgatcttgaagagaatcaaatgaagcagtacaaatgggagcaggaacagattgcttcaatgaaggagtacattgctcgcttcggtcatggttctgcaaagcttgctcgtcaggctcagagcaaagagaaaactcttgcaaagatggagcgaggtggtctcaccgagaaggttgttagggacagagttctagtgttcaggtttacagatgtaggcaaacttcctccacctgtgctgcagtttgttgaagtcaagtttgggtatacaccagataatctcatatacaagagtcttgactttggtgttgatcttgactctagaatcgcattggttggtcccaatggtgcagggaagagcactcttctgaagcttatgactggtgaccttgctccattagatggcatggttcggcgccacaatcacctgcgcattgcacagtaccatcagcatcttgcggacaagctggatctggacatgccggctctggcttacatgatgaaggaataccctgggaccgaagaagagaagatgcgagctgctgttggcaggtttggcctatcaggaaaggcgcaggtgatgccaatgaggaatctttctgatgggcaaaggagccgtgtcatctttgcatggttggcatataggcagccgcaactgctactgctcgatgagccgacaaatcatttggacattgagaccattgactccctggcggaggcactgaatgagtgggatggtggtttggtcttggtgagccatgatttcaggctgatcaaccaggttgctcaagagatttgggtgtgtgagaatcaggcggtgacaaggtgggaaggtgatatcatggatttcaaggcacacttgaagagcaaggctggtttatctgattagagggctttttccagcaaccatgagctttttaactctgtatcacgaagtcccagttttccaatagcgaactatcagagttactttattgtatcggatttcttttgacttgcattgcaacctgattaccttatactacctggaatatttatttatatatcttttgaaatgctattatgtgtattgttaagtttcgtagattttggaagttttgatttgtcaaagttactagattctatgatcattgtgaacatacaacttaaatttagttttcaattcaactgattttatttcttcag

SEQ ID NO: 16798 - DNA, 820 bp, Zea Mays
gttctcttgttcgttcatggacatgcaattcccaaacgggcaactgaggtacgtcgccggcgacggcttcacggcgcgtgctttcctgcccctccgtggcggggtcttgcaagcccacggaaagttcccgggggagaagaggctcagcttctctttcaagaacaggaatggcggcagcgtcgtcccgatggttcagtggccggataagtcactctcggtgggggtcgtccaggcgttgtcttggaggagatccggcctgatgctgcagccagcaacacagatcagcatatgtcctacgatcggcgggcgccatcctggggtgtgcgtggagctgatccactcggcggacgacaacgtcggcgtagtctgcggctactcccacaccgcttcttcccctgcttccgcatacgcctccatatcgatcggaaggtcgaagctgaacggcggagcggcaaggtcagggttagcgttcagagtagacgctccactactccacggttttggccggccatggttctcggtccagatgaacagcggcatcgagttctgattccccactgtcttgccgttgccatgactgaacgaacgaacttactgtacagtagttgatgttgtgtataaagcttgacgacgactcactgatgccatgagtatacgcagtaaacgctacaacactatatgtttggtcgctggctaacttatcataatatgtctattttttattgagaaattagacattttctaaattaaatttcgaatataaattatagataacagtagcagactagtaagcagtacatagaacaacactgcgtcaaaa

SEQ ID NO: 16799 - DNA, 1362 bp, Zea Mays
tgacaattgacgaatataccacgcgttgcgttaggctagatccgctcccctgcaggccacgccttctcgccgctcgcggaaccaccgccgccacctcaccactccagctccagcccccgcccgccataatcgcgtccccttctcgtccttccagagcttcttaaaccacccggcccgctcccagcgtcccttctccgcccacagccagcggcgaactcgatcgagcaggatggggtttatcggcgcgcacggcgtggagacgctgaagcggtataggtacagtggagaggaccgctcggtggtggccaagtacgtgctgcagcccttctggagccgatgcgtcactctcttcccgctctggatgcctacatggttatgctttccgacatttcagatcacacttacaggattttcgtttctagtactatcagcgctgcttggctatatatgttcgcctcaccttgacactgctccccctaggtgggtccatcttgcccatggattacttctcttcttgtaccagacttttgatgctgttgatggtaaacaagcaaggcgtactagctcatcgagtcctcttggagaactttttgatcatggatgtgatgcacttgcgtgtgcttttgaagcattggcccttggaagcaccttgatgtgtggaggatggacactttgtttctgggtagttgccgctgtcccgttctatcttgcaacctgggaacacttctttacaaatacgctcattctgcctacaataaatggaccaacggagggcctgatgctgatctatgtatcacatttgtttacattttttactggcgctgaatggtgggcacaggattttcggaaatcactaccctttttcggttggattccacttccatttctttctgaaattgaaattcctttatatgttcttgtgctgattcttatgatcgtatgtgctgttatacctactgttagatccaatgtcagcaatgtccaagaggtagttgaggcacgaaaaggaagcatggcattagcattagccatgatccttccttttattgtactgttagctggagttgctatctggtgctatctttctccttcaagtataatgaggaaccagccacatttgctcgtgattggaactggctttaattttggatatttggtgggaagaatgatacttgctcatttgtgtgatgaacccaaaggtctaaaatctgggatgttcatgtctctggtgtttctttgttttccaattgcaaatgctctcattgcaaagatcaacgatgggagtcctttagttgatgagcttgttctgctgctgctttattgtgcatatacagtgtgttatgtgtctgtcttctgggatta

SEQ ID NO: 16800 - DNA, 265 bp, Zea Mays
cccaaccatagaaatcctccaattattcgattcccaagccactaaggcccttggaggaacaacagaatccagaaaccgaaaagaggcctcactgctgccgcctgggccaagtcgtcgtcttgcttgccaatccgtcgctccacctgaacacaccggcgaagaggaggcgaagaagcgatgggcgtgaccaaggaggacgtcgaggcggccatcacctccgctctcagcccttccaatctccatcttcagttgtcgactaaccaac

SEQ ID NO: 16801 - DNA, 1078 bp, Zea Mays
acctgaactattgcgctcgtatcttcttccttgtgcgcgtgcagccgccgtgcttgcgggttgcggccctgcctctctcctctccggctctcccaccggccaccggccaccggccgccaccgtcgccgccatgccttttcgattccagttcccatggctcaagaacccaactacaaacggcggcacctccaacatagacactaaccctagcccccgcttccccaaccccttcctccctatccaagcccatgtcacctccttcctctcctccttcccccgggcgctcccgccgccgccgccctgggcgcgcatcacctcgccagcctccacctccggggccctacctacctctgagatcgaggagcggctcgccggggtgcccgtgtacgcgctcgccaacgccgcccaggagttcgtgcttgtgtcgtccacacgcgtgggagggcaagggggcgagagcgtgagtccaacgcaggcgctcgggctgctctgcttccggaaggaagatgctgacgcgctgctggagcagatggatggcgatatgcgcgccggctctggtgtcgttcctgtcgcgctgaacaaggttatccaaatgaagtcggatggtgtggcgtttagattcctccctgattcatctcaggtggctaatgcaattaagttgatgcaagatgaaggactgtatgccggagagggatttccaggagtgccagtttttcagtcaaggagcctggtcttgatgagtgacaacaagagatatcgtccagtttttttcagaaaggaggacttggataactcactgcaccggacctcccgtgatcagcaaaaacctaatcctgctgttaggtttggtgacactcaggtttcttctttggaagatatcattaaatctatgaaggatagctcctcctcaaaatgggatgatgttgtatttattcctcctggatttgaccttgctactggctcgacaccatcacagctccgcaagtagttcattctttagaaggaaaacaacctacacatcactcttcactgaagaactgtagccatcttggtcatcataatacttggaccacagcat

SEQ ID NO: 16802 - DNA, 1364 bp, Zea Mays
agcaaatgcaaggggagaactacgattctattcctatttattattaccaaatttcgctgattcacacaaggattgtagctcaaagctttctgaggaatctggaggatgctggtgtgacatgcttcttcctattgttaaagaagcttggaggaactgcaagaaagcaattgaggcatcttcgccaccaaaaggatccaaatctattattgtacccatggatttgtgttcatttgaaggtgattcttctgttgccatcgcagaggcactctatgagatggttaagggttttgtgctgcagcatcaagttatactcttctgtcttggagaaactttcacagagctacctcctatttaccctctggttgatttgcctataaatactagggcaagcgctgcagattttggtggttcagttcctaaacctgggcttgaagtcaacttagtcgacgctgttccttgtcgaatagcatttgagaggggcaaagaacggcacttctgctttttagccatagctcatggaacttctggttggattcttcttctagaagaattacctctaaaacgggaacgaggaattgtccgtgtcatggcacctttggcaggatctgatccaagaatagatacaaagcatgggaagtggttacatctacgcattcgcccttcttcggtcccttttttggacactgagaagcataaagcgaagacaaagaagtatcttgttgatgggagatggacccttgcttttagggacgagcagtcctgtaaggttgcagagagtatggttattgaagagatgaaactccaacgaggtgctgttgcagagcaattgaagccattggttgaatttgacatgcctgaggatggaatgcagcacccccagacttcacatgaaaccccttctgatgatggatcatgactaaattttcatcaagtgcagtgttgagcttctcaattaaggagacatggcaacagatggccgcaaaagtgccgcattgaacatttcaagcatgctggcaggaaaacccaccatggcaagtcatcgacaattctgtacattacattgggagattagagatgtctccttgttaacacacaactgtagagtttcgggccgtcctgagttgaactagctggataggattctttgtacaatagtttgtttctctccttgcccgttgtaaccttatatatcacatcaaaacccattctttgttaagtttcagggcacagttgtgttgtgcacacgaaatgtttaaagaaatttgcagttagtcatacctgttgtcaaagcaagccttgcctatgtggtaataaaatgtcagatcgataatttttcttggaaatatgaatgttcatggactgtt

SEQ ID NO: 16803 - DNA, 382 bp, Zea Mays
gccacgtaggctagctgatatgttgctggcaccatgcgaggacaccttagctgcatgtcaaacatgtcaggaacaccttgccccatattcaaagttaagttgttcctgagctgagtgtcaacctcctgtgtggtgaccagggtcatccaagtgcccacctcgccgcggtcaagcaatcacaagcgattccccagctgtacagtgcaagtttcgtgttctccttagaacacctagacgaggtggtatttaaagaagtctactccaatgcctgctcctcaagtggatgaagccatctaactgggtattggatagagggatctagaaccacttcattgcaacaaaggcaagccccggtgcatgcaaccacttctttgtgttttta

SEQ ID NO: 16804 - DNA, 1027 bp, Zea Mays
aggaagacgccatcggaaacatgccttctgcactgccccctctgctctgctgtctcgcggcttagcggggataagatgaggagtctttagaaaatcatgcacactaccaggtgaaaacagaagttgtaaaggtactcgtgaaatatcctatagattgagggtccgcatagcaaaagagaagttaggccttcttgtccgcttgtgttggcggcggcgatggcgacgtcggcgagcacgtccggcgagtggctcaagggcgcgctgcaggaacttcgggagcgtaagggcagctcgctggagttcgactcggatctcatctcgggcctcgtctccttctgcgagctcgcgcctccctccgacgccaccagctatctcgagaattttattgggaaagaagctgctcaggacatcattcaagaatacttgcggaggaggggtcacattggttcctcaaatggaactgagagctttcagtcatctaaccttcagccttatgttaagccttcagctgatgcagcaactacacaaacaaagaaacaaacacgcacgcaaaaagattcagcatcttcttctagtcagagttctaagagtcaatcagaaattgcagaatcacaagttccttccaagagaggttcaaaaaagaaaggagcaaaggtcatttccctcgctgaggcagcaaaaggttctattgtcttcaagcaggggaaaccttgttcatgccaagcacggcaacatgaccttgtcagcaactgcttatcatgtggcaaaattgtgtgtgaacaagagggcgagggaccctgtagtttctgtggcgcacttgtcttgaaggaaggtagcacttatgctggtctaagtgatgttgggctacccctttccgaagcagaaactgcagctgaagcatatgcaaagaggcttgttgactatgatagaaatgctgcagcaaggactaaagtttatgatgaccaaagtgactactatgaaatggaaggaaacagttggctctcttcaaagatatatacatgtccat

SEQ ID NO: 16805 - DNA, 1127 bp, Zea Mays
cagaaacacccatccgttcgatcatgcccacgcggctggctgggctggctctctccggtttccgtttcgcttcctgccccccgatcctctctcgcgtacatttcccagtctccaccccggaaatggccagaacctgaggcactagaacccacccgcccgcggctctctccagcagccccccaatccatcgacgccgttggcgagggcgcacaggcgcgcgtcgcaccacatccgccacccacaacacaccaccgtcctcatctccggtgtgcaggcagagacgcgggatggcctcgcgccagtagtatccgcccggcactttctaccccacccatccggccgcgggtgggtttgaccgagatcggcaggcggccgtcggcgtctcgctcgctcgatccgcctcgtctcagtcctacctaggtatggcggcggcggtggcagagggatcggcttcttcggcggcgaaggaggtggagtaccaggcgggcgtgcagaagctggtggacctgctgtccaacctcaacccggccgccaaggagttcgtcccctccgcggccgcgtctccgcccaagaaggcgctgtcggcggatgcgccggtgttcgattaccactccatcggaggcgggaatggggccaccgacgctgcgttttacgttgggtttgggcaccagccgcgcacgagggggaatggatacatcaaccaaggaaggaggaggacaaatggtagagtgaggcgggcagacagagaggacagcattaggcgaactgtttatgtctctgaacttgaccatactgtgacagaggagagacttgctgatatctttaccacctgtgggcaagttgttgattgcagaatttgtggtgatccccactcagttcttaggtttgcattcattgagttctctgatgaagagggcgccagaactgcgcttaacctgggaggcacaatttttggtttctaccctgttagagttttgccgtcaaagacagctatcttacctgttaatccaaagtttcttcccaggacggatgacgagaaggaaatggtcatgcgaactgtctattgtacaaacatagataagatgatcttgggtgcaagtttctgaagctaacactatcagtttgat

SEQ ID NO: 16806 - DNA, 3414 bp, Zea Mays
cctgcggtggggaaggcggggattttttagggtttaaagacgtcacggaactgaactactgggacacctttgcaaaatacacggcaaggacatcatttgagcgaccactgctcaatggggtggcattcgcacagcgtgtattccatcatgagagggaaatgtttgaaagccagcagggatgggttatgaatacgatgcagcgggagcctgcacctccgcaggttgaatacgccccagtgattttctctcaggatacggtttcctaccttgcacgcattgacatgatgtctggggaggaggaccgagaaaacattttccgggccaggactactggcaaagctgtgttaacaaacccattccggttgcttggatcaaaccacttgggagtagttctcacgtttgctgtgtaccgccctgatctccctgctgatgcatcagttgagcaacgtgtggaagcaactattggatatcttggtggagcctttgatgtggagtcacttgtggagaatttgttgagcaaacttgctggcaatcaggatattgtggtaaatgtctatgatgtcacaaatgcttcagatgctatggttttgtatggaccttcaagtttggacgagcaagtgcctttcttgcatgttagcatgttggattttggagatccatttaggaagcatgaaatgagatgcaggtatagacaaaaacttcctatgccgtggtctgccatcaccaatcctttgggcacatttgtcatatggatgcttctagggtatagcattgctgctgcatattctcgatatgacaaagttactgaagattgcagaaagatggaagagctaaaaacacaggcagaagctgctgatgttgcaaaatctcagttcctggcaactgtgtcacatgagatcagaacacctatgaatggcgtccttggaatgctggatatgcttttaggaacagatctaactatgacacagaaggattatgctcaaactgctcaaatgtgtggcagagcattgattacactgataaatgatgtccttgatcgagcaaagatcgaggctggaaagttagagcttgaagcggtgccttttgacctgcgttctctcatggatgatgttgtttccttgttttcttcaaagtcacgggagaagtgcattgagcttgcagtatttgtatgtgacaatgttccaaaggttgttattggagatccttggaggtttcgacagatattgacaaatttggtcgggaatgcagtcaaattcacagaacgaggtcatgtatttgtgcgggtctgtttggctgaaaactcaaatgtggaagccaatcaggtcctacatggagccatgaatggcaaaggtggtagagttgagtcaacaactaatggtgccttcaatactttgagtgggtttgaagcagcagacagacgaaatagttggcaatattttaaactgctcctctccgataaggagtcacttttggatgatcttgagggcgaaaattctaatcaaagtgattcaaatcatgtcacactagcaataagtattgaggacacaggtgtcgggataccactgcaagcacaagatcgtgtttttacaccgtttatgcaggctgacagttcaacttcaaggaattatggcggtactggcatcggtttaagcatcagcaagtgtctagctgaacttatgggtgggcagataagtttcactagccatccttctgttggaagcacgttcactttctcagccacactgaagcactcatacaaagatatttcggtcgattcaagtaggagcttgacagaggcactaccaactgcttttaagggaatgaaggccatcttggtagatgggagacctgtacgtagtgctgttacaagatatcacctcaagaggttgggaatacttcttcaagttgtgaacaatatgaatgcagtagtaaaagctttcccaggacaaaatggagcaaccggttctagggaaaaagcatcaattctttttattgagagtgacttctggaggcctgagacagatgttcagttattgaaccatctacgcgagcagaagaacggtcagttgtcggatgggcacaaggtagttcttttggtcacctctgaagccgacaaggacaaatatggatccatatttgatattgtgatgtgtaagcctataagggcaagcacaatcgcttcatctattcaacaactgctcaaagtagagatagccgaaagaaaagataatcaaaaccggccgtcgtttcttcgaagcttgctggttgggaagaatatattggtcgtagacgataataaagtcaacctcagagttgctgcggctgcactcaagaaatatggtgctaatgttagctgtgttgaaagcggcaaggatgctatcagtctacttcaacccccgcatcgcttcgatgcatgttttatggatgttcagatgccagagatggacgggtttgaggcaaccggacaaataaggcaaatggagttgaaagcgaacgaggaaaggaagaacaagttggcttcgattgaaggctcgacaactgccgagtaccatctgcctgttctggcaatgacagccgatgttatccaggcaacttacgaagagtgcataaaatcgggaatggatggatacgtatctaaacccttcgacgaggagcagctataccaagcagtctccagattggtagtgggaacgacggattcggctgtttgatgttcaaaatacgatggacctgacttctcattcatcgaagtgaagcatcaccatcttgcctctgtccagctgactctatatcccttgacaatgggcctctgacatggcctctcacaagactagatgaaaaaagaagatgaaagtgccgtgagttaggtacgtgtcacacatgacatgaagttgctgcggcagcccagaggagtgtaggtagatcaccctgtaactctcttgttctttgatgtttataggctgttgtgtcttctgacaattcattggaaataccacatctcgttgcaatccccctagtttcagaactgccctgcctcgtctcatccacattatccaggaaactgtttccttcagggctagtttgggagtccaaaaaccggaggggattagagggactaaaattccctgcttattcaaaattgaataaggaggggattttagcccgtccaatccccttcggttttgtggctcccaaactagccctaagcgcgaaggaaaacacgggtaaattggctgtaggacttacttgagtattggtatttgctaatggatactaatcaatctcttctaggaatggacgtgagaagctaaaagtgactgctatgtcctgactattatatatacctttctataacccttaacagttatttaaaatagcaacatttgaagggtcaacacgtactaccaacactga

SEQ ID NO: 16807 - DNA, 2481 bp, Zea Mays
tttctgccacggaaatagttaagggtttggactaatgattggatcaagcgaccgagacccgccatggaccttgcacggagcggcggtgccgctgccgcggacgacgggggggagatcgagaggcacgagccggcgcccgaggacatggagtccgaccccgcggcggcgcgcgagaaggagctggagctggagcgggtgcagccgtggcgggagcaggtgaccctgcgcggcgtggtggcggcgctgctgatcggcttcatgtacagcgtgatcgtgatgaagatcgcgctgaccacggggctggtgcccacgctgaacgtctccgcggcgctgatggcgttcctggcgctccgcgggtggacgcgcgtgctggagcgcctcggcgtggcgcaccgccccttcacgcgccaggagaactgcgtcatcgagacctgcgccgtcgcgtgctacaccatcgcgttcggtggtgggttcggctccacgctgctgggcctggacaagaagacgtacgagctggccggggcctcgccggccaacgtcccgggcagctacaaggaccctgggttcggctggatggccgggttcgtcgcggcgatcagcttcgccggcctcctaagcctgatccccctcagaaaggttctggtcattgactacaagctaacttacccaagcgggactgcgaccgctgttcttataaacgggttccacaccaagcaaggagacaagaacgcaaggatgcaagtccgagggttcctcaagtactttgggctcagcttcgtgtggagctttttccagtggttctacacaggcggtgaagtttgcggctttgttcagtttcctacgttcggtctgaaggcctggaagcagacgttcttctttgattttagcctcacgtacgttggtgcggggatgatctgttcgcacctcgtgaacatctccaccctccttggtgccatcctgtcgtgggggatactgtggccactcatcagcaagcagaaaggggagtggtaccctgcgaacatacctgagagtagcatgaaaagcttatacggttacaaggcattcctctgcatagctctgatcatgggagacggtacataccacttctttaaagtcttcggtgtcactgttaagagtctgcatcaacggctgagccgcaaacgtgctaccaacagagtggcaaacggtggagacgaaatggccgcgcttgacgacctacagcgtgacgagatcttcagcgacgggtctttccccgcctgggcagcttacgccgggtacgccgcgctgaccgtcgtctcagcggtcatcatcccgcacatgttccggcaggtcaagtggtactacgtgatcgtggcctacgtcctcgcccctctcctcggcttcgccaactcctacggcacggggctcaccgacatcaacatggcctacaactacggcaagatcgcgctcttcatcttcgcggcctgggccggcagggacaacggcgtcatcgcgggcctcgccggcggcaccctggtgaagcagctggtgatggcgtccgcggacctgatgcacgacttcaagacgggccacctgaccatgacgtcgcccaggtccctgctcgtggcgcagttcatcgggacggccatgggctgcgtcgtcgcgcccctcacgttcctgctcttctacaacgcgttcgacatcgggaaccccaccgggtactggaaggcgccgtacggcctcatctaccgcaacatggcgatcctcggcgtggagggcttctccgtgctgcccaggcactgcctcgcgctctccgctgggttcttcgcgttcgccttcgtcttcagcgtcgcccgggacgtcctgccgcggaagtacgccaggttcgtgcccctgcccatggccatggccgtgccgttcctcgtgggcgggagcttcgcgatcgatatgtgcgtcgggagcctggccgtctttgtctgggagaaggtgaacaggaaggaggccgtgttcatggtgcctgcggttgcgtccggtttgatctgtggagacggcatatggaccttcccgtcttccattctcgctctggccaagatcaagccaccgatttgcatgaagttcactcctggaagctagaaacagtattgacagttcacagaaatggagaatgcgagatacactgaaggcatcaactgtggttggttgaagtgttgaagagcaagtcctctggtcgtcgacatgaagcggagccatatgtcccctgtattatccttgttgtgcatgtgtgggttctccaagggctacagcactcgagattttctatagagttgatcatatgttttgttgtcatgttgggttcaacctatgtttatgttttgggtggaaaaaagatacaactgtacatttttaacagaaattaatgctcattttggttgtgtatttacattctttcaagtttgtggttactgccttgtatagtttgttgtcaacaatggagctgattgg

SEQ ID NO: 16808 - DNA, 103 bp, Zea Mays
aggctttcgacttgatctaggtggcgtctcacagtcagctttctggcgccaaggatagattttagatcctgcgatatttatctcttattttgtaagacttccg

SEQ ID NO: 16809 - DNA, 698 bp, Zea Mays
tcagaatgacattttctctgaagagaaacatcctgtcattcttcgttagcagctctgcaactattttgaagccttttttttgcagatgatgcgaatcaactttgtatagttagtttcgttgatgtacgcctgtaccatgttgtagtaaatgataaagagaataggagtcctcggatcatctgctcgtttgaaccattcagtcatcagccatcgaaaatagctgtctgctatattttttttcgtcagcgacgatctgtcagggtcagggacttttcattgcaacgagtgggacgaacttgtccactgaaaatgatgaggcccgacccgaagggacgcatcaaatccgaatgagcctgtgaagtcaagcactcgaagccttatctgggaaacaaaatgctattcctgatctgacggaagcatccaccaatacagctagtttggtgccagcagcgatgcctccttgttcgtgctcggcaagtcggccggtgtgagcaaaatccgtacgtcatcgtctccagtggtgccattctccgtggctctgcacacggtcggggactcggcggccttgctggatcatttgtgccgccaaacggtaaggaaggaggcaggcgaggatgtcgcaccgtaaattcgagcacccgaggcacggttcccttggcttcctccccaggaagcgatcctctcccgccaccgcggaa

SEQ ID NO: 16810 - DNA, 2830 bp, Zea Mays
ctcccgttccgtccccaaaaccctagggcgccgccgcctctggagcaagctcagggcaaagaccaagatgaaatcgatcctggtttacaccacctgaacaccgcccctcatacttgtcgacggtctacctgatggcagcaggttccggcggtggaggttttctgggcgacgtcaacgacccatggctgaagccgcggctgctccgcgcggtggtcaccgggcgccttccgcagcctggcgccgccgccgagctctcgccgacggaggtcgcctccatcctcgaggtggtacgcactcacggcctactcacggaggatctcccgggccgcggcgcgctggtgaacccgaagctcgccgaggcgtggcgcgccgccgtggacgcctgggttgagcgtgtcgtggcgctggtggagagcgactcgcaatcgtctagctttcaacttgttattgttatttcctgtacttccatgtctgatttatttgtaagattggctaagttttcgaacttaaagaaagagggatcatcctttgctggaagggttgttgaaccagtgctgcggcttttaaatcaaaatggtctagtagctgacgaagcaattgatttgctgaggacagttattaaattgtacccatcctctgtaaaccggcactacaataaagttgaatctgctattgcagcaaagattatgagcaatgtaaaaccatctgagaaatttgcgagaaccttagcattgttaccttctgtccgagtgtccgaggacagttggtcactgatgattcggaggatactgattgtggtaaacaatcttttgaatgatgctttcattgggcttgaagaagaaaagaaaggccatgatattatgctgctgctagttccacctggaactgatcctctaccaacattgggagatgaagtaatgcctggaggcaatgtgcatatcatgaagaaatttcgtgtctttactgttcctaccatttcagctcttacgctttgctgcagcgtgatgctgactagttattatccagttcaggtcaatgttccaattcatgctttgatagctttgatgcgaagagtgctgttagttgatggatcattgcataacaagctgttcccttctacaacttcattgcatcaagagcttatttgttttgatcttccatcgttacattcaactttcttggatttgctgaatgcaactattaaaggcatgcgaagccaactcttacctcatggtgctagtatcatacggcttataacagagtacttcaaaatagcaaagctgcctactttgaggacaaaaacttatagcattttgcagctgttgctgacctccatgggtgttgggacgtctctgcacctgcttgaggcaacagtccgcaatgcagttgctgatctgaatgatgatggtgaaattaacatgactatgatcaacacaaattcatcgcaattgaccaatgaatcatcatcaaaagtttattcgaagaagaggaagcaagaaccacagatgcaaaactcaaccatctcaggttcagagaaagtagcaatcagcccaaggaaaagaaaaggttcttccataccaattacatcaaagggagtggcccctgaaagtacaggagatgttacactatcaactccacattctgtcaaaatagctgcgcttgaaacattggaagttcttctgaatgtgggaggttcattgcggatggatcgctggaggtcagaagtggacatgctcttaattaacgtggctagaagtgcttgcggcatgggagggagttatgagcaaaagccatccacatttggggagccaaacatatcggacttccaacttgcttcgcttaagggcctgctggcatcttttctttcttctcatgcccgtcctccttatttagccaacggaattgaactcttcagaaaagggaagctagagataggcactaaggttgcagagttttgttcacatgctttgcttgctttggatgtccttgtccaccctcgagccctttctctggaaagaacagttcctgcaagctctgggttcaactacactgcacagaaaaaaacagtttttggtgctggtacacaccagatctcaccatttggggaccagcctcaagcaatggaggtcgaagacatgtacgatgactggctaatatccaacaacaatgaaccaccagaggttccagtgaacggtagtgatgctgtggtaagtaaaggtgtgctggtggaggatggaaagcagctcaatcccatagcagaagatccaaaagtcgacccacccagaatcacagacgcagcacaagatgcaccagcatccaccaagactgatgtcaaggtggtcgatgcagctgcagccacagctgccaagccaaacacagcggagaatccttcgagttccaatgctgtcccctctccagtgcgcacaacagattctgattcacgtaagcatgcgtcatttcccgagcaggatagtcctcatgagaacaaaagcgcagccgtccatccaggtgaagcttctgcgactccaggtgttggttcaagccaccaccgccatgaagcacctgaggcccgttcagccagcttcacggaattgtttggttctgagtctggcatcgaatcagagtccgaagacttgatgccagatatcgtcgacggggaccctgactctgactaggtttgccgtcgtcatttgtgacatggcaatggaaattttgtgatgttcctgttttgttttgagcaaattgtacgacattgccggctgacagatgatgcagtatttgattgatagatatagatggagctaaattttgtgatgttcctgttttgttt

SEQ ID NO: 16811 - DNA, 829 bp, Zea Mays
ctgctgaacagctgggctttacagctgcagcccaggtttcccttttttggaaagaagtatcaactcaaattcgcgagtgacgcggtgtttgagaatcagtgcctggtccactttcccacccttatgagattatcaagggaagctggacttgaatatgtggagatccagaatttaaccgagttttatgatgataacagaacacaattcgctccaatgcttggtggttacggtgcaagttttttggatgctcgagggaagcttgttgctcgttcctacgacattttaggcttgtattcagcatttgtgttccagaagcctgatccagaggcaataccaccgattgtaactcccgacttgcctgatcctgataaaggtcacgaagaggagtggctccagccacagcaggcgtcagtggaagatgggagacgctcgcatgcggatgtgcttcccatagaccctgagaaaggcatcctgggtcctggacctgcagacatgaggctttagttgctggacattcaaatgcagctgagcctgggtagtgatttttttttccaccgtgggcattctcccatagtcccatgtggccatgtctcctttatgagtccacgaaaatagcgaacaacactacaaggctcatgaatcctgcacggacgcatgggctttcttgtaaaacaaatgctcgatacgtatgaccttgtacggtctttgatgtgtatatttgactgctcatactcagtaccattttttaattgcctaaattgtctagctgcaagacaacgaaaccagttcagtgtgtcacgaacgcgagagaagtgctgaaagtttgaac

SEQ ID NO: 16812 - DNA, 1572 bp, Zea Mays
atgccaaacaaatagggcctatgtcttaggagaccatgaggggtgaaaacagggatgctcccttcagctggagtagtcaaagttctgtgtgagagtcttaggaagtttccagtcaaagctctagtggtggatccggtcatggtgtccaccagcggtgatactctttcaggaccatctactctcgctacatatagggatgaactattttctatggctgatatagtcactcccaaatgtgaaagaagcatctaagttacttggtgatgtatcattgcatacaatttctgacatgtgcaatgcagctgaatccatttataaacttggtcccaaatatgtgcttgtgaaaggcggggatatgccagattcatcagatgcaattgatgtgttatttgatggtaaggagttcactgagcttcgtggtctgcgtataaagacccgtaacacacatggaactggttgcacattagcttcatgtattgctgctgaattagcaaaaggcgcaacgatgctgcatgctgtccaggctgcgaagaaatttgtggaatctgctctttatcacagcaaagatcttgtgattggaaatggacctcagggcccttttgaccaccacttcgagctcaagtctccatcatacaagatgggatcactgcaaaagttcaatccagatgacctcttcctgtacgcagtgacagactctgggatgaacaagaagtggggtcgttcgataaaagatgccgtgaaagctgccattgaaggtggcgctaccattgtccaactgagacgccgagacacgggagttcttggaagctgccaaggcctgtgtggaaatctgcaagtccagtggagtgccgctactgatcaatgaccgcgtagatgttgctctggcatgcgacgcagatggcgtccacgttggccaatcagacatgccagcatgggaagtacgacggctcctaggacctggaaaaatcatcggcgtctcatgtaaaaccccggcccaggccgagcaggcatggaaggatggcgcagactacatcggctgtggcggtgtcttcccgaccacgacgaaggcaaacaaccctaccttagggttcgagggcttgaggactgtgtgcttagcttcgaagctacctgtggtggccatcggcggcatcaatgctggaaatgcaggctcggtgatggagcttgggctcccaaatctgaaaggtgtggctgtggtctctgctctgtttgaccgggaacgtgtcgcggctgagacaagaaacctcagatccatcctgatgaagaatgcttactcaaggtcttagagcaagttgggatatgccgcctgttcatttactttctttgtttaggcccgaaataagtttgtaatcaatcactttgtcataaggagaaaccaaacaggcgctgcaatcttcaataaaccggagtcattatttctctggaaaagaacaattctgtgacatttccgaagtgtgatacatttcaaaggcactgaactgtgtaataagaaatcaataatgtaccagaactatatttgatgcaagtactaacttggaaataatccacgggctg

SEQ ID NO: 16813 - DNA, 2218 bp, Zea Mays
atggacgatccctcctccgcctccaacaagcacaagcgcaagcgggggcgcaagcccaaggcgtcgccgcccttccccgaccgctcctccccctctccctcggccgcccccgctccggctgggcgtcgtggccgcaagccgcgacgtcacgaggcccccgccgacgcggacgccacgcgtccgccgtccccgccccgccgcggggagccgaagccggtggcaaacggaggcgatgtggtggcagtggcggagtcaggccccgcgagctgggatgaggtggtgagggtagtgccgtgcatggacgctgtggtcaaggtgttctgcgtgcacacggagcccaacttctcgctgccgtggcagcggaagcggcagtacagctccagcagcagcggatttatcatcggcggccgccgtgtcctcaccaatgctcactccgtggagcactatacccaggttaagcttaagaagcgcggctccgacaccaagtaccttgccaccgtcctggccatcggcacagagtgcgacattgcgctcttaactgtcaatgacgatgaattctgggaaggagtttcacctgttgagtttggaacattaccagcccttcaggatgcagttactgttgttggttatccaattggaggagataccatatccgtgacaagtggagtggtctctaggatagaaatactttcatacgttcatggttctacagaacttctaggattgcagatgcagctattaattcaggaaattcaggtggcccagcttttaatgataggggaaaatgtgtcggtatagcttttcagtctcttaaacatgaagatgcggagaacataggttatgtgataccgactccagttattacacatttcattgaggactacaaaaaatctggagaatacacaggctttcctatacttggagttgaatggcagaaaatggagaatccagatctccgcaaagcaatgggaatgaaaccagatcaaaagggtgttcgtgttagaagggtggagcccactgctccagaatctggatgcctacgaccatctgatattattcttagtttcgacggtgttgacattgctaatgatggaacagttcctttcaggcatggtgagcgcattggcttcagttatctggtttctcagaaatatactggagagaaagctcttgttaaagttctgcgtgattcaaaagttcatgaatttaaaataaggttagcaactcacaagcggcttgttgcggctcatgtgaagggcaggccaccgtcatattacatagttgctggctttgtttttgcagctatctctgttccatatcttcgatccgagtatggaaaagattatgaatatgatgcacctgtcaagttgttggtgaaacatttacatgcgatggcggaatcacctgatgaacagctagtggtggtatcacaggtgcttgtatcagatatcaatataggttatgaagaaatagtcaatactcaggtacttgctttcaatggccagcctgttaaaaatttaaagaacttggcgaccatggtggaaaattgcaaggatgaatttttgaagtttgatctggagtatgaccagattgttgtcctcgagacgaaaactgcaaaggctgctacccaggacattctgacgacgcactgtataccttctgcaacgtcggatgaccttaaggcctagtgggaggagaagggagcatgacgcagccctgggcctgagccagggccatcaggtgggccaatagtttgggccacaatttcggctgaattgattagcgcagcgtacgatccgtgatgaagaggaaccccaatgtttatctgtttaagttaaatatcttttgaggggttgtggatgtgagagtgctggctggtgtctaaagctccgccattatagaaggtttgagggactgtcactgtcagataacaataaactggagttgttacagacagagtcatcgtgaaaacgatagtgtctagtaagaagctgagtttgttttttctttacatgatttcattacaactacaccaaattattgacggggaaaggaatcataattggtccgtgatttcattacatccttggtgtctcaagcttgttccgcatagtacctgctatttgtcaacgatacttttacttctgcttgtaaagtatttgcatcttgtttctggacaagtggtacttaaaagatatttaagcgttgtgaaccaaag

SEQ ID NO: 16814 - DNA, 168 bp, Zea Mays
  misc_feature (168)..(168): n is a, c, g, or t
tgtgatttttttcttttttttttttttttttttttgttttgtttttttttttttttttttttttttttttggttttttttttttttttttttttttttttttttttttttttttttttttttttttttttttttttttttttttttttttttttttttttaaaggttn

SEQ ID NO: 16815 - DNA, 1016 bp, Zea Mays
cccaccacaccaaaacccgcatccataaacaagaaaaagaaaagaaaacccccgctgccagcgacagaagaagaaggggtcccttctccttggttgcgttgcgcctccctcctgtctgcgtgcgtgcaatcgacgcagaggcgcgggcgctcgcaccaccacgaccacgacccgatggctttcatgcgctcccgctcaaatgcatcttctggcatgggagttgctcctaacattagggagacattcgtcgagcttcaaatgaagaaggcattccgatatgttatcttcaaaatcgaagagaagcaaaagcaggtggttgtggagaagacaggggctactactgaaagctatgatgactttttggcctctctcccagagaatgactgccgatatgcgctgtatgattttgattttgttactggggagaatgtgcagaaaagcaagattttcttcattgcctggtccccatcgacatcccgcatacgtgctaagatgctgtactccacgtcgaaggaccgcatcaagtacgagcttgacgggttccactacgaaatccaggcgaccgacccatcggaggtggacatcgaggttctccgggagcgggctcactgaagctggttctccttttgaagggacctgtggagggccgtgaaccttcagccagatgcaaattcaattatcaacgatgaagctcccgccgtggtgtttgttaataagttcctgtaagcatatcatttagtcgctatgcatgacactagctgaagcgctatctaagctgtaaacgaagcaagatttgcaaacttgttatattgtggtattgatgatactggattactggctgtgggttgttcgggaatgtctctgcctctctggtctggtgtctggacgtggttgtggcttgctcgggatcgccctggttggtctggtgtctgctgggtctggcccccggacggtcggattgtctgcatctgttagatgtacttgttctaatcaaagcatgttccaagttcctgacc

SEQ ID NO: 16816 - DNA, 2538 bp, Zea Mays
cgctttccgtgcgcatggccgccgcgcgggcgcaaccaccaccgccgtggccggatgtctagaaagcccctcctccccacctgcgggtcctccacccctcccccgctcctcctcctccgccgcttcctccctcgccgccgcgcgacctcctctcccccgccgccctccacccggcggaggaccgccgccatgccaccccgcgccggcgactccgccgcggcggcggctgcggcggcatccttccgtctcgggatggtgcgggtggtctctttccttgtaggcgggctcaacctcgcggtgctgctgctcggactctacattatcgacgccgtgctcccgtcggggtgcggcggggggctcgctttcgcctcggcgcccgctctggctggggtccgcgtgctctccatgatcggcgccgcgcgcgcgcagcacgccacggcggacgccatagctaagcgccacctccacgagagcgacgcatctgtcgcagctgatgccgtagctcgccacgagattagggtgaggtacaaacgctggttgtggtggaccagatttggtatggcagttggtgcattgcagttggttgcagcaatttatctcatgtttgtcattgtaagagatctctcaaatgaaagaagatccacttcctgcttctttggataaagctgatcgggtgtcagtacgagcacttattgctttatttcttatcctttcatgggttgtgatcattgtccaatgcttcacgggttctgatatattgaggtggcgatcattttatgcaacacatgatatggcatggaaagctcattacagggaagtgttcgaccatggaatccgagaagctttgtgctgcctaggacgtgcaaaatatctaactgtattggaagaagatgaggtttattctgttgcaagactccttggtgatttggttgcatatcgtgcttctgggacaggacatttggagctcttagcagggcttgctctattgcagaagcacgggaatttatctgaattgcagactgaccttgtggaggcatcccatgagcttatgcaagaagctgctttcctccatccatttgcggaagcatgttatacgggaccacttcttgattttggacgaaatcctatcctgtttccctgtgcatgggtttatagacaaggtgtgttaactccatgggcacgcagaagacgccctgcacttgatggtgataattggtggcgaggccatgctgcagctttccttagatttgttaatataccacctaaagcacttctgaaaggacgtgtttgccagagcaagcgtgaagctgcttattttgttgtggttctccatgacaaaagaactgttgtcattggggttcgtggaacagagacaccagaggatctcataactgatggattatgcagagaatgtgcttttactatggaagatttggatggactatagtgaacaattacctgcaactacaagagagagagttatttcaacatttccacactatggtcatggtggaattgtagagtctgccagggagcttttcatgcaactaaatggagaaaacacatcttctggaagacttgggttcctttccacactgctgggggagggcagtgagtgtcatggatataaagttcgtcttgttgggcattctttaggaggcgctgttgctacagtcctaggaatgatgctatatggcaaatacccaagcgtgcatgtatatgcatatggaccacttccttgtgtggactttgtaatagcggaagcatgttcgcattttgtcacaaccattatttgcaatgatgaattttcctctcgcctttcaatcaattcgattcttaggctacgatctgctgcaataagtgctctttcagataactctccagctgatacagcaatgatacaaaagctcgctcgaagaattttgcatgtgaacaggtatcatgataatggtcctgacgatggcataatccagggctatgctgatcatacaagaacagcagatacaacagtaccgaatgaaagacaaatttctcatcagattccattatgcaatactgaactagacctccacaatacgcaaaatggcttttttaggtataatgggtccagtgcatcaatagatgagcatctgagctatgaaggcataagcagtggccatgatatgcaaataattccacttgatggggctgattctggttttgaagggcaccagacatcttacagagaaataccagtggagcctcctgagatgtttcttgcaggcttaattgttcacatagtgcggcaaagaagaagtctctttcctctttggaaatgctggagcatccaggaaactgaaccaccatacaaagctgttttagcgaaaagggagaacttcagggatatagtggttactccttacatgtttacagatcacttaccatggagatgttcgtgcttctactatacctgcctcacgattagaacagtccttgatggagtccttatcttcttcaattgtgccttcttcagtggaatggcagcatgcaatggacgag

SEQ ID NO: 16817 - DNA, 708 bp, Zea Mays
caccattctgggttcagatagtagttaatttgacaaagtatataaaagggataatgaatcaacttggccttgttgttcgagaagatgctgttggtaacatatttggccgctgggagggttccgagcctggactaggagcagttgcaactggatctcatgttgatgccattccattctcaggcaaatttgatggtgttgttggagttctgggtgctcttgaggcaattagtttgctgaaaaggtctgctttcctgccaaaaagatctttggaggttattatgtttacatcagaggagcctacacgatttggaattagctgcttgggaagaatctgctggctataagttgaatctagaggacctgcatagcgtatttttaaagacagacaaatactctgcttttatagaactgcacattgagcagggtcccatcttagaaaaggagggtatccctattggcattgttactgcaattgctgctcctgcaagtcttaaggtggactttgaagggaatggcggtcatgctggagcagtgctgatgcctgcaagaaatgatgctggactggcagcagctgaattagcattagcagtcgagaaacatgtcctggaatcaggatcaattgatacggttggcaccgttgatgatgaagctgctgcaactacaagtgatgaaggcgtgggcagcataaatgagatgggcttagatatt

SEQ ID NO: 16818 - DNA, 2215 bp, Zea Mays
gtacactggccgcggcaggggagcaggcgcgcagcggagctgcacaaggtggacgccatcccagtcctacgactacgaggcgcccccgctctcggaattttcagcgggtcgcgtcgcgttctgtgcggggtgtcgcagtgccgaggtataaatggcggtcagtccctgcggccgcagcagcaactgaatcatccgaggaaggagggtggagggaggagggattttgccgatcacggcctgcagtcaatttgtcagtttattgagacatccaacttgcatgagttgatcaacaagcccatccctggttccttatggaggcatcatcttccttgcgcttccaagtttctcgttttagttcgttcaagatatggctatgcctttttctggtactcgttcttcagaactgcagcccagcactttcagattcaccatatttggtcggtatggggagctatgacataacagggccagcagcagacgttaacatgatgggatatgcaaatgctgagcagattgcatcaggaattcactttaggctaaaggctcgtgcctttatcgttgctgagcctaacggcaagcgtgtcgtgtttgtaaatcttgatgcttgcatggcatcacagcttgttactataaaggtgcttgaaagacttaaagcaaggtatggagatctttataatgagaataatgtggctatcagtggaatccatacgcatgctggtcctggtggttatctgcagtatgtagtttatattgttacatcacttgggtttgttcgccaatcatttgatgtgattgtcaatggaattgagcaatgcattgttgaagctcacaacaatctccaccctgggaaaatctatgtgaacaaaggtgacctccttgatgccagtgtgaatcgcagcccaagtgcatatctaaataaccccgctgaagagagaggcaagtataagtacaatgttgataaagaaatgaccctcatcaagtttgtagatgatgagtctggtccgattgggagtttcaattggtttgcaactcatggaacatctatgagtcgtacaaattctttgataagtggtgataacaaaggagcagccgcacgtttcatggaagattgggcagaacaaaatggcattccaaaacaggcagctcatgtaaatcacgatggtttggaatcttcacacatgacctctcgacttccgagaagagtctccccaataattcctgaaccaaatgagataactgatgacttagtacaattggcgtcatcctacgaagcctcaggtggacggcgattatcaagttcaagtatcaccaagcgtatcagaagtacccaacaaaacagacctaaatttgtttctgcattctgccagtcaaattgtggtgatgttagtccaaatgtcctgggaactttctgtatagacactggccttccttgtgacttcaatcacagcacatgcaatgggaagaatgaattatgctatggacgagggccaggatatcctgatgaatttgaaagtacccatatcattggcaataggcaatttcaaaaggctgtagatctttttagttcagcttctgaagaaatacaaggcaaaattgactacaggcatacttacctagatttctcaaaacttgaagtgaatgtccgtacaagtacaggaagtcagcaagttgtgaaaacatgcccagcagccatggggtttgcctttgctgctggaaccacagatggtcctggagcttttgactttaaacaaggagatgtcaagggaaaccctttctggagattagtaagaaacttacttaagacaccagggaaggagcaagtcgaatgtcaagcaccaaaacctatcttgctagacactggtgaaatgaaggaaccatatgattgggcgcctgcaattcttccaattcagatcataagaatcggccagctggctatcttgtgtgtccctggagaattcacaacaatggctggcaggaggctacgtgatgccgtcaaagctgtacttacaagtgacaacagtggtgaatttaataacattcatgttgttcttgcggggctaacaaatacatattcgcagtatattacaacttttgaagaatatgagatccaaagatacgagacccctgggtgcattattgcaagctgttttaaccgccgcggaccccttatatttagcgtcacaaagggacaattctacatttttttcatctttgg

SEQ ID NO: 16819 - DNA, 2836 bp, Zea Mays
aatagaattgttaaaaatagcactacacaaaaatctaagtacaagattcaacattcagaaaaaaaaacctcatgctcagtcactccccgtctcacaaaacgccgcccttggatgagccaatcttcctctcgcacggcccactccttacccccgtctcacaaaacgccgccgccgccgtcgacagccaactccccgcgcccccaccgcctccgcgcaccgccccacacctgattgcgcgtccagaggtattcagagctctctgctgtgggagcaacgagggcagggatgagggaggtggtgacggtgcaggtcggcggtttcgcgaacttcgtcggctcccacttttggaacttccaggatgagctgctcgggctcgccgacgaccccggcgccgacccggtattcaggaccgccgcgctcgacatggacgtcctgtaccgcgccggcgagacacaccagagcgtcgccagctactgccctcgcttggtatcagtcggttctcgagggtctcttggctcgttaagttcctctggcactctaggttcgagcagtgcagctgcagatgagcccaacatcttcacatggtctggaaaggtaacaaaatcagtagcaaaacctcatgagcgaaacttgttcctacaaagtttatctgaagaagaacagaacccaagctctagcgatggccaaaacaatgctagtgttgaagataaggacctggtcgcaaatctggagaatggagtcaaattttggactgattattcaaaagttcagtatcaccctcagagcttatatgagttgtatggatcatggacagactttgacaggtttgataactatggaactgcaaaggaggtggtttcagaatggtcccaaatggaggaaatgaatgagaggctaaggttctttgttgaagaatgtgaccatatccagggtatccagtttcttgtggatgattctggaggctttgccagtgtagctgcacagtttttggagagtattgttgatgattacacaaatacccctgtaatgctgtattgtgtgcggaatccagactcctatgggtcttccagaaatcagtgtgaaaccatcataagatctttgcatgatgctgtatcgttgtcgaaactttcatactactgcaatctgatggtaccaataggactgccttctttaagttacttgtcacctttgctttctataaaagatgagaagcacttccactccagtgccatttgtgcagcagcaatgcattcattatctattccattcaggctacaacacgtgggcccggcctcagattcagcgcattcatctggtaagcttgatattggtgagcttgtgcacatattatctgatcaagggaggcagaacatgatcactgcgctggatgtagcaatgcctgccccttctttgacagatagaacagatttgaggaacatacagaggagcttgcattctctgacacctgaaatcagcgacgaggatgaagatccttacgctgttgaatccatggtggttcatggagtcctagatgcaggcgggaaaagggcttccatatctcaggtgaaggaatccatctgttcagcactggaaggcagggcgacgaaacccaagttctcccacctctcggtatcgcggtgccccctcccaatcccgctcccgttcccgtcaatcttcagcagcagtgttggccagcagggcgagatcctcggcaccagccacgcaggagcccggccaaagggtccgcttgccgtcggctcggtgccgatggcagcgcgcctgaggtcgagcagcgccatagcgccattcatcgagaggaggtcggcgagcctccagaggctcggtgtcgccaggggcacgctgggctcgcaggtcctccacgactggggcttcgggagggaggaggtcgaggacatggctgagcacctggcgaagatgttgcgcccgttttacccggaaatggacctgacgtcggattctgatgattaggtttcactgtcattgtgtctcgtattaccggatggtaagcagctgggttttagtctgtgggaactagaaattgtgatgcagatgcagctggcgtgagacgccgtgctgcgatgcattcctctggtctgtgttgaagggatgcagagtactggaaacgagatctgagagagcctgggcgtgtgaccgtgtcattcagcgctccgcatgtgatgcacatgcatttgggcgacgacgcggacgtccgccgccatgggcagttgttgttgtggtaacattgtgcaatgatccagccctgatgcagatgtccagatctgtgctgtacttacctgcaaaccacacagctaatgaaactaaagaacagtctttctggtctgagatgttttctttgttcgttttaacttcgcgagcaccagaactgtaaacctggcattttttctagtatgaaaaaatagcattatttggctcgacaaaccgcattgttcagttggatcttcatatcatcacagccagaacaagagggcaaatgcagcattcttgcatgtgttggggttccctgaaattttgtatggtagtgtcaccgtaattgatctctggaatatgtaatgtaaccccctctgttgtcgtgtgcatgaatttcttcagtctgtgcatcgctcgcacgcatgcacatggtcgcaactcgcaacattctgcgatctgatgttccagacaagctcaagatccagatcagatacccaaccaggccaccttttccaatttatttcctggggacaaaaagagaaaaggcttgtactgtatcactgttcttctcatatagtacaatgtatcggtatggtctcaatggacg

SEQ ID NO: 16820 - DNA, 1232 bp, Zea Mays
atcaccttcatattccaacttgcccgtgcccgtttactttatttcggacatagagagtttagttgtcgcaccaatatccaaggcatctgcaagacaacgagcaggcagagctggaagggtgcgacctgggaagtgctttaggatctatacagaggaatattatcttactgaaatgcagtcagaaggaattccagaaatgcaaaggtccaacctggtctcctgcataatacagttaaaagccctaggcatagacaacatcctgggctttgattggccagcttctccatctccagaggcaatgattcgggctcttgaagttctattctccctaggtatcctcgatgaagatgccaaattaacagtacccattggcttccaagttgctgagatccctctggaccccatgatttcgaaaatgatcttgtcagcgaatgattttggatgctctgatgagatattgaccatagcatcatttctgtctgttcaatctgtatgggtttctgtgaggggagtgaagaaggaatttgatgaagcaaagcttcgatttgctgctgctgagggagatcatgtaacattcctgaatatctacaaaggatttcaccagtctggaaaatctagccaatggtgttacaagaactttttgaattaccaagcactggcagttagaaaggccattattgctggttcatttactaatgcatgtcatctggaggaatacagccaaaacggaatgtataaaacaattaggacattacaagaagtttatattcatccatcttcagttctctttagggtcaatccaaagtgggttgtctaccagtctctcgtctcaactgacaagcattatatgcggaacgttattgccattgagccatcatggcttacggaagctgcaccacatttttatcagttccgagcattcaatcctgctccccactaacattactgtggactgcacgtcgttttgtaattttagagaacttaactttcctagggccacaattttgttgaagaaaaggattgccaatatttgtatatgctaagcacttgtggcattattctattccagtgatgatgggacggccaaaatcacacttgtcggtttatcccaaaatcacagtagcgagaaatctgtaacttgtacaacctcttgaatttgcccacattttgttcttgtcagtttatgggaggatgcagtttattggactatatagatgagttgtctctttttt

SEQ ID NO: 16821 - DNA, 2239 bp, Zea Mays
ctgcctaggttcaccccgattcaactccgacttcgcgagtcgtgtctcacctctatcgccatccgttccctactccacttcaatctgctattcctgctccactccgcttcaatccgccgcccctgctccagtaggaacgttccccaccccggcaaccccccacgctagctactccggagcaccggaacgcaccgtcgcccccgtcaagcaggttgcgccgcccgcccgtggtgccggcgctgtgctggaggcggtggagctggggccgtggggaagcttctcgctggggagagccgggacaagctagagcgacggacatgggtcaccagtaagccacggtcaggggcatttcagtcctacctagcagtggtgatggcaaaaatctaacataatgattgaagtgttatctgaataggaatgctctggtggatttgcagcaagaaaaaccttggaatgaatgtacaagccacttagggtgctgtattagagctgtaacaggatgggttcgttatgctgcgtggcggcacggcctcatggggctagcacagcaagccgggagtggtcctctattagccgtagcgacccaccctggcgtactggtgctggcttctccccacctctgtctagagggtgggagtacaggatcaactcggaagggctgtcttatggatcccatggtgatagtggggtcgctgtgaactatggatcatcactatcatcaaatagtaaaggggctagtaggagctgggagaggaatgagcttccacaagatcaccgctactctacatctgagggtgccatttcgtatctcaacagcccagatatcagcttccagaatcaccatattatgctaccgatgctgcaagattctagtgttgatgaatacatgagagtttcagtcgctgagcctattggttctttattattgtcagagggaatgtcaggtcaacataatagtggtggttccacctcctcttgctctgatggaagcgaatatgatattgtacctaaatcatacacatcaacgccccgcaacttcccaagtcgtcgatcattcctgtcgaagccaatccaccctgtttcatttccagaacatgcactagaagcacaggaaactcgaagtcatgttgcaagcgcaagctccaacaatcctctgtgctctgaatacaagggaacaggagaactttgcttcccggactacggtagcggccgtcacggggagtcaggaaattggagtgctgcaagcagcatggatcttactgatctatcagaacaacccgaagctggacaagctggactactgcgtcctaacaatgcaatgcagaaaacaaggtgcgacctctgcgagaggcttctgacaaagaggtcaccttgtggttctcgtagaatcgtacgcaccggagatttgcctgttgctggtgttctaccatgctcccatgtctaccatgccgagtgtctagagcggaccacacccaaggggcagaagcacgaccctccttgccccgtgtgcgacaagctggctggtaaagataccgagcagtggtcaatctgcaggttgaaaaatgggttcccaaggttccgctcgctaggggaagggccttctcgggttttcagctgcgctgatgctggagattgcgttgctggggccgttcagattccaagatcaaatagcatcgggctattgactcgcagtggtcacaagaggcatgcatcttcgaagggagagcccagcaaagactcggctgagacatcaagaaatgcttgcatgtaacttcctaatgcactcagtaggtcttatgtccatgaccttgcattgttatagttgcaaggtcttatgtccatgacctcgcattgttatagttgcaaggttatgtatgcatgcttacggatgttttcatggcttaatggcgccgctaggaaatgacatagatatgcctgtttatctcctatcatccctggtttgatgacaaggggataggagaggagaggaaatcccttgctattcaaaaaattttcttcaccatggatcccctctaattctcttgtcgccaaactagctctcggttatcaggttgccacttgtgcataatgttgttcagttgtattgtgctggaaatcgcaagtaaactgctcatccagttctatgaaactaccgcaattacctggcccctacagtctacggccctacattgtaacactgtatggttgtaacgctgtcaatattgagacgagatttgac

SEQ ID NO: 16822 - DNA, 1599 bp, Zea Mays
gagaacagaagcataaggctagctaactgatctaactttataaatttatccccagaagtctgtaccaagtatatcagtgattggactgaatggagttctgctgtggaatcatgatggatatatcaactctgaaaatctgaaagaaagcattgagaaagcgtgggctgctcttcatctacaggagacagcagcgaccttgttgacagcatcacttgctacaagaaattctgaacctgtgaattctgctactactgttttgccagctcaagggggctcttctactttagaaaatccttctgatttatccagtcaatcaccagatgtttctggtgccagtgaagttgctcattcaactgatctggtatcacaaattcctaatagcactgccctttatgaacctcttgagataaatgaaaaagaagggtcaaaatcaaactcggatgataaaactgttgagaagctagattcgaagggagaagacattacaccatcagcaaaaagaaagaacaaagatgatggaagtcacacttctattcccttggaggatactcctagtacactcactaataaaggagtttcttcccagtcacgcgtggaacaagacaaggcaacttcttttgtttctgtgaagtcagatgatattcagcttagtattcgtatgcccagtggaaatagactggagatcaaactaacaaaacaagatgttttaaggaaagtgaagaatttcgtggatgaaaaccaaggcaatgggcttggctcatatgacctttctctggtttatcctaaaagagttttctttgaacaagatatggaagcaacactatccgagctgggtattcaaaaccgtcatgcaatgattgttgttccacatcggcagtctggtcaggtatcaaggcgtcactcctcggcatcttatgatatgggtgtcaattcaggtgcggatgatgttggtggcaattcaggtgcggggggatactttggttacctgagaaccgtcctgtcttatgtgaatccactctcctacctgaggggaaataccaactcatcaaatacagagctacagtcaaatgaaggcctgcggcagcttagacatggatctggtccatggagtgagccacggcctcttggcaataggggccatgaagtgactgatgcagactctgcaaacacgctgcgaaggcggcctagaccatttggtgccaatatccacactctggggagcgaggatcatggtccgtctgatgaaagaaatgttttctggaacgggaactcgacagagtttggaggcgacgacagaaaataggttgtggcgtggctggcagggcctgggacgacactatcagacagaatcaaagttgcgaatagacagctgaaacaaatgcctcgacaggcttattgaggaataagtattgagattatagtgctgaaataatcgctgaattgtgatgtttacatttgtggaaacatacggtcgctggatccgtatactcgttgtatagtacatagccacagatatattaaatccgaactgcttggttctactgtctgatcgaacgacatttgttttggcgttggctacgaagaaaatttgccgctacc

SEQ ID NO: 16823 - DNA, 755 bp, Zea Mays
caaaaaaaagaaagagaaagaaaaggatccaagacctgaccagactcgacgacggcctggctaggtgtgtgcaccatactttacagtaatggccgataaggttacttctggcccagcccacaccagccctgcagcccatcttagatgtgcgctgtggctccaactgcgagcccttttatcccttatccaacctgatccaccacaccaccattcccgagcacactagtctctcttccctgcgcttgctcgctccttcttgcccccatggcgctgctcgccgtccagggcatggccatgtccaccgccgccgcggccctcccatctcacaaccacggcgccgtctcatcctacgtctccacctcctcctacgcgctcgcagcctccgccgccttcccccgcgcccgggctgcgttcgccgtcggcgccgtcttgtcggccaccgtcactccagttcttgacgtctactgcgggagaggggacaagaaaacgaaaaggggcaaaaggttcaaccattcatatggcaatgcgaggccgcgcaacaagaagaagggaactgggcctgcgcggctctttgcccctcctgctcctccaaggaaggatcagttcgatgatggggagatcatttcaatcgagattgacgaggacatcctggaatagctgctgagttctttactctcttcaaaatgaaactgtgtcgaaataagttttttttagaagatattaaatgattcatctagtggtaacggagagattac

SEQ ID NO: 16824 - DNA, 730 bp, Zea Mays
gtatttaaccatatggctcctttgagttctcgaaatgcttctataggaagtccgggtgagattcgagggttttggggcggatgaggatgagtgggtgaatgtcaagaagttcatccgccagcgttccattcctctggagtcctcacagtgcaaaagcgttgttgaaggtgaccttgttctctgcttcagggagggaaacgaggaggcattgcatttcgatgcacatgttcttgaggttcagcggaagcagcatgatattagggggtgcagatgtgtattccttgttgaatacgatcatgaccaaagccaggagagggttagcctgagaagattgtcccggcggccaaagtacttttgaaggctgctcctgttagcctgatgggcatatctattctggaactggaactaaccggagcgtgaaacttaggtgaagttagtttgtggcgtccttggtcatgtgtgtattagcaaccggcggcagcaagcatgggcttgcatctcaacccctttggcacaggactggctgactgaattttataaactcgttatcgtgcagaagagggaagagtacgcggcttgagcacttagggtgtcacttaggatgtgtttggttcgtgaagtcaccttatgcttcatgaggtgtatcatgaattcatcctataattttttgtggcatcaacctattcctcgtttatatattaattattagtttatgagttagtaatgaatc

SEQ ID NO: 16825 - DNA, 815 bp, Zea Mays
ctttgcttcacctcttcactttttcagcctacctgtgattctgaaacaggtttgccaatcgctaagctctgcttatgttgatgaccaagggatgaattggttcttgaggaagaggttgtgaggaaaacacaatcctttgacaagttgaaacaagaagctgagaagtgcttgcaacaaagtgaaagatttaacaatgagaaagctgagttcgaacaagccgccttttcaaagtttgtggccgtgttgaattcgaagaaggccaagctcagacaactcagagataaagttgtggagctcgaacccgctgtcaagcctccaaaggaggaggcaggtcaggagcaggaggaggaggaggagaactcaacggaccggacagagctcttcgagggagagaatgacaaagaagcaagcgccaaggatgaacactccggcgagacaggcagcggcaacgttcctagttctcctggggaatcggcagctacctccagaggaagaggacgagggagaggtcgtaagaaggcaagaagataggctgcctagactgacaatagcaggtcctactcggaaattcgctaatcgtcgtggtgcgtctttagccggctagtctcatttccaagagcacgtgtctttcatgtacctttgtgttcgcgtgctgttggcaggcagagtattgcctgtgaaactgattgtccgtctgcttcgtctcatcagtggaaaatattttccatttcatcacatgtgtcagtcatgtgacatgcttttcacctgcgcgtggaaaaaaaacgaatgaaaaaaggggggaggaatgtttgacc

SEQ ID NO: 16826 - DNA, 1623 bp, Zea Mays
tcaccggccaaatgtcttcttgctacggtagcaggtgatatggtactcatattgtttgatacggtgtccatgaaaatggttcgtagatttgaaggacatacagaccgtatcactgatttgtgcttcagtgaggatggaaaatggctcatctcgtctagcatggatgggactcttaggatttgggacatcagtttagcaaggcagatagatgcaatgcatgttgatgtatctataacatctatctctatgtctcctaatatggatgtgttggcaaccactcatgttgatcaaaatggtgtctacctctgggttaatcaatctttattctcggtctcaacaaatactgaaaattatgccagtggtaaacatgtacggaatgtgtgtttgccagctgtttcatcaacagagagatctgaggaagaacaagttcagaatttaggagagtcatataagtccagtattaaaccttttgtcataacggatcatcaaataccgaatctagttaccctctccttacttccaaagagtcaatggcaaagtttgactaatcttgacattataaaggttcgcaataaaccaattgagccacctaagaaacctgagaaggcaccattcttcttgccttcagttccatccctttctggggagatattgtttgagcctcctgccagctcaaaagatacagacatcagtaccacgaagaatacaaatcataagatgtctgaactctcctctcatttcagtcagcagttgcaattttgtggtgaaacaaagaactattcggcttttactgactacctaaaaggcctgtcaccgtcgtctttagatatggaactgcgaatgctacaaatattagatgatgaagagtctgaagatctggagcaaagacctgagcttcagtccatttcttcgctgttggattatttcattcatgaactttccttcaggaataactttgagtttgtccaggctgttctgaaattgtttttgaagatacatggtgaaacaatacgacggcactcaatgcttcagagtaaggtgaagaagcttcttgaggtccagagcttagtttggcagaagattgataagatctttcagggtgcacgatgcatggttacattcctcagtaactcacaattttagtagcaggccggagttccacataccagggcatacatggtgcctaatgcctgcacgagtgtggccattggattgagcaagtggatatagttgattttttttggagacggcattaaaatggatctggttctcaaacatggcatgactaggcattggagcattgttgagcagcagccatggctatattactctaggcttacaattttgctgtagctgttagtctgttacacagcaaggagtccacttggtaaacatttgtagctaccaaaacagccccatctcatggtgtaacaattttgtagttttacatttgtgtcatctttttgtaacaaactgatgtatcaaacaccgtattgcaagaaatactaaggcttgccattgctatttgaacaaaaaaccatatctgtatattcaacaagcttagcttctgtgttggtcttatattgtggaggataccaggtgaaaatatccaaatgtacctaa

SEQ ID NO: 16827 - DNA, 181 bp, Zea Mays
gtaatctcagattggagtggattgatgtggtatgtgatgtattgaagtgtaatataaattaatttttatttcaatctccttcaatacaccttaatccacttcaatccctctttacccaaataaagcctgcaggttgaaggtcaccttgcatcacacgtactcgtacgttgcactcgtgcag

SEQ ID NO: 16828 - DNA, 962 bp, Zea Mays
ttgttcagacttcagatccgtgtggcacatcatatagagaaaacatgcagggagagagttgttacaaataagggagactgaattggatgattgtattgagattcaatgtgactacatataagtacatgacaaaaccctagactaggagattacactactacccttggcttttataccttaacaagaattatgtctgtattgcattgagccatcatagttgcaagcggaagaaccatttaccttctgaagtatttgctgttgcatttgctgtcctggcagctggggctataattctgaccttgaatgttctgcttctgggtggacacatcatcttcttccaaagccttagtcttcttggttattgcctgtttccactggacgttggtgctctactttgcatgctgaaggacaacgtgatacttaagattgtcgtggtgacaatcacattggcatggagctcctgggctgcctatccattcatgagtgctgctgttaacccaaggagaaaagctctggccctatatcctgtcttcctcatgtatatctcagttggtttcctcataattgccattgattaacgggggggcaagcttcctagtaacatctgaatagttgtgactttcctcgtggatggttgaaccaccagaaaacatacaagtttgagtagacaatgcttctaccctgtagtctgaatcgtctcgtggggatttcggtctttacatgatccggaggcttaaggttgtaaaattagttgaaaatctatacctgttgtaaagggctgaacttttgaccactgaattgactgccaagcttcttatactgtgtgagagaaaatactgtgttaaatgaggtgttgagaggtgcatcgtgtgttaaagggctgaacttttgaccactaagtgctagtttgggaacctcaattttttaagggatttctatttttccataagaaaataaactaa

SEQ ID NO: 16829 - DNA, 1102 bp, Zea Mays
ctacctccatactagcaagactcaatcggcgaaatcctgggcgtgcctgccaatgagcaagaagaggaagcatctggatccagcgaactcgttgaaagacagcgaacaagtagtcgcctcagatttcataagaggagacgatcttgatgacctattatcgaagcttatcaggagtgtggagattgccaaggcttcaaggggaggcttaccagaaaagatatggatgaagcaacaatttgctatcggcgtcaatgatgtcacaagggttcttgagcgaatgccgcattctgtcactgctcatcctgctcaaatgtctaatgaagcaccaactgtctcaggccgacgtcaagctcctttggtgccattgcaggctgtccttgtagctgccgactgcaatcccaaatggttaacaaaacacataccaacactagcgtctacaaggcaggtaccggtattgtgcgtgaaggacaacaagggaggctcagtaaggttaggccatgtggtgaatgtcagaacagcccttgccattggagtaaaggccaaagatagcgttctcaacaagaccattgatgagttcctgaaagacagtaaactggttgccaatgaaccataaagtaaccccaagtctagtgacacgtttgtactaaaaagcctgtacttccgggcatgcaacatcccaggatcatctcataaatgggtttaagtttgagaagggggtcaagtatcttgagcagattgtggcaatatcaatttggagggacttcttgagagaacagtcatgggaaataggacagactatttgtttggtccgtgcaatattgtttgactggtgaacctagttatccattgtgatctagaacttgtatcaaactccaatgtaacgagatgttaggatccttgtttattgggtacagttttttcttcttctcgaggctcgacaccggtacattaatttttcttgttttttatattctatagtatatataataatgtgaaaaggcttatattgtgatggttaagtctttcgagtagcatcgacgaatttttagcttgattaaaaaatcatctcgttatgccttgccagctcccggattatgtcctg

SEQ ID NO: 16830 - DNA, 948 bp, Zea Mays
tgcagattcactattttaactctcgtggcaacgaaatgacacgttagttcataaaaccaaatacgctaactttttctgatcggcatccaacgacgcaattgacatcccctcgcctaccccagctctacccgcgacgaagcatcaccaggaaggatgacgtgctcaatggatctcccggccaagggcgggttcagcttcgacctgtgccgccgcaacagtatgctggagaagaacgggctcaaactcccgggattcaggaagaccggaacaaccatcgtcggcctcgtctttcaggatggggttgttcttggggcagacacaagagcaactgaggggcctatagttgctgataagaattgtgagaagatccactttatggcgccaaacatttattgttgtggagcaggaactgctgctgacactgaggctgttacagacatggtcagctcgcagctacagctgcaccgttacgcaacgggtcgcgaatctagagtcgtaactgctcttacactgctgaagtcacatctctttaggtatcaaggccatgtcagtgctgcccttgttcttggtggagtggattgtactggaccgcatcttcacactgtttatccacacggctccactgatactcttccttttgccacgatgggttctggatcccttgctgcaatgtcagtgtttgaatcgaagtataaagagggcctcactagggaagagggaatacaactggtgtcagaagcaatatgtgcaggtatcttcaatgacttgggtagtggaagcaatgtggatgtctgcgtgataaccaaggggaagacagaatacttgagaaaccaccagttgccgaatcccagaacttatgttagttcaaagggatatagcttcaccaaggggcagactgaggtgttgtccgcaaagatcacacatctcaagcagaagacggcagcctag

SEQ ID NO: 16831 - DNA, 666 bp, Zea Mays
ttccctctcatcacagttggttaatcatcgccatatgcggggtcctgtgagagcgcatcaaagaggagagagaagtgaatgtgaggaccgctgctcggtactatttctgggcgagcagcgtggtgcctggggcaacgacgtaaccagatgaagtctctgcagtgccaaatcgggtggggcgtcggggccctttttctccagtcttgcggtcgccgggtccttgtgctaggatggccgagtgcagggcgtgttggggaaatcatgggagaaggagaaagtcgttggggtcgtgcaagcgttgatggtggcgtggtgttcctggagagtgaccatgatgcctcatcagattgcgtcgcatgtcttctgcgtctagtcgagcaaaaagggaatggctggtgagcatgcagttcttcgccaaagcagacgcatcaacactgaaccgctgctcgtcgcgagcagcgctgttggcgcccatgcttttggtaagacacccatctcgagtacatgttggctctcgcactcttttacgttcacctacgataggagatatggacccaacgaccgagcatgtgctccggcaatggcggccaccgcggtggtctctcatgccaccgtatttgatgtctataggaggaagatgtggcctggaccgttgattggtgtttg

SEQ ID NO: 16832 - DNA, 1011 bp, Zea Mays
catgcaagatgaaactatcacctttaccatggtccatgggttacaaatggtttgttcaacctggtgtgagaacgagcaacttgctgagagtgtgttgaagggaaaaccatcaaagcccaaatatgggatactgctgggcaagagaggtaccgtgcaatcacaagtgcgtactacagaggagctgtgggtgcacttctagtctacgacatcacgaagaagcagacattcgaaaacatacagaggtggcttcgtgagctccgcgaccacgccgactccaacattgtgatcatgatggttggtaacaagtccgacctgaaccacctgaggtcggttgcagaggaagacgggcaggcattggcagagaaggaaggcctatccttcctcgagacatccgccctcgaagcgctcaatgtcgagaaggcgttccagaccgtcctctctgatattcaccaaatcataagcaagaaggcacttgcagcccaagaggcagcaggcagtgggcctccaggtcaaggaaccaccatcaacatcgcagacccatctgccaacacgaagagagggtgctgctcttcataagtaggtgcaaacaaagacatgctgctgcttctgcgaaaagaaaaccccccggtggatcatacaacacttttgttatgtagttgaccccttttggcctgtaactctggtgggttgtaatcacaattcatactcctgcaaagaaattctcctctcgggtagatacgatgtgtagtttcgagattttggtagaggccaatgtttggctggcagacttcgggtggagtccagcctcgtgttttctttcaatgttcttctacctcggtagtcttctgctggaaaaaaaaacatgatcagatacgttcttgtatttctacctgagtttgttgtattgtctccggtatattatatatacactaaaaactttgattcctgtgctacaacatgtatccgtgttgcttgtttgcgtcatggccgatgattgatttgagtctgtgg

SEQ ID NO: 16833 - DNA, 4069 bp, Zea Mays
ctggcatgtggcgcctttcgacgcgcagtttgcacgacacgcccgcacacctagcagtccagtcgtcgcatcctctccgggctccgggctccggacttccgtttccgctgccttctccggttctcccctcaccccactagcccccctgctccgtttctctccccgcccacagctcgaacgccaccaccttcattgtccgcgcgcccgcggctttcgaaaccctagcaccgatccccgtcgccagtcgatcgcagacgcttggagacgttcggggcccatgacgagcggcctctgagcgcgcgagagactagactgctgggtgtgctctagctagatccgaggggcttccgccgatggcgagggcggaggccaactgggagcggctggtgcgcgcggccctgcgcggggagcggctcggcagcgcctacggccagccggtcaccggcatcgccgggaatgtcccgtcgtcgctcggcaacaacgtgcacatcgaggaggtgctccgcgccgccgacgagatccaggatgaagaccccaccatcgccaggatcctttgtgagcatggttacacgttagcccagagtttggatccgaacagcgaagggagaggagtattgcagttcaaaaccggtttaatgtcagtgatcaggcaaaaactagcgaagaggggaggtgctgctattgaccgaagtcaggatattgctaaattgcaagaattttacaagctttatagagaaaagcataaagtggatgagttgattgaagatgaaatgaagctgagggaatctgccgtgttcagcggtaaccttggcgagctagaacggaaaactaggaagcgcaaaaaagtacttgcgactttgaaggtcttatggtcagtaatagaggatatgacaaaggacatatcaccagaggatgcaaacaaattgatatctgaagagatgaaaagggtcatgcaaaaggatgcagcaaggacggaggatgttgttccatataatattattcctctagattccttgacttctaccactaatgcaattgtgaattttccagaggtgagggcagcaatatcaactctgcagtactatactgatctgcccaggcttcctggtaccttttcagtccctgatgctaggaattcagatatcctggatcttttgcaatgtgtatttggttttcagggggataatgtgaaaaaccaaagagagcatatcattcacctactggcgaatgaacaatctcgtgtgggaaaactatcaggaaacgaaccgaaaattgatgagggtgccgtgcatgctgtgttttctaaagcccttgataactatatcaaatggtgcaactatctgcctcttcgtcctgtctgggataacaatgattcgttgacaaaggaaaagaagttgctatatgtgtgtttatactacttgatgtggggagaagctgctaacgtgcgatttattccagagggcttatgctacatatttcatcatctagcaagagaattaggggtgattctgcagaaacaaactgcagagccagctgaaagctgcaattctggtggtggcgtatcgtttcttgacaatgtcatttatcctttctatgaaatcattgcagcggaagcagccaataataaaaacgggcgtgcaccacattctgaatggagaaattatgatgatttcaatgagtttttctggtctcataagtgcttccacctacgatggccttggaacctgagcgacccgtttttctcgaagcccagtaggaaatataagggcttgctcagtaggaatcatcactacggaaagacatcttttgtggaacataggacttttcttcatctttaccacagctttcatcgcctttggatgttccttattatgatgtttcagggactgactatcattgctttcaatgatggtagttttgacaggaagaccatattgcaacttcttagtctgggtcctacttatgtcgtaatgaaatttattgagagtctattggatattctaatgatgtatggtgcctattcaacatctcgtggatctgcaatcaccagagtggcatggcgattctgctggtttactatagcttcagttgcaatttgctacctatatatcaagacacttcaagatggcacagagtcagcaacattcaagatatatgtttttgtaatcagtgcatatgtgggcattaagataattttcagcctacttatgagtgtcccttgttgccatggtttggctgaggcttgctatcgctggtctgctgtacgccttgttaagtggatgcatcaggagaataattatgttggaagaggcatgcatgagagtccccttgactatatcaaatacgccactttctggattgcaattcttggtgcaaaattttcattcacctattttcttcagataaaacctcttgtagaaccaacaagaactataatcaatttcactggcctgcagtatgcttggcatgattttttctcgaagaataatcataatgctcttacaatcctttctttatgggctccagtgctgtcaatttaccttttggacattcatgtattctacactgtattgtctgctatttatggatttctccttggtgcacgtgatcgcctgggagagattagtactgtcgaggctgttcacagattctttgagaagtttcctggagcattcatgcatagacttcatgttgaggttcccaaaaggaagcaactgctatcttctggtcaggaaatagagttaaacaagtttgacgcatctagattctcccccttctggaatgaaatagtgaggaatttaagggaagaggattatattaataattttgaactagaattgcttttgatgcccaagaatgacgttggagttctaccgattgtgcaatggccagttttcttgcttgctagcaaggttttcttggccaaagagattgcagaggactgcaaagactcacaagaagaactttggttaaggatatcgaaggatgaatacatgcaatatgctgttgtagagtccttccatagcatttatcatattctgacgtctatactagagaaagaaggccgcctctgggtggaaagaatttatggtggtatccgagacagcatttcgaagcggaccatccaaagtgatcttcatttcaaaaaactgcttaatgttattgccaagcttgttgctgtattgggaatactgcgaggtacgacggagtccagtgatttgaaaaaaggtttggttaatgctattcaagacctatatgatgttgttcatcatgaagcgttttcggttgatatgagtggccacattgaagactgggatcaaattaatttagcaagggctgaaggtcgcctcttcaataaactcaagtggccaaatgatcccaaattgaagacttgatcaagagattgtattcacttctgacaattaaagaatctgctgcaactgtccctaaaaatttagaagccaggcgaagacttcagttctttacgaactcactgttcatggaaatgcctgttgcacggcctgtttcggaaatggtctcctttagtgtgtttactccatattactctgagattgttctctacagcatggctgaacttcagaagaaaaacgaagacggtataactacactgttttatctccagaagatttacccagatgaatggaagaacttccttactcgtatcaacagggatgaaaatgcagcagactctgagctttttggcaacccaaatgacatacttgaactacgtctatgggcttcttatcgtgggcagaccttagctcgaactgtccgtggtatgatgtactataggaaagcccttatgctgcagagttatttggagaggatacaatctgaagatttggaatctacattagggttggctggttcagctgataggcattttgagttgtcacctgaggcgcgtgctcaggctgatttgaagtttacatatgtggttacctgccaaatttatggaaaacagaagggggaagggaaggctgaactgcagacatatccttactaatgcaaaggtacatttaatttatttatgctagagatgtctttg

SEQ ID NO: 16834 - DNA, 3228 bp, Zea Mays
cgggcttctggccttctcctccctctctgcacggggaaaagaatagaaaggagccttccgctctcacgacgtctcgacccgtcgaccgcttcgccaccacaaccccgccggaaccctaaccctagcagcgggagccccatccgccgggccgtaccgatgggacggtctgtgaattgaagtagcttggaagagcggtgttatgcactgggatgggagacaatgtcctaaaattcagggtggggttgttaggataaactgcattatggattctggcaacagttcgtgctctagaacacgaagtgggctttgatgtttcgagttccagaactcgaagtggccttctaaggataaagagctttctggattcccatgatggttcattttcgaggtcacaaagtgaccatgtaggaggtagccctcctattgttgaggctataaatgatgaatcagttttgaaggagtctcctgatagattgatgaaagaagagatgcctgttacaactccaaatgggcttgttagacagagctttactgaacaggctgtaaccaaggacaagtcaggcatgaggacacttctcgatggatgtttgagtgaagatatgccttctagaacacggagtggacttgtcagaagaagccctactgttaagactctaagcaaggacaaatcagtcattaaggggctggcagatgggtgtctgaaagaagacaagcctcttggaacacgaagtggccttgtgagtggaagccttgctgccaaggttccaatcaaggctgaagtactcacaaaggggcagcatgatagatggctgaaaaatgacaaggctgctgcaatgcggagtgaccatggtggcagaagattggctgccaagactgtaagcgaggacaaaagaggcgttgagggtttgcctgatggatggcaaaaagaatacagacccaggaagaatggtccatgttcagatccgtactacattgatccagtcagtggatatgaattccgctctttgaaggatgtgcacaactatcttgaaactggagatattagccaatgcgctgtgacaccaaagaagagcaccatctgcgaagatataacagaaagtcaaactcatactagtacatcaccgcagcacatgaggcctggtactgcgaataagggtattcagtgtgaaatattaacttcggatggtatcatggcgccatgggaggataatggaaatgatactgaacataccatgttaccagagcctgagagcttgaaagcaactcaagggtatggcaacaagcttgaaacttcagaacccacgagggttcaaccggtttctccacataatggttcaagacaaaccaaatctgttaaaaggaaagaatcaaatgcagaggtcaaatccaagaagcgtaaaaccagttctgctgtgactcgtgttcgagcgtcgccccgcttagctgcattaaatgctcatcttgatgtaagcatcgaacatgaagatgacatggttagcacaaatcatgtggactgggtacagactattgaagagagagccatcgatcaggcacagaaaagccaatcaggctcttttgatcagatacatggtaatctggaaagcactttcagtcagttacagttgagccaagcagaccctgctaatggaatgcaggttatacaggcaaacactaccattcattcacaaccaagccaattggatactctgagtcctacacagaaaaaacaggaaaacagttccaaacagttacaatctgtggtcacagattcttcgattccaaaacgaaccacacagaaatgcactatagatcagccaagccagccagacataaatcatatacgcacagatcaggaattcactgggaatcagttcccctcgagcctaccagttgacactgttatttcattaggggatactgaagaattcacagcgggtcactcacagccaagaaatagtgacactgcaggacaaattcaggccaatgaggaaaatactgccgatcaagtacagttgagcctggcagagacagtcattctggtaccggctattcaagaatatgctgctggttattcactgctgagcaaagctgacactactgatcaaacacaggccaatcaggaatacattgctgatcaagtacaatcgtgcctaacagacgcactcattccagtaaaagctattgaggaatacacaactgattattcacatattagtaaagctgacattacaaatcaaatacaggtcaatcaggaaagcactgatgatcacttatatttacgtcaagtagactgtctcgctgaaatgcagataattgagcaaaatttgtccaagcaacctcagctgagccaaccagacactggggatcaaatacgaattgatctggaaagcactaccaatcacttgcaaccaaactacgatgaaaattctatgctgcaatctggtttctcttgggctcctgaacagaacagaggagcccctactacagatttctggaaaaatgttgaaagtcaggcgtcatcggtttccatgccaataaatggagcgcctctttcaagctttccagcaaatgtcagattccaaaatgcagcagcagcagcagcagcagcagaacctgctttgccaccacaggttgctccaaccgaaacaggttccgatcagtctgggttggccttccaatcccttttcggaaacatctggtcagatccttgcatcgagtttgctttcaagacccttacaggcgacattcctgttctcgacgacacaacggctgtcacagactacttcccagagcaacaagacttgaataaagacccagcgccaaactgtgcaggctctgtgtttgacagttcaagaaaccacacacaagtcgacgtcaaccttccaccgcctgctccggatggtttctacgatggcagctggttccctccccaatgaatttgagtgcagggaggggaaaaatgcaataacattttgtacctgtgaaaaggcaaatcagagaaggctagtggccgaaacataaaagcaatagtcgcactcttgttagggctctgatctgaatgtctaatcccacaggacacattttgtaaaaaggcggtagcttctttagccttattagactgttaatacactcaactgaatgatgtccagttccatcaacaaggcttcaccgagactgtcgagtgactgatcaggatcatgttttttttttcacagagaaaaaaagagg

SEQ ID NO: 16835 - DNA, 307 bp, Zea Mays
ctcggctcttctccctgaccttcaacgggcgaggttttttgaaagcatcctctctctcgtctcctcttcaacccccgacacccaactgaagccgtaaccgaagccgtagagagggggagccaaagcttactctttagaccttcctacttcataggatttcgggactatcctccctcgattcgtgtcatctacctcgcggtcccgcctcaactgccgcctgtcgattagccgctcggagccccaattctatacggctcttcgatctgggatccgctagattcgtaaggcggcgtttcgttcgatctgt

SEQ ID NO: 16836 - DNA, 868 bp, Zea Mays
ttatgagcgagtaaaatcctagatttgtgcagcagagcgtggtgagcaaccgaaatggtgggagaaaaatgctgggccaaacatgattgacatccactccacagtggagttcttggatgcactaagagatgctggagacaggcttgttattgttgagttctacggaacctggtgtggttcatgcagggctctctttccaaggctctgccggacagctttggagacccctgatgtattgtttctaaaagtgaattttgatgaaaacaaacccatgtgcaaacgactgaatgtcaaagtccttcctttcttccatttttaccgtggagctgatgggctactggaggctttctcctgttccttagctaagtttcagaagctgaaggatgccgttgcaatgcacaacacggctcgttgcagcattggtccacctgttggagttggcgatgttgacttgctggatagcacgagccctcaagagaaacctgcagaagctagcccacattagattaatgagaaggagctcctccccatccacgtctacatcctgctcattgttttcttcactatagaccttaatgtaatcagttcaggagaactaaagtaccctcaattcatgaatcagatgtatggattatcgtacgcattcttgaaagggaaaaaagtgtataatagtgataactatacgttttttggacagaagaaccatgtacttgtacatcattttaggtgaagacgtcatgagcatttaagcgcccttgtgggccgttttatcagtcagtccgttttttttcgcacgttcactgtcattctgacagactgtactttgttgtatttgttcaattgcgaagtttaagtgaaaaaatagaaa

SEQ ID NO: 16837 - DNA, 1189 bp, Zea Mays
aacagatggaggccggcctgcgcgcgctaggccaccgctacttcggcggcggcggcggtggcctcggtgggttcgcggccgcgcgtgccacccggctccggcgccagcgccagcgccgcatggccgccttctgctccctcgctgttaatggagatgggaatggcgccgcgggtggccccgtggggagcggcgtcgaggtggcgcgcgccaggaggatgctccatgtcgtgctcgtctcgccgctgataccaggaaatacagggtccattgcaaggacatgtgcagcatctgcagttggcctgcatcttgtcgggccattaggctataaggtagacgacacgaagttgaagcgcgcgggattggattattggccatacgttgttgtcaagattcatgactcttgggaccacttctgtgattatttcatgaaacaggaaggagataaaaggctgttggcgttcaccaaaagaggcacacacatccattcagatttctcctacaggccaggggactggctagtcttcggttccgaaacaaaagggttgcctcagcaagccctcgaggattgctgcagagaaggcctaggcggcgggaccctccggattcccatggtggagacctacgtccggtgcctgaacctctccgtcagcgtcggagtcgcgctgtacgaagccgctagacagctgaactatgaacagcttcagtaccagcctgatgagctcccagaggaggcgcaggagcttttcccggcagaggacatttatgcgtgaaaacctctgcccgagaacaattacacgttacacgcattgatcacctcatttttgtgtgtgtgtgtgtgtactgtttgccgtgacacatgattgagctggagggaccacgcactgcacgattctgttgcgaattcaattccaggccgagtccttgtccagacggtgttgacatgctcattcaaaatggtgtacctgatctgcttggaagaatcgttttagtgccatgtataatttcgcagtcagaactcagaaggtgattagagtatgctgcgatggggtctcgttctgacttcttttttgtgtgtgtactggttactgaaccataagctttgttaactgcaactggacgctgcgtcctgttgcttctctgtcagtgtgtgtggtgaggaaggaaggttggtgcgggagctttactgcca

SEQ ID NO: 16838 - DNA, 2771 bp, Zea Mays
cgaccggtgacgagcggtcaaaggcgggccgccccaccggctgcggccggtcaccctcgcctcgggcgccgcgaagctatttagcgcggtggccggagcgccggcaacggctgccacaccaacacacacagactgacaggcgcaagaagaggagaggagaagaacagaggggagtggaaataatctagcagcggaaggggaagcagcacgaagggaagcggcagcggaagcggggttctggctaaagtacgttaaggtcttttttatcagcaattccagtaatgtgccttgcctcttttacgtgactatacaagacaatgaatggaactcatccctgggcctccatgtccggaggtccatgttctaaccttggatatgccagggacatgaatggtaatgttccaataagcactacaaattcttctgggccaagcattggagttagctcattggtgactgacgccaactcgtcactttccggtggtgcccagttacagccaagtactagcatgaatggtgattcattgatgcgtgttcctgcgtcaccaatatcgttttcatccaataacatctctggctcttcagtcattgacggttgcatcatgcagcaaagtccaccccaagagcaggtgcagaaacagaggtcttcaagtgtaacatcacaacctgtgattgatgctggtggtgcattgcatgctcagaagaaatcaaggattgatgtttgtcagggtggtatcacggaacaacagctgattcagcaactgctccatggtcagaattctcttcattaccaggggcaacagaatccacagcttcaagctttaatgcagcatcataaactggcacaacttcagcaacggcagcagcagcatccattttctcagatgcaacaaccccaagttggtattcctcggcagcctcaacttaggccaccactggcacagactggaatgcagttaggtggtcctgttaggtctcctatcgagagtgggatttgttctcgcaggatactgcagtatttatatcacaagcgtcatcgcccagagaataaccctataacatactggaggaagcttgttgaagagtacttcgcacctcgagcaagagaaagatggtgtgtctcttcttatgaaaacagagggaattcttcagctgctgctccacagaaagctttggatacgtggcgatgtggcatttgcaatacacatggtgggaaaggatatgaagttacctatgaagtacttcctaggctctgccaaattagatttgaccatggtgttattgatgaatacttatactttgactcacccaacgaattccggttgcctaatggacaaatggtgctggagcatgcaaaagtagttcaaaaaagtgtttatgaacatctgcatgttatacacgagggacatctgagaataattttcacaccagaactgaagataatgtcttgggagttctgttcacgacgccatgaggagtacaccactcgcaagactatagcaccacaggttaataatcttctgcaagttgcccagaaattccaagctgttgtcagtgaaagtggatcagctgggatatcaaataatgatgcacaaaccatctgcaacatgtttgttaatgcatcacggcaactggcaaaaaatctagagcatcacaccttaaatgaacatgggctttctaaaagatatgtacgctgcctgcagatatcggaggtggtgaatcacatgaaggacttgatcgagttcagccacaagagcaagcttggtcctaaagagagcctgaacagttattctaaaaccacggcaaagtttgagaatatgcatgattcgagacaggccatggctgccgctaaccttgccaacaaccagagcaacaccaaattgatgggggtcaaacaagagacaagcacttctgcgaacaaccagactcctggtgccggagccattggcaacaacaatctaccgattgccgcacctctaaacacctaccagaacatgctcagaagctcaggtgccagtacgatttcgctgcagcaggaggcgtcgagtgtcttcaaaggtcctacagcaatgcacaacggcatgcagctggaagcggccaggtccttcctgggacctaaccaagttcaattccagcaccacccaccgtcgtcgtcgtttcagcagcagcagcaaaacagtttccatggctttggtgtcaacccgcagtaccagcagcatgtcctcaaccagcttctgcaggaagttaagaacagtaacaaccgctcgaaagcgcagcaaccgcctctggatgcaccaccgccgaatgcgagcggcgggggtctcgcgccaggagttgctacccccaacgtcattgctgctactggggagcaggggcagcatgtcaataacagtagctctaaccataacggcacggtaaagggtgctgctggtactggccctagcaatgtcatcaacaatagcacagccagcatggcttcggccagaaacagcagcttcaagtcggtgagcagcagtccagctgctgctggcaatgccgtgagctcgaaggtcgatgactccttccatcaactggaggacctcgacgacatgatcgctaacgaactggtggagagcgggctgttcggtgcaggacacgggtggtagtacgctactgtggtaaagccaagcaatgagatataagcctaagcctgattggtgctggtaggagatgagctcgtcggataagcctctgtcctcagaccccacagactctacaagtgcctgtctttg

SEQ ID NO: 16839 - DNA, 921 bp, Zea Mays
cggccagccagattgagatgacggcaaaggcaaaggcaacggagccagccaggtccagcctcaattccagactggccgatcctgccgcaaactgcaaacagccccccgcaacggctgtgcatgtgcgtggacccaccgccggcgcaacacgccatagcagtcccagcgagggggggtggagtgaatgcacatgcggtacaagcagagctgatcgggattcctcgtctctggtctgtctgtgctccaccacctgctgctggtgccatggccatgggtagtctcgccttcgccacggcgctcgtcttcgtcttcgtcttcgccatcgccgtgccggccgtcgccgccgccgcgcaggcccccgccccggcgcccaccagcgacgggacgtcgattgaccagggcatcgcgtacctgctgatgatcatggcgctggtgctcacctacctcatccaccctctggacgcctccgccccgtacaagctcttctgagcgagcagattttctcctccattttttggtaggcttttgtagtggatcactagagtaactgggggtggtggtgtgggtgtgtgggtgagattcggtacctattcattgccatgaattacattcggtttcgcgtgtgtatattattactcctatatgtcttctggttcatgcttcgatgtccattggttgtcgctttgtgttgcatcggggagacctcgaggagtagttcttgttcagtagtgcctagcgcgcatctgagatctgacctgacctgaccttccacacgcgaagccttgtggtgtggtgtttgttgttggggctttcgcaggatctgaattagtcaaaccgttaaggccctatttcccgatagcaatcgagatcatcggttcatgttagaatgcgccgggagcaggaagtattgttgaattaacg

SEQ ID NO: 16840 - DNA, 650 bp, Zea Mays
acatatgaagcttgctccgtgctcactcaattggactcctgggacagccaaaatataggagttagtttagatcacataccactttttccattggaagaaaggaacaccttttgctgatgaccagggaatgtacaacgcattgacttggtgggagcaaatggataatggcaaacagcttactcgtaataggaagttcctcattgttgttcctgttgtcctgtatctgatagctctgcacaccacagactaccaacaacctatgctcttcctcaatacccttgccgtcagtgtgcttgtggtcgcgaaactaccgaatatgcacaaggtccggattttcggaataaatgccgagaactgagcaacgtcatccttcgccagacatttaccctatatgcgcttttcagaacggttttgtgtgttcccccccccttctagtgcctttagttgggctcatcagagcaccagtgttgaaaaagttgttagcaggatgggccttggtcgctgtatagagagatgctcggaggcgtgctgtacatctgatgtgcacggattctgtacactcttaatgttgctatatatacggtttgttgcaagcatctgtcggttgctatatgtacagtgtggttcttgcagagcgatgtgtttcctcg

SEQ ID NO: 16841 - DNA, 2049 bp, Zea Mays
ctgtcacctaaaatctaggatatattattcccccaaaacaaacactaaccggccggcccaattctcacgcgctcgccgcctaggagcattcacgttggtggcgggcggtggctcggttcctctcctccaccgcacctccaagaatccacctccacgactaagctgacggctcggcggcgccatggcggttcaccggctccaaccttccctctctggcctacagtgctccaccgcccggtcgccagtgctcctccatgggccacggctgacgggtgcacgcaccggtatgcatcccttgctgctctaattcccgacgctctagctcgtgtaccagatgtgcagactgtcgcctagccctgctccggcgtgaaggacttctgcttctgcccctgcgcatcccgcccttggtcgcgcacctcggcatgttcctcggcccgacggctactgtcttgaggcatacggtggccgcccacctcgtacccagtcaccagatctcaagttccacctcaaaatccagatcaagtgaatgccatgtttcatccttggtccaatcggttcttactggaatttgttggcaggcaacgagcacccaccaccggttaagtctctccccttcggtccttcctccctttcttctgtgttaagccaccgagcacccaagcggtttggcctgatgccacatctctggtagctacaaacctacaagctttgacaaaagatgctatgattaggccgatacaaagttgtttctgcttctttatctctgtatcatactagcacttattaggttgcaactcgattgtttaggtactagatttgatctgattgtgaattaccagatggttggtgcaggcaggagaggtggatttggtggacctagattcgatgtgcagagagcgacttggaggtggctgacatcttcaagcactgcaacatgcagttacaactactgttggccatacagggaaatgctgggcctattataccaattgttcaaagcatggaccttgttatttttccagcacttgacattcgagtgaaaaatgtcgcagggacatattctcttgaacataaaggagaaaattatctcttcgcacatcagacaaggcttctactctttcagaagaaagtcattttcaagagaatcttgaacaaaatgaccagatgtttaggcctggttggaaggacatttttcgaatgaatcagagtgagctcgaggctgagattcgaaaaggtctctcgagattctactcttgatccaaggaggaaggcctatctgatccaaaatctcatgaccagccgttggatagctgctcagcagaaatcaccacaaccaagcgtcgaaggacataatggatgtacacgacgacctggatgtgttccttcgtaccgagacccagggaaacaaatatttggctgtgagcattacaaaagaaactgcaagcttgttgctgcatgctgcaataagctattcacttgcatattctgtcacgataaagttagtgaccatacaatggacaggtaactcaagaggtccacttattgactcttatgaccatgtaattggtgttaatacaactacattaacacgtaaaggttggtagatctggaaggtcttgatggtctaatacctgtctatgagtacgaaagaaaaggcgggagaagtcggtctctgcagcatcgcgcgtgaaaaaaaatcagccaattccatgagcattgatgttgtcatgacttcaaggagagaccatgctaagaataatgcattatgacatttgtcaggcttacatatcgattgtttgatatggatagatgtataggtttatgaccaatccagttcaaagcaatttgagtacaaaagaaataaggagcaggaaagctctgtacatcttgcattttgctgtttttttgtcgaagtttcaatgtctgtcgcgtgacaaaatatagttgtaatttatattttggcatgcacgaaacatgtgtatttattcatttttgaacgaaattttacgtcaaatcctctattgcgttatatacgaaattttaacgcgg

SEQ ID NO: 16842 - DNA, 1325 bp, Zea Mays
tcatggtttgcttgtgctgtgaagatcgaggcgatcaaggttttcagaggttcttgctctggttgtggttttatcactggatcggccttggtggcttgatcggttcatgattcgtttgagctcggcaaacgggggcagtcctcaggaaatgtcgacatcgagcttggattgcagggtgacctgactagttctgcgcagccaggttttgagggattctatgaacaggtcaaagaggttgaaagcttgctcaacacattgacaaagttactgaaggaccttcagaactcaaatgaggagtcaaaagttgtcacgaaggcatctgcgatgaaagaggtaaaaaaacgcatggagaaggatgtcaatgaagtgacaaagattgcacggctggcaaaatcaaaagtagagcaactgaacaaagataatgctgtgaacagaggaaaaccaggatttggcaagggatcgggtgtggaccgatcccggacaacaaccactgtcgcattgacaaagaagttgagagaacgtatactggagtttcagacattacgagaagaaatccagcaggaatatcgtgacgtagtggagcgtcgtgttttcactgtgacgggggagcgtgctgatgaagagacaatcgacaagctgatagaaacaggcgacggcgagcaaatctttcagagagcgattcaagagcaagggcgaggaagggtactggacacgctgcaggagatccaggagcgccatgatactgtgaaagagattgagaggaagcttcttgatctgcagcagatcttcctggacttggctgtgttggttgaagctcaaggtgagatgctggacaacattgagacgcaggtcacaggtgcagctgaacatattcagaccggaacaaaccttctccagaaagcgaagaagctgcagaagaacacacgaaaatggacctgcataggcataatcatcctcctcataatcattctcatcattatcctctccttgaaaccatggtcctggggtaaataagcagcaaacaagaagcgtcgttcccatgttggttttggttgatgatattacctatagtattcttgttatagctgtgcatatgtcagaaggtgctgtacatcgtattgcaatctttgttttttttttccttttggaagagaaactttgggtgtgaactttcagattttgcttgattcgaatttgctgtattggttgtgcaactaaaggcctacacatactggtttcttgggaaattggtaactctgtctacgtagacagtaagctactgctgatgcaatccttgatttgttttacgtgatcgtatacttccg

SEQ ID NO: 16843 - DNA, 1941 bp, Zea Mays
agattgggctggtccggccactccgacacccttatataaagtcccgaaccctagaggccagcaccttcctccccaactcgccgtctgccttctgcgcctccatttcggcctctgtcccttgcaagttcaatctcacctccaaccatgggtaaagagaagtcccacatcaacattgtggttattggccatgtcgactctggcaagtcgaccaccacaggacaccttatctacaagcttggaggcattgacaagcgtgtgatcgagaggttcgagaaggaggctgctgaaatgaacaagcggtccttcaagtacgcgtgggtgctcgacaagctcaaggctgagcgtgagagaggtatcaccattgatatcgctctgtggaagtttgagaccaccaagtactactgcacggtcattgatgcccctggacaccgtgacttcatcaagaacatgatcactggtacctcccaggctgactgtgctgtccttatcattgactccaccactggtggttttgaggctggtatctccaaggatggccagacccgtgaacatgctctccttgcgttcacccttggagtgaagcagatgatttgctgctgcaacaagatggatgcaaccactcccaaatactccaaggcacgttatgaagagattgtgaaggaagtctcatcctacctcaagaaagttgggtacaaccctgataagattgcctttgttcccatttctggttttgagggcgacaacatgattgagaggtccaccaaccttgactggtacaaaggcccaaccctgcttgaggctcttgaccagatcaccgagcccaagaggccttcagacaagcccctgcgtctgcccctccaggatgtgtacaagattggtggtattggaactgtaccggttggtcgtgtggagactggtgtcatcaagcctggtatggtagtcacctttggtccaactggcctgactaccgaggtgaagtctgttgagatgcaccacgaggcacttcaggaggctcttccgggtgacaatgttggcttcaacgtgaagaatgttgctgtcaaggacctcaagcgtgggtttgtggcctccaactccaaggatgaccctgccaaggaggctgccagcttcacctcccaggtcatcatcatgaaccaccctgggcagattggcaacggctatgcccctgtgctggactgccacacctcccacgttgctgtcaaggatctcaagcgtgggttcgtggcctccaactccaaggatgaccctgccaaggaggctgccagcttcacctcccaggtcatcatcatgaaccaccctgggcagattggcaacggctatgccccagtgctggactgccacacctcccacatcgccgtcaagtttgctgagctcattaccaagatcgacaggcgatctggcaaggagctcgagaaggagcccaagttcctgaagaacggtgatgctggtatggtgaagatgattcccaccaagcctatggtggtggagacattctccgcgtatcctcccctgggtaggtttgccgtccgcgacatgaggcagacggttgctgttggagtcatcaagagtgtggagaagaaggacccaaccggcgccaaggtgaccaaggcggccgccaagaagaaatgatgcgatcccgtgtctgcttttgcagtgcctggataacttgccactaaagttgtgtatgcggttgttgctgttattgcgtggactgtttgctgcggtgtctcctgtttgtttgggtagcgcagcgtcggcctcttcaggtgtctgttgtctgttgtctttactatcagtaatgctcctgagacttgtatttctccttttggcgccgctaaatggaattttcgaacaatgattttcgtgttattattttacaaccttttcgaacaatatttacacgtctgatgtgttttgctgaga

SEQ ID NO: 16844 - DNA, 115 bp, Zea Mays
aagccacaggggtgaactgcaaccaacaggtggaactgatgaaagattggatgagcgattgcttggagaaatagaaacctgctcatcgtagaaatatgtggagttctgggtaggc

SEQ ID NO: 16845 - DNA, 1016 bp, Zea Mays
cagttattgtgctgcatagtgtgaaatcttgatatattgattactaactcagatttccagctaaaaagcttagggcactatggttttccccgcccactaatgatggctactctggaactggtacatatggacctttgccaaggatattcatttcagaacttcttgtggatgagttgactactcaaagccaggaaattatacataaatacattaaaacttctggcaatggaaataatcatgctgctattgcaagtacatctggggagctaacatgggagaagcccatttattcagatttccagattttgtctagggaaagtgaatatgctgcatggactcttgttaatggctatgcactaaatcatgccacaattgccacccatcgcctagaatcagatatcagaagtattaataagttcaacaaatttgtggaggacaatggcttcaagttaaattcagaaggagggattctgaaagtgagtcctgatggtctccttcaacaaagttcaacagtagctgactcatcattgtttacgtttgctgatggaataactgaatctattcctcgatcatacattgaatttgctgaacgtctcctgttaccacagttcaaagatttacaagatgaagaggtgaaagaataccacaggcgtgatggttttgaggtgggcaatgcggacaagatattcgaaagtacatcgaaggatcagctgacgcggagatctgcatgaacagtgaactctagatctgcatatgaccccgtgaactctctagatctgcaaacaacccagtgtgcctcttggaagtgtgttggtgactgtgaaatgattgtacctacttgggtgaaataaagcatgggagtcaataaaaagtaactgtttctttattctacatctgttgaatccaaagagagaattagttactgtttcccttcctttggccctacaatctatcatcatccatatctgggaactttggcgttcgtgttccagaatagacatggcgtctgcactaag

SEQ ID NO: 16846 - DNA, 1245 bp, Zea Mays
gtacgcacgacggaggatatgctaacgcatgaacataaacggatgggaggccatgatcttcatcggcctcaatgccgctatcagtgtccgagtctccaacgagcttggctccggccgtccgagggccgcgtggaacgccgtcatggtcgtcgtcggcgaggcgctggtgatcgggattctgtgcatggcactcatcctcatcttcagagacagcttctccatcattttcaccagcgacaccaccctgcagcgagccgtcgccaggatcgccggcctgctcggcctcaccatggtgctcaacagcgtgcagcccgtggtttcaggggtcgcggttgggggcggatggcagggcctcgtcgcctacatcaacctcggctgctactatatcttcggcctgcccctgggctacttgctcggatacaagttcagctttggagttggggtaattaaactctcgcagctgcatgctgtatgcagtcagaaaagctgccgcatgaacgaaacacgcataattagccaaagaaaaatccttgtagtgaattatattccctcacattttagttttatcgcaggggatttggtccggcatgctttgtggtatcacccttcagacgctcatcttgctaggtgtggtttggaggacagattggaaagcagaggccgcacaagcttcaggccgtgtgcaaaagtggggcggcaaaggcaccgatgaagtcaagcctctcctggaatagaattagtgtagtactatcacgcacgaagctcgtttcatttgaataaacaactgggcaatacgccttatccctttcagaagcacagctcatttgctttcccatcgaatctgatagcttccctttcccctcctccgtgtagttaaattgatgtctctgtatgaacactgtttgaggcgactagtatgaaccctgtttgcggcgactagacgtattgaacatactttttttttcttccagttgactcagcatgacttgaacagtctcaaattgtgtgtaaaggatttactcgctagcagttggtgtaatggtggcaggaatgatgttcttcaggatcagatgagacaagataggaccccttaattttaattttagagactctactatggaggaaaggatggagatacgagtacacttatttaggattaattgttcttttagtggttgacgtgtaagtgattgtgctaaattttcaatatatacacacacaattattattattattatagtacac

SEQ ID NO: 16847 - DNA, 3484 bp, Zea Mays
atccgcccagtttattccgcccggtgtccacgtccactccctcgtcttcaacattccgcccagtttattccgcatcgatccggagattagggtttccgctcgccgccgatgaaaggcggccgcctgcaccgaccggagccgccgcagacccacctcgccatggcggcggcggccgcggcgcctcccatccccgcccctaaccccaccgatgactgggtggacggctcgtggacggtggactgttcctgcggcgtcacgttcgacgacggcgaggagatggtcagctgcgacgagtgcagcgtgtgggtgcacacgcggtgcgcacgctatgtccgcggcgttcacacatccttctcgtgccacaaatgccggaggtccaagcgcgtgccttcctccgctgacgaggccgaggttgctgagctcctcgccgagctgccaacccaccgcccgcctccgctgtaccgccgctgggccgaggtcccgctcccagcccgcgtccacgtccacgggcttcctggcgggggcgacggcgctcttttccgcggcgccccggccttttccgccgccctgtggcgctgcaccggctacgtccccaagagatttggcttccgctactgcgagttcccctcctgggccgacgataatgatggggctgatgctctttttgcgctggccagagagaagcccagggagatgacggatgatgttttgataagtactgaaccgaagaaggagaagcattatgtccgaagcctgagttgtcgtggcaagaagattgacagcaatcaacaagcaatgactcctctaaccaaggctaagaagagagagcctgatagttggaagaatgagtgtcagcagagtgagggctgtgggatacaagattccatttgcgatgatggtcacgctgaaactaatatggtcagttctgatttgctaactgctaaaaccaagaagaagatggaggaatccttggagccaagtggggagaataataactgtgagcaagttgagatttcgagtaaggatggcaaaaaggtgcccatgaagttggaggtctcatctggagttcaaactacatcatccattgtggaacaagaagtgcactcagggtttgttggggtagaggttacaatgtataagcaacagccagaagaggatcacattgtgtgctcaaggcctgacataacaagttcaggtcccatcaaagtgcaagacatacagggccttccaaagcaaccaaatcaagcttcaaatctgcaggttgttgctggtgtaccagatttacttattggtcagccaaaaccacagactattaaaactgagcctagttctcaggaaaacaaggcagctcactgtgtcgatttagtgagtgatgaccatgaaagcaataagcaaggcctaggggatgctgcagttctttcaatcgtccaaaaagattcatccaatttaaaatatggttcagtatcccatgaacatctgaaatcggaagcacaaaatccgaggcacacagttgctgagaatcctaactcaactttgggttctgcaaaagtttgtacatcgttttctggttctgtctctacaccacctgagttatcacactctctggcatctaaagaaccatcatcagggaatagtgattgttcaaagaaagaggagttgctctcaccaactgtcagcaaacatgatcccgtgaaattttctgaagatagttcccaggaagtgacaagatactctgagaaagttcaactaaaagactcacaaccttctgcaccaaaatcatctcaagctagtagaatacatctgtctacagtcaaacatagattaccggtgtcaaaggagcaatcacagaagatagccctcactggaggcacctcagcaagatcattccatggagaggtgccatcacttcagtctcgtaataaggcagcagcttgtagttcttcccagaaaaaggacaagatctaccagcgcatcattaatgtcacgcaagatagttccaataattcagcaccaaccgagctgcgtgcatctgattcggctgccccattgagtgatgagcagcttgcattattgttgcatcaacaattgaacagctcccccagagtaccgagggtgccacgttgccatcaagcagctggtgcacagatgcttcattcaactggatcatctgttttttctaagcggtattcatcacatggaggaagggatcatgcagcggttataaaaaagagaaacagagaagattcattaaaagatagcgaggacactaagaggacagaaaaaaggcatagagtttctagcacggagcatgctcctgtgaaaaactcgtgcagatcagctgaaaatatagcatcagaacagaaaattcgtggcatatgtccaactggagccaatgctggtttatcaaaggatgatttgatggatactattgtttcacacaatttacctggattgattgatgaaattgtcagtaaagacaggaatataacatatgtggaactctgtgatgctatccatcagggactcaaggaaatcgaatgggggagattctttgtatcgcagttatgcggatgccatcaaaggttgccttaggaagaggagggagtgggctcacctttttgaccaagcttcaaaaatgaattcaaataaaaggcgaacaggggaaagcaactcattgttacctgacgtaccggacgcagagaacataagaactggacctgatagggattcagaggggagtgctgatttgcatcaggataatctacctaggggcaaacgtaagtgtcggaaacgcaggcgacttgagctcaaaggtaggagagtcagggatacaaggaagagatccagcattgattcttcctcagaagatgctgctgcccccttgtctgattccagtagtgacagaaatagtaatcccagggacgacgagagcaaagaagataattctgttgcccaagaaattggcggttacatagacgctaagggtgcagcttcaagtacataatattcaactggtggtatatgcatatgactagaactgaatcttgtggtgaattttcaagttggtcagtgttcgatggatttctttatccatctacaaatctaggaccaaaaagaaaaatgggtactgcagtccgcatcaccaccagtcctttgaaagagcaggaaatggaggagtttgtctaacaaatctgttatgttcaacaatggtgtatatattattagtcagaatttagccttgcgctattatgatagaattagttgcctggtaaacagtggtaacaatgttgttttgtttatttaatgtatcgatggaccatcttatgtatgagtgaattaagtagacattttcgtgtcgagtatgataaattgttagattgctaggttaaataaatctgttcttgtttttgaccacttgtctattcgataaggcatgtaacctgtaatatgcaatccactagtattcaattgctgtggctcgttt

SEQ ID NO: 16848 - DNA, 1477 bp, Zea Mays
ccaccaacccgggctcctccattgaaccgccgtctcctccattcctggcttcccctccattgaaccgccaccagtctcttccattgaaccgcggtcgtaagacgcctcacccaacaccgcgcccaccaccccaaacgacgcctacattcctgacttcccctcctacgcgcagacgccgtcccaccgccgggatgccgccggcgatcccaagcctggtccacccgtcccgtgtgcggattctccacccgggcggaagccatattcacgggccggtggtgtactggatgctgcgggaccaacgtctcgcggacaactgggccctcctccacgcggccgaactcgccgctgcgtccacccccgcggcgccgctcgccatcgctttcacgctattcccacggcctttcctcctaggcgcgcacctccgccagctaggtttcctcctccgcgggctccgccgccttgccgccgatgcgcacgcccgcggcctcccgttctttctactcgagggcggacctgcggagctgccgtcgttggtgcggcggctcggggcttcggcgctcgtcgccgacttctctccgctgcggccggtgcgggaggcattggatgctgtcgtccaggagcttctgcgtgacgccgccaacatggccgtgcaccaggtggacgcacacaatgtagtgcctgtctggacggcgtcagggaagctcgagtactcggccaaaacctttagaagtaaggtgaacaaggtgataaacgagtatctggtggagtaccctgaggttccgcagtgggcgccttggtgcatggagcagccgaagagtgttgactgggatgcactgatcaatagcatcttcagtgaggctgagaatgtgccggagattaactggtgcgagcctggggagtcctcagcgatggaggtccttcttgggagtaaggatgggttcttgacgaagaggattaagaactatgacactggccggaatgatcctacaaagccacatgcattgtcgtgcctttcaccgtacttacattttgggcacatttctgcacaaaggtgtgctcttgaagcaaaaaaacgccgtcatcttagtccaaagtcagtggacacgttcttggaggagctgataataaggagggaactagctgacaatttctgctattaccagcctcaatatgattcactggctggtgcatgggagtgggctagaaagacgttaacggatcacactggtgataaaagagagcatatctatacgagggagcagctcgaaaatgccaaaacatctgatccactttggaatgcatctcaattggagatggtgcaccatgggaaaatgcatggatttatgcgaatgtattgggccaaaaagattctagaatggaccagtcaacctgaagaagcactttccatagcaatatatttgaacgacaagggatccccgtcgaggatttatccccgtgggggactaggatggggaag

SEQ ID NO: 16849 - DNA, 1803 bp, Zea Mays
ataagttcggaattttctaactaccaacaacttgcaggcactgtaggcgaaccgcgtcgcgaacccaggatcccatcgagggcaggcgggcagatcccggcgtccgacggcgatgggcgaggaggacgcgagcgccgggggagatccgcagcggctgaagcggatcgccgctgcggcgtacgactacgagaacgatgcgcggtgggccgggtactggtccaacgtcctcgtgccgccccacctcgcctcccgccccgacgtcgtcgaccacttcaagcgcaagttctaccagcgatacatcgatcctggtttggttgttgaaccgatgtcctccatgacttcaactcagtctagcagaccagcagcgaagtcttcagctacaccatctagtgagaatgtcagagctcgggactcaggctctagcacgagatcaactgggacctcccaacatccaccagcagagaggactgcaaattcattacagctagacggacggacaataaacttttctatcaatgcctgggtactggttgtagctagtctcggaatactcccagttctacccaaccatatctcgagtaaagcataccgtctttcattgctaggaacaatatgctcgtctgcatattctttatatggcacttatgggaaaccaagagcatggaatatgcctgcaattcagtcctggttgcagtctattattgtagctaaggactttgttcacttgatgttctctcttatgatgttcacatctaatgtgcactttaagattgctctacttcctgtgctttgctgggcgcttgatcatgttgctcgattcctaaggcgtaattttacacactcttctttatacaggaagtacttagaggacccttgcctatgggtagagacaaacaacactacactcagcctactttgttcgaatgctgaaatcaccctggggtttctcatgatcatctcgcttttctcgtcgagacgcaatataatccagacatttatgtactttcatcttttgaagttgatgtaccattctcctgtgacatctggttaccaccagagcgtgtgggcaagaataggccgggctgtaaacccgtacatttaccgctatgcgccattcctgaacacacctatttcggcagtccagagatggtggctgaggtaggaaagcatggaccgcagcacagtgaaaatatgcctaaacagctactctgatctcagcgcctcgatcttttagaaggcgtgcttgcacggcgtgttcttttcttgtaaaggttgtattctcagttcatgtcttactgagctactgaaggcataacactagagaatttcttacgatgagcagtagcgcttgagcaaactgtcgatttgatgggatacagttacaggcataaagtgattgcacagaattttcataaggatgcttgctgcagtcaataggatggaacatgcgagtggcactattgattcttgaagtaataaatgatgttcttgtctattttattttgctactgctaggttatcttggttctgcactgttctgtgtctgttattatggaggaaatgccttagcaactctaacaaactctctatattcttcctaatctatataaatagagttttttttaaaaaaatacctctaacagcttatttaaatggctatctaaatatagccatttttttatttcgggttttctttagctaaatatagaaaaatatgaatggctctttagagtgcaaacaatatatataaaagattgttgaaaattaaaaaaatatagaaattgaattttatataaatgactc

SEQ ID NO: 16850 - DNA, 1922 bp, Zea Mays
agttctttgtttcgcggtacttaatttcctctttttttgtgaggcatgcctttttgctatcttgttacctcaacattcttggatctaactatcttgacatgaaattttgttggagggattgattttgcattatatactcagaaagaaggctctacgaagaacctctgaactatctggggtgccccccagaaaatggtaaatggtggcagagtcagcaactgggcatgtattaacttctctcggaatgtgcaagatagtgccgctaggggtttctgtcatgaactggcaatcatgtgccaaatatcaggaatggatttttcccttgagcctgtgctgcctccagtgactgcaaggccagaacatgttgaaagagcgttgaaggcacgttatcaagatgcaatgaacatactgaggccacaggggagggaacttgatctgctgattgtaatactgcctgacattaatggttccttatatggggatctcaaaaggatctgtgagactgatctcggattggtctcccagtgttgtctgactaaacatgtttttaagatgagcaagcagtatcttgcaaatgttgcactcaaaataaatgttaaggttggtggaaggaatactgtacttgtagatgctttgacaaggagaatcccccttgtcagtgacagaccgaccataatatttggtgctgatgttacccatccacatcctggagaagattccagtccttccattgcagctgtggttgcttcgcaagactggcctgaggtcaccaaatatgctggactagtgagtgcccaagcccatcgccaggagctgatacaggatcttttcaaagtatggcaagatccacagagaaggacagtaactggtggcatgataaaggaacttctcatttctttcaagagagcaactggacagaagccccagaggatcatattctacagggatggtgtcagtgagggacagttctatcaagtattgttgtatgaacttgatgccatcagaaaggcatgtgcatccttggagcccaactaccagcctccagttacttttgtcgtggtgcagaaacgacatcacactaggctgtttgctaataaccacaacgatcagcgtacagttgatagaagcggaaacatactgcctggcaccgtggttgattcgaagatttgccatcctactgaatttgatttctacctgtgtagccatgctggcattcagggaacaagccgccctgctcattaccatgtcctgtgggacgagaacaagttcacagctgatgagctgcagactctgacaaacaacctatgctacacgtacgctaggtgcacccgctccgtgtcaattgtgcccccggcatactatgctcatctggcagccttccgagctcgcttctacatggagccagatacctctgacagtggctcaatggccagtggtgcccgtggccctccaccaggtgcggcacgcagcatgagaggagcggggagtgttgcggtcaggcccctacctgctctcaaggaaaacgtgaagcgtgtcatgttttactgctgagatgctgagctaccttcaccaagaaaatatcctgacttgttccatgtacccgcactgtttcggtgatactatctgacaccgaatttatgcattaagtcttccagtggtctggagattttaagtaacgcctgtttttattcgtgagttgtaacgctgcagttcgaggagcttcagtgctgtatgatgtgtaaactatttgttgtaagttgtaaccaattgttgtaagttgtaaccagccactatgttataatcctgtttgtttcagctttttacagtttctcgctaccaaaagctgttgtgaactgtcaaacgtttagctttttagttagctctataaaaatcgatttgttaaaaaccatccaaaattaata

SEQ ID NO: 16851 - DNA, 138 bp, Zea Mays
gaacaactctccaatcctatctatcaccttatctgttgccctatcacttttcactattattttaaatcaaatttagatactttgtaaatagtgagattcgaactcgtaacctctctctcgcgcataccctcctatacc

SEQ ID NO: 16852 - DNA, 1173 bp, Zea Mays
tgggctccgcgagtcataccctggtggcctgtggaaggcatgcagtgagatctaagctggtagagcttggatatgaaatcagtgacaaggaatttgaagatttctttaaacgctacaaagaggtcgcagagaagaaaaagcgtgtaactgatgaggacatagaagctttattgtcagatgagatattccagcctaaggttatttggtcccttgctgatgtacaggcaacatgtggaacacttggcttatctacagcaactgtgaaactgatagggccagatggagaggagagaatagcatgttcagttggaacaggtccagttgatgcagcttacaaggctgttgaccaaataatccagattccaaccgtcctccgagaatacggcatgacttcagtcacagaaggcattgacgctattgcgacgactcgagtggttgtcaccggagacgtggccaacaactccaaacacgccttgactggccactctttcaaccgctccttcagcgggagcggggcggcaatggacatcgtcgtgtccagcgtcagagcttacctgagtgccctgaacaagatgtgcagcttcgctggcgctgcgagagccagcagcactgaggtgcctgggagcgcaagtgttcaacgcgcagaatgagctcggcggcgttcgcgttcgtgttagttctcgtatgggatgccaggatggactgtgcgttgtaagagcttgtcaagctgttgaggtgacatttcgtttcagtaacaggctgctcgatattatggggtaccccttgtcagtggggtgacgacaatgctgttctttttctgggaggatagtcccttcagcttagaacatgcaggaaattttggccctatgtagtgtacattttgtatctttaaacatactttcaataatgaaataatattagggtccatctagccacatgggtggccatcggcatgaaaatgatcgaaaataaatatttattcggtttgtcttttttttattacggataaataggatatagaatttacaatgaaaatatatattcttatttttaacattaaactcataaagattcataaaagataaaccttaaaattatcatatatcttctcaataaagtttggatatagattcagatataatttcgaatgttttttcttctttttttggttgt

SEQ ID NO: 16853 - DNA, 1153 bp, Zea Mays
cccttctatcgcacaacaagttacctagttccagccaaacatcttcttccagtgccaagaccagaccctgaggttgttgcaatgttgacatcaggactgactgcatcaattagtcttgaaaaggcaggacaaatgacatctgggcaagttgttttagttacagcagctgctggtggaacaggacagttcgcagttcagctggcgaaattagcaggcaacaaggttgttgccacatgtggaggtgaaagtaaagctgaacttctggcttccttaggagttgatcgtgttatcaattacagaaatgaacgagtcaaagatgttctgaagaaagagtttccaagaggtgtagatatcatatatgaatctgtaggtggggaaatgtttgacttgtgcttgaatgcacttgcagtccatgggcatctcattgtaattggtatgatctcccagtatcaaggagaggatggctggaagccaaagaactacactggactatgtgagaagattctagctaaaagtcaaactgtggctggatttttccttgttcagtatgctcacttgtggcaagatcatcttaacaaactttttgacctgtatgcctctggaaagctaaaggtttccctagaccccaagcaattcttgggtgttgcttcagtcgtagatgcggtcgaatatcttcattctggcaagagtgttggcaaggtcgttgtgtgtattgatccatcatacggtcagatcgttgcaaaattataatccatggacatgatgcgcattgtcttccatggtcacgtaggttattgtcttatagttacacatatacatcaagaccgtattttcccagcgggtgacaaatgaataagggaacatgttggtgtatagtttagtttcatttttccaaagtgtaagatgcacaactatactgaaggacaagcatgggcatggaaatcgattaagtttctaatcccgtgcagtaggatatgcattcgtgtggcctcgttccacgttgtatgtatacagtatatattatataacttgtctcagtgccacatgcttcaattcgaaccggtaacaataattcaaacagctcatgcagatgcattctcaaatacacagcttggaacatcgatattttcttttgaagaaaatttgtttgtgc

SEQ ID NO: 16854 - DNA, 2440 bp, Zea Mays
cccgacggccacagaccttccaagggcagagcggacccatccataccaggaggcggcggaggagagagcggctgcctcagcctgtctttcttgtgtgcactgcacccaccctgcctcagcttgggcttggctgcctcttcgtttcgccaggaacgcgtaggcgcagcgcagcagcccaggaagcaacacccagccgcctaatcccgcaacaactcgccctcttctacccccatcggctcctctgcatccgcataccggtggcctacaggtttgctggagtgcagtgcacgggcggtggagcagcaaatctgcaactgattcaggatggatcaggaggcgaaggactctaggccctcaaggtctcccagcgagccaaacctcttcctgcaatggggtagccgtaagaggctgcgatgtgtcaagacgcgtgatgacggctcaccatcgccgtcgccgtctcaaggtcttaggcgtgccataccccgttctactcggcccctccttggagcagacattgcagcatttcgttcaccgcggcgccctagcacccttaaccgcaggaaatccgatttgctggtgaatgagtacaagcacacgatggcgctatcgccagagaaggacaagtattacacaacgaggggttcaccatttccctttgaaggaaatgggtttgactttggtaccataacagaggataagggaaccacatcgttgccgagattcttcattgcattgtcaaacaaggagaaggaggaggacttcatggcgatgaagggctccaagctgccacagaggccaaagaagaggcccaagctgatgcagaagtgcttgcttatggtgagcccaggagcttggttatcagatctatctcatgagagatatgaagttagagagaagaagagttctaaaaagagggctagaggcttgaaggctttgagcatggcgagtgattcagaatagagtttgaggcgaatggatttttggacttgactttagctggtggcaagaatctgtagttaggtggcactgccttctgcctgtcagacaaacctctgcatctaatttggtgctatgagtgctctgatcaaggtctattgatgtcaacagcaaagatgatattagattcctgatctagtgaggtgcagctccatctttctgggtagtgggcgcctttgtgggagagaaaatggagggtgggatacaatagatggtttctcaaaaccacagaggaagtaatgttcaactgttgggaaacattgaaagctggatgttggctgagaaccaatgaatcatgatgtttaatcgtcataaacttgtagctaaaagagaaatcgaaactccaggataaggaaacgagcctcaagaaagctgctgcaaaaggaagcaaagctgagcagaaggcgaagaaaaagcaggtagaggaagagatcacacgcctctcatctgagttagaggcgaaccatgctgcagagcttgcttcctttgggtacaaaccctctggtagctcagagaagggaaacctcgacaacttagtgaaggccatagccggtgtttcagtttccagcaattcggattcagcaaagctcagcaagggagcacgccggcgagagaagaaggcgaaggaggaagctgcccgagagcagcggatccaagaggaacaaagcaatctcgtgagcgaccgcatgctagaaaacgagaagctcgaaaggaagctcgagcccttggggctgaccgtccaagagataaagccggacgggcactgcctgtaccgagcagttgaaaaccagctgtcgctccactccaatggcgctgcacggtacagttaccaggacctacggcagatgacggccaagtacatgagggagcacgccgccaatttccttcccttctacttagcggaaggcaaggccgatgttggaccagatcccatggcgagcttcgagaggtactgcgaggagatggagtccaccgcagcttggggcgggcagctcgaactcggcgcgctgacccactgcctgaagaaacatatcgtcgtctactcaggctccttcccggacgtggagatgggtaaggagtacaaatctggacctggaggtagtggcgccggcggtgcgagcatcaggctgtcgttccacaggcacgcctatggtctcggcgagcactacaactcggtggttccagccggatcatcctagcaagagaaaggtggatgctctgatggcctctaatacttcttgatttgattgtttacgggtggcacttgtctgagtctgaaacacaataggccacttttctttttcccagttgctgtaatccctgtcatgagtagatgaaggttgagtgtaccaatcaaagctgtaccggggagtttgtttcccaaacaattttgctctcatcagttttatgtctgtggtttgatttgaagttgtgtgctgctact

SEQ ID NO: 16855 - DNA, 916 bp, Zea Mays
tgtcattcaaattcacaatttcctggagtagtgaggatactgatggtgtttaccgtcctccgaaatttatgcctactagcatggatgatgaagagaaacgtcgtaaaaatgattcaaggagagataaagcgatagcccgagtggcaatagaaaacccttatattaaagagataattgatgatgctgcagacagacctgaagagtggaaggaaacagtgggcgatgaaagcagagaatttgggaggtacatgcgacagagagaagagcaagagaagcaggaagaggagttgttcactcgggctcctgtaaccaaacgtgataagcagatcgagaagcgcataaggagacaacttcatgggctaggaggcttaactgacggtttcgaccttgggatgaacatgctgttgggaggagacaaggaagatgatggcggttcaagcaagtcgcatggcaagagcggaaaccgaaagaagcacctgaagagcagcaagaagaggaagaggcattagccttggacccacactgctgtagcacttcaacataccgatacagcctagagacggttcaagcaatccacacggaaagttgaagctggagaaaatacaagaaaccaagtagagaaaaaaagctttggttcctgtaggcgtattatttctgaaacagaaaacttgatctgagcgactgatcctgagccaatggaacagtatgaattatatggcttgaacatggtaggtgtaccaagttttgttctgatagtcgaatgattgttgtattattgattaacaagaccaacaatatatagactaggctccaaccggttcatagaaacagtgcccggtagagatggacggtgatcacctgattagtaccttctaagtatagtcatgcactagagatggaaggtgatcaccttgcc

SEQ ID NO: 16856 - DNA, 1576 bp, Zea Mays
cgcatggccaacagaaggctatgggtgagaacttgcgtgagggagtgtcaagctacagggattgttggggagaatgtcatcagccattgtcagtccaaagagaactacacttctgttggagtctcttggtataaccaggagcaaatttacatccagtggaaggaactgaactgtaggacagactgtcgctatttttgcatgatgcagagagaaggggaacgacagtcacttggtctgagccctgttaaatatcatggaaagtggccattcttacgtgtttctgtgttccaggaacccctttcaactgcactatctgctgtcaacctactgatgcacttcactggctggctttcatttttccttctagtgaattacaaattgcctcttagaccccagaccaagagaacttattatgaatacactagcctgtggcatatctatgcaatcttatcaatgaacgcatggttttggagctcaattttccatactcgagacattgagttgactgagaaactggactattcttcagctgtggccttgcttggctactcgttgatcctttcattgctaagggctttcaatgtcaaggatgaggctagcagggtgatgtttgcagcccctattttggcattcgttacaacgcacatcttgtatcttaacttctacgagcttgactatggatggaacatgaaagtctgcgtggtgatggctgcggttcaacttctgacgtgggctgtttgggctggtgtaagccggcatccatcacggctgaaactctggacggttgtttttggaggagcactggtcatgcttcttgagctctacgacttccctccatacatggggtttgccgatgcccattcactgtggcatgcaagcaccattccactcacctatctctggtggagcttcatcaaggacgatgccaaattccgcacgtcaacactcagcaagaaggcaaagtagttaagcaaagcgcgacattcttagcatagggtcagagaggatcagattccgattccgtggtctgcacgggggacattttgggggcacacgtgttgtcggacatcatggaacctcggtacatttgccctccccaaaaaagacattcatcttcatccactcaggtttttggcccacaaaagtcaacatactctttagggcgcatgttctgcccttacgaattatctctttactgacctgaacgtgcatcctgtgattgaatcggcatcttatcattgtagtgttggtggggtttgggagattttgtcatcgccgaatcagttttgtgaaatcagacagaacaatgaacatcagtggtgtgtttcctattatgtgtggagttttgtaaattcctgaagcccattttgtatgagttttccaacgttacgaaaattcctgaacaatgaacacgtgctatgtttgaaacaagagggcacggtagctaactagctggcaggcagtggtgggctacgggtttaaactttaaaccgaggacagtcgaggatattttttttgatatgtcatattgtgtataattcgaccacatagatatatagttttcatcaattcggta

SEQ ID NO: 16857 - DNA, 3051 bp, Zea Mays
cgcacctgcactgctggtcactgtcgtcccggacgggcgtccccttcccctgctgctttttcttcgtcgtaatccccgtccagcgagctgcagcgcaccacagtccacaaactgctgatcgatcctagctgctaggctggctggagcaggaattgaagcaggcagctagctagctagcattgcgtgatgaagaagaacaactccagcattgagagcacgggcggcggcggcggcacggtgtcgggatccggctccggctccggctccttcaacctccggaacctgtccaaggtcatcctcccgccgctcggcgggccgtccggcggccaaagccagtcgcatggcgggtcggacaagtgggtcgtctcgccgctcgactccagatacaggtggtgggatacgttcatggtggtcctggtggcgtactcggcgtgggtgtacccgttcgaggtggccttcatgaacgcgtcccccaagggcgggctggaggtggcggacatcgtcgtggacctcttcttcgccgtcgacatagtgctcaccttcttcgttgcctacatcgacggcaggacccagctcctcgtccgtgacaggaagaagataacactcaggtacctatcgacgttcttcatcatggacgtggcatcgacgatcccgttccagggccttgcctacctcatcaccggcgaggtcagggaaaacgccgtgtacagtatgctgggcgtcctacgcctttggcgtctgcgaagggtcaagcagttcttcaccaggctcgagaaggacatccgcttcagctacttctggatccgcagcgcgcgtctcgtcgcggtgaccttgttcctggtccactgcgccgggtgcctgtactacctgatcgccgaccggtacccggaccggcagaagacgtggatcggcgcggtgatccccaacttccggcaggccagcctgcggatccgctacatctcttccatctactggtccatcaccaccatgaccaccgtcggctacggcgacctgcacgcccagaacaacgtcgagatgatcttcaacattttctacatgctcttcaacctcgggctcaccgcctacctcatcggcaacatgaccaacctcgtcgtcgagggcacccgccgcaccatggagtttaggaacagcatcagggcggcgtcgagcttcgtgggccggaaccacctgcctccgcggctgaagcagcagatcctggcctacatgtgcctcaagttcagggcggagagcctgaaccagcagcagctcatggaccagctgcccaagtccatctgcaagagcatctgcgagcacctcttcgtgccggtcgtcaaggacgtctacctcttcaggggggtctcaagagaaatgctcctgtccctggtcaccaagatgaaaccggagtacatcccgcccaaggaggacgtgatagtgcagaacgaggccccggacgacgtgtacgtcgtcgtctccggcgaggtggaggtcatactgttcgacggcatctacgagcaggtgcaggccacgctgggggcgcgggacatcttcggcgaggtgagcgcgctgagcgaccgggcgcaggccttcacgttccggacgaggactctcagccagctgctgcggctgaagcaggctacgctcaaggaggccatgcagagcaggcccgaagacagcgtcgtcgtcatcaagaacttcctcaagcatcaggtcgagatgcatggcatgaaggtcgaggacttgctgggagacaacaccggcgagcacgacgacgacgcgaatgtgctgacggtcgccgcgatgggaaacagcggcttactcgaggacctcctcagggcaggcaaggacgccgacgtcggtgacgccaagggcagaacagcattgcacatcgcggcgtccaaggggtacgaggactgcgtgctggtgctactcaagcacgcgtgcaatgtgaacatcagggacgcgcagggcaacacggcgatgtggaacgccatcgcggcggggcaccacaagaccttcaacctcctgtaccaattcgggcgcgcgtcgaacccgcgcgccggcggagacgtgatgtgcctcgcggcgcgccgcggccacctcggcgcgctccaggagctcctcaagctcggcctggacgtggactcggaggaccacgacggcgccaccgcgctgcgcgtcgcgatggccgagggccacgcggatgcggccaggttcctgatattgaacggggccagcgtggacaaggcgagcctcgacgacgacggctcaggttcaggctccggctctggcgccgcgcggctagcaatgtcgcccaccgagctgcgcgagctgctgcagaagcgggagctcggccactcgataacgatccacgactcgccagcggtggtcccgaacggcggctcgtcggggcacagccgtccaggaagattacagagcacaagttcggacagccagcgctggcctcgggtgagcgtatacaagggccaccctttcctcagaaaccgcacctctgaagctggcaagctgatcaacctaccaggcaccatggaagaattcagagccatcgtcggtgagaaactgaaagttgacgcggagaaggcgttgatcgtgagcgacgaaggagcggagatcgactcgatcgacgtgatccgggacaacgacaagctgttcatggtcaccgaagaagatctgaggcggctggcatcaatggactggctgtcgtgcgagtgatttggttcctcccaagataattggaggctaaatatagaatacagtacaagagtattgtgcttctacgatgtctaggattgatagattgatggcaactactgagtggcatgagctctatcgagcgactaatttgcaggcaatgtgtaccatgagttcggaccactgtccgttattaatgcaaggtcattcttcttgtaatttctataaggggtttcattttgaatcctattgggtacacactgacgggttcaaagatgtagttcaacaagcttggacggccacaattaactcctctgatgtcattcttcggctacatgttaa

SEQ ID NO: 16858 - DNA, 2162 bp, Zea Mays
cggatttccttgtgttttttttttctttccgattttcgtttctctctcttttcctttccccccgtccctctctttctttctctcttggaattgtaattggactcaaaagtttcggcggccttctccatgaacacggtggcttcgctgcctttggcgccgcgcctgctcattaagccctccctcgcctgcttctccagaaaggacgtcggccgctatggcgggatcaaggtgtacgccgtgctcagggaagacggggccgagttcgcccggaacaacaacctggaggccctgttccaggtggacgaccccgggccgcgggcccccgtcaagaagttcctggacgtgaacgaggctctggaggtggtccgcttcgacatccagtactgcgactggagggcgcgccaggatctcctcaccatcatgcttctccacagcaaggtggtggaggtcctcaaccctctggcgagggagttcaagtccatcgggaccttgaggaaagagctcgccgagctacagcaggagctggaaaaagctcacaatcaggtccatctctcggaagccagagtctcatcggcgctcgacaagctagcgcatatggagaccctggtgagcgcaccatccacagccgagccgcccacttcttcctccctgtctgcaactgcaagcagcaccgcccgtgtccgagccaagaacaaacagccacgtcggaggcttgacgtgtccggcccagtgaagccttacaaccccagcctcaagaacttctggtacccagtcgccttctccagcgatctcaaggctcctgacaccatggtgccaatcgactgcttcgaggagcagtgggtgatcttccgaggcaaagacggaaggcccgggtgtgttcagaacacatgcgcccacagggcatgcccgctgcatcttggttcagtgaacgagggcaggatccagtgcccttaccatggttgggagtactcgaccgatggcaagtgcgaaaagatgccatccacaaagatgctcgacgtgcgcatccagtcgctgccatgctttgagcaggaagggatggtctggatctggcccggggacgacccacccaaggctaccatcccttctctgctgcctccttcaggatttacggtccacgcagagatagtgatggagctaccagttgaacatggactcctcctggacaatctcctggaccttgctcacgctcctttcacacacacgtccacctttgccaagggctggagtgtgccaagtttggtcaagttcctgacacccgcgtctgggctccaagggtactgggacccgtacccgatcgacatggagttccggccaccgtgcatggtcctatcgaccatcggcatctccaagcccgggaagctacaagggaagagcacgaggcagtgctccacgcacctccaccagctccacgtctgcctgccctcctcccggaacaagaccaggctgctgtaccggatgtcgctggacttcgcgccgtggctcaagcacgtgccgctcatgcacctgctgtggtcgcatttcgcagagaaggtgttgaacgaggacctacggctcgttcttggccagcaagaggggatgatcgacggcgccaacgtctggaactggccggtgtcgtacgacaaactcgggatccggtaccggctgtggagggacgccgtcgagaggggcgccgacgaccggttgccgttcagcagcacccaagctgagagtttgtcgtagcgaccggaacgggacgggacctcttcctcgtcgcatttctccgcaagacgacggacggacagccagagttaatgtgacctaggcgtacgtgcgtctctctctctctctctgcgcggttcatcgttcacctcgggctgctgcgcactgaaggattctggaagggtgaaggttgacggccggagacgatgatgggcagcatcatggtctatggtgtccacatgcatgtacactactagcgacgacggcatcatgggatgcaattgtaatctgagattgatctcttttttttttcaccctttctgtgtaaagattcagcaaattgttgcgttactcttccaaagcatgtataatcaactacggagaagtgttcatatatataaatatgagaaattgcagctattgctacagttcatctgccccgt

SEQ ID NO: 16859 - DNA, 2486 bp, Zea Mays
acggaatggacgggaaccccgaaccccaaattgatccgatccactcaccttttttccccttctaatttcactttcacctcctccgccaccagttcggggaaaaggaatttttggagaaaaatcccattggcccagcccagaatactcagccgcgcgccgcgaccttcgctcccgtctccggtctccgcctgccccccgtccccaacctatcgggagcgctcccgattcgcgggagcgagagaaatagagtgccccccgctctccgctctccgccgcggatcagcgccgtcgccgatcggaggccctcgcttccgccggcgggcggcgcgagccgggagatggacggcggcgcgggtgccggtcggaggagcgtcccctcctcctccggattcaggaggagggtcccgcccgccgagaacgggcacggccatgacgccccgccgccctccaggcggtcctccgcctccctctcccgcggccactccacgccgctgactggcgagaggaccgtgaaaaggctgaggttgtccaaggcactgacgataccggatcacacgaccgtgcacgaggcttgtcggaggatggcatcacgcagggtagatgccgtgttactgaccgactccaatgctttgctctgtgggatccttaccgacaaggacataaccacaagagtgattgctcgtgagttgaagatggaagagacactggtctccaaggtcatgactagaaaccctgtatttgttctcgcggacacgcttgccgttgaggcgttgcaaaagatggtgcaaggtaagttcagacatctgcctgttgttgagaatggtgaagtcattgcaattctggacatagccaagtgcctatatgatgctattgcacggatggaaagggcggcggagaaaggaaaagcgatcgccgctgctgttgagggcgttgaaaagcattggggaacagctgtatctggtcctaacaattttattgagactcttcgagaacggatgtttaggccatcactgtctaccattatctctgagaattcaaaacacggtgttgacagcatcaaagaagatgctggaactaaaaatgagttcagcagttgtagcaatcgaaagcaaacctgggggaattctgacatctagagatatcctgatgcgtgttatcgcccaaaatcttcctcctgagtccactacagtcgagaaggtcatgactcagtgtcctgaatgtgcctcggtagacaccccaattcttgatgctcttcacacaatgcatgatggaaaatttttacatttgcctgttctggacagggatggaaatgttgtgactgttgttgatgttcttcacataacgcatgctgcaattgctacggttggaaacagcggggcagctggatctgagtcaacgtctgccatgatgcagaggttctgggattcagcaatgtccattggacctcttgatgatgatgatgactccaccagaagcgaaggatcgacaaaggtggcatctgaggcagcagatataggaagatcagccttgtttccagcttctgctttatcaaacacttttgggttcaagattcaggacaagcaagggagaatgcacagatttaactgtgaaacgagcagcttgacagacctgataactagcattcttcagagggtcggcgatgacattgacagaaaacacctgccacaaattttgtatgaagatgaggaccatgataaggtcatattgtcgtcggacagtgaccttatagctgccgtagaccacgcaagacaaatcggttggaagagcctaaggctgcacttggactacgcccgccggaagagaggggacggttcctcagacttcgagtacgctggcaaggatgcatgggcttctgcatacagtgctgtcgcggcaggggcggctctggttgctgggctcggcgtgatggcttacttgaaacggtcagggtaatagcttgaggcaagcacggcagggactagggagcacggttttgatcgtctttgtgatacaagtgccacttcatcggaattggcagaatggctgtgtaagtaattcttgtgagagaggaaaaaaatgaagattttaataatactactgtcaaggcagtgaatggtcccttcatacaagtacacggaactgatcgagttttttttggtgggttgagacttgagagtcaccatggctgtcagcttcgtcacgattgtatttattatcataaaaacacatgattcattgtacaagaagagtcttgatagaccttcttcatgcagcgtctggctgattagaatttatccaaggcgatttttgtccatagttactagctcttgctgcaacctgcaatgtactaagctccttgttccagcagacaccagattttttgtatgatactgtgactaaaattttgctctccacagaccatgcgtgtatgaagacatgattttttttgtcatagtttttttatatgatgatccttagtgcaacat

SEQ ID NO: 16860 - DNA, 5034 bp, Zea Mays
acttgagctagcatatattttaaacttataaataatttataacagtttaaagttatttctttgaatcacctttgtaatcaccccggtcatgtacaatgtaaaatttttgtaacctgtaaaatttggtactaagatttccgctgcaaaaatgttgtgtgtgtgatttgtgttacttaatcccgcggttctggttgtaagtggtttatccgaggtccttggggcactcagacggatcctgttaagttatttggtgcacatgcatagccgtctgaggtctttgagacaagaacaggtgcatgtgggcccaatatcttgggaggttctaccacaatttccaacatttttcttgtagattctttagattataatttgctttctgtatctcaattatgcaaaataggctacaactgtctatttacacatataggtgttactgtctttagaagaattgatgattcagtagcattaaagggagtattagagggtcacttatacctagttgattttaacaaaactgaacttgatacttgcttaattgctaagactaatatgggttggctctggcattgccgactagcccatgtagggatgaaaaatcttcacaagcttctaaagggagagcacattttaggactaacaaatgtttattttgagaaagatagggtttgtagagcatgtcaagcaggaaagtaagttggcgtacatcatccacacaaaaacattatgacgactgacaggccactcgagctactccacatggatctattcaacccgattgcctacataatcatcggcgggagcaagtactgtctagtaattgtggatgattattctcgcttcacttgggtattctttttacaggaaaaatctcaaacccaaaagaccttaaagggattcttaagacgggctcaaaacgagttccgattaaggataaaaaagataagaagcgacaatgggatggagttcaagaactcacaaatagaaggatttcttgaggatgagggcatcaagcattagttctcttctccctacacacctcaacaaaatggtgtagtggagaggaagaatagaactgtactggacatggcaaggaccatgcttgatgggtacaagactccggaccggttttgggctgaggcgattaacaccacctgctaatccatcaaccagctctatcttcactaaatcctcaagaagacatcatatgaactcctcaccgatgatgaagaggatccatgtgtcgcgctaaggaacatgtccattggggatgtgtgtcctaaggaatccgaagagcccacacaagcacaagatcaaccgtcatcttccatgcaagtatctccaccaactcaagatgaggaacatgctcaagatgatgaagatcaagaggatgagccacctcaagaggaggacaatgatcaagagggagatcaagtcaatgagaacaaggaagatgagcaagagattcagggtcaaagaccgccaccccaagagtccaccaagcaattcaacgagatcaccccgtgaactccatcctcggtgacattcataagggggtaaccactagaactcgagttgctcatttctatgaacattactcttttatgtcctctattgagccatacagggtggaggatgcactaagagattcggattgggtgatggctatgcaagaggagctcaacaacttcacgaggaatgaggtatggcatttagttctatgtcctaacaaaaatgttgtaggtaccacgtgggtattccgcaacaagcaagatgagcatggtgtggtgacaaggaacaaagcccgacttgtggccaagagatattcacaagttgaaggtttggatttcggtgaaacctatgcacccatagctagacttgagtcatttcgcatattacttgcctatgctacttaccatggctttaagctttatcaaatggacgtgaaaagtgccttcctaaatggaccgatcaaggaagatgtctatgttgagcaacctcccggctttgaagttagtgagtaccctaaccatgtgtataaactctcaaaggcgctttatgggctcaagcaagccccaagagcatgatatgaatgcctacgagattttcttatcactaatggcttcaaagtcggaaaagtcgatcctacactctttactaaaactattgcaaaagatttgtttgtatgccaaatttatgttgatgatatcatatttgggtctactaacaaatctaattgtgaatagtttagtaggatcataatacagaaattcgagatgtctatgatgggggagttgaagtatttcctaggatttcaagtcaagcaactcaaagatggcaccttcatcagccaaacaaaatacatacaagacatacttaccaagtttggaataaaggatgccaaacccatcaagacacccatgggaaccaatgtgcatctcgacctcgacacgggaggtaagtccgtagatcaaaaggtataccggtcgatgataggttctttactctatttatgtgcatctcgaccggatattatgctttccgtatgcgtgtgtgcaaggttccaagccgatcctaaggaagttcaccttagggccgtgaaaaggatcatgagatatttagtttacactcctaagtttggactttggtaccccaagggattcacttttgatttaataggatattccgatgccgattgggcagggtgtaaaattgataggaagagcacatcagggacttgtcagtttctaggaagatccctggtgtcttgggtttcaaagaaacaaaactcagtacctctttctaccgccgaagccgaatacattgccgtaggccattgctgtgcacaattactttggatgaggcaaaccctcagggactatggctacaaattgagcaatgtccctctcctatgtgacaatgagagtgcaatccgcatggcggacaatcccgttgaacacagccgcactaagcacatagacattcagtatcactttttgagggatcaccaacaaaatggggatatcgagatagcttatgttagcaccaaagaacaattaaccgacatctttaccaagcctttagatgagaaaacctttagcaaacttaggaatgagctaaatattcatgattcttggaactttgattgaaacattgcacacatagctcatttatatacctttgatcatatctctttcatgactacgactaatgtaagggaaatggagtttttcggcgaagacaaggcttccactccactctatcggtatcatttaaccttcgccgtcactccacatcactctcacattggtataatctttcactcacatttcatttaccaatgggggagaaagtaaagagggctcacaaagtctccgtttttggtgattaatgccaaagggggagaaagtattagcccaaagcaaaaggaccgcaccaccatccttcgaaatttttttaattaatatatttcaaattggtatgtttactttcaaattggtatttttcaaaattggaataaattacatatttccaattgatatttattaaaaccctcttgaaagataagaggagaatttcattcagggggagttttgtttagtcaaaggaaaatcatttgaaacagggggagaaatttcaaaacatgaaaatgcttcttgcaatcttattcatatacctttgactatttgcaaaaagactttgaaaagattttcaaaaaaggatttgcaaaaacaaaacaaatggtgcaaatgtggtccaaaatgttaaataaaagaaagcaatccacgcatatcaagtgaaattataaattggtttaattccaagtaacctatgcacttaccttatgcaaactagttcaattctgcacttatatatttgctttggtttgtgttggcatcaatcaccaaaaagggagagattgaaagggaaatagggtttaactttttccaataaataattttggtggttgaatacccaacacaaatattggactaactagtttgctttagattatatattctacaggtgcataaaggttcaacacaaaccaataaaagattgaagttagggatcaaattcaaaggagcaaagaaaccgagtatgccctagtctggcgcaccggactgttcggtgtgccaccggacattgttcggtgcaccagggccgtacaacgtccaattctccactctcgggtttcttagggcgcgctctgctataattcaccagactgtccggtgcaccagcggagcaacggctactcgcgcaacggtcgactgcaaaagccgcgctgaccgttgaacagtgaagaacagtgcacgtagagtcaaagcacagaagtcagaggcgcataggacagtgaacagtgcgtgtccggtgcggcactggactgtctggtgccgcttgaagacaagcctccaacgcttaactgctctggaaccctaacggttgggtgacatagctggcacaccagactgtccgatgcgctcatcgatagcagccatccccaacggctatgtggtggttgagggctataaatacccccaaccaccaccactccaagcatccaagtttgcagcacttcacattcaatacaggagctagtgcattcactccaagacacaatttcaatagaatcaaagcctctccaagtcccaaatacattccactcacctagtgacttgagagagagtttgttcgtgttctttgcgctcttgtttcatggatcgcttttttccttcctcattcttgttctcaagtgacttgtaatcaaggcaagagacaccaagtgtgtggtggtccttgcggggtctaaatgacccatttgattaaggagaaagctcactcggtctaggagaccgtttgagagagggaaagggttgaaagacacccggtccttgtgaccacctcaacggagactaggttctttagaaccgaacctcggtaaaacaaatcatcgtgttcacccgctttatttcttggttgatttgttttccttctctttcggactcgaattcatttctaacactgttggggact

SEQ ID NO: 16861 - DNA, 2908 bp, Zea Mays
gtgcacttttgggtcctgcggcggtgcttctgttttgggggttcagtggcctaccggcgaatcaagcggggtggaggcgtcgaccaaccaggtggctgagcagcacatgcaattttacgatctcccgtggaagatcctgtgtgaggtcatgaacgttgaattgaaggctgagccagacaatgatgaggtttatgcccagctcactctgctacctgaatcaaagccagaggagaatggctctagtgaggagatgcctgcttcacctcctgctgcacttgcaaggccacgcgtgcactccttctgcaagacattgacagcctctgataccagcactcatggtggattctcggtgctgcggcgccatgcagatgagtgtcttccgccactggatatgacccgtcaacctccaacacaagagcttgtagccaaggacctgcatggtgtggaatggcgctttcgccacatattcagaggtcaaccacgaaggcatcttttgcagagtggctggagtgtttttgttagtgccaaacgtcttgttgctggcgatgccttcatctttctaagaggtgatagtggggagcttcgtgtaggagtcaggcgtgccatgaggcagcaagcaaatgttccgtcttcagtaatatcaagccacagcatgcatcttggtgttcttgctacagcatggcatgctgttaacactgggaccatgtttactgtctactacaagcctaggacaagtccagctgagtttgttgttccctgtgatcgctatatggaatcactgaaacgaaattaccctatagggatgagatttaaaatgaggtttgaaggtgaagaggctccagaacaaaggttcactgggaccattgttggaaatgtggatcctgatcaagctggatgggctgaatctaaatggcgttacctcaaggtgaggtgggatgaagcttcctccattccacgtcctgaaagggtttctccctggcaaatagaacctgcagtcagccctccccctatcaacccacttccagtgcacagacccaagagacctcgctctaatgctgtagcttctctgcccgagtcttcagctccaacaaaagaagctgctccaaaggtcacattagagactcaacaacatgccctgcaaaggcccttgcagacccaggataatgtggccccgaaaagtgtttttggtgataacagtgaattggactctgctcataagtcctccctgcgaccgtcaggttttgatctggacaagagcaccattggcatgcagaggaagctgggttcagatatttggatgcgaatgaacagacctgatggttacagtgaaatgttatcgggatatcaaccacctaatgaaggtgcacggaattcgcagggtttctgttctttacctgatcagattgccgctggacgtcctaatttctggcacactgtaaacgctcattaccaagaccagcaaggcaatcacaatctgttccctggttcatggtccatgatgccttcaagtactggctttgggatgaacagacagagctatccaatgatccaggaagtcggtgggatgtctcagagttgtacaaacaccaagtttgggaatggagtttatgctgcactacctggccgaggcattgatcgatacccatctggatggtttgggcacacgacacccggtggtcgcgtggacgatgcccagccacgcgtgattaagcctcaacctttggtccttgctcacggcgaagctctgaaaatgaagggcaactcgtgcaagctttttggaatccatctcgacagcccagccaaatctgaacctttgaagtctccgccaagcgttgccacaccggcagctgagaagtggatggcagacggaatcgacgcagacaaaagccctgagccgcacaagacgccaaagcaactcggtgctacacaggtggatcctgtcccagagagatgcccacaagcttcaaggggcacacagtgcaaatcacaaggcgggtcgactaggagctgcaagaaggtccacaagcaaggaatggcgctgggcaggtccgtggaccttaccaagttcaacggctacacggagctggtggcggagctggacgagatgttcgacttcaacggcgagctgaaaggctgtagcaaggagtggatggtcgtgtacaccgactacgaaggcgacatgatgctggtcggggacgacccctggaagtaagtaacgagtagtagcagccggacgtccgttgttctctcgtaaaagcccctgatgtgttgtgcgcgtcgacctggctgtgtgggcagtgagttctgcagcatggtgcacaagatcttcgtgtacacgagggaggaggtccagcgcatgaacccgggcgccctgaactcgaggccggaggacagcggcctcgccaattcgacggagaggggctccgcatctactgctgctgctagagaggcacccggctaccagtccgcctcgtcgcttaactccgacaactgctgatgccttggcagctagctggtcgtcccaagtagtagagaacaaggcaaatgtatccatagatctccttgtagcggagcttaatgcctttttttcccctttctaatatgcattggatgagcccgtagcgcaccgtagtagtatctaaagctggtgttctgagttggttggaccttcctgcagttttggtttctccttctgatgtggcaagttttagctggtcgcacctacctaatgtatgcttagcaaacgaagtcccactaagcgctgtacataactgcccctccctgcatcaactctaatatatcatctgcttaatcgtcacccctgggcccccgtgctggttgctcaagatcccagctgcttgttgtggcgcttggtttggttcgttgtcggccgtggctcatgtttgtt

SEQ ID NO: 16862 - DNA, 2131 bp, Zea Mays
tagggcttgggatttcatttcttcatccgttggttctgaggttcttgattgagcggtcacaagacctgtcactgcaatggtcgccaagatgttgccatgctcatggatctcggcgtgcgtgctcgtgctgctcttgagcctgcacccgcgtgtccatgccttctacctccccggcaccttcatgcacacctactcccctggagaggtgatctcggccaaggtcaactcgctcacctctatcgagaccgagctgcccttcagctactacagcctgccatactgcaagcctctggatggcgtcaagaagagtgccgagaaccttggtgagatcctcatgggtgaccagatcgacaactctccataccgcttccaagttaatgtcaatgagtcagtattcctttgcaccacggacccgctcaccaaggagcaggccgagctgctcaagaggagggcacgagatctgtaccaggtcaacatggtcctggacaatttaccggtcatgcggttcaccgagcagaacggcgtgataatccagtggactgggttcccagttgggtacaacccgatagggagcaacgaggattatatcattaaccacctcaagttcagagtcttggtccatcagtaccaggcgcagggcgacgttgtggtcacgagtgaggatggtgttgcaatggtagagtctgatcgcaagagtgggttccagattgttgggtttgaggtcgtgccttgcagcgtaagacgtgatcctgagtccatgtccaagctcaagatgtatgacaaggtcgactctgtgaattgcccgttggagcttgagaaatctcaggcgatccgtgagaatgagcggatcacatttacctatgaggttgagtatgtcaagagcaacatcaagtggccgtccaggtgggatgcgtatctgaagatggatggtgccaaggtccactggttctcgatcatgaactcgatgatggttgtcttcttcctggctggtatcgtgtttgtcatattcttgaggacggttcgaagggacctgacaaggtatgaggagatggacaaggaggcacaagctcagatgaacgaggagctctcaggatggaaacttgttgttggggatgtcttcagagagcccagctttccaaagttgctgtgcgttatggtcgctgatggtatccagatcactggtatggcagttgttacaattgtgtttgctgccctgggatttctctcacctgcttccaggggaatgctcctgaccggaatgatcattctctacctcttccttggtatcattgccggatacgttggtgtccgtgtctggaggactatcaagggaacctcggaagggtggaaatctgttgcttggctgactgcatgcttcttccctgggattgtgttcatcatcctcactgtgcttaactccattctgtggggcaagaagagcactggagctctacccatctcactgttcttcaccctcctggccctgtggttctgcatctctgtgccactcacacttattggaggcttgctaggcacacgtgctgcaagcatcgactaccctgtccgaaccaaccagatcccacgagagatccctgagcgcaagttcccctcatggttgcttgtgctcggtgcgggaacattgccatttggtactctcttcattgagctcttcttcatcctttccagcatttggttgggaaggttctactatgtctttggcttcctgttcattgtcctcttcctgctggtcatagtctgtggtgaggtttctctggtcctgacctacatgcacctttgcgtggaggactggaaatggtggtggaaggccttctttgcttctggctctgtcgcattctatgtgttcctctactctattaactacctggtgttcgatctcaggagcctgagcggaccagtttctgccacactctaccttggctattccctgatcatggcccttgcaatcatgctctccactggcgccattggtttcctgctctccttctacttcgtccactacctcttctcgtctgttaagattgattagaggtgtgccccgctgcctctttctgcaatagagtcatctgatcatgaaaccggtgcagcagcatctccaacgacaaagctgagc

SEQ ID NO: 16863 - DNA, 958 bp, Zea Mays
gttttgtgctttgattaccattttcttattattttggttgcagttgaacattaggatgtaggtaacatatttcttacaaaaggttggatagcatattagcatgtattagtttatgttcgctcctttcccctttggcccgtgtgtttgaaatttataagttccaacctagattgaatcgctacatagttcagcatccaaccacaggtttctaagtatttagagcctcaaaacgttgcatctgctcatcttcatcttttttttgttctttaattcgaggacttactggtgtgtgctattcctttgcctgagttcatgttcatcgcagatttgttgattttcctagtggtatgcatatggatacctggatgtctggaggggaccgctactggaggacaatccaattgttcttggatcaatacgctcctggagtgcagaatcatgatgccagcttcaaaagtgaaattaccgaggatgatgaagctgctgattgactggaaaatctggatcggactttttccaaatttctgtttcctgatgttgctgcaatttgtcaccaatgaactgaaactcaccgcaaacaattaattcaggcaattattctgctccattgtacctgaagcaaccgaagttgtgaatatttttcgaggatattctccaccatgctctgccgctacatttgcccctggaacttaagttatttgcccatgaaccgaatatatatcctcttgattgaatgtatgaatgatattttttttctcctttgctagtatttggaacattcctaaaaatgtggctgtatgacagcccgatagataggctgtaagctcattggctgaactatttggttttgtgattttgattgtttcctttttcgatgttaaagcatctagacctttaatatgtttggatgacacaagattattgtgattaatgtatgttttgcagaagtgttgaagtt

SEQ ID NO: 16864 - DNA, 374 bp, Zea Mays
gccgatccaattctatcccgacgcgtagggtttcctgtggcagcgctcccggccactagaggtcgggcaacattccccagtttggaaggacacgagtggatccaatcgactgcactccaccgccaccatctccaccagcatcgcccacaccgctgtcatccgctccgtcgctgtgccatcgtcgtccactgtgccgccatccgctccaccgtcgtgccatcgtcgtccactgagccgccattggaaggtactcatgcgaattaggtgctgccattatcgatctatttgtctgaggtggccgggttacctctgctggttagggcttttgaaaggaattaaaccaacaggattccattgcttactaatctctttct

SEQ ID NO: 16865 - DNA, 1889 bp, Zea Mays
acccatcgcacacccctgctcacgaaaccgtaggcatcgccgcctccccatacctacgaaactagcatcccgcggcggcgatggccaccggcgacaacgacaagcccccgtcgcttgacgcagacgtcgacatggccgacctagcttccctcgacgccacggccgctacatccgccgccgcgggcggcgcgccttccacccgcttccgtcccaaggccaaggggaagcccaggccgaaggctgagcctcccagacccgtaccagttgccgtacccaagcccttcgaagacgacacccagctgtacattatgcagtaccccctgaggccatgttggcgcccatatgagttacatgagatatgtgaagaggttcgtgtgaagccattgagttcagaagttgaagttgatttgagtatcaatacacagagtgaaaattatgaccaagaggcacctttgaggctgacaaaacagacactatcgtcatccaaggcagttgatgttactaattacgcggttggagttcttaatggcaacttggtccatttgaatcatattgatgcagtggtgcaaatgcgaccatcaatgtcacatattatttctggccgagcacatactaggcaggcttcacaaccccgggaaatgaatgggggagctagtacctcgatggattcatctcataagggaaatgagcgccctgaagattccaaggaccgagcagaagattctgagccatggatttctctcatctaccaaccagcaggaagcaatactgcaactaagtaccatgataagatgatagcaaatgagggtgtgcctattgatttcacaatgagctcctcttgttatttgacgtccttgtgtcctggggcctctactagcagaaagcgtatcaacaaattccaagcaataagggagatgcttttgctaccactggaagaacgcctcaagaaatggtttactgaggtttcaggagtaaatcgatttgatgctctgaaggaccttgctccaacctgttcagaggttgaaattttgaaaatgcttccagagtgtgcatatttggtgcgtggattgtgggtctgcaaaagttctttgttgtttgatggtgtatattctggtcccatggatagaattcttcttgagtttacaaaaagggatcccgtcccatcaaatattctggaaccatttatcaatctgattggcaatcgtgctatgagagactggatactgtctccattgtgtaaaagacgtcaaattctgaaggaccataaatttatatcggcagatttgtctttcataaaacgctatccgcatatagtcaatgaacaagagtgtgcttggtctgctcgggagaccactctccgtgagtccctagaaatgagcactactttggcaaagaagaccatgaattcaaccagacctaatgttgcttctaaagggcctcattcaaatatgagcaagggcagggatggcccatctcaaggaagtgatgaccttgcgcgatctgttttgggcactgttttcactgccaataaagttcgcagcatgcaggcagttgttagagacttgcgccagttggctgcaaaatatgcttccaatagaaaggatggatccaaactgcaagctctgtgcaatgctgcaaaaaattgtgcatcgctgcctcatgatgagctgaatcgaaaaatacatctagttgctgttcctgttcatagtgtttttgttgcaaagcatgaggataagcgagctctacgaaacatatttattttgctcttccgtcacaaagaacccaatggaacattgactaagcaggaagttgttgctgctgctgcgaaacatataaaaagagagattactgacagagagtaccatcagattcatctagtcataccatct

SEQ ID NO: 16866 - DNA, 2435 bp, Zea Mays
cgcactacacagctactcgaagtcgaagctcgatccttcctcgagaactcgttcgctcgctacgtttccctccgcttgccgagtgctgcgcgggagcacgcgcccatggcgacgccgccgccggcggcgacggcgtccgcgcttcccaagtctggggcggtatccaagggctacaactttgcatccacttgggaacagagcgcgccgctcacggagcagcagaaggccgcgatcgccgcgctctcccacgccgtggcggagcggccattcccgcccaacctggaaaaaagttcagggaaggatgaaggcttggctgttcccgagaaagaatctgctttggaggaggccggtgcaatagatgcagtcttggtgaatacacatcagttctacaagtggttttcagaactggagtcagctatgaaatctgagactgaggaaaaatatcgactttatgagaatacattacaggagcgtgtcaacacatgtgacgtaatccttaagcaggttgatgatacattgagcttatttgaagaactgcagtctttgcactcaagcgttgccacgaagacaaaaactttgcatgatgcttgcgaccaacttttggttgagaaacaaaggctgatcgagtttgcagaggcacttcgaagcaggctcaattactttgatgaattagaaaatgtatcaagcagcttttactctcaaaatatgaacattggaaatgaacagtttcttccactgttgaagcgccttgatgattgtatctcgtatgttgaaaacaacccgcaatatgctgaatctgctgtttatttggtcaaatttcgccaacttcaatctcgtgcactgggtatgattcgctcacatgtgttgtcaatacttaaaggtgcttcatcccaggttcaagctgcaattcgaagcagcgattctggcaaaaacattgtcacagagggtgtggaggcatctcttatctatgttcgcttcaaggcggctgctagcgagctaaaaccaatattaggtgaaattgaaagtagatcttctaggaaggagtacgcacagattctttctgagtgtcacagtttgttctgtgagcagcggctgtacttggtacgaggcatggtgcagcaacgaatcttggagtttgcaagaaaagaggccttgccttctttgacaaggtctggctgtgcctatctgatggaggcatgccagtttgagcaccagctttttgcccacttcttcccagcatctgctgctgatgtttctagtatggctcctttaatggaccctctgtgcacctacttgtatgatactctgaggcctagactgatatatgaaggaaacattgattctctttgcgaacttgttgatattctgaaagttgaagtgctgggggaacaactaagcagacgcggtgaatcagtagccggtctccgtccaatattgcaaaggatacttgcagatgttcatgagcggctagcattttgtgctcggactcatatccgtgaagagattgcaaatttccgtccttctgtcgaagatctagattatcctgggaaacttgaacgacctgtggatatgtcttcaagtgctactgttggtgacaactcagacatatatataacatggtacagaccattggagaaaacagtttcatgcctttcaaagctatatcgctgcttagagccttctgtcttcactggattagcccaggaagctgtagaagtttgctcaacatctcttcagaatgcaagcagggttatctcaaagaaagcaaccccaatggatggtcagctttttctgattaagcacctcctcattctacgagaacagattgctccatttgatattgagttctctgtcacacataaggagttggatttctcccatttattggatcacctaagaaggattctcaggggtcaggtctcattatttgattggtccaggtcaacatcactagctaggaccttttctcctcgtgttttggagaaccaaattgatgccagaaaagagttggagaaaagccttaaagctacctgtgaagagtttataatgtccataactaaattagtagttgacccaatgctttcttttgttactaaggtaactgccgtcaaagttgcattgtcctctggtagccagggtcagaaattagattcagttctagcaaaacctttgaagactcaagcttttgcttctcctgataaagttgctgagctagttcagaaggttgccgctgccattcaacaagatttgcccaaagtaatgaccaagatgaggttgtatttgcaaaatccatctactcggatgatcttattcaaacctatcaagacaaatatagttgaggctcatatacagctgcattcccttctgaagtcggagtactctagtgaagaaatgcaatccatcgatcatgggttcatcctcttgtgagatctgcc

SEQ ID NO: 16867 - DNA, 1986 bp, Zea Mays
ttcagatatcagatccgccgcagactacttttaactggcactccaatccaaaatagcctacaagaactgtggtctttgcttaactttattctgcccaatatttttaattcatctcagaattttgaggaatggtttaatgcaccatttgcatgtgatgttagtcttaatgatgaggaacagctattaatcatacatcgtctgcatcaagttttgcgtccatttttgctgaggaggaaaaaagatgaagtggaaaaatatctccctgtcaaaacacaagtaattctcaagtgtgatatgtctgcttggcaaaaagcatactatgaacaagtcacaagcagggaaaaggttgcactaggatttgggctcagatcaaaggctctgcagaatctgtcaatgcaacttaggaaatgttgcaaccacccctatctatttgtagagcactacaacatgtaccagcgggaggaaattgttagagcatcagggaagtttgaattgcttgatcgtctacttccaaaactgcagagagctggtcacagggttctgcttttctctcagatgacgaaactgcttgatgttttagaaatatatttgcaaatgtacaatttcaagtacatgaggcttgatggatccacgaagactgaagaacgagggaggttactggcagattttaataagaaggattcggaatatttcatgtttctcctcagcacacgtgctggaggacttgggttgaacttgcagacggcggacactgtcattatatttgatagtgactggaaccctcaaatggaccaacaagctgaagaccgtgcccatcgtatagggcagaagaatgaagtgcgtgtgtttgttcttgttagtgtcggctccattgaagaagagatcctggaccgtgcaaaacaaaagatgggtatcgatgcaaaagttatccaggctgggttgtttaacacaacttccacaggtgagtttgagtgatctaattcctatttatttaatttttgtctactacacgactggaactcgcatgacattttcacgttcatttcccactacagcacaggacagacgagcattgctgcaggagatccttaggagggggacaagctcgctgggaacagatatccccagtgagcgcgagataaatcgtttggctgcacgaactgatgaagaattctggttgtttgagaagatggatgaagaaaggaggcttagagaaaactacaaatctagacttatggatgggaatgaggttccagattgggtattcgccaacaatgatttacccaagagaaccgtggcagatgagttccagaatataatggtcggtgcgaagcgacgtagaaaggaggttgtctattcagactctttcggtgatcagtggatgaaatccgatgagggatttgaagacattccaaaggcgactcagaggtcgaagaagactgcttactcatctgacatccaagttgagtttagtgaaaggaggaaaagacctaggtctgtagaaaacagcgcagacggtgtgagcaacccgacgtggacgcctgacaaaggaagggctggagtttcatcatacagcaaggacgagactgaagatgatggcgaagacgaagtcattactagcggcttacaaaagggaaacagtttcacatggaataccctaggaagaagaaggtcaagccacttcagttcgtcatcggactcgagagggcgcccaacattctaatggcaacatacatgaatgttatggcctcgacctgttggttgatggaatacccttgtagagcagggctgcgactatgactgagtaccttcaagcttatgaactttattaggattactagtatactgtatggacttgttggcatgaatttgtaactcctttaaatattaattgtttaaacaactggtggtgtttgctatcataccgcgcctacatgtttttatttttttgctaatcaaagtttttgtggccaggttttattggtg

SEQ ID NO: 16868 - DNA, 1300 bp, Zea Mays
gccgccggcgcgcgtgacccacgaagcaatttcaaacccagccagaatcaggagcaccgcgtacgcgacgtcgcggtcgcggcccagcttccagcgcccgacccggcgggcaagacataaaacacggcaacacataacacaactagtgaaggatacatcagacaagcttaaacaagctagcgaggcggatcatcgcgttgaagtcagcgctaccaaaaagattgctgatgcaaagctagctaaagatttccaagcagtcctaaaagaattccagaaagctcaacgattagcagtagagagagaagctgcatatgcaccttttattactcaagcgggcctgccacagagctacaactcaagtgaagtgaacaatggtgctgataagttggcagagcagcgcacgcagcttctagaatctagaaggcaggagttggtcttcttggacaatgaaatagtgttcaatgaggccatcattgaggagagggatcagggaatacaagagattcaacaccaaatcactgaagtaaatgaaatcttcaaagatcttgctgtgctagtccatgatcaaggagcaatgatagatgacattgattcccatatagagaatgctgttgtagcgacttcgcaggctaaaggtcagctttcaaaagctgccaagactcagaagtcgaactcttcgctgatatgcttgttactggttatcttcggcgtggtcctgctcatagtgataatagtacttgcagcataaaagcttggaaggcagctgaggttccaatgatcgagcttattgcgatgaattccttattattattttttttgctgtgcagccaggaatggatcctggcatccgcctggatgtatccaggcggtgattggtgatgtgcttgtggtatggctgtgtatttggtgatgatgtatctggaatgcatgggtggtttcacataaaagtatactctttcctgccagtgtagttcctcttgtctcatatgcacgctttgtttatatattgtaatgtatgagtgcgtgctgtagaacaaggttggattatctgtggtatgaatttcctcgattccatgagaaacgcttttctatatgtgaacttcgcttcctcttttcttcttgggcaatgggcaccatgttgttaggtggagacggaggtccatcattgttttcttcttgcttattattatgtggtccatcatagttttctgcttaaggaaatggttggttcaggagaggataaaatagtgttattgtaatcttctgtatttataatgaccgaagatatcgtacatagttt

SEQ ID NO: 16869 - DNA, 526 bp, Zea Mays
cattaggcctgtaggctcgtgtctcagcgatgcggagaaagcggaagacaggtcgcttgttctacttctacctggcctcgcaggcttcgcaaggcggccacacgccgatacctcctccttcacccgctccgtcgtcccccacagccggccacgccaccatgctgccaccggccgcgcgccttgcggcccgccgcctcctcggcctcgcctccgcatctgcgtcggaagccgccggccgccggatcgcttccgcaggctactccgccgccgcgtccaggggctccgtctccagcaccaggcccttctccacggctcttaactaccaccttgattccccggagaacaagccggacatgaaatgggagttctcacaggcgaatatgaagaaggtcaatgagattctgtctcactatccaagcaactacaagcaatctggtattattccgctgcttgatcttgcacagcagcagcatggtggatgggtgccagttgcagcaatggatgctgtaagttctactatgtgaaa

SEQ ID NO: 16870 - DNA, 2353 bp, Zea Mays
cccgccgcgaaacccagcacgaccgatccatccacctcacaccgcgtcttcgtccagctcactcccccgccgcgcccccgctccgctcccctctcttcctcgccgcgggtcgcgcgcagccaggcgccgagccgccgaccagtaaccgacgtatatctcatccttccccctcccccctgcacagccccctctacaactccccgattaaaccctagaatctcccaactcccaaatgcgcgcccccacctaggcccccgaattcggcatccgctccgcggaaggtgtgcaagccagggtgcacacaatgagtgcgggtttcaacaagcagatactggctcagaagctttcgaagcttaatagctcacagcagagcatagaaactttatcacattggtgtgtctttcatcatcgttactgccaacaagttgtagaaacatgggattgcgagtttcatgcagctcctggagagaggagggtatctttgctgtaccttgcaaatgatattatgcagaatagcagaaaagaaggcaatggatatataactgaattcatgagggtcatccctgctgccttgaatgaagtgttgactatcagagatgattttgggcggaatgttccaaaaagactgattgacatatgggaagaccgtaaaatatttgatactcaggcacaaagcctcaaagatgactttttcagaaggttaaaggacattagaaacaaattgaaaaatacgggcagtgagctgctggagaaggttgtctctagctacaaacatgtcctgaatgctcctatggatgaggatactctgatgcgaaaatgccaagcagctcttatcaattttgatgaactcaataaaacgtatggaaacaactctgttttaggtagcagcaatcaatcggaatttatgcagggggtgcaggaacaacacaacattctcagaaactccattgaacaactcaaattgtcagaatcactcagggccactctgatttctcatttgaaggaagcgctgaatgagcaggagctcaaagtggaacaagtcagaagcctgcttcaggcagctcagcctcgattcaagagagctgctgagctctgcgtggggcttggaagcaacatggaaatgcatgagccatcaaatcaagggcataagaggtctagcctctctgatccacttagtactgttgctccaggagctgagaagtctcttcaaaagggacagtcaagtgcagtgttgtattcacaggagggaaatggttttgagcacatcatgacagagacaaagcttgctgcaggtgatgcttcagacaatatacgtggtggtgatttgccttcacaagtgaatgggggcaacaccaagctgaaaatagaagagcacacttctggtaacaagaggcagaagctagaggatgacacagatatttctcagcctcaatcacagtcaccgccaccgccacccccattccctcatcctgacgcattcgaaccaccaccaccaccaccacctgaggttcctccatcaccagagcctagcccaccaccaccgccaacttcaccgccacccaatatgatccccccgccgccgccggcaatgccaccccaaatgatctcacatgtaccacctccagctggtacatttgtaccttttcctgctggaccacctggtccaatgtattccagctacccaccttttactcctgtggtcaacttccccataaccagcccaccagctggtttccctagtccaagcccgcctccgccttttcaaggattagtgggtacattctatggccctcagttccccaccgcacccccaccagcagacaggaaatgagtgtagtaacctaccggcagcccccctcatcatactagtttatttccccttttcaacagagaatatgactcggggggtggggggggggggggggggcgctccatcagcatgtgttgtggagctcagaagattgttgtaaatttagccagtcagtgcgcagcagtgaattttctgaactagttgtggtcttggtcctggagtagaagtgtagaacctgtagatttcgactgctagagagaattagggattctgagagccgagaacaaatgcctgcgacagattaataataagttgtggtcttgttggagtaaaaactgtagattcccacagcttagagagagagcatggaactcggtagcatgacatgttgtaactcatgtacaattgtgttcattgccagatcatccgagaacatgtacatgttcccgtgatgttttgagcgtgtaattctgttgttctgtgtaagatatggcttgagccgctgtcgatggttgaaactttttgctctcggtcaaaaaaaaa

SEQ ID NO: 16871 - DNA, 608 bp, Zea Mays
aattctatagcaatctgttcggcaaagagaaaatggcgctcgaacatctaatgctgcattacgtgcaaggaagagtgttgctccaggtccaagtttcaatgtctccagaaattttgattcgggatgcaatggaagtcgcgaagcaagccgaagaggagatactcagggctgatgccagcataagccaaatcagcttgcagctaagattgggccaacaaatcaagcaacttcagctagcatcgcaagaacgtcgctgatctacatgcaggagatcactgatccatttgctggctgcttcatgagtctactcgggagtatttccttttgctaatttttctgacatacatgagcttggtctgctgatgaggcagtaggctataggattctaggaaccgactgtgtacattgtaatcagagtgttcggagacgtgaagctgagtttgtaataatacacaagcagccttgctcagaaatgtactgggcaacaaattgtctgccacatactgtcaatgtaaaatgtatgaacaagttcctcactggccccgctataataacaacgaaccatggctactgatgcaaaataaaatgaatattgttttttttctgtg

SEQ ID NO: 16872 - DNA, 2168 bp, Zea Mays
caggcgctgaggcgcagacgagccgagccaagccgcgagacgggacacacacgagcgcacgtcccgaggccaactcgagagcgtggagagtcgagagcccaccacccgcgacctaacccggtgacctctctcccctcccaggctctcccacccacctttctcctctccttcattcctccccgtcccgcgtcgcgtcccacgccgccgcacctccgcggcagcgctactcctcgccgtgacgtcggggaggcctcgctcgggggagggctgcctgcctgcctggctgggtgtcagtcggccgtagaggaggaggggggcggaggagcttgatctggggcacctgccccccctcccctgcgccgtcgggatgtacatgccgccgccgccgcccaccggcggcgccggcgagcagcctaggctttaccaggaattcttcttgcagggaagattcatatttgggcctgatgtgagatctgtgtttctcactatgatcctcatcatcgcaccagtggttgtcttctgtctgtttgttgcaaggcatctcataaatgatttccccgatagctggggaatctcagtgatggtagtagtggttgtcttcactatttatgatttgacgttgcttctttgtacctctggtagagatcctggtataataccccggaattctcatcctcctgaacctgaatccattgatgggatcaacgacacgggtgttcagactccacaacaatttcgtttgcctcgcacaaaggaagtacttgtaaatgggatcagtgtacgggtcaaatactgtgatacttgcatgctgtaccgaccacctcgatgctcacactgttccatttgcaataactgtgtggaacggtttgatcatcactgtccatgggtcggccagtgcataggactgcgtaattatcggttcttctatatgtttgtattctcgacgacattgctctgcctctatgtatttgccttctgttgggtgtatgtgatcaagattagagctgctgagcaatcgtcagtttggaaggccttgctgaagacaccagcatcagttgctctgattatctactgttttctctgtgtatggtttgtgggtggtttatctgtcttccatttatacctgatgagcactaaccagacaacatatgagaatttcagatatcgctatgatcggcgcgataacccatataacaaaggtgttctgaacaattttctagagatattctgcactgctatccccccttcgaagaacaatttccgggcaagggtgacagcggggcaagggctgcagcaaacgcgctcacagtccaggggtttcatgagccccagcatgggcaagcccattggagatcttgaaatggacaggaagccagtagcaccttgggacgagccaaggacggcggctgatatcagggacttggaagcagggcttggggtcatgttcgatgagaaagagggcagggtagctcatgcatccccagatctgagcagagaccttccagcagagttcgtggaaggccgatctggtatgcactcgaggcagtcaagctgggttcagagaggagacgcaatcgaagcgtcggcggtgcaaatggctaatgcgcgcaccacggaagctagcaacaatgttgcctggagcggtacacattaacccaaaaaatgataaaaagaaaaggaggaactatggtgtgttggcgatgtctccaagtgaacccccgtgtgtttgttgccacgtgtgctgctccgggtaaggccctggatcattctgtaatgtataaatcctaagcacaagcttgctgctattgtttcatccctggtagcgtaccaggtccctgcggctgctgctgctgtcttgtgtgtgtttgtttgggtgacaaattgatgaagtggccgacgagcttaagctcccgccaggttcggatgatgtatacaaaattgttgtcaggttccaacggatgctgtgcttggtttgccacaccagcgctgcgtgctttgggtactcgcaagtggcatctgggcaccccgctcccatgcaaacttgttcttggtgtaagcctggaaatctgctctgtatggttggcattgttgtatttgcagatgtggacatggtacttgctagtgtagaagaatgacattgctgagaaattggcttggaactttttgca

SEQ ID NO: 16873 - DNA, 1075 bp, Zea Mays
ctgtactgctgctatttttgttagatccatactgcacttgtgatggttgcagatgttttgtgtttcaaagagcaattgcttgctttctcagtttttaatagaagttaagtagcttgctctcttaggtgtcgatctttgttatcctgcatttagttgttgacaagcaaggtggcagcttatgttcctagtgcaaaaaactgcttaatgcccaatcatcatacagtatctcgctccttttggaatactaaatttgccagacctgatcgcttctgagaaaatttgctactggagataacaaatttcagttttatttcgcatttaaagatgcctattgttatagtatctgaggcagtaggacaggacatataacatacaacttccccaaccattcatgatacaatccatgaataacttgagttatctgttaggcaataagttactgctcaactaaaagaaatgaactatcaaatgcaaatgctacttaagtaccttgtacctatgctagatcctatgtcaatgacgaattgcacagtggaattgtggaataataaagatcatgtggtacagctgtccaaaagcaaatatatatgcactggcacttcattcttggaatggttgaaattacaactgatggaagtgtcagtcaggcagtcaggctgaagcatcaagttagctcggaccaaatgtgtaaaagagtccggtatcctgtcgcatgttccatgacatgtgacattctaaaggggcagttggaagccaagcacatcaatgtttttaatttcatctgtctttattgtaattgtataagtttacaatagatgcatagaacagactggatcgataaaagcgccttcacagaccaaaaacccggtatcacggtagtggttcgtgcatttcgttagaaatgccctacgtcttattttgaaaagttgtgcttgtatatcttacttattgacaatagctgtacttataagactacttgcataaagaagaaaagtgaggtgcaaggccgaaaggcccctatgcgctaaatacaaatgcctttgtgaatagaagactttttttttgttatcatgaa

SEQ ID NO: 16874 - DNA, 2968 bp, Zea Mays
aataatgcaagtggggtcacggcaaaggtgtggcgcgtgcgtggacctcgccctcatctcgtctcctccggcggtccggcctgtccaataattctagtattccaccgccgcacacctcctgtcttccttcaccttcgcgctccgccgccgccgtcgattcgtgctgctctcacccctaacctgtccaacatcgccggggagggaagcagcagaagaagctccccttacctccggctatcgcctgaggataaagtggggtctgtaggggagtcttaggggggagcaaaagggataggatagggagagatgaagcaatcaatttcttcgtccgccttcgcccctgcttacgtccccgctactaaccctagttatgaggttgaacgccttcagaagcttctctactagattagtgtaaatagtagacttgttcgagtttagcttggctggaagaattagtctctggtccgtgtttatatctgctagcaataatggctgcgatgaacggagaggtattgggtgaatgtggaaggaacataaatagtctcaagagaaagcgggagagccccgctgcatatgctgctggcgtattctgcacctctgaattgcatcagcatactgtcaatgattctgctgttaggtttcatcttgataaagaccgtaaggcaaagatcgtgtgccacttcaacaagcaggttttgcagagctataagaaattcatgagtagtgcaccacctaagcgtattttgcttcgccaaggtgctgtctggaaagactttccagaaaagattgtcaaattggcccaagctgacttcagggcaaaaaagatgatcacagaaacaggatatcagaaccagctatttttgctggattttgcccatatgacattcatagacacaaagacaggttttcagaggccaattgcttggatcgatgaaaatgaaaagtgctacttcccggaatcatttatacaagatcagaagttatttatgaagaaagattttggcaacggaaatcatgagtacattagtgaagagcgaaatgggacacgagaaacgaatcaccagtttggagcatcagaaagttctgctgaaagctcaaactttgagtcaagtattggagatgtttctagtcctaagagagctagggctgaaaagaatttcattgtaaaaaaatattgtgatatgggagaagctattggagaaaatgagtcatgcactttgttgcctacagcctgtaacctactaccacaccaagctaatctgggtgaggtatcccgtgctcagcgcactattgaagccgtggagaagctgttgctgcaggggatgggttcagttattgaatccaaggacattattggaatctacaggactccattattggatgaccacggacaagtccgttaccatattcaccaaaagcaagtacaggttaccggatgtcatcgtggaaacgcaaatgtccgttatgcatggcttccttgctccaaaagcactgtgcatgtaatgatgctgaatggtgttttgcaagttgataagcctcccaataagtgtgcagcctatggagagggcactctccttacaccagcaaatcgttcggatgcctgtgtgaaatactctgatgttgatgaaaatggcattgtccgtatgatgttgtgccgtgtaataatggggaacgtagaaatagttcaccctggatctaagcagtgccaacctagtaataagtattttgatagtggagtagacgaccttaaaaatccacggcattacgttgtgtgggatatgaatctgaatagtcatatctattctgagtttgtagtcactgtcaaattgccttctaaaaccaaagattcctttgtatcgcaagaaaactgtcagaattcgtctgatctatcactggtgttgaactctagttcacctgattgtatttcacaggtaagatgctttacatggggtattaacaagatagtactgtaacactagagacaactgttgctaacttgatatacagaagagttccactgttggagcagcaagagtgcagtaattcagattctgtgatttgactcaataattgacatgattgcattattgagattataacttggagctgattatattcgttatctatgatagaaacctccaaatatgataagtttccctgtgaaaccatgctattttagccacgctggagttggttaaagcaccagttaacaacttccttttatgcataaaacaggagatgaacctggaggcacctccagcattgggaggtggatgtgcagcccccatgctaggagattcgatggaaaaggctccaagctcaccttggatgcctttctccatgctgtttgcagcgatctctaccaaagtgtctcctgagaatatggacgtgattattggttgctatgaagagtttaagagcaagaaaataagccgaggtgaactagtgaagaagctgaggcatgtagttggtgatagagtgctaatatcgacgataatgcgtctccaagataagttacctccagtggataagcgtgaggaaccagacacatcggcgtccaaggtggtggcggaaccatgagatgggtgtcaggaggtgggcgaggaatgcagaaagggaggaaccagccgacttgacatagaaaaccctgtgggaagcagcaactatgaagcctcttgcatcagtcttgtgcatggaggctgctgtttgttctctgtatcgtaggtgtctacgtttgcgaggaaattgtatccggtgtttctctttcttcaaattaaaccacgcacatgcagctgccgtactttttggaccattgaagtgtttcgtccgtgaaaaaggctccttttaccttcccgtttgccttcctaagagcatctccagtagttttgtaaaataaaactccctaaaagacgatgtagagagttgctaaataataatagagagtaaaaaattgcatgttcttcaatag

SEQ ID NO: 16875 - DNA, 1191 bp, Zea Mays
ttgagattgaaaagtctgaccgaatctctgctttctgatatggaaaaagggaatcttgtttgtcgctattgatcagaaacgcccattgtctgatcaaggtccatttgacattgttcttcataagttgactggaagggggtggcagcaattgctggaggaatatagggaggcacacccagaagttactgttcttgatccacctggcgcaatagcaaacttgcttgatcgccagtctatgcttcaagaagtatctgaattggacctcacagattgtcatggtaaagtacgtgtgcctaagcagctattcgttaatactgatccctcatcaataccagctgcagttaggagggcaggtctctctctcccattggtggcaaaacccttggtggcgaagtcccatgagctatcccttgcttatgatccaacttcactgaccaaacttgagccccccttggttcttcaggaatttgttaaccatggtggcgtcatgtttaaggtgtacattgttggggatgcaataagggttgtacgtcgattttcactcccaaatgttgatgaaggcgatctatcgaacaatgctggggtatttcggtttccaagggtctcttgtgctgcagccagtgcagatgatgcagatcttgaccctcgtgttgctgaacttcctccgagaccattgcttgagatcttggcacgagagctgcgccgacgactgggtcttagactattcaacatcgatatgattagggagcatgggacgcgagatcggttttatgtcatagacatgaactactttcctgggtacggcaaaatgcctggatacgagcacgtgttcaccgacttcctgctgagccttgccaagaaagagtacaagagacgacaaagctatagctcgctaagctcaggcgaatggtgataagcgaggagactactcggcggggcatgtatatgtctatcatccacgatgcgtgcgtacagatgtacttgtgcatgacgagagataatgggtcgtagaagcggagggctgttgtcaggctataactaactgttgctttacatgtgctaactgttgatgcttcagaataaattttgtttgggtggatgatggctctgctgaaatcgagctacttgtagaacttatgactggaacctcgaaataaacggagaatttggattacgtaccgtactacttgc

SEQ ID NO: 16876 - DNA, 480 bp, Zea Mays
cttcaccaacgaaaacattgcgaagggaatctcaaataacaaaatttgtcgatcttaagtttcttcatcaaccagtttgttgtttcggctagcgaccggtgcgcaagaaggaagggataaggtgcttggttgacccggaccggacgacaggacaccgtcggggattcgctgcaacgcagcgacggcttccgcatcttctcaggccaaggtttaatatcagctaccttgttctacaagctggctatgtgggggaatgacagatgactgaaatttgttggggatgcaaagattcttcgaaggaactttgtgattgatctgttaagttatgaggacaattcgtgccgatatgccattcctgcaaacatacaatagagacttatcgatatcgctaaaaaggattagctggttagtgtacagttgtcgacacatttttctgtaattaaaaattttaaattaactttttagaaataatttgtgtga

SEQ ID NO: 16877 - DNA, 960 bp, Zea Mays
gactctctctttcagtctttctctctctctctcctgtcgttaattattaaactttaaacgataaaaaccccagatatcagcctgacccaaaaacgttttctttttcaccaatgtctgtaaaattctatttatagaggcagcaaaacctcgcccactctacaaacacgtgacacctccgcccaccctcgccccctccctaccggcaccgcccagatggcctgctcccacatcgccgccgcgggggtctcctcccccgccgcagcggcggctcgttccccggcgcattctcccgcttccgccttcgcgcgcctccggtcgacgcctcgtttcgcgagcgctggcttgtcggttaagggaaacggagcggcgttcccgttggtcgccgccgcggggccggccgcggcggcaccggtggccgacctggacggccgcccggccacggagaagcagcccatcatcgtcatcgacaactacgacagcttcacatacaacctctgccagtatatgggggagcttggattgaacttcgaagtataccgcaatgatgaactgaccatagaagatgtgagaaggaagaacccaaggggaatacttatttctccaggacctggtgaaccacaagattcgggaatatcattgcagactgttcttgaattaggcccaaccatcccaatttttggagtttgcatgggtctgcaatgcattggagaggcatttggaggaaagattatccgtgctccttctggagtgatgcatgggaaaagctctccagtttattacgatgaggaattaggaaaggcattgttcaatggcttgccaaacccttttactgccgcgaggtaccacagcttggtcattgagcaagaaaccttcccacatgatgctttggaggctactgcatggactgaagatggacttatcatggctgctcgccacaagaagtacaaacacatccagctg

SEQ ID NO: 16878 - DNA, 934 bp, Zea Mays
tctagactcgaccccttcttcaaatcgctcagcttgatctatcatctacctgggtatttggtgtaaggtggtcaccaagtgggaagacattggcctatgcagggcacaactccatgatttatttcatcgatgaagtcgaatcatctcctgtggcacaaaatttggcactgcgtgatctgcctctccgtgatgttctttttgtctctgagcgcacattgattggtgtcggatttgactgcaatcctatgatctttgctgctgatgatactgggctttggactttcataagattcttggacgagaggaaagctgccccatcagcttcaaaagcctcgcagctctctgaagcccttggaaagctatacggccaatcaaagcaagggactagtagtgataccgttgaaccatcaaaacctcgtggcggggcccatgagaattgcataacgtgtattgtacccttgagaaaaggaagcgacggtagtatcaaacgattcagcacatcaggattggatggtaagatcgtggtatgggatttggagaatcacgtcagcattgcaaaatagctcgagggagactttatcaccaatcaaatcgagggaactcctgtcattaccagccgtcctgcaggttttcaagatccagggccagccagatagattgttttttttttaatttttaaattttgttgtacctgtacacagaaacattgccttagcgtagggacagcttgcatctatcaagtagcttcatttttggcgagtaattttgccctttgaattgaatctatacaatattatactataattttagttaggtcgtaggcagttgacgtgatcccgcgttctttcgctctttctttccggtgccctgtgtaaaataaccacacgtggaatcttatctatccgggacttgtggtcatcttgtttcttctgct

SEQ ID NO: 16879 - DNA, 3161 bp, Zea Mays
agtaacatcagactttcccaagtggaatattgcttagggcaagctccctccatcggtccgtctctctcagcttcttcgtcttctctcttaggttgacctctttgcctcaactgcgccgcccgctcaccaagccaggcagaggctgcaggggtcgtagagttggagggcccagtccatctgggaggtcccagtgccgcccgctcaccagttaccagccaggccgtcgggaggggagagagagagagagagacgaaaagatcgagacccatacgctcagatcgaagttcgacttctcctctccccctcccccaacctaacagattcgtgtagcacagatccatccgactttgggttgatttcttcctttgctgctgatcagaaagttacagatggatcatgctgaggtctctggtttgttgtgtattggtacacgtgaaacagatgggggtgaagaatcatatgcggctgagtaccctaaaatggatcaggataccaatgcaacgaccaaatttgatgtagtaatggagacttcagcaatgtatactgatcaaatcaacaccaatgcttgcttagatgaatatcacatgtctggaaaacagcctatggaagaaatgggatttggcagtgcacatccctttgaacttccatcagaaggaatggtagctgattctggggaagaaagcatgccatctagccctgacacatctaccagtaattatgatgcgcctggttacacggagcaaaatctgcagcatatctataattcgtatgatgcactggttgacaaagacggagttgtgcttactcctgccttcatgatatgtgacaaaactttgtatcttgaacctcacctcactttctcattggacgggatcaagattgagtatttggatttagattcctttgaagacgagaagctgtcagctctacaatgggaaatatctaatattatttccatcagttgtaaatggactcgtagtgttggatctgccttaataacactccttgttggatctacagcagaaacaggaaatgcaggtcctgttagagcacgattttctcttgatgattcgcaatggccaaggagacaacagaggatttgggaactgggaccaagatatcaagaaatatggaaagacatcccatcagatgattttgcattggagaattggagcatcgaaccctgtctgtttttccctaggcaatacttttccagctggtaactggatcttttcagaatcatcccaagctagcttgtggtggtgagcagcttgacgaaagacatcaaagatgctcaaatcctggtgaacctgaaacagtttgcacagttgatgatggaactccatgaagtacagccatccaagtccatctgtttatatgattccaaagaggggctacctacttctggatgcatgttggacactggaagtgtcccaattgttgatgtacagaatctacaagagtcagaggtttgtgcaccagtgaaggatactgttgtttgcttgtcaatccaggatgagaaaaatgacccacttgcatctaacagtcaacttaatatgagatcatattccccagaaggtgatggcgtgattaaggaatcaaatcgtgtggtgacagataaggaaaatgataagtctttgtttctttctttggataatgaccaaaaagttcacagccaagcagaagctgaggtgcaggatattatggttcgtactagctgctcaatatctgaaattttagctcagaaaattaccagcaaagaacagccctcccaaaaaagcatagaagttggggatgagtgctttagaccttctcaagatatggattatgttatgatgtttgactccagcaaagatgagaatggaccaaatccagaaagattgacagctgaaggtgattgtggcgatcctcatgaacgtctggatttagtcacagtaggtgatatcggaaaaatggttgtagacaatgcaatcatcgaagatgtgaagagtaataacacaactgcaaacaatgtcaatcacggtgagctgcatgtttcattgcagttgccagagggaaacactgacaatggtatgactggtgttagcacagcttcctctttagacataaaagagggaaacaatgacaaagtagtggcagatgcctctgcacatgaaggtgatataaatgacaatggtagctctgaattgaaaataggaaatacgaacagtggtattactggtgttatcgcagcttcctcagacttaaaagaggaaaatattgacaaagtagtggcaggtgactgtgcacatgaaagtgatataaatgctaaggattgcactgagttgaacattggaaatactgataatagtattgctggtgatagtacagtttcccctgaggtgagcgcggaaaacactgatcaaatcatagcaggtgattgtggaaatgaaaccgatttaaaagctgatggtgagggtgctgacaaattcttagcaactgacagtgctcttccttgtgaagatgatgcaacttgcatggatggtgcgaatgtgattgtatcactagatgtaccccgtagcacgaagaatgatacattttccaagaacacatcttctgacgctgaaatgcctctgcctgttggaacctgtgagctcgtcgatagaccttcttccgagaatgacatgtctgagcacacatcttttgatggtaaacggcctgcggatgataggactttggaagagaacgaaatggttatgcctggtgatgaaaaaacagaggtgcattacaagcgacggaaggttttggcctcagagaaacaaagcagcttctccggagcaacttctacagattaggtttggctggtgtgagacttagttttagtttctgggatatgtgacctgtctagtccttgacaatatgctgcctgtgatatagtatatatttctgtaatataaggtactgccactaatgactgtagaaataacaaaaagaactggaatcctgaaccctgatgtctgcttgacagcgtggtttgagaattgagatactgtatatggtctgagtattgcacgacctgcactgcacatgcaagttgcacgatataggctgtttccaaacatgtggaaggccttgtttacctgattagttgggatagaccatgctatgattgttatgatttg

SEQ ID NO: 16880 - DNA, 3173 bp, Zea Mays
ctcatagccagtagcccagtaacttgtttgatctgtcttgctgcaatcacaaagtttggatcagcaaaagtttcttgtcagcaattctcttcaatggtgcctgatattattggtcgattcatggatatgcttcttgagtttgcccctctaagtaaagcatataacttggcgaaagatattggtcttcggagagaatttttgtataattttggtcctcgtgctgctgttcctaaacttggcaatgaccatggacttgaaatatcattttggattgaactggtgcagaagcaattactctgggctcttgatcgtgaaaagatatggtcaagactgacaacaagtgaaagcattgaggttctggaaaaggatcttgcaatatttggtttttttgttgctttgggtagaagcacacaaggatatttgtctttcaagggtttgactgatttggatgattcactgaatggtattgtaaggtatcttatcggtgggagtgtactatattatccacagctgtcctcgattagttcatatcaactgtatgtggaggtagtctgtgaagagctcgagtggcttcctttttacaatgatgatgttttaagtgcaaaaactgatactgaaggtagagaagaagtgcctaaaggagaagtcatatcaagagtcctaaatgtgtgctcttactggatgactagttttacaaagtacagctcatggcttgagaacccttcaaatgtgaaggctgcaaagttcctttctaagggacatgtcatgttgagtgactgcatgaaggagcttgacatatcaagaaatatgtcaaacgacagtggcttcctagaacctgaagaagaattggatactggaacagaattagcttcctttgacaagtcgcttgaaaatgttgaagaagctctggttaagttagaaaatttgcttcaagaattacatgtttccagttcgcactctggtaaggaggatctgaaggctgcatgctctgatcttgaaatgataagaagactgaagaaagaagctgagcttcttgaggcatcctttctagcaaaagcagaatatctggaggccgatgcaagtagcggatcactatctcctgcagaggaaggacctgtaaagacaagtagcaggacgaacgatacatcagcaccacaaaaaacaggaagcagggtggataataaacgtcgcccattttgggacttctttggtcggtctttgaaagttgatccagctcttgcagatcaggatctgatcactgtcgccaatgtggagaaggaaggcatggagtcaaatgacatcctccgcttcgaacagttaagacgtgagctgattgagttagaaaagagagtgcagaagagtgcggatgaagctcaaaaggaggaggagatggttgtcgcagaaaaaacaactgcaccatcgcctggatcatcagtttcttctcgtcagactaccaagaaagaaaatgtcataactaaatcagtggagaaggtcaaagagactacaacgactgtgttgcaggggacacaactattagcaattgatacaggagctgctatgggtttgctaaaaagagctcttattggggatgaactaactcagaaggaaaagcaggctcttcaaagaacattgacagatttggcgtctgtcgttcctataggaatactcatgcttttgccaatcccgtccacatatgcccccggtaggttggatctccttaggcagattgagaaggttaaggaaatggaagttgctgaaggcagcagtgaagatatattggaggaactgaacaaatgaaataagctgggcatgtacagatggacatgattatactgcttagcttacggtctttcctgtaaagttgttttggaacaagacatttgagggggtttgttttatctaaagattctttgaatggcatacccgctggaaacagaagtgcaaggccctaggaataagtaaccaatcattgtgtcgacaaatgttccacgtctgcaggctggtgtatacataaaacatactccacattatacattacatgggcggctcacggtgcccttcaacatagtagaggatgaatgtccaagttcctcctggacagtgttctgtgtagggtagtggttttgatagaggattgtatatctagttggtatgttggtgatcacctttgttttgttttttaggaaccaagcctactacatgcattattgtctgtacccaaatgccaagttcagtgatctcctacgggattgagtggtgcgggcattttctaataataagccaagcccgtgagcaagatgtaggcgtgaacagtgttcgtcagtcgccgccaccgtctcccctcctgatccaatccaatggcgcgcctccacctcgtagccgtggcaatgggcttgctcttggccttgacgacggcgcaggcaccgggcgcgtccacgatgcccgcgcccatggcgcagcctccggcgacctcggcgcctcctcgtcccgcgccatccccgacccagaagaccgctccagctccggcgcccaatgccacggtacccgcccccgcctcgccgccggcgccgagctctatcgggcagacgccgaccgaggcgccgtcctcccctccgccgcccagcgccgcgtccagcgttgcctccgccttgtacgtggccgccgctatggcggctgtcgtgtttttcttctgaggtcggtactcggcgccgatggatccgccgcctatggtatggtacggtgcggtgtggatttgacacgatggctcccgctaccgctggtcgagtttgcttattaggatactagtagttaattaatagttgggttgatcagatcagatctagcgtttttgttgagtggggatattatttcttctacggatctgcacactagggttatgtcactatggttgccattgttattagggaaggtgcaaacttctaatttgaatcacatgatgttgatccaagggacgcataagggacgccaagcttattaaaacgataaaacgatggaacgctcatgggtgaaattttgacttttaaacgtttaaactttgtttaaacatagttttaaacaacataggaaaaataccaatatatcataatttcagacaataatatgaagttaaatactccctccgtcccaggatataaggcgtaactactttttat

SEQ ID NO: 16881 - DNA, 274 bp, Zea Mays
ccgccatctgcaagcgcgcctctgctgccgccgccgcgtcctaagaaagaaagaacgaacaaaagaaagagatcgtctgatggtctcagacgacaactaacatgttcctttcaccgttcgtagagcgcggagcagcacggcgaggaggcggcggcgagctcggggcaagccccggaaaacgcgcgtccactaacggtcagcgccgcctactcctcaacccctcttcctcctcgggagattagatttttgatttcccctgctgtgcgtgactgcg

SEQ ID NO: 16882 - DNA, 2888 bp, Zea Mays
gccgagttgccgacgcaccgaaaaaagacagctgacgcgaatgcccaaacgttcggggggcgagcgggatttggaagctgcgcaacgcgcttcccaaatcccccaatcccgacgcccacccgaccccgtcgccagatctcgcgcctcgtccccggggctcgatcggataagcggcggtcggcgattcggggacggggtcatctcgcctaggcttgggcggggctgggctggtgggagccgccgagccggggagccatggcgtcggcgcaggcgccgtcctccgccgctgcgccgtcgcgcaaggaccatctcgaggccgggaagaagcggctcgagcagttccgcaagaagaaagcggcgaagaaggccactgcagctagtgcagagcaggcaaaagcgcctgcgcctgatgtagtggagaacccacctccaattgtcaatgctggtagcttgggagatggactggtgtctgatgtagacccaaaccaagcgagcacgtcttcggtaccattgtccgtatatgagaatggcccagccagtgcatccaggggtgcagaattcatgtcaaatggtcatcagcaagatgctgttagtgatggaggacgtaagttctatgggaacttgagcttctctgaccttgttaatggtcatcatgagaattggagaggcgacggagcccgtaaaaaggacgagcacagcccttacaaggatgtggaatcaaaatcaaaattaagtgcctttgggaatggcagcagtttaaatttaccttctactgaaaacatgccgagttggggaagaaattctttatcaagtcaagtacatgatactgaacaatctagttcatattcatccagcaccctttttggaaagtccaaaaatgcctatgctcaggattactccacaaacagtgatatctttggtcgtttgagagctacctccgaagactcttccaaagtggagcaatctatgtatgccagcactcgagattatggcaatgccttcaatagttcaatgattgccggtactgtagatcatgatacaaatgttggaataactcggacatctgcagattccacacctgttaattctgaaagacaggatccttttctgtcatctggttatccaactacatacactcgatcaaggccatcatttcttgatatgattggagtgcaaagagcccccctaacaactgaagcctcatatagggagcctgcaaaggctaatcaactatccagctattcaaattatcagagttcatttttgcagcaatcaaatcaacaatccactggaagtaatgctgcagatattccttttgcatcagaaagtcaggaatatagtcatgaaaaggggtcatatggcagctccactcctcctgatttcttacttcccaaagaagaaagaagtaaacaccatggtaatcaaacattccaaaacttcacaactcatgggaaggatgatgattttgcagcactagagcagctcattgaagatttgacaaaagagaagttttctttgcaacaaagtcttcagaaatctcaagaactagccgaaactttggcgacagataactctgcattaactgataagttcaaccaacaggcacatgtaatcagccagttgacatctgacatggagagattgcaggaagagattcaagctcaactgctggcgctggagtctatcaggaccgaatatgctaatgcacaactagaatgcagtgctgcagatgagagggcaaaagtacttgcagctgaagtcattctactagaagataagggtttgaggctgaggtcaagtgagctaaaacttgaaaaggaagttgaaggtttacattctgagatttcttcttacaggcgcaaagtttctagtctagaaaaggagcgtcagcatcttcaatctactgtcaaagctcttcaagaagaaaagaagctattgaggaacattcccgtgaatgagaaggcaacaactactgtagagaaaccttgggttgataaaagagacgcatcaactgcgacagaagatttagatattggggaaaacagctcttcagaaacgctaaccagcactgttgacacattggaagatgctggaatatctgttttgcgttccaacattatgtctgatttttcttccttagaagaggtctcatctagcattccagatgatcagcttagaatgattgacaacatcaattctttgatgtcagagttagtagtggagagagaagcgctgctgcgagcactgagaattgagtcatccaactgctccaagctgaaggagttgaataaggacctaacacaaaagctggagattcagacacagaggcttgaactattgacttctcaaaggatggctaacgagaatgccctggcaaaaccaattgacacacgctccatcaatgatgcaacaatgtatgcagatgaaggagatgaggttgttgaacgggtgcttggctggataatgaagctcttcccaggagggccaaagcggcgaaccagcaaacttctgtaatgaaaatagagctcctagtataccagatgtttctttcatttaaggcttgtttaggtgaaaggggttgttctaggagcaccaccaagtgtttagttcaaatttgaactaaatgttgaggaatttgttccaaatccccagcatccgaacatgcctttatatatatatatatatatttctttgcccggttttgctgatagcatggtgagaagctgtatattggagccattcaatgtaaccattatttatttttgacagaagataatgtaattccctggagtatggtgcgggcggcagcctgttttggcaaggaaaagaatagtcgcaaagaatagacccttttgtatccattgaatacggattgaaacaaagcagac

SEQ ID NO: 16883 - DNA, 137 bp, Zea Mays
cttgcaggtttattgtaataccttacatgaagaagttcatgtattgtattctcaactgcatcccaatgtacctgcggatcctgtcgggacagaagctggaccttctgggacagcgggggaagccttcggtggtgaac

SEQ ID NO: 16884 - DNA, 514 bp, Zea Mays
caaatttgcaacggttatttagggagagtcgcatataggcatatgagcagtatgagggaactggatttctgtcctcatgtacactaggcaaatggctaccttgttcttcaaatagatgttgaagaagatattacagcttcagagaatcagagctctcttttttggtgcttgtaatgttacaaagaagccccgacgatgatgtgaatcagagtagcacttcgtgcattctaatctgtgtactgtggttcgcgaaactaagattgaatgtgtcgagtgtttctgtgtgggcggttgtttgcctcttctgtactctgttgttcttcttctctgtttaatgaaataattcacagctctcctgcatgttatgttcgatcgagagagagagaaagagaaaaaaaatgtttgcacatagctgtgttgtgctatcatcttccatatttctgcaattctgctcctaactgggaatggttttccctgcggtgaatatgaattggccatttgggtgtgcgtggaa

SEQ ID NO: 16885 - DNA, 191 bp, Zea Mays
caaggacgcggagaggacacttaggcttgcgacctgggcgaactcagcgtttgcgagaccgggcaggaagggcgcgacgtagaaggagctcgactgctagtaaagcccgagcatggaggcaagctcgcggggaaacaacggttgagccgtcggcgagcagggaaagcgctggcaagcgcccgatgacactt

SEQ ID NO: 16886 - DNA, 990 bp, Zea Mays
ttcctttgctgtctcatttcagtcttgctgaggttccttgttgacatgaggggagctgacgctgatgatcgccagcttcgagatgatcttatgacaatgcttattgctggacatgaaacaactgctgctgttctgacatggtctgtttttttgctagcccagagccctaccaggatgagaaaagcccaggcagaggttgattctgttctcagcaatggggcaattactgtcgaatctcttaagaaactggagtacataaaactgattattcttgaagctcttcgcttgtatcctcagccaccattgttaatcaggcgttctctccggccagacaagttgccaggcgggtgcaatggagcaaaagagggatatgaaataccagctgggaccgatatatttgtttcggtatacaacctccacagatccccgtatttctgggaccggccaaatgagtttgaacccgagaggttttccgtcccgaagaaggacgagagcatagaaggctggtctggttttgaccctgaccggagtcctggcgcaatgtaccccaacgagatcatagcggacttcgctttcctccccttcggcggagggcctcgcaagtgcgtgggggaccagttcgcgctcctggagtcgacggtggctctggccctgctgctgcggaagttcgacgtggagctgagagggtcgcccgacgaagtggagatggtgacaggcgccacgatccacacgaagaacgggctgtggtgcaggctgaggagaaggacttgacgggccaacattagctttgcagtttgcactgagtgagaagtagctctcgtgcttgactcctgtgatgtgctttaggcgagctaaactgcatcgcagacagaccagtggatgggaaccgtgtacactgaaaacatatcttgtaggcttgtagcgtaacaggtgcaaccacaacaatatattatttatctatctatctaattgagcttgacattccggtgc

SEQ ID NO: 16887 - DNA, 1940 bp, Zea Mays
cactgtgcatgaaattttggtcactgaagattcatactggaaaccaattgggggtggttccttgtggccttcgtagaaggcgcaagtcagagacccttcgtgctcagtatattgatgtcagggagctcaggatttgtgctggaacatggaatgttgcaggcagacttccacctaatgacttggatatccaagaatggttggatatggaagagccagctgatatatatgttcttggatttcaagaaattgttccactaaatgctgggaatatatttggcgctgaagacaaccgccctgtagcaatgtgggagcatattattcgtgaaactttgaataagatcagcccagataaacccaaatataaatctcacagtgatcctccttctccgtcaaggttcaagccatctgatgatgcttttgttatggaagatgaacttattagtgagtctgatagtgaaggtgatggggaggtgcacccattgaacgaacaagatttggtcgactctgttgatggcattcatggtaacaaatgtgaacctcaaacaattttacaagatgaagagttcagcaggttgccttcagtgaagacttttgacagatccaataacctaagttttaaagaatctaatttggaagagaagatctgccagaagatattaactaaaacattcagtcactcagagaggcttgggatgatttggcctgaaccaccattggatatgtttgcccagtgtcttccagacagcacaaagccatttgcttcaggaaaggttttaagatcatatttgtctttcaagtcggtaaatggagattctggtccatttgctgaggacaattcagttcctgatttttatatgagctgtgcagcagttaaaagaaaaaggccatactttgtaagaataataagcaagcagatggttggagtgtacctatcaatatgggtacgaagaagcctccgaaagcacattcagagtctgaaagtatcaactgtaggggttggtgctatgggctacattggtaataagggatcaatatcagtaagcatgtccatataccaaacacacttttgctttatatgttgtcacctgacctctggagaaaaggaaggagatgaactaaaaaggaatgctgatgttcaagaaatccaccgaaggacaatatttaatctagtttcgagagtcaacatgcctaaaacgatatatgaccatgaaaggattgtatggctaggtgatctcaactataggatcaacttaccatatgagaagacacacgaactcatatccaagcaggactggaacaaattgtttgggaaagaccagctgaaagtagagctgaagaaggggcatctgtttgaaggatggactgaaggggtcatcaactttcctccaacgtataagtacaaggttaactcagaaaagtacataagtgatgataacaaatctggaaggagaacacctgcatggtgtgaccgaattctttcccatggtaagggtatgagattactgtcatataagacagttgatctcagactatcagatcaccgccctgtgactgctgtgtacatggcagatgtggaggttttctcttcaaaaaagctgcagagagctctgaccttcaccgatgcagaggctgaggaacagctctccttcgaggaagacaatgcttctggaatatacaaccttggactatatgaaagttcaagtgaagtttacaccccattagtaagagccaaagttttcagcaaggttacctggttgaagccgcagccgttgatgcgggcgctgagccggccccggcggaacggactgcccgccgtgtcccggtcattcccaacgctgcgacttcgacgctagggctagtttgaaagccacaaaagtggagataatgtgaggggctaaaatctattctttatttaattttaaataaaaagaggattttag

SEQ ID NO: 16888 - DNA, 3660 bp, Zea Mays
  misc_feature (3660)..(3660): n is a, c, g, or t
gcaagccgaccgaaaccaggcagtggtgtggagtggacacaacacaacaggagaggaggaaaagggaaaacggaaattcactgctactactccgtctccgtactagcacgcccataacctctctctctctcctgcctctcaccgcatcgtcttcctctccccccaccacaccccccacccgccgatccatcccccaaaagccgaagccgaaaccgaaacctccctccgcacgccacctgctaccacacacacacccgcgccgccgcccccacggccggccgcgcggaggtgactcgagaaggacgcaggaaccaaggagagagtttggtgaggggatcagagacgtaacccgcccggacccgggctgcattagccggaatcccatcccaggcgagcctctctctcccctcctcgaaccaggcgcaggcgagcgtctctgcccgcccgcctgctgctaccgccaaaacgcctcctttgttgccatccgccgatgccgtaatccgccgcccaaagctcttcctttttccctctctctcgcccgcggccgcactccctgccccagtgcctgccgtggcgagcccaaccccaatgccttttaaacccctccccgctccctcactgatccccaccgcctcccaatgccgccctccttcccctccctcccgctcccggaggccgttgccgccaccgcccacgccgcgctgctcgcgctcgccgcactcctgctcctcctccgcgccgcgcgcgcgctcgcctcccgctgcgcgtcatgcctcaaggcgccgcgccgccgcgggggccccgccgtcgtcgtgggcgacggcgccggcggcgccctcgcggcggcgactgccggcgcctggcacagggccgtgctggcgtcctgcgcctacgccctgctctcgcaggtcgccgtgctgagctacgaggtggccgtcgccggctcgcgcgtctcggcgcgggcgctgctgctgccggccgtgcaggcggtgtcctgggccgcgctgctggcgctcgcgcttcaggcccgcgccgtcggctgggccaggttccctgcgctggtgcggctctggtgggtggtctccttcgcgctctgcgttgtcattgcgtacgacgactccaggcgcctgataggccagggcgcgcgcgctgtggattacgcgcacatggttgccaacttcgcgtccgtgccggccctgggcttcctgtgcttggttggtgtcatgggttccaccggtttggaattggagtttacggaggatggcaacggcctgcatgagccgctgctgctcggcaggcagcgcagagaggcagaggaggagctcggctgtctgagggtcactccctacgctgatgctgggatcctcagccttgcaacattgtcatggcttagtccgttgctctctgttggtgcgcagcggccacttgagttggctgacatacccttgctggcgcacaaggaccgtgcaaagtcatgctataaggcgatgagcgctcactacgagcgccagcggctagaataccctggcagggagccatcactcacatgggcaatactcaagtcattctggcgagaggccgcggtcaatggcacatttgctgctgtcaacacgattgtgtccaaaactgcttgagacactcactgcccgacagtggtacttgggtgtggacatcatggggatccatgtcaagtctggcctcactgccatggtgtataggaagggtctccgactgtcaaacgcctcacggcagagccacacgagtggtgagattgtgaattacatggccgtcgatgtgcagcgtgtgggggactatgcatggtatttccatgacatctggatgcttcccctgcagatcattcttgctctcgccatcctgtacaagaacgtcgggatcgccatggtttcaacattggtagcaactgtgctatcgatcgcagcctctgttcctgtggcaaagctgcaggagcactaccaagataagttaatggcatcaaaagatgagcgcatgcgcaagacttcagagtgcttgaaaaatatgaggattttgaagcttcaggcatgggaggatcggtaccggctgcagttggaagagatgaggaacgtggaatgcagatggcttcggtgggctctgtactcacaggctgcagttacatttgttttctggagctcgccaatctttgtcgcagtcataacttttgggacttgcatattactcggtggccagctcactgcaggaggggttctatccgctttagcaacgtttcggatcctccaagagcctctgaggaacttcccggatctcatctctatgatggcacagacaagggtgtctttggaccgtttgtctcattttctgcagcaagaagaactgccagatgacgcaactataaatgttccacaaagtagtacagataaggcagtcgatattaaggatggcgcattctcttggaacccatacactctgacccctacactttctgatatacaccttagtgtagtgagaggcatgagagtagcagtctgtggtgtcattggttctggtaaatcaagtctactatcgtctatactcggggagatacccaaattatgtggccatgtcaggataagtggcacagcagcgtatgttcctcagactgcatggatacagtctggaaatattgaggagaatattctgtttggcagtcaaatggatagacaacgttacaagagagtcattgcagcttgctgtcttaagaaagatcttgagctgctccagtacggagatcagactgttattggtgatagaggcattaatttgagtggaggtcagaaacaaagagttcagcttgctagagcactctaccaagatgctgatatttatttgcttgatgatcccttcagtgctgttgatgctcatactgggagcgaactgtttaaggagtatatattgactgcactagcaaccaaaacagtaatctatgtaacacatcaagttgaatttctaccagctgctgatctgatattggttcttaaggatggccatatcacacaagctggaaagtatgatgatcttctgcaagctggaactgatttcaatgctctggtttctgctcataaggaagctattgaaaccatggatatatttgaagattccgatagtgatacagtttcttctattcccaacaaaagattgacaccaagtatcagcaatattgataacctgaaaaataagatgtgtgaaaatggacaaccatctaatacacggggaattaaggaaaaaaagaagaaagaagagcgtaagaagaagcgtactgttcaagaggaggaaagggaacgtggaaaagtgagctccaaagtttatttgtcatacatgggggaagcttacaaaggtacactgataccactaattatcttggctcaaaccatgttccaagttcttcagattgcgagcaactggtggatggcatgggcaaacccacaaacagaaggagatgctcccaagacagatagtgtggtccttctggttgtttatatgtcccttgcctttggaagttcactatttgtgttcatgagaagccttcttgtggctacgtttggtttagcagctgcccagaagctttttataaaaatgcttaggtgtgtctttcgagctccaatgtcattctttgacaccataccn

SEQ ID NO: 16889 - DNA, 990 bp, Zea Mays
tgacaatctacggctacagaatgtgattgagcatttggatggtcgcagagaatttcctcgtttatctataggcattggtagcccacctggaaaaatggaccctcgggctttccttctgcagaagttcagttcagaggaacgagtccagatcgacactgctctggagcaaggggtggacgctgtgagaacccttgtgcttaagggttttagtgggagtactgaaagattcaaccttgtgcagaagtacaagttccacagggtttgaatgtttgaggatctgtgaaatacttgggcttacttctgcaaacaacctgatacacatcaatatcatttgaagtgttggatgtggtgatttgctgttctgaactatgcatgagcttacaagttcgatgaatctgtttgttaatcagtatagctgacaattggcaaccttctattgttccttcggtttttgcataacactctaggatctggagaaacggcaaccagtacttagctccacttgactataatctgtagaagccagagataacttgtgatgtgatatatccaaataacaataagggggcttgtctaatacatcgaacaagatgtgatgttcgtcaaaggagtagttctgacttcagtttcaagacataaaaacatctaataatcgcacttccactgccttttgctgttaaagaacatgtgcctagttcttttcaaattgagaagtgggctctaaagttttacatgttacatttataaagccctttcttccaccatcatgttatctaagcactttgctaatccctttcttaaaggcataacacagctagggcgttaagtaattatatatctccatctgttgatcactcgcatgcagattgtaatagttttttttttccaagtgtcgcaatcgtagctgtattagcttattcaatgctttatactggatccctgtgctctaaattattctctgtgctatttagctttatatacattctaaga

SEQ ID NO: 16890 - DNA, 2831 bp, Zea Mays
atcttcgttctgagctctctctctctagtctctcccgtccctacccaccaaatctcgcagtcgcagcaggtccaggtgctcccgaggaatccattcccaatttgcgttcccactcccaccaccgcttcttcccgtatcccttgtcctccctaatttcctctcacaaaaagcgggtgcggcgtcctgccactcacctcggtctcggggggcgccgtgcggcgggcgcccgtgctgctggtttcgctccaggggagaaggggcagagggagtagagcaggttaggtccgtttgcgttttcttttgcgggtttgtaggtcaaaagctcggcgagcactttccgctccacctcctcacgctcggaatcaaatcgatgccccccctgatttggttcctggtatcggtgcatgagcttgctccaagagatctcccttttggttcggcgtcaggggttctgtgaggtcacgcggcttcttcctcttggcgctcctcacatgtccgggcgcttcgatctctgcccactgcgcgagtgattctgctgctgcagcagctgttaggtgcgcgcggtccgttatggggtgaaccgaagcgttcctcgcagggctgtgggtttattacgccgcctgtttgcttccccgctccatgtccttgtgcccatgcttctttgcttttgtcacgcctgaaccgtgtcttcttgtagtatctgaggcttggcagttggcaagtacaaactagcaacttgcttaggtataaagtataaaccagtgtctggtgcagagcccaaaggggtcacgaatcgttgatgcatagatctgcttctggctgagataaggctctaagttcgctctgttgatggggctaccatgagccacgggaacgggatgttgaattctgtcaaggtggagaggtggccagcagcagtcgctgcaaatggccagcctaggccgatggatgtgctccacgacggcagctcgccgccgttccttaccaagacgtatgacatggttgatgacccaaccacgaacgccgttgtgtcatggagtgccgccaacaatagctttgtagtttgggatcctcatatctttgggacggtgctgctgccaaggtacttcaagcacaacaacttctccagctttgttcggcagctcaatacttatggcttcagaaaggtggatcctgacagatgggaatttgctaatgaggagtttctgagaggtcagaggcacctcctcaaaaacattaggcgtcggaaacctccacactcatctccaaatcaacaatctcttggctcttacctcgaggtaggacactttggatatgaagaagagattgatcagctgaagagggataaacagctcttgatggctgaggtagtgaagctgaggcaggagcaccaaaatactagatcagatctacaggccatggaagagaaattacaagataccgagcagaagcagcagcagatgatggcattcatggcacgcgtcatgcagaaccctgatttcatgcgtcagctgatctcccagcgggagatgaggaaggagctcgaggatgccatctcgaagaagagaaggcgccgcattgaccagggacatgaagctggtagcatgggcactggttctagcctggagcaagggccacagggagtgtttgaaccgcaggagccggtggaatcactcgccaacggtgtgccatctgatctggagagttcgtctgttgaggcgaagggattggaggttcgacagggtgtttcttcaggtggttctgagcatctgaatggcaggccaagcggagagttaaatgatgatttctgggaggaccttctgcacgaggggggacttggtgcagatgcaggcaatgctgttggtcaggatgatatgaacatggacatggacccagatgttagcctgcctcaactgaaacaacatggacccagacattagccgctcttgtgctatcacaatggctgtgactctgttgtttggcgcggtggacggcgtattctgcatgttccagggaacaattgcgaacgttgctgtgctgaagcagcagtatgggttgagcaaaggcgctaatgaggtcagcatcatcatcgaggcttacaggaccttgagggacaggggcccttatcctgcagatcaggttgtgagggacataagtgggaaatttgcatttgtcctgtatgattgctccactaagtcggtcttcatggctgctgacaccgatggaaatgttccgttctactggggcgtggacaccgacgggcgtcttgtggtctctgacgacgccgaactcgtgaagagtgcctgtgggaaatcctgtgccccgttccccaaaggcttcttcttcacgacgtccggagggctgaggagctacgagcaccccatgcacgaggtgaagccggtgccgagggtggacagcaagggcgaggtgtgcggcacgacgtacacggtcgacgcaagcgccaggaaggagaccaccatcccaagggtcggcagcgccgccgactggtcttcgcagtactaaaattcgttatctttctctgtgtgtgttgaacgggttcgagcgcaggtagcagggcgtcgcacgggcgtggcccgtgtttgttcgcatggaaaccctagctgtctggtgtttatctgaatgaatagactgttctctatgaatcaacacggatttctctctaagttcacatgatttccgttgctgctttgctgcacgcctgtactgtaacaagaattactgcctttgttatcaggaaataagttcacatgatttcctgtctgcagatgcgctgccagtcgagcatccttgaggaaggatagggataaggc

SEQ ID NO: 16891 - DNA, 2251 bp, Zea Mays
ctctagtgcaatgttgtagcgacaagtcaatttattctgcaaggaatgacaagtacatatgcacaattagctttttaggttatttacatgaaaagttggtgtcaatgttttgacccgagggtcctaaccaacaagtgaatttatgctgcgtgccccggtccagatggatgatgcaagaagacacaagatttacccttgttcgggcaagagaaggccctacttccagcgaggggggatgagacttatattatcttgtacctaggtgctcatagtagggggtacaagctggtcgagagagggagtgagtcccaagtctccgagagattgaagcgagtgccaatatcgggagtgaagagcaaacagtgaagtgtagtgtgtttctcctctccccctttggagactctagactcctccttttatagtcgcaaaggggaagccatgagttacaagggttgttgcgctgctcttgtgataagaggatacgagtccgagcccttgtagcagtatggtcgacgggatgtcccttgtcctgggcgttgtatttgatcaggagaaggatgtttgatccctgtaacctgcgctttgatcgtatagatgcgtacccaagcctgtcttgtgaggggcgcagatgagacgtttataagtttgtcgagtcgtagtggttgaaatgtcactcgacatggtaaaaagtgcgtggtaatttggcccgtgcgttatccgggatggcgaaaagctggttggacatcggccttgcggtttttgtagccatcccgtctttagagggcgggcaggtgttcgtacagactgcatttaatgcacatgtcttggggtttcgagaagtcggtcgaggctgggctcataccgggacctcgcctgagatgccctcgggtgaggcggacacgcgttctccgcccaagggtgcccttggtaggttgctgatccacgtagatgtagcattcaccggaggtttggcttaggcaaagcgtagttgcgcagtcggcacgcggagcctcggacgaatcatggcttggtcctgcgtgaccttggaggtcagggcgtgtttgccctgtgatttcctggtactcgggtgtcttggtacgattagggatgtaatctgggtacccttaattatggtacccgatagttgggttcgcagaggcacaaagaactagttctacacaatagatctcataatttttctggaagtgccacatgaagaaagtctagcagtgtgccagctggaactgggaagtttgttagtttctctattgaatatttaattatctggaaaaataaagacctatttttgcattgcctagtcattctgttaatgattattaggccatgtttggttcctttagtcactagactaaactttagtcgctaaagtaccccgtttggttccagtgactaaaccggactaaagaacattaattgctgtgaataatgactgtattgctcctattaattagtggatgtttgctgcaagaagaaagtggagagggcaaataaggctctcctgtggatgcatcaagacaacagcatgatggcgccaaacttgaggtcagcattgggcaagggcaactaccagagcagagaaaccaaataatataccatacctaactgttcgcctggaagttactcttcatggcaagtgtttgaattttctcttgttactgcgtgtcgaacaatcatgtagctgtagatatagtgattgtggaaggatgaagttgccaaattgacccgtggcgatttccttctccagacaggaaaaattctgaacatcaaggagtttctgtttgcaagtttcactatttaaaagcaggtcgtgtcacttgtgcggagttaaggactggaccgaggcagtattatcagtttctggatatggattgttgtgctagtttcgatgcaggtgtcaaacaacaattaggctgaagaggtgagcaacatttaaggaggtgctgatgcttgctgataacctatgaaaaggcgttgctgtagctgactacttggtttgtggtcagataattctggacgtgaattttgatatgttggccagattagctgccaaataggtatttcgtatctcttgatttatgggattcacattaactgattcttggttgccattcacttgtcttggttatggtgctacatgggcgtgcaaagcatgaaggcaatcgtttgactttgcttggtaatgcgttttgcgcacaacaatctgatcaaggcaaaaatggtaatggtttcc

SEQ ID NO: 16892 - DNA, 1003 bp, Zea Mays
gtcctcctctggaaaaccacctcttctcctagacttcttccgttgcatcttctcttctgttctccacgacgcagttcggctgccagacaaaaaccctaaacgccgccgccgccgccgctcttcctcgagatgggaggcaagtgcccgcaccgcaaggtaaagaagcgccgcctatcccacaagacggctcgccgcggcaagttcctcctgaaggccgacgatgccgtctatgacgagctcgtcaagctggccgaccagggcaaggacgctgaagccaaggagctccccgtcgatgaggacctcccaggcctgggacagttctactgcctccactgcgatcgctactttgcaagtgaaagcgtgaaggatgatcactaccgctcaaagcgccacaagaaaaggtaatgtctggaccggccccgcacacgcagcttgatgcagaactcgctgcagggatgggaaagcctgacaacggcctgaagctcatgtccatgtgaaggaacctcttgctggtactggtacttgttccgtgcctttgttgctgccgtacaattgaagctgctttgcgcagtaagtaatagcaagagttatagcagacggtttttttttgttgtacgcaagactttcgaagtgggtgtaagttgttttagagtggtggcagagggggggggggggggtgtcaatgcatgtatcatgaaaccatttatcgacccataccagtgatgatgatgatgatgtctcgtatcatttggcctcagactgcgctcgtgtgatgtatcatgtatggtagtaccacaaagacagacggatggacgcgagaggcgtccaggccaggacagcagcgctcgcttgtcagctttccgttctgtgcgaagattttccaagatctgtgtctgctgtacagtacctgtgctctctatggctctggtttcgtcggctgatgatgccgatggctgggtcgtctataataattgcctatttcgcgtagagacggagagattcc

SEQ ID NO: 16893 - DNA, 3006 bp, Zea Mays
cacatacacacgcgcacagccgcactcggttccagctacagagaattcgtccaggaaagtaaaaaaactcccccattcgcgagggacaggagggaggagtcaccgcgtgagctcaggaggaagagggagaaggagaggccgccggcggcggcgcggcagaccgggaaccgccgtgtagcactggggtggtggacccgcgcgcccatgcgtcggtgaggtggtggggcccgcttggcgctcgagttggaatggcggcggcagggaggtggtgggcggtggtccttgcggtcgcggtgctgctctggccgggccgggtcgtcgccaacaccgagggcgatgctctatacagcctgcggcagagcttgatagatacgaacaatgtcttgcagagttgggattccactcttgttaatccatgtacatggtttcacgttacgtgtaacagcgataacagtgttatcagagttgaccttggaaatgcacaattatctggcgtcctagtgccacagcttggtcagctgaaaaatctccaatatttggagctttacagcaacaaaataagtggggcaataccccctgaactggggaacctgactaaccttgtcagtttggatctgtatatgaacaacttctctggcaatatccctgaccgcctagggaatctattgaagctgcgtttcctgtaagattcattttgtttaccagttactagcaccctcatatattgttttactagctgtttttaatgcttagacagttttcagtttttttttaaatttgtttgtttttttacttttgatatctatgtcaagaatggtctatgtactttgtaaccagaaaaataagaggaacttgtgatgctgcatttgttaatttctgtgacacgttggtatttgattaagtttgttgttttcctttttgatagatggagttgggtgtttgtttggcctcctttctcttactcttaccttgcttattctatatttttggcagttgtagtgttgaattgtaatttatcagcaaaactcatggtgtctgtggaaaaagaaaatcattgccatttttctttttattagtgtcttctgtgcccttatattttggtaaagtcacaaatatctatttgttctgtgcctatttgcaatgatagacgtcttaacaacaacagcttggttggtcccattcctgtagccttgaccaatatctccactctccaagtactggatctctcgagtaacaacctctcaggaccagtctcatccaatggctccttttcactcttcacccctataagttttaacaataatccaaatctttgtggccctgttactacgaagccctgccctggggatcctcccttttccccaccgcctccattcaatcctccgtctcctccaacccaatcaactggtgcttctggccctggagcaatcgctggaggtgttgctgctggtgctgcattggtttttgctgttccagcaattgcatttgcaatgtggcgccgtcgtaaacctgaagagcatttcttcgatgttcctgccgaggaggatccagaagttcatcttggtcagctcaaaaagttttcgttgcgggagcttcaagttgctactgatacttttagtaacaagcacattttaggaagaggtggttttggaaaagtgtacaagggaaggcttgctgatggctcattggtagcagtgaaaagactaaaagaggagcgcacacctggtggtgagcttcagtttcaaacagaggttgagatgattagcatggcagtgcacaggaaccttctccgacttcgtggtttctgcatgacacctactgaacggttgctggtctacccatacatggctaatggcagtgtggcatcacgtttacgaggttctttattctttattataatttataaaaaacctgattccatagtcccaactaaacaagcagaacgttagcttcctgttctcattaaactttctgattccatagagcgccaggcatctgaaccacctcttaaatgggaaacaagaagacggattgcactgggatctgcaagaggtctttcttacttgcatgatcactgcgatcctaagatcatccatcgggatgtcaaagctgcaaatattcttttggatgaggagtttgaggcagtcgtaggtgatttcgggcttgccaagcttatggactacaaggatacccatgtcacaactgctgttcgtggaacaattggacacattgctcccgagtacctatccactggcaagtcctctgaaaagaccgatgtttttggatatgggatcatgcttctggagcttattactggacagagggcatttgatctagctcgtcttgcaaatgatgatgatgttatgcttcttgactgggtgaaaggactgctgaaggagaagaaggtggagatgttggtggacccagacctacagaatgcctacgaggagatcgaggtggagaaccttatccaggtggcactcctctgcacgcagggctccccgttggagcgtccaaagatgtcggaggtggtgaggatgctggaaggtgacggcctggcagagcgttgggacgaatggcagaaagtagaggtggtgaggcaggaggctgagtcggcaccgctccgcaatgactggatcgtcgattccacgtacaaccttcgtgctgtggagctgtccggtccaaggtagtagccactccatgactccgatgaaagaattcaacactgaattgcctagattcagtctaattgctgcttgtgtatatgaaaggtagcttttggaattgttagcggcagtcaatatgaagggatggtttttttttttataattcctcgctagcctcagaagtcggggggtaggctgcagttgtgttaaggtgaaaattcgtatacccgagggtgaatttttaaagcattgttgtagtggttcggggaatgtagcagcgatcgtccaattgtactacgtgctatgaagaacagtgctaccttttggccataaaaaaaca

SEQ ID NO: 16894 - DNA, 1316 bp, Zea Mays
gtaggagcagcaggcgacagaaaggttaaaaataaaatgtgacgctgtcagacgaggaccacgtaccacgggcccgggtgtacgcatagtatgcctttctggctgcagcagcagttggatcttgggaacgtgccatgcattgcatcgttttccctctctcttcactggattcagcgaacacagcggacggcgtgcaggtacgggggcaagaacatcgccttccacgtgaacgagggctccactagcttctggctctccctgctggtggagttcgaggacggcgacggcgacatcggatccatgcagctcaaacaggccaactcggcgcagtggcgagacatgcagcacgtctggggggccacgtggagcctcaccccgggcccgctcgtcgggcccttctccgtgcggctgacgaccctgtcgggcaagcagacgctcacggcccaggacgtcatccccaagaactgggcccccaaggccacctacacctcccgcctcaacttcgcgtagaggccttctgccttggcccgccgcgtatctatcgttctgtgcagtttgatgtcgcgtgaaggggataagctggtatagtagtggataaacctggtgtttagggcccaggtagccctctccgaactggagagagagcgtctgattggtcggcgtgggccgcatgcttcctggaggctggaaatgggagctcgatccggtgaagagcggctggggaaccaaaggcgtgagcgtgacgtgactcctcttcgttttcgatggactcatgcagtgcttatttctgtgttcttctctcttaacttatctattgttgttgttatattttcgtgcccttggtacatgggctgtaacttgctgtcacctatgcgcaccgtaaactataataatcatgtattgttcgttatgttagtcatcaacgactgttgccgttacaaaaaaaaaaagaagcaaagctcgaatgatcagttgcagtggagtgtaacttgtgacttatgcgctacttcagctgctgttgtagccggccgtgctccctttcacagacgctctgttactcgtcatcatagtactaagtggagttgcaactgatcaggctgtatatcaatggcaaatcacactcacgtcggtggtagcaggtcctgtcgtgaagtgctctcatccagattcgtgattttgagacgcgctccggcaacatcctcattcctcagccggattaatcagctgcaaaatcagcggagttgacagaagatgatcatagatcttaacacaatcttaagtgacgttttgaatcaaggtgctgttgttcttttggc

SEQ ID NO: 16895 - DNA, 954 bp, Zea Mays
caaaatcacttctattgaaaaaagcaaaccctaccccctcttctccccttctctcgacggcgccaccatgccgcctccgccctcaaccctagccgccagggcaacaacagtagcaccgcagggcgtaggtggcagagcagggacgcggattccgactgacacttcgtcgtcaagctctcgccatttgtaactccttgctccgccgacctcgacgcaaactacaacttctcgctcgcgcctatccaggatccgctctcgccatggttgcagggacggacccaaataggggaccaagcattcccttagagtttgcacgcttgctgatgcagtgcaagcctgcaacatgcagaggtgcgctagtgccaggtgcggcgagtcagcagatcaaggaaaccgcccgcggccgccccaggggtccaggtctcctcacggcgacgggagagcgcgagccaatgtggagcgaatgttgcatttgacaaatgactactctcaggcctgcaaactgcacattacaacgtgaagttggttattgaaagggcgcccatagctgcaaacatagctgtgaccacatgatgatgacgatttactacagcaggcacttgcaatgtcaatggagggtggtgcttcaggatctgcagctgtgactgactctgctatggcagaagctagtgcagttgaccctgacttagcgttggcttcctggtgttgatcccaatgatccatctgttaaagatttgttggcatcattgcacaaccagggagagcaagagaagaaggaagacaagtaagacaaaacagaagacgagaagaactgcttcaagctggagtgatgtcgctgtggtgcttttgtgactgatcatctctggagcttttgtgaatgatctagctagctatttgtaaatgatctagttgtgaatgatattataattgtgatacttttgtgaatatataatt

SEQ ID NO: 16896 - DNA, 1400 bp, Zea Mays
ctcccctctctctgtggtttggtttctttgccacgcgtatataacaactcccatcacttgcgatcggttcttatcgccccctttcccatttctcccctcgattctccgggctgatccggtcgctgtccgggcctgttcgattggaggagaatcgcctggtttgaaggaaaggcttgggaagaaaggtaattatcactgtatctgacatggatgagcacatgggaagacgaacagtcggcggcctcctcttcaccaagggaggatccatccttctcttcagagaagacggctcgcgccccaaggccaagaactgctgcacgcgccatggctgtagcggtcagcatcctgctgacagagccaagggcaaggaggtgcacagggcagcagcggtgggcagtgaatcgacaccggctacccctcggagatcacaagcttttaggaagcccaacagaaggcctccacatgaaggcagtgcctcaggcagcatcgtcagggatgtaggaggcccttgtagcgaaaccggcagcgggtcaagagatgctcctgggcgtgatctgcttgctcggcttaaggagagggtcaacacatcaaggaaacgatcgttgaacagggagaacagcccgcagtcgccgagtggactcagtgtctgtgccagttccccgagcaacagtcggtcagtctcaaggccgtcgcaccggacagcttcgaggataagagaagctgacgaaggcgcgaatgcaggagctgacagtgtagtgcgcagaaatgctgctaggaggggttcagagaggagtgacgatgacttgctgctggtcgagcaggtaacaagaaaccaagcgccttctgaagggtttctctctggattcatggctagatacagaagcgatcttcagggagagctttcgtccctggacgacagcatggaggatccaaatggatacttgcgctttgatgtgggcgggattgaagagctcgagaactatttcatattcaatgatcggcatagaggaatgaggatggatatcgacggcatgtcctacgaagagttgcttgctttgggggagcgaattggtaccgtaaacacaggtctttcagacgacgcgttatccgcgtgcctgaacaggaggctctacatgcccacagcttcaggttctcatgaagattgtgaaagaaaatgcagcgtatgccaggaggagtatttagcaggcgaggaggtgggcgagatggcatgtaaacactactaccacctttcctgcatagatcactggcttcggcagaagaactggtgtcctatctgcaaatctgtcgccctgaaaatcaactagcaacgtgtttcatgtttcttcataaatgaagtgaaccaacagatgtagaaactagggcacgatgcatgtctccac

SEQ ID NO: 16897 - DNA, 1865 bp, Zea Mays
gccaagcttctttactcgggagccttttatgtcaaagttggcaaccttccccgagtggccgagttcctcactcagctggggacaccacccggccaccctcacctctcaatatacataccaccaccaccttcatcaacccctgggcctggcactcatagctcgttcgtagcaagagagagagagagaagagtgggaagtctcacgccatcagggagaggggagcgaggatcacatctctcgtagcgcgcgcgaagctatataataatggaggtggccatggccgtgaaggtgctgctgagcctgtgctgcgtgggggcgtgcggcctcgccgtgtacctctaccacatcctctggctcgtgccgcagaaggtcctcgccaagttcgaggaccagaagatcggcgggccgcggccgtcgttcccgtacggcaacctcgccgacatgagggaggcggccgccgctgcgaaggctgcgcgcgcgtcggcacgcagtagcggcagcggcggcggcggtggcggcggcatcgtgcacgactaccgcccggcggtgctgccctactacgagaaatggaggaaagagtacgggcatggtggatctgatggtcgattctgcacagccactgcttatgtcatgggaagagagagttgatagaaatggtgggatcacagacattaagatcgacgatgacatcagggcttactctgcagatgtgatctctagaacgtgctttggaagcagctacatcaaaggaaaggaaatctttatgaagatcagagaactccagcaggctgtgtccaagccaaatgtgctagctgaaatgactggcctaaggttctttccttcaatgaggaacaagcaggcctgggagcttcacaaacaagtccgcaaactaattcttgaaatcgtaaaggaaagtggagaagacaggaacttactgagtgcaattcttcacagcgcaagcaccagtagggtgggcattgccgaggcagagaactttatagtggataactgcaagagcatatattttgcaggacatgagagcacagctgttacagctgcgtggtgtctaatgctccttggactgcacccagaatggcagaatcgagtacgagaagaggtgcatgaagtctgcagaggccagccagtagactcacggtcacttcagaagatgaaaaatttgacaatggtgatccaggaaaccttgaggttgtacccagcaggtgcctttgtttcaaggcaggccctccaggaactgaagctcggtggcgtacatataccaaaaggtgtcaacatctacatccctgtctccacaatgcatcttgacccagagctatgggggcctgatgtgaaagagttcaacccagagcgcttctctgatgttcgaccccagctacattcatacttgccatttggtgctggggcccgaacctgcctagggcagggatttgctatggctgagctcaagatcctcatctctctcatcgtctccaagtttgttttgaagctctcaccacactaccagcattctccaacactgaaactcattgtggagccagaacttggtgtagacctcaccttaacgaaagtgcaaagtgtctgtactaagaggggcactgcaatttagtcatacaatgtcatggaatgaaacctgtgctatggtgaatgcagcttcccctgcggagaggggacaatttgtacagagacagctcatactatctacgcatgatcttttcaatgtgcatgattatagtaagaaatggtgccaaatgatccaatcatttataccaacattgtatgggaaaactatacagctattaaatttagtaatgaaacgaaatatattggaacattattaaggtgttcaa

SEQ ID NO: 16898 - DNA, 634 bp, Zea Mays
atcccacgcgaaacccctagcaataatcaaacgcacatgatttggtcgtcgttttcggctcgccctcgccgtctgatccccacctccacccttccctctcctcaaacaacagcggcacagcgctcgattcggcttcgcctcgactcgcgggctcccctcgcaaagctctaaacccctctgagagaacctatccgggccaccacaaccgccacccatggacggcggcgacgctccggcggcgggaggcgggaaggtggcgtgcgcggcgtggatccggcgccgggaggacaagtcggcggcggcgccggcgcgggtgttcgcggcgtacggccgggcgggggcggccggctccccggccgctctcgaggtgcttggcttcgacgccaaggagtgctccctctccccctctcccctggcgagggccgtgatcggggacggcggcgcgggtgacgcgccgcgcggcatcgcggtgcaccccgccggtgacgagctcgtctgcgccacggcgaagggctgcaggagggagcttgaaggagagggcggcggcgatggctttggtgggacctcgaagggtaggggagcggtgctggagggagatcgaaggggtgggcggcgcagctggagctggaagtag

SEQ ID NO: 16899 - DNA, 1281 bp, Zea Mays
acgactgacagtgaaaaaataggaaatgactcgtcaacgcaactaccccaagtcgccgctgagccactctctccgtccgcgaatccgtaaatggaaggggacgaaatgctcagggtgaagctcggcaggcagggccttgaggtgtccaagcttggcttcgggtgcatgggcctcactggagtgtacaacgcccctgttcctgaccaagctgggatcgacataatcaagcacgcgtttgaggccggcatcaccttcttcgacaccgctgatgcctatgggccacacaccaacgaggtcctgctcggaaaggcattgaaacattttcctcgtgagaaggtgcaaattgccaccaaatgtggcattgcaggatttgatgcaagtggcatgcgtgtgaagggcactccagattatgttcgagcttgttgtgaagcaagccttcagcgccttgctactgactacattgatatatactaccaacatcgcattgatcagtcagtgcctatagaggaaactatgggagagctcaagaagttggttgaagaagggaaagtgaggtatgttggcttatcagaggctagtgccgataccattcgacgggcacatgctgtccatccaattactgcggtgcagttggagtggtcactatggaccagagatatagaggaagatataattccagtctgcagggagcttggtattggaatagttccatatagcccacttggccgtggcttctttgctggcagggcagctgtagaacgtgttccatcagaaagtctattgtctaaacatccaagatattctggggaaaacttggagaagaataaagttctgtatacacgacttgaaatgttgtccaagaagtatgggtgcacacctgctcaactcgctctctcctgggttcttcatcaaggagaagatgtggtccccatccctggaacaacaaaagccaagaaccttgacgaaaatatcggtgctgtaaaggtaaggctgagcaaggaagacctcgaagaaatctcaggcgcattccctgctggtgaggtggctgggtctagactccttggagtcttggagcctttttcctggaggctcgcaaataccccgcctccaaaatagcgagttcagatgcaaattcttggccatcctaccatttaggtcatgttatgttagatcatatctacatgatgcaaatgattgttcctgtgctcgcgcgtgaaaatgcatgtacctgaaacaaagagatgtaacagttggttctctgtgtggaacgtgctgattgct

SEQ ID NO: 16900 - DNA, 2161 bp, Zea Mays
acgaaacaagtccatctagaccgttcctcctctaatccccatcctcgctccccccaaccctcaccgccatggcgaccaccgaggactccgccgccgcgggcgaggcccgacgcctgttcgccctcctcgagtcccagcagcaggtactctctgactgccacggcgcctggtcgcgcgccctcgcacactttgcctcgcgcgaggaggacctcgcctcccgctccgctgcactcgacgaagccctagccgccgccgacgtttccacttccgagactctcgcagcgctcgaggcccgcgagtcctccattcccgcgcgcctcgctgaggcctccgccgcgctctccgccgccgtcgctgaggccgagactgaatccaccgggccaccacccaccgacatcaagggcgcgctccggtggatatgccgccgcatggacgctgctgcgctctggcgcttcatggccgcacgccgccgggagctcgcggtagtccggagggaggccggccccgccgtcgccatggccgtcgacccgccccgccttgtcctcgacgtggtaagcgatttcttagccgctggcgacggcgtcggcggggaccaatgctgggtgctcggcatgttgctgcgctctttgttcgatttggatggcaggaagcctcccgagataggagatacattggttgagagggcgtttgcagtaaccaaagagtggcaagagcgctttgggatcaatatggacaatttgtcttctgaagacaaggaggtggagatggccgaagctgatgggtcagagaactcaggagcaacagagaagaaagaaggaaaagaagatgaggagcaggaggaggtggaggaagaggacgaggaagaggaagaggaggaagacccagaggaggaggaggaagaggaggaggaggatgacccagaggaagtagaggaacctgaggcaccaggaaaggaagggaatgaggtgaagggagaaggggcagagggaaaggtgtctgaggagggagaaggggcagagggaagggtgtctgaggagggacaaggggcagagggtaaggtgtctcaggagggacaaggggcagagaaaataggacatgaggatgagaagaagggagcagcagtgggcaccatgaaagtgaagacgggagaagaaggtaataagggtgcatcagagcaatcggaggcacagatatttgtgcagatggtagcggcatttggattgaaggataagttcgatgaggagttcttgagaaggctgtttgttgctaatggacggaagagggagcttgctaggattgcatgcgtgcttggatttgaggaaagccttggagatattgttgaggaactaataaagtcagggaatgctatagaggctatatatgttgcccatgaggctgatttgcttgggaaatttccacctgtgcctctcttcaaatcttatctgcagaattccactgataaggctcaggcagtgttgaaaagtggaagacattccagttctgcacttgaagaggcaaacagcttggagggcaatgcatacaggtccgtcataaggtgcgtcgagtcctgccagctacaatcggtgtttcctttagaggtcctgaggaagaagttagggaagttggagaaagagaagtctgataggaagaaggcagctggtccaagcagattcccgaacaagcgatcccgcggcgcagctggaccctatcccttccctgctgccaaggctgctaggggctcaagctttggtccgcgtttccagaacccagtctcacgttccttaaactacgcacctcatgctggatatataaacccagcagctgcatcaccattctctgtccctgggagcgtgtcggggagacgaggtggtgtaccatatggcggacctggagccacgtatggtggctcccctagctttgcaaccggtggtgggcagcaaccattccgtcgttaggtctagggctgtttgttgtaactgaatgctccttgttttctggctaatagggataatgtatgcctccagctattcaagcatacttgttcagttcttgatggatgctggatattgaacgtcgtgtagtacacattctatggtactgtgtttgctttgttaaatttgaactgtgtcttccataattttgtggcgcaggcatacgtggg

SEQ ID NO: 16901 - DNA, 1136 bp, Zea Mays
ctatgttcctcccttctcttcaggcgagcgccggattactgccatcaaagccataaaagacgcggaggctgggaacatacattaccagttgcaattggcacggtcctattattccgaggagcaattggagggaaacgccatgcagtattttcaggagaacttgcacaatctgtcggttgttccgaacgaggaatatgatgtgcttgagctgaaatggaataacggcggcgaatggatgattggagactttgcagatgacaggactctacgggcttcgattgcatcattcacagctgctgatggacttcagttcccaagggattcagacttctatacgcgcactagcaatttcagtgactttgcttggagtgagcagcctgaaggccaaatggcaggagcatcagaagcttttcagacacctggggctgtgagtaaccggctatcctgtggcatgacacccaaaactgtgaggctacccaagaatggtgagatgctcctatctgtgcatggttcacctcttggggtctataaagaagaaaatttagcagccattgaagaatctggtaacggaagtgaagatgctccctgataactcactgatatcacctgatggtgccagcctttgacaataacagtaatgcactttgaaattagtgtttaggtcactctgtattttgatgaaccctattgtagcatgccgacttttattcagctgacattattgtgctttgaacagtgttgttagctttgctgccaaggaggtcggcagaatcacttggctccggcctccgtgccatttccaccagacgagtttatttacgaactgagccgaagtttttctctacacaaccctcgttacaggcattactgaaatagatcattagaacaagtccattgttgaccacggccaccaaaatctagcttgaattcaaattgattataattgggtgacagctttagacgacgggatagataaacacaattgactcagagctgaagcagtttcgatgcaaaagtccaaaaacctatctgtgggcctgtttggttcagctttttctgaccatggagagaatctgactttagagagaatctgagtatcgttatgattatatacgacggaagataaaggtgtccac

SEQ ID NO: 16902 - DNA, 1466 bp, Zea Mays
tgcaagccaaccctcagcttcacatgcctctgcttaaactacaagcgccatggcaaaccatagtttatgatatgccagacattcaaactgttgagaaattcatatacgtactttgtgttcttccaggtttttggcaggacagtcatatgccgagatctggaaactgcgactaaagttgcacgtagcaatggtctagattgcatcacacttgatggtgatcaggtagggaaaaaaggtgctatgacaggaggcttctatgattctagacgctcaaaactaaagtttgtgaagataataagggataacaagacagcaattgatagaaagacgggtcatctagagagtgtcgtaaacaagctaaaagatatccttttttggtttaattataatttagttaccaaacagcagcaaatggatgctgaacgtgatcatgcgaagtcagagttggaacaatttaaggctgacattgccagggctatgaagcaaagggggtcacttgagaaagcccttgtcaagaaggaaaaatcacttaacaacatctgcaaccaaattgagcaagtccagtctagcattgcaatgaagaatgatgaaatgggcacagagcttattgatcagctaacttcagaagaaagagatctcctttcacgattgaatcctgaaattactgatttgaaggagagatttctaatgtgtaaaaacagtcggattgagatcgaagcacgaaaggaagaattggagaccaatttatcaacaaatcttatcaggcgtcagaaagagctagaagcgataatttcatctgcagattctagaaccttgcctttggaagctgaggcaaaggagcaagaactgaaaagttccaagagaaaccttgatgaactaacttcattattaaaggctaatgtcgatgccataaataatttcaccagaaagatggatgatctgaaaagaaaaagggatgatctgaaggctcgtgaagctattttagagcagactgtacaagatggtgccaaagacttagaacagttgatgaacagcaggaacacttatctagccaagcaagaagagtgcacgaagaagatccgagatttgggcttgttgcctgctgatgcttttgaagcgtacaagaggaaaaacaagaaacagctacataagatactctatgactgtaatgagcagttgaagcagtttagtcatgtgaaccaaaaggctcttgaccaatatgtgaacttcacagaacaacgcgaacaactgcagagaaggcgagctgaacttgatgccggtgatgtgaaaatcatggaactcatatcggttttagaccaaaggaaggatgaatccattgagcgcacatttaaaggggttgcaaggcacttccgtgaagtgttttctgagctggtgcaaggtggtcatggatatttggttatgatgaagaaaaaggccaatgttctgattgttctgttttattgcgg

SEQ ID NO: 16903 - DNA, 263 bp, Zea Mays
cggcgttgcaggcggctaaacaaccgaaccgaggaatgggtttcacaagcaagctaaagcgctcgaggcatggtgtgtccatgaagctccgagtccgtgatccgaggccaacgcagacagtccaagatggactcagtttcgtggcgagcttgaagcgcgtgttcgcctgcgagcctgacaagtacgacgagatcatcgccaccatgcgccagttcaagtccgggaggtcgatcgattctttattcgtcttgtctgtgaattgc

SEQ ID NO: 16904 - DNA, 2661 bp, Zea Mays
caaaaaggacaatccatttgagaattacaaacgggctaacaagatttttaatgtggattctcaaccaggcagacaaacctaatattaatgaatgaatggaatagactacatgactgctgccatgcagatcaagagaatcttctggaagtgcaagtctatgcaatgtctgactccttaacatccaaaattggtggtaccaacaaagaaaattatggagatattagtgatatgaattctgattcgtcttacagaagttttggaagagctggttctatggggttaataggattggagaatctcggaaatacttgctttatgaacagttcaattcaatgtttggctcacacaccaaaacttgttgaatacttccttggtgattatgccaaaaatataaaccggactaatccattgggattgaacggtgaacttgccttggcgtttggagaactgttgaggagcttatggaccactgacggaaaaccagttccacctcattatttcaaggaaaaaattgcatgttttgctcctcagtttggtggctttaatcagcatgattcacaggaacttcttgcttttttactggatggtctccatgaagatcttaaccaggttaaatgtaaaccgtatgaagaagcaaaggatgcaagtggccgtcctgacgaagaagtagcagatgagtactggagcaaccatttagctcgaaatgactctgttatagttgatacatgccatggacagtacaaatctacattaacttgtcctacttgcagtaaaacatctgtcacctttgacccatttatgtacttatctttgcctgtaccttccacggcaaagagggtaatgactgtaacagttttcagcactgatggtagcagagaaccatgctcgtatgacgtcagtgtgccaaaatttgggactctgagtgatcttgttcaggctttaagcattgtttgcctacttggagatgatgagatcctgctggttacagaggtctataataactgcatcatccgatacttggaggagccttcagattcagtttcattgctgagggatggagataaactagcagcataccgtctacccaaaagacatgagaaatccccccttgtggtttttacacaccaacattttgtccagcattctagtgatggtaatttaactccacaaatgagggagtttgaggccccacttttggcagcacttccagaggaaattagtggattatctcttcaggatatctacctaaagttgttgagtccatttcaactttccaacggggctagttcgcttaatgattgtatggagtctaatagtgactccgtcgatacgccttctgattcaggcagtatcaattttcagaacagccaattggaagatggccctgaaagcaaccactgtagtgctagtgaatgtgaagtaacaaaaggacctgatgatttatacgatggggtttctggttctaacaaggaagcacatatggacttcgaattttatttaaaaagtgaaaggggcgagggccagcaacagaagatagaaattaatgagctccatttattattggagacagcaccaagccggttgcatgtgaatgtccactggctacagaatgcttcaagaaaatatgccacctcaatgctgaacaatctacctgagatccacaagctcgagcttatcccgaaaggaactgaagattctgttgcactacatggttgtctggaagcctttctaaaagaggaaccgttggggccggaggacatgtggtattgcccgcgctgcaagaagcatcagcaagcgatgaagaaactggatctgtggaggctgcccgaggttctggtgatccacctcaaacggttctcctacacccagttcacaaggaacaagctggagacgttcgtcgacttccccaccgtcgatttggacctgtcgtcctacgtcgcggacaagagcgagcagccgagcagccattatcgcctgtacgctgttagcaaccactacggaaacatgggagggggccattacaccgccagcatctatcatgaggaagggaaggggtggtacaagttcgatgacgactgcgtgacccctatgagcgaggacagcataaagaccccggctgcctatgttctgttctacagacgagagtgactgactggggattgaagcgcatttttctgcaggtgggttttggtcggcaatccagagcagactgcctccctacacagtttgctgcttcaggcgtgtctgagttttctaacgtttcggcatttgaatctctcaagccatactgacgcctaccggtgatacaacaacattatgtacagattcatctgccaacaggagagagagagagagagagagagagagagagagagagagagagagagagagagagagagagagagacctagctcagtgcaatattctttttttcgcatcagctcacagtattcttatatgggtagtacatggaccccacccacccgcacacaccaacattgtaattcctccgacttcaaccggtgatcacatcacattcaccattaaagaaagggtcaatagacacatcttttgtcgtcgcgcatcgaatcggagccagggcgatgtagtggcagtcgtgaccagcccccgttctgatcggttgggcgtgcgacaacgacg

SEQ ID NO: 16905 - DNA, 980 bp, Zea Mays
ctcgaagacataaaaatcacaagcggccgaaaccatacatgagctaatgaccatgagattgagtatggacaggagtaggagggcagctagcaatttgcaggctgtggagaggccacgtcagcgcgcgcctcgtgaggctgtctcggcttcctcagcagcaggcagcagctcccatcttctccgctcctgccgcggcaacgtgcggccatccaaaagatgcggccgccgccgaagcccgccagcggcggcggggcgacccagctggccagcaggccaactagcaataggcccggcggcggcgtcctgaggctgcggctgcggctgctgcaggcgccggcggtggtcgcgctggcggcggcgctggcggtgtcgtccgccgctactcctcctcccgcgccggcgccggcgccgctgtgcaacctcccgccgacgctgtcgggctcggacggcggcgggcggcagggcgaggcgaaccggatccggcaccccaagtcggagcgcgcggcgcgctgcacgtccaagtgcgtcagcacctgcgtcctcggcggctacggcgcgccgggcgtcgccggccccttcaacatccggaggcccctggtggtgttcaaggacaccttccgaagccggcagtactggacggcgaagatgaccagtgatcgagaaggggtacagtgagtggacacaacgcacaatgcaagaagacgtacacggcatcgccgccttgacgacatgccatgcgagctataggcggcatggaggaacgtgtttgctctagcgctacacacaattaggaagaaaccgagtggcggcaaaagagtcctgtgtgctttgcgtcatggaggaacatacgtactatacgtatttgctctctctcgccgtatgtgtatagtctgtcatgtagagaagctgaatctagtgagctgctttcgacattttagcgttgtacgtgacctctaaatttatataacacacacacaaag

SEQ ID NO: 16906 - DNA, 101 bp, Zea Mays
ctagtaacggcgagcgaaccgggagtagcccagcttgagaatcgggcggcctcgccgcccgaattgtattctggagaggcgtcctcagcgacggaccgggc

SEQ ID NO: 16907 - DNA, 1714 bp, Zea Mays
  misc_feature (1)..(2): n is a, c, g, or t
nncctcatacctctactctgcttaccctgatctcaagcctggtcaactaacagatctgaaatcattagctgtcaataacaattcatttgcttatgtcgccgttaagaaatctatccataggtatctcataaaggattctaactatcttacgacagcggtaaataaattcgcgaattatgttaacctttccagttcagagaaagacttgttagaagaaccaacatgtccaaaggttcttggtgatattgttgaatcttgtgttggtgctgtgcttttagattctggcttcaacctgaaccatgtttggaagctaatgctaatgcttcttaaaccaatattgagcttttgtggcatgcacatcgatcctatgagagaactccgagaaacttgtcaatataatggttttgacttgggacttcccgaacctacgaagtacaatggagagttccatgtcaaagtagaagttaacataaacggcaagatgataagctgtactgcagcaaaccggaattcaaaagatgctagaaaagtagctgcacaagaaacactttcgaaactgaagaattatgggtacaagcataaaagaaagtcgctggaggaaattttgcgttctaccacgaaaaaagaatcggaactgataggctatgatgaagaaccaatcaatgttgaggatgacattgacatgcaaatgaataatctactgataaatggagaaagaacctccattcagagtacagcgggagataacaaggttgacaagaatgatgctaatagtggaaggaataataagtccaatgtggtcatgcagaatggttgcctacctagaggggcaactgataaaataaaccaaaaagaatatcatggtgatatggtccgcaaaacagcaaggtcattcctttatgaattatgtgctgcaaactattggaaacctcctgaatttgagttatgcaacgatgaaggaccaagtcaccttcgaaagttcacatgtaaggtccttattgagatcacgggaacttcggtgagccttttggagtgctatagtgatcctaagctacaaaagagagccgcgcaggagcatgcggcagagggagctctgtggtacctcaagcaccttggatacctaccaagagatgaaaatcgtttctagcgacattttaggttttgtagccttcagtcacataaataaacctcggatgggaagagttctgttattgtaagcatgcagtctattcagaggctgacatcggaggacatctgcattgtacaacatccaaattgtatgggaagattttcgtcggtatgggtacatatttgggagaaaatcttctcattagctatggtgggtatgtgtatgggaatgcagaattcgaacctgattataactagcaaaattagttgtgtaacccaatagataataaacccaataactaacccacttgtcctaacccttttaagcatccatctacccaacttagacgatcaaccacccgttgtcccatccactagttcacgtgtcatttatttttgttgttttatatagttaaacaatttttttcttgttaaatatcagtatatttgtgttatgttgttgactgtgaaccatacatgtgtcaggatcagaaattcacttacataactggatatcatcatacagtgttcaaataatagcgtaaaaaatattactttattacatcatggtgttcgaaatattcac

SEQ ID NO: 16908 - DNA, 1600 bp, Zea Mays
caagggagtaactttacagtacagtggaacgttaagttatatttttaacaacttcgaaggagcaagaacctttagtgatgttgttgctgaagcaaaaaaagcaggatacacagaaccagatccaagagatgatctgtctggtactgatgttgccaggaaggtcataattcttgcaagggaatctggtttggggcttgagctttctgatattcctgtacgaagtcttgtgccagaggcacttaagtcatgtacctcagccgatgaatacatgcagaagttaccatcttttgacgaggattgggcaagagagaggaaaaatgctgaagctgcgggagaagtcctgcggtatgttggagtggtggatgtggtcaacaagaaggggcaggtggagctgcgagcctacaagagggaccacccgttcgcgcagctatctggttccgacaacatcatagccttcaccacctcgaggtacaaggatcagccactgatcgtgcgaggtccgggggctggtgcagaagtgactgcaggaggcgtcttctgcgacatactgcgcctgtcttcctaccttggtgccccctcgtagtctgtcaaggttttgcggtgccgtggtgttgtgttgctgctctactactggttttttttgttgttgttgttgttagtgcttggaatagctggagtaagtatggattaagtgagttctggggtgttaagggttgggtgtcttagttagaaggtcgtattggagggaatggaatccgttcaccgttcttgcgtgttgcaataatcttgtgtggagtctccaggtttgttcggttgctgacagtaagccaagccaaaatggcgagtctagtgaagaaccaaataaaaaaaaggctgggctgtaaggaatgtatccacacgttacttcattggtgtcaccataaatatatacctggatcatttggcttggtttggtttggttcgtactttgatttgggtatgttctggaactgtccccagacaacaatcccttcttcccaaagccagtccgacagccagccaccgccgtggacgtagccggagccggtgggggtggtggcgtcgacgacgacaaggaagagatgctttatggcgcgtctttgtgcacccacggtgaaacaaccgagccggtgagctccacgcggagaagacggagagaaactacgcctagacagctgcccatggcgagggcgcttgcggctgcgatggcggatgatgatcgtggtgggcaaacccggtgtcaagagctgctgggactgggatgggcgaaaggaaattggatggtggtgaaccagcagtgacggtgaattttgtcgcacgtgaaattttgtggatggtgttggaaacagggaaaagagggagggctgccggcggcgaggcgttttaacagcgaggggagagagctacaactttgcttcaaggagtaacaataagagatcaaaggtttgcaggatacacttgctccaagtttttggcaaaactgagaactgaattcagtttcctagttttttgaaacagtttaagctcaaccaattaaagggaggctaattagtgttcaaacgtcagatacaaaaggtacgtt

SEQ ID NO: 16909 - DNA, 3350 bp, Zea Mays
gaaaagctacttgagcctgagcgctgcgcagaattccgtccggcacgaggtggacgagaggagggataaggaacagaagccttcgagctcacgctgatccgcctcccgcattgccttgaagcctctcgattcgggcggacccgagctgccccgcgcggagggctcgatctgggcccagatcggccagcatttcactcccgtgcttgcaagtgcgcgtgcgcggtgaggcactgaggcatggggaaggtggaagacgagtacgagtcccatgcagccaaccggcggggtgaggtgatagattggctcgctgagttgctgccggagttcgacttgccgctggattcctcagacgaggagctgcgggagtacctcattgatggcacggcactatgttacattgcagagaaactaatgcccggcattcaggaggaaatgtggggtggtaatgcatgggatcagaggtcgaacgtgaagaagttcctctattttgttgcggagatggggctgccaggcttcagtgtcaaggatctggaggaggggtctgtgtcttctgtggtggagtgtctcttggctctaaaggataatgtgactacaggattgggtcaaaacgttacaaacaatgctgctaaaacaccccttagaaggaaacttgaacttgaatctgatgggcctataatttcagttatgacaccagggagaagacctggggaggaaagatggaaaggccactgggatcctaagtctcaacaaagaagtattcttcattctggacaaaaggtccatgatgctttccaacttaagcgaggttcctacactgatcttcctgctgccaaagtttcagagatgatgcatccaagaagtctagataatgcccctactcaatcacttcttagagttgttaatggcattctagatgagagcattgagaggaaaagaggagaaataccacatcgtgctgtttacttgctaaggaatgttgttcaagagattgagcaccgcattgctattcaagcggatcacataagaaatcaaaatagcatcatcaagactcgggaagacaagtatcgttcaaaaattaaagcactcgagacattagtaaatggcacaaatgaagaaaatgaggtagaaaaatcaaaacttgatgagaaaagaaaactaggtgaacaagacatggttcggctgatgcaagaaaaggagaatgcagaaaatactattgcttcccttcagcaagaaatacaggtcttgagtaggatgcatgaacagtaccacgagagaaaggaaacagaagccaggcagatggaggaacacttggctatgagacttaaggaggctgagtttcttttaatgcaatcagaaaagaaagttgaagaaattgaatctgtttcccaactgaaatctcaactttggaccaggaaggcaaacattttccagagttttatggataatcaaaaattgtccattaaggacataaggatatcatctcagtccattaagcaggaaatgtttgcccttcaaatgaaatggatagatgaaatatctagcattggacgtgagttgaaaggcttggtagatgctgctgacaattaccataaggttcttgctgaaaatcagaagctatttaatgaggtacaggaactaaaaggcaatatcagggtttattgtcgtgtcagaccatttcttcctggtcaagatggaaaaacaaccattattgattatattggtgaaaatggtgagattctcatcacaaatcccttcaagcaagggaaggatgtgtgtcgaatgttcaagtttaataaagtgtttaatacacatgcttctcaagctgaggtattctctgatatccaacctctgatcagatcagttcttgatgggtttaatgtgtgcatttttgcctatggtcaaactggatccggaaagacttacacaatgagtgggccaggcacatcaaaagaagattggggtgttaactatcgagctttaaatgacttgttcgacatctctctaagtagaaggaatgctttctcatatgaggtgggagtgcagatggttgagatttataacgagcaagtgcgggatcttctctcaaatgatattgcacaaaaaagacttggaatttggagtacatctcagcctaatggacttgttgtccctgatgcaagtttacatccagtcaaatcaacactagatgtgctacagttgatggaaattggacaaacaaatagagcagttggatcaacagctctgaatgaaaggagcagtcgatctcacagcattctgactgtgcatgttagaggggtggatctgaagaatggatctacttccagaggatgtctacatctaattgatcttgctgggagtgaaagagttgagcgatctgaagcaattggagatagattaaaagaagcacagtatattaacaaatccctctctgctcttggtgatgtgattttttctttggcacagaaaaatgcccatgttccttatcgaaacagcaagctgactcaagttctacagagctctttaggtgggcaagcaaagacactgatgtttgttcaaattaatccggatactggatcatattcagaaacaataagcactttgaagtttgctgaaagggtttctggagttgagttaggtgctgcaagaagtaacaaagagggtaaagatataaaagagctgctagaacaggtttcatctctgaaagacacaatatcacggaaagatatggaaatcgatcaactcctgaagaacaaagccaaatctccaggttcatcaatagatagaaatgacagtcgccaacagatccggcgactatcagggactggatcaagtgaagccgaatgtgaagataacatgtctgatgatggctgctcagtagcaggaaccgagtattcagtaggtggtgcttcagaggcgacagcagaacggatgcagaaggccccatcaaggatagccaggctattccacacaaagaatggacagcctgcaaactccaaaccaaaaccaagggagtctgctctgaaaccaccaggtcgcacgacatctacaggaggaagccaggcgacaggaggatctttagtgaaaccccctaagaggcggtagagaaataaagattccatcatctaggatttgccatgttgatgggggtatgtgacgatgtcactgtaacgggttcacttgtcatcaccatgatgagcagccgactgtaggctggatgttgtatgagctggacgccatgaggttggtttctcagccctgctgaccatcacgttagttatcgactatgttactgaccatcatcaactttttatctatactatacttaaagcaccagtttcaacggtcgtccc

SEQ ID NO: 16910 - DNA, 1254 bp, Zea Mays
cgcaagaggcaattggtctcattttgaagctgaccgaagaaataaaaccaagatagtggatgctggcgcacttgagcccctgcttggctacttgcaatcaagtgatccaaatttgcaggagtatgcgactgctgctctcgttacactttcagcctcatccaccactaagcctatcataagtgcttcaggagtaattcctctactcgtggaagtcctcaaagaagggaatcatcaaggcaagaatgatgccgtgatggctctgtacaacctctccacaatcacagacaaccttcaagctatcctttctgttcagccgattccccctttaataaagctactaaagggtagcaagaagtcctccaaaacagcagacaaatgctgtgctcttctcgagtcactgcttgcttttaatcaatgtccgctggccttgacatctgaggaaggcggagtgctcgccatcgtagaggtacttgaggaaggctcccttcagggcagagaacatgccgtgggagcgctcctgacgatgtgcgagagtgaccgcagcaagtacagagacctcattctgaatgaaggggcgattcctggccttctcgagctcacagtccatggcacacccaagtcccgaatgaaggctcatgttcttctcgacctgttgcgggattcaccgtactcgagaccaaagctgcaggcagacacgctcgagaacatcgtgaccaacattgcgtcccaaatagatggcgaagaccgtggcggcaaggcgaagaagatgcttgccgagatggtgaaggtcagcatggagcagagcctgaggcatttgcagcgtcgggcttccttcgcctgaaacacctgcctcaggtgacagccccctctcattttgcaatggaaatagaagatagatcaaaataatgagattcctggtgatgccggtccaggccttgacaaggaccgagtgaccggtctaagccctcatacactcaagctgttgacgtagagatccattttccctttcacatgccaatcttgtgtctcgtactctcgttgtgaagaaaagaggcttgctttgtcttctcgttgtaagttttcccttcccaaggttttgtgcatggaatggactgtatataataaagcaaaggatcccattcctcatgtctgaaaaaatctctctgttggtttcatgccacacttttttttctgtttactgattgcacctcctttttgtgtgacaagcaaattgatagccttcttgattcgtcg

SEQ ID NO: 16911 - DNA, 3662 bp, Zea Mays
cagattttctgtaacattgacaaagtttctggtgattcaaacatggttattcagtacaaaaagaagcattgcatagatgaaagattctgtttcttccagggttgctgtgtctacttgcataatgcgcccttagtgaatgcggactacaatgtaatatctgatcttgcactgaagagggtgaagcaggatctaacaatgcatggtggtcaagtctgcagcagtattgctccagctactcatttggtagtagtttcggttttacaggtctataactttgataacctgtacaagagcttccctcccgctgaaagacgttatctacatgacaaaagattacatgttgtcagtaacaagtggttggaagattcagtggagaaacaaatgaagctctctgaaactgcttacagccttaaaccagatacactagaagaactagaaattaaaaggagtgaggaaaatgttcagcctccggagcataagtttgaggaacacaaggaggttgaaagatctcatgcggaaaatatgccaaggaaaaggagtaggccaaccagttcaagaactgcaagggctgctcctagagcagtccgccgaataaggcctagaagaggaaaccagaaagcaaaaataggtgatgttgaatctgaagaaagtggccccagcgaatgccaagatgatgaaaatttggacacagatgatacctctaagattgaagaaggtattaccaacaaaaacaaaggactccctgcacctgcttcaaaaccagcctggagaacaggggctacaaaaggaaatcagcatacaaaaatagatgacagcggatctgaagaaagtgggccttgtgaaacagcgcaagatgattacatctctaagatggaagtagataacattgataatgaccgtggaccaccgccaggtgctcagcttttcacgttgggggagcaagaggtcaaaggtgtcaaattgaacaccgtggaggagaaacaagacagccctttccagagaacaaccgctgctgaagcgatgagtagcacgcctggtgagaagatagaacaaatggctgatccgttgcacgccatgcttctggatatgttgccactcctgggccagaaaaggacagaagatacaagcaaggcgcccttggcgaaagctgagaaggatccacctgcgataggaagctccacatccaattctgagattctgttgccagatgctggaacatccggggttccagccccagagccaagtgcagctccaccaaagaagaaaaaagtgagttacagagatgtcgttagtgaacttctgaaagattggtgagcgagcttggtcagtggggatagcctgcagtctatgttttactcccgtaatcgctatctttgtaaataggacagcgccatctaagtaaccatgtttgtagggtcaccttggctgcttgtcgtgccctgccctctggagctcacttgttttgcctgttgagaattttgactgttaagcctaacaacactgacgttgagttggaccaatatgcacgcggaatgctaggattctacaaagtggaagtggaagcctgttgtccgctctctgcaattggttttggatctttgcactgcagccaatgttgtcgctttcgctgtatacgagaatgtggtctgagccgaagccgagaaagaggaagctctccgtttggcggcctcggcgtgtggtcgtcgtgcgctgtgccgtgccgggccgagtcggtttaccaccaaactggcgtgtgtctgaaacgaaaaggaggggaatggagtcatggagatttgtcgccgaatcgccgttatttcacgcttgtcggaccattcactgttgctcgatcgagtctcgactctcgactgtgcaagtcgttggattggacatttggaccacagcagagtctgtagaggtagtagcagtattcaccaacgtactgactggattattctctctcttttaaaagaaaccctgactggatttttcttccttgctcgctcgacatgtatactaattttctttcttacgatgccgtacagtacaggctaatctaatgctaccagttcagtacatggacgccgcgtgctggggctagcccagacgcgattcgcatgggcgaagaaattcggccgacgcgcaccacatggcaccgcacaatgggttcggtgtggcagcactctgtagtctctagtctgcactgcttgcttttggttcctctttctctctggctgttgacctccttgctccttgtgttccatccgaggcccgtccaaacgcaaaaccccacggcgacgtgttccatccatccggacaagctcgttgcacctcacgaccccgtcttaccacatggcctccagtccccgcttcataagggaaaaaggaaaactaattattactagtatactgttactgctactacaaggttcaactggtaggccctcctgcggtcctgccgatgaccacggccgatacagaagcacataaacacattcgacgaggtcacgactcacgaggggactcccgagcgcacgcgcgaatcgccgcggacctcgccggaggcggcgacgagctcggatcccggcgatctagtcgccggaggcggtcccgatggctcggcggtcgtcttcctcgtcgtcggggacctggcggtacctgaacccggcgtactacctcaagcggcccaagcgcctggcgctcctcttcttcgtcttcgtcgcggccaccttcgccttctgggaccgccagtcgctcgtcagcgagtacgagtctgagatttcccgattagaagatgatataaatcggttgcatgaccagctaagaaaggctggagttaatctggatgaaaatccagtagtaagcaataagaattccagaaaagatcttgtagtagaaattgatcctgtcaataatgaaagacgggaaaaagttaaagaggcaatgctccatgcttggaattcttatgttaagtatgcctggggaatggacgagcttcagccacaatcgaagaatggtatcaacagctttggtggtcttggagcaacccttgttgactcacttgataccctatacataatgggcctgaaagatgaatttcagaaagctagagactgggtggcggagtcattagactttgacaaggattatgatgcgagtgtttttgaaacgaccataagggttgttggaggtctgcttagttcatacgatctatctggtgataaagtatttcttgataaggctaaagatattacagatcgactcttacctgcttgggatacaacatctggcatcccttataatagaataaacctagctcatggacgagcccataatcctggatggactaacggtgatagtatccttgcagattctggtacggagcaacttgaattcatagctctgtcacagaggactggagatcccaaataccagcagaaggcggagaacgtcattaaacagcttcaaaagatatatccaagtgatggtttactgcctatttacataaatcctcattctgggacagcatcatactcaactatcacatttggtgctatgggagacaggctattatcatctgccaccctttgtgttgtaccattacttgaatgcacaatgtccacacatgctgcaatgatcagcatgttatagagatttcttcgttg

SEQ ID NO: 16912 - DNA, 2056 bp, Zea Mays
gaagttttctgctaaaatggggctactattctctgccctggtctatggtattagctgctatagcggcaagctttaggctacacaagacagttcctgagctgagtggaaataaatcccagctcgaattggatatatatgaggaagttggcattcctaattccacggtggttgtgaatatgatacatccattagatggatcaaactggacaaacatcatcttcaacattgtccctttcccagagaacgtgactatatcatcaacatggttgagcattcttagatcaaagttcatgtccttggttgtacggcagtcatcaatccacttgactgagcctctattcgggaatgcgtcagcctttgaagtaattaaatttccaggaggaataacaattatccctccacaaactgcttttcttcttcagaagccccatgcaacttttaattttactctgaactatccgatctacaaattacaagacagaactaacgagttaaaggatcaaatgaaggcaggattactgctcaatccatacgagaatctgtatatcaagttgacaaattcgcaaggttcaacgattctcccgccaacaatcgttgagacctccatcgtcctcgaagttggaaaccaccagccatctgtaccaaggatgaaacagttggcgcggacgatcaccaattcatcttcatcctcaggaaacctgggcctgaatcacactgtatttggcagggtgaagcagattagcctttcatcctatcttaggcattccttacacagtggacgtggttctgatgcaccgagtcctgcacccatgcaccatcatggtcaccacagccaccaccaccgccaccaccaccacagtcacgatgacaacaggcatcctgcagctcccgctcctgctccagtacattttcctgcgccacagcccagatacggtgctccacctccatccggtgggtgtccgtacagcaaaaacaagccaaagaaaagcgggcgtgctgcaccagctgccgagcctgcagctaatgaccaccgatctgcttccatcgccttaccaccgcatccatcatcgccttcgcctgctagttggtctcagcatgctcccagtacgccggctgttcctccccctcctgctctaccagagccacctctgcccaccatctcgtttgctcatccacgtcctccaagtgaacgtggaactgggacgagtcctgctccaagtgaagaggcgacacgagcgggtccttctgggatgtcacaagtggcaccggcgcctcattcatcttatgccaccaggatgcagggcgatgttccctgctgctgggtcctttttgtcctcgcgctatgcgtcctaacgagcctgctacgatgagaaggaagtgcacggccggccaacgagatgtacatcagcgaccgctggcgtacgtgctaaagaagagaaagaggacccacggggctccaccggcgcggcgcatctggttccggcccggccacgccaccatccagcagctcccgggggcggggggtggccaccaaaggcacaaggaagctgagagcctcatcccttgtcaacccctcggcgggctgtgtcatactcttgtcgttcgttgctagttgtcagctgtcatgtaaatatgaagggatgggtataaaaggcaaggcaaagccgcaagacgggcggccgcgcgtggtggtcacgggtcaaagccacaggggggtggcaggcccttgtgcactgctgctcgcgcgcctctggtctgctggctgccgtgtgtgttcgtgtagtgtactgttgctccttctccggctccgacgctcctcaaatgtagagacctccagtttcatggaggttcgttttcttttcgttgctgtgctttatcctgattcctgcaggcagtgtttcatggtagactctcatctgtgcctgctgccgtggaatgaaatcgtcgagctcggtgatcagtgatcgcagctccctccatttccatgcatgcatggtagtagcagagaagccgattcaggaacctatattcggtacaggcagcgtatcttagattc

SEQ ID NO: 16913 - DNA, 1575 bp, Zea Mays
cagaacccgcccatctcagttgacgccgcgccgtgggagttagctggttgtaatgagaagctggacctgttaggccgaagagttctcgttgcaagtctgtgcctcagcgatgggttcaggcaacttgatcgtgaagaaggtggtaaagcacagctcctttgatctggacatacagcttgataagagttggatggaggatgttacctgcccgatctgccttgattaccctcacaatgcagtgctactgaggtgcacgtcttatgagaagggatgcaggccgtttgtttgcgatacagaccagacccgctcaaactgtcttgagaggtttaaatctgcatatgaactgccttccaatgtgaaagtttcatctttagccgtgcctcctcttgatagcattattcatattgtgccgtctaacgcaaacaaccgccccagctgccctttgtgtagaggtgatgttattgggtgggttgttattggtgaggctcggctgcatcttaatcagaagaaaaggtgctgtgaagaggattgctgctcgtttgttggcaacttcaatgagcttcagaagcacacgcaacaaaagcatcctgattcacgcccttcagagatcgatcctgctaggcaagttgattgggagaatttccagcaatcttctgatatcgtagatgtcttgagcacaatacatgcacaagttccaaacgggattgttctgggagactatgtgattgagtatggggatgatgacactggtgaggactatgaagttttccgcagggtcaggacgaactggtggtcatgtattttctgcagggcgttttcaagatcttcaagaagtcgtagaagatccagagcaagggaaagaataggcagtggaaggaggaatggcaaccaggttaatctagaaaattttaacctcgtggttccgacacaacctgttgaattaagggaaattaggtttgatgaaattgatgatgaatacatagtcacaggggccattcctagtatcgcagcaccgggaagaatggctagtttccattacagggatacaagatatggacgttgatgcatagggtctgcagtaaaaaaaggaatagatgttatgcaatttaccgatcaacgtaacgttgtaactccgctcatttggattccttttccacctgccctcggtaggtgctgccgcagttcaaacttatctgtgcataaaaagtagcaacagaacctcgctgttcgtttgaatcaggcctcgtcattctagtttcgatcttgtatatatttagcacccgtctctataggatgttggtgacagttcttttcggaatgcttctgcgatgtagcgcggttttacatagtaaccctgaaacaaacttcagcccgctctaatggggatttgtttggagactcgtgtctcgctgggtagcccttcagataagagcttctgagccgtccatggtgatgctgttcagttagtttaagatgctataatattgagacaagcagggaaggcacgtactgttgacgtttccttttgaccctaccgcctgtgttattctaataaacgcatgtcttgtacattct

SEQ ID NO: 16914 - DNA, 1190 bp, Zea Mays
aagcagctgtgctacttgttcttggtgctgctggtggtgtcggggcatctgctgtgcaaataggaaaagtttgtggtgctgttgttattgcagttgctaggggggctgagaaatcggattatctcaaatccataggtgccgatcatgtaattgactcaagcaaggataatgttatagaaagtgccagtctttcttaaaggctagaggcttgaaaggtgttgatgttttatatgacccagtcggggggaaattaactcaagatagcctgaaacttctcaattggggagcacaaattcttgtcatcggatttgccagtggtgatgttccagttattcgagcgaatattgctcttgttaagaactggacagttcatggtttgtactggggaagctacttaactcaccggccacaagtactcattgattcgctcaatgaactcttgtcatggctttcaaagggtctgataacagttcaaatttcacactgctacagacttgttgaggtccatcttgctttctctgccctgagagataggaaggcggttggcaaagtgatgattgtaatgggctcctcagctgtaccaaggctctgatatcattcagaaacgtttctctacgagatcataccaaggctctgttatcattcagaaacatttctctacgagatcatgaggcttatactgtgtatctcttttatcatctgagactgaagtagtttccttgtcaataatgtggtgtatgatctacaaaaataatcagagaaataagcagtttatatcgacacagtgccaagcagcatatacaactgatgagaaacagctctaccatgccaatgctgtgagtagtggcatgtacaataaatacaacctgattaaccagcatctagatcgcaaggattggattatggtggcagtgggaagacctcgccgttttttttatgttttacaccattaggtgatcttattccaaatatgttgtgtattaaatataatatgtagctccttagaagcggatgcactcgaccatagcaaagtgtacaacaacgagaaaagagaggcttaggtgttgtttggttcaagaaatgtacaacaacgagaaaagagaggcttaggtgttgtttggttcaagaaatgtaacgcaaatggtaatggtaatggtttacgttcgattactggcggtaacaaatttgaa

SEQ ID NO: 16915 - DNA, 852 bp, Zea Mays
gccaagctagcctgcccctagtccccttacccctgcggccctgcccctgcccccgctcccgattccgccgccgcatccgacccaacccgctgcgatcccctccgccgtggcgtcggcgactccctctcccgcgacgccctttcatcgctgcagttgatacgccacccgagcggttccttccctcctctcttcctccccttgtcgctctccgcatcgccgcaggccgtagggcgccaccgcgtcagaaggcgcgatccatggaccggtcgatcaacttccgcggcatcgccgggagcgccggcaacatcatgcagggaatggggaaattcgttttcggcaacgagggactcgactcaaaggaagatagctatgttgagagataccttgaccggataagcaatggcaccatacctgatgaccggagatctgccatgactgagctgcagtctctcgtggccgaaagtcgcttagcacagatgtcgtttggagcgatgggttttcctatcctcctcaatatttttaaagaagaccgcgaggatgtagagcttgtgagaggtgcactggagacctttgtgagcgcattgactcctattgagatgtcacaagggccaaagactgaggttcaaccagcatcagtgaattctgatctgctgtctcgagaaacggagaatatttctcttcttctgagcttattgtcagaggaagacttttatgtgagatactacacaatccaacttctaacagctctacttacaaactcgctgaaaaggttacaggaagcaattctattgattccccgtggtataacagttctaatggacatgcttatggatcgtgaggtgggtgcccgtg

SEQ ID NO: 16916 - DNA, 1731 bp, Zea Mays
agtggcaactcagaatattatttcttttaactgaacttagtacaaaatctaaacatgagggttaaaaagacacccataacacagaagctagaataaactagtcttcagcaagtcttcgtcgctgaagagacatagtatggcacaaagatagcttaggtcaaaagtagatcattagctccgtagtgagggggtcgcagagagaccctaacttcatgttcttcaggttcattccctcgttttgggaccatgatctccagcactgaggcagcctcatcaaaacaagcctccagcttagcatcttcagggatacgagtagctagaggtatttcacgaatgaaatcaccaggagggcaatgctctggggaaggatcggcaagcgcgaacatcctgccatgtctccttatatgttgcatcctagcagtactaacacaaacgatcttcacaatgccatgagtcagagtgttcctccacgaaaccttcaccctctgctgatcaacaaacggcaagctgaccattattaagtagccctggtcatcctcatagatagacttggcagcagtcactggcccacaggcgtttctcatcaccccagtaaactcatggagccacgcagcaggctgcgttggtgagtgcatctccacatcttgttgtgtcttctgagggcaagaattcagtgggaagaatacttcctcatccatggcctgtggggacaattccttcctacgcttgctgctaactggagagagatccataccatcttcgcctgaatgattggacggtgacgacagattcaagcctgttttctttgggttttgggtgccgttgctcttcatgacagggtgtggcttctcaagctcaagctctgaatttggaatggtcctccatgtcccgaaatcactggcttcctgtgggatgatgaaattgagctccctcccagtcaggtccgcccacctcctaaggtctgcctcggtgagccctacaagatttggtgacctgaccacctcaatcccatggatacattgcgggtttgacagcccccggtagtgcttacgctgcatccggtgcgaccgcacaaaccccctgtcgacgctgaaggggaactgcggctccccgggccgggagtggccgttcatgtagctcctcagctgcatcttccccagagcattctccggccgctccttgaacacccacatgtacatgttctccatgtcgtgctgcaccaggaacatatcaaggcggaggtcggacttgtcgaagcccgagaccccgccgctgttgtcccggacgaccttgtccttgcacttgtcggacagcaggggcttgaaatagaaggtgaagaagaaccaggcgccccagatgctgtccccgcgcttggcggccttccggctcccggccttgggggcgcagctgagcacggcctcggcgctgtagacctgcgggccgaggccgacgtccagcatgtcgcagaggtcggtctgccacggctggttgatgtcgggcggaggcgcgccggagggcgacacggcgtgggcgcgggcgccggcgccgacgccccctccgatgagggtctgcaccatgacgccgacggcgcggggcggggcggggcggtgtgttagccgactgttacctccatcagagatgatgagccttcgtcgttaatgcgagggagtggtgggcagcggagagatgcaggggcaagtgcgcggggaggaaggcgacgacatgaagggg

SEQ ID NO: 16917 - DNA, 4727 bp, Zea Mays
cgcttccgtagtacagggcccccatgtgcgccttgccgccttgcctccactccacacaaccgtgtcagtacggcacccggacaagaggcaaacggcaaacccgatcggccgatccattctccaaccctagccgccggccgccgccacctacccggctaccccacgtttccagtccccactccctccgccggcgcatcctgcttccagcctccatcggcgcatcctgctcctggcctcccgccaccggcgcatccttgctcccggcctcctgccaccggccgcatccccagggccgcgagatcctgctcccgccaccggccgccgcaacctgccagcgtccagggcactcgcccccaccatccgccgccgccccccaccggcagtcgcaacctgccagcgtccagggctccaggcaagggccgccacgtgaccacgtctcgcaggtcagcaggtcccttgcctccttccatggcgcatgctggtaggagcggaaccggcgctcaagcacaaggtgccccgaggccgagcagtcatcaagttccctcaaagacaagtgctgtggctgcaggaggttcctcaagtgcacctacaccgacgagtgctgctgcaaatgcaatgccatcttcaagtgctcaagctccaccatcagaaggtcctgacacccttgctgacaagaaacgggcagcgggcggtggctctgtgtttaagccaccccctcccatggtagctgttgctgtgggttccatcgatgaagatgagaagccaggacctacagagaatgacgcgacaagcctctctacgacaattcgcagtaactcattgcgacgctaccgaggaagtggttccgatgataaaacatctttgaatgaatcaacagtcactgatgaggacgaaagggccccatcacccaaccatcaggatgagccccaccggcaagaggcccacatctctagaagctctcaaggttctcgtcctcatggcactcctcgtggttatggttactatgatgatagaggatcccatgataaacatggtgatcgtgagagatctgcatccattggctatagtaatagtggaaggcgaagataccatgatgatagagaatctcatactaggcgcgctgagcgtgagaggtctacatcaaatgaatatactaacaagagaagtcgacatgagcatagctcaagaagctcaagaacatctgcacgatctgattgggatgatggacgctgggaatgggaagatacacctcgtcgagattatcgtgataatcgtcctggctcccggagacaacatccaacacgatctcctatgctcgctgctgcatccccggatgcacgcctggtatctccttggttagacgggaatacaccacgtctagcagcgtccccgtgggataatgtatccccttcacctgctccaatacgtgcttctggttcctcaaaagggtcttcttattcacattccagtggaagatcacaccagcttaccttttcatcaactactagttctaatattattgatgctgatagaagcccctcaaatcctgataggaacagtgagataaccgaggaaatgatgcaggagatggactacaatgctgaccgtgcatggtatgactgcgaagaacacactaccatgtttgatggtgatcattctatgtatcttggagatgataattcctacaaaaagagggaagcagagatgccgaagaagctgactcgtagagatggtagcctgatgacccttgctcaaagcaaaaagatgtcacagatgactgctgataatgctcagtgggaggatagacaattgttgagatctggagctgttaaaggaacagaagtgcaaactgaatttgatgatgaggaggaacggaaagtaatacttcttgttcatgacacaaagccccccttcctggatgggagagttgttttcacaaaacaagcagaacctgtaatgcctctgaaggacccaacatctgatatggctattattgcacgcaaaggttctagtctggttagggaaatccgtgaaaagcaaagcatgaacaaatcaaggcaacgattttgggagcttgctggatctaagcttggcaatatcttgggtgttgagaaaacagctgaacaggttgatgcagatactgctgttgttggtgaccaaggtgagattaattttaaagaagaagcaaagttttcacaacatttgaaggataaagcagaagctgtcagtgattttgcaaaatcaaaatccctttctcaacaaaggcaatatcttcccatatttaccgtccgggatgatctgctacaggttgtgcgtgaaaatcaagtggttgtggttgttggtgaaactggttctgggaagactactcaactgactcagtatctgcatgaggatggatatactaccacaggagttgttggttgtacccaaccaaggcgtgtggctgccatgagtgttgctaagcgagtcagcgaggaaatggagactgatctgggagataaagtcggatatgccatacggtttgaggatgtcactggtccaaacactataataaagtatatgacagatggagtgcttctccgtgaaaccttgaaagatgctgacctcgacaaatatcgtgttgttgtcatggatgaagcacatgaaagatcactcaacactgatgttttgtttggtatactgaagaaggttgttgcacgtagacgggattttaaactaatcgttacatctgcaaccctaaatgctgacaagttctccaagttcttcggaggtgtgcctgtattccatattccgggtcggactttcccagttaacattatgttcagcaaaacaccatgtgaggactatgtggaagctgcagtgaagcaggccatgactatccacataaccagcggccttggtgatatcctaatcttcatgactgggcaggaagaaattgaggctacctgctatgcgcttgctgaacgcatggaacagttaatatcgtcatccaccaagactatccccaagctagagattctgcccatctactcacagttgcctgctgacttgcaagccaagatttttcagaaggctgaagagggcgctcgcaagtgtattgttgctaccaatattgctgagacctcattaacagttgatggtatcttctatgtcattgataccgggtatgggaagatgaaggtgtacaacccgcggatgggtatggacgccctccaggttttcccagtcagccgggcagctgccgaccagcgtgcaggtcgggcaggaagaactggccctggcacatgctacagattgttcacagaatcagcctaccagaatgagatgctccctaaccctgtgccagagatccaaaggactaacctggggaatgtggtgcttttactgaaatccctcagagttgaaaacttgctcgactttgactttatggacccaccgccccaggagaatatcctcaactcaatgtaccaactctgggtgttaggtgcattgaacaatgttggtggccttacagaaattggctggaagatggtggagttcccgttggatccaactctggcaaaaatgcttcttatgggggagcagctagagtgccttgatgaggtgctgaccattgtatccatgctatcagtgccgtcagtcttcttccggccaaaagaccgagcagaggagagtgacgcagcaagggagaaattctttgtcccagagtctgaccacctgacactcctgaacgtgtatcttcagtggaagtcgaatcagtatcgaggcgattggtgcaacgaccacttcctccatgtcaagggtctccgcaaggctcgtgaggtgagatctcagctgctggacatactgaaaaccctgaagatccccctgacatcatgccatatggaatgggacgtggtgaggaaggctatctgctctgcgtacttccacaattccgcccggttgaagggtattggggagtacgtcaactgccggaatgggatgccgtgccacctgcaccccagcagtgcgctatatggccttggctacactcctgactatgtcgtctaccatgagcttgtcctgaccaccaaggagtacatgcagtgcgtcaccgcagttgatccacagtggctagcggagatggggcccatgttcttctctgtgaaggagacagacacctctcttcttgaccacaagaagaggcagaaggaagagaagacggcgatggaggaggagatggagaagctgaggcggcagcaagcagaggccgcgcgcatggagaaggagaaggaacgggagaagagagctaagcagcagcaacaggttgctatgcccggcctgaagaagggtgcgacttatctgaggcccaagagaatgggtctgtagataagacctgatataacttaactgtctccggtgattttgttactaggctgagggaacttgtaatgtgtagcctgctcaagcagcatgtaaaacaacacgtcaatgtgaatgtatacaacatcgacatgtgaaaaaatgaaaagaaaaatagagtgttgtcgacatagagtttgattttttgctgagttagctcttaaaagtatgcagtcattatgtttgatatggtatgtcctcttaatgaaaaatatgattcttgaaggtctatgaattctgcaggcaagctaaattagctcttaaaacatttcaagaaacaacgtgaccctgaatggactcaaccaatcgtccattgctgattagag

SEQ ID NO: 16918 - DNA, 2367 bp, Zea Mays
tgactactccagtactccctctgtcaaaaagaatgcaattaggagggtagttctggaagcaagaggcttaagggtcttggtattggttctcctgatggtcctgtttcactagacgatgtccgaagactagaaaaatctaatgctgatctcagggaacaacttgaggctcatgttgtgacaattgaaactttgagggctgaaataaaaacgacccaagtgcagcatggaaaggaacttgaggagttgagagaaactacgtcgagttcttatcttgatcaaactaaatctctccagtccacacttgaggagaaacagaagcaaatagattcactcagtacatcaaatacagagttacagaactctataaaagatctggatgaaaggcttggtgcatctaaacaatcacgcgcggatgctgatgagataatttcaagccagaaagcaatcatccgtgagcttgaggaacagctaagtgaggagcgcaacttaagaagagaagagcgtgataaggctgcacatgacttgaaatttgcagtgcataaagtgcaagccgaggctcaagaagaaattaagaaacaagcagagtcttaccttagacaacaaagagaacagaaagaagttattaacaagcttcaggaatcagaaaaagaaacacgtttgtttgtggaaactttgaggtccaagttggaagatgctcgagataatcttgtaacatctgagaaaaaagtaagagagctggaagctcagtttcaggacgagcagctagtatcagccaacaatcgaaagaaatcagaaaatctggaaactgaattgagaaaactgaagaaggaacttgagaatgagaaggctgctcgagaagaagcatgggcaaaggtctcagctcttgagcttgaaatagctgcaacgattagagatctatcaattgagaaacagaggtatcaaggggctagagaacggattattctacgggagactcagctgcgtgctttctattcaactacagaagaaatctcttctctgtttgcgaagcagcaggaacagctgaaagctatgcagagaactttggaggatgaggagaactatgagagcaccttaatgagtgtggatctcaataaagagcatctagccattgataatgctggtatgaagccagtaaactgctcaaaaaatacactgggagcttcaattgcttcaccagaaaatactcaggtaagtgaacatagttccagtgacgaagatgccaacatgactgagcagcaagatgatgatgttactgccaatggtggcaacactcaagatctagaatgcaccagtccagaaaggtcagtggagaggaggccgggttttcatggcaatcctgttcctacagctcctgagagggaagtaacagatactgagcaagttcctgagacagaaagcgaagctggtaatgttggttgcgatgaccaaagatgtgacaatatcggaggagagactatgccgctagaggacgaagtgctgcttccagagaacgaggagcctactgcattgctcaaagatgcagggcagccacaatcaaatatggttcctattccaattctcgatgatggcggcggccactgttcagaagaaaaacacgagggtgcttgctctgagagcaaacgggatgacacacatgttggagctatcagaacgggtgatctgttggcctcagaagttgctggcagctgggcagtggaaacagctccatctgtcaatggggagaacgaatctccaaggagcttgggagatgctacagagcgagatgaagatggaggtagcgtggcagctgatgctttgctaactttggtgaactcagagggccaggcggctgggagccagaataatgttgagcaggccagttccaaaataaccgatgatcgccgtgttcttagtgccatgattgggattgttgatcctgaattcaggaagcaaatgtccaggagtggagctggaaacgaggagccgatgtctgacgctgagacggatgaaggcgtcgaggaaggtgattcagattcaggttcagatggcagcgacagcgacagcgaggaggctatggttgaggattctgttgggtagcttaaacggaattgactgctcactgtaaatatctcaattcgttcgtgcaccattcgctgtatgagcttgtattatgcgtagtgtagcagtatttgttttttattctttaaatgtttttagcagctcgtggtgttgtacgaaatggatgccgtttggtcttcaacacaaaataaagacattcaaactataaaaggatttggctttttatatacagttgattttctatatattcagacataatatagaaaagtcaaaaataactcaagaata

SEQ ID NO: 16919 - DNA, 143 bp, Zea Mays
gagctggctaggcgtcagcgggagactgacgacaacctccgtcgtcaagcttcttccatgggtatgccatttgctccccgctcgcctgatgtgcctcttcatcctcctcctccagaaatcaatgaatggcaccagcaggccta

SEQ ID NO: 16920 - DNA, 1071 bp, Zea Mays
aaaaatccccaaatctctccactcccagccgctgcacctggcttcttcgccactctctcctctcctcgttcactctgccaggtggccggccgcccctgctcccatctcccacagccgccgccgccctcagctcctcagccacctcccatggcctcgtctccctgctgcagcgaagccgaccaccgtttcctgcagcctcgatagctcccccccccccccccccccccatgccgtccctgctcacctcaccttcgtcggccgtccttggacgccgtgctcggcgcccgagctccctacgccggccaccatccttcccatggcaggagctccgatcggcccctgctgaccttggcactcggcgtggctccaagcagcgccttctcccccaggaccggctcaccgtcagccgcgagctcctctccctcacgtcccctacagacaagcagtgtcgccggtgagcagcagccacagcaactccgcgctccgccggcttgcggttttgtcaagcccagtagacagcagcaaccccgatgtcttcacgtcgtgcgctccaccccgatttgcgcagcccctgcgcgacgtcgtccacccgatgttgacgctgtgccacgcgcaccaagcgttcgacgaaatgcccaaccaacggacagcacgcgggtctcgaacccgattcggctaggttgttcgatttgtattttgtggtctactctaattacgctttggtcgatgtcgcatatatatgtgtgtgaatatgtttgtatggattcgagttagggaaggagaagaaagcgaagtagaaaagaacccggatgtttcttaggttttcagaggattgtggttgtattggatgtgtgttgaaaatgcctcctcgcaaagagtgtatggtcccatgcatgcgatgtgtgatttttgttggtgaatgcgaaataagtttagtgtttcaaaacggttaattgatagtctctgttagtgctattgtgttgatttttgttgtgtggcgaattgatgcttcgttttaacaagtcactacattttatatctagcgggtgattaaatgccacatcggttaga

SEQ ID NO: 16921 - DNA, 1559 bp, Zea Mays
tgattcgtttgtggtatcttccggtctggaaaaattcattttcacccaagcgaggaagaactactgaaagaaacagacaaattgcttcttattgctcctgttcgtgggatgaaaagaccacaatatagagcattaagtgtacggaaagaaacacaaacattgagtcgtaactcagagccaagagagggtcaaggatcatttaatatggctactaccatggataatgaaacacggctaaataacattgtaaagcgccccttgaaatctctttctaagagcagtgattatatgcttggacccaaggaatgtgtacttattgttggttggcggccaaaagttaccgaaatgatacgggagtacgataattaccttggacctggtagtacagtggaaatcttgtcggaaacccctattaaagagaggagcagtatcatcaacccccttttgcagagccagcttaaaaatgttaaagaaacaataattaacgtacgagaatctgccaagtcagataaagaggttccactgtcaatagttgtgatatctgacagagactggtttgttggagcagatgctgcacaggctgataaacagttggcatacacccttcttcttgctgaaaacatttgccagaaacatggcgttatggttgagaatcttgtatcagaaatcgttgacatgggactaggaaaacaaatatctaaaataagaccatccctttcatttattggagcagaggaaataatgagtcgtgtgacagcacaagttgcggaaagtagtgagctgaatgaagtatggaaggatatcctgaacgctgaaggcgatgagatctatattaaggaaattgggctgtacatgaaggaaggagagaaaatatcattcttggagctctctgaaagagcagttttacgccgtgaagttgcgattggttacatcaaggacggcaagcagcatattaatcctatcaacaaatcggagccgctgtcccttgaaatgaatgattcgctcattgtgatatcggagtttgaaggtgaacaaccaattatgatgggcggagaaacttcaggatgaaattttcagctttatatctcttcacagaaactctaacaactcttgctaccatgaagagatgacatataacctgtttataatccttttctttttgtacaaagggaaagcaaaatatagtttaaaggccacaaatcaagttttgttcctcccatagccgtagaacttctttgatgcaaatattttactgcacagtttaaccgcagaatcttttctatttatctgtaaacatagtgaataacacaggcaacttgtatggtacagatgtctgaataaaggaaggatgaaggaaaattgattgactatgttccttgttgtttccttctgactaatgaatacaatgtttccatttttttagtcctgagctagacaaaatcagctaggtatggccttgctgttctctttgggagataaattcgtcgcctctagcatttggcacaagaaaagtttgttttacactttgcttcattaaccaagccactgcttcagccttt

SEQ ID NO: 16922 - DNA, 762 bp, Zea Mays
gacaccgcctcggttggagacgtggtgcttgttgcgaatgaatctgtgatcgataatgaacataaactggttggattgcacagcttggtgggctacaatgtcgtaacttcccggcgacgcaatgttggcaaggtgcgtggtttcacatttgacatcagctcaggtgctatggagtctctcgagcttgactcttttgggctttcgattgtcccttctagcttggtaagcacgtactgtttatttgtcgaagacgtgctggatatagtctccgatacagtcgtggtgcatgaagacgccgtctcacgggttcaacggttaacacagggcattttgggcactcaaaacatccacggacctggtggtgagattgacgagtacggtagatttggggggagggggaggaggaggagagcaaatggccagggaaagtctggtggccgagaactccgcagcgaaccgaagcatccggatgatgaatgggagctgccgatggactactgacacaaactcgccatgatagcattctgtttagtgctattgtattgccagaaaagtacatgctttgtacatataacataccagaggattgcgaattcagaaaagacgaaaggccctttcagccttgtcagagtttgatcgctttggcccgggtgggttagtataaaaagcgagattgtgttgccatgcaatgaccgtaaccccctttgtcttccccgacactgattgcactacactactactactactactaatcattcaaag

SEQ ID NO: 16923 - DNA, 1255 bp, Zea Mays
ctaaccctaaatcagggatgttagttgccttttgtgagcaaacagagggtcaaaagttgctggaagatttaccagtgcaggcgatgttggagactctcacaaagagatacgagaaggaattgatacacccaattcaaaacctgttcagtggagaattagcccgtgctatgcttattcagattcaaaagcttaaactggaccttgaatcgggactactggaaatggatcagattctaagggcaaatgctataaactttgctgttcttgcagcgcttcctgcttttggtctttcacttctgttgcttgtgttactgcgagcatgggttcagcgtgaccatggtgctgagggaagaggtaatattgcacgatgtcaacggaggctgcttcttgttgatgtagagagaaggcttatggagtttcaacattacagggataatggaatggaggaagaggcacggtgcaagtttggcttagtactttacacgcttgatagactctgcaaagctgttgagtcacacgcaaaagaaacaggcgaatggttaagcttgagacaagatatttttgatctgtcgaagctcgacatgggaatgccagataagatgattgtcgtttcacggttgaagtggatgtataactgcttgcttccattctcatcgagccgtttgccacgcctctagagcagtgagcaactggacgtcgtgtgttgcattttggataaagattttgacacggatacctggaactctatgtcggaaggatggttctttcatgcccacaagatgttctgtagattttagcagagctggatgaagcatatcggaagggggcagattgggtggatgcagtatccatcgagccctccgttgacaattcttgcattgctaggcatgttgatttggattggctgttgcaccgaatggtttgcgtcgatgggctacatctacatgtgtgcgagcattgtaccctttggccttgttccacttgcaattccaattccaatggttgttccatatcccatactagttcataagtcataacatgacaacagaatgctcttcttttatctattccgcagagatgggtacaatcttatttaactgtttcatttgaaagaacgtgttattattcatgtggccacacgacaccctgggttcctttcacttgccgatgatggcgagcagcgcttccttgtagtggccatgggtgttcttggccacggcgtcggcgagctttgtcccgtactgcctggtgtagg

SEQ ID NO: 16924 - DNA, 2029 bp, Zea Mays
atcaggtcatggtcgctgttatggtgtttcacctattgtgactgctagagttcctgtactgaaggttattgataagggaactggtgtagagtgtgatatttcagtagaaaacaaagacggcatgtcaagatcagccatatttaaatttatttcatcaattgataaaagattccggatactttgttatctgatgaagttctgggctaaggtacatgatgtgaactgccccaaagatcgaacaatgagctctatggcaattatttctttagtttcttttcatttacagactcggtgtcctccaatattacctgcattttctgccgtattgaaagatggtacagattttgcaagtattgagaagaatgtatcactattccagggttttgggcacagcaataaagagtctattgctgaactttttgtatcactaatgagtaaactagtgtcagtggagggtttatgggagcaagggctctgtgctagcaattttgaagggacatggatatcgaagacctgggcgaagggtgttggcaacttgaatgttgaggacttcttggaccgatctcagaattttgccagatcggtaggggtgaaggagatgcagaaaatatgtgaatgcctaagggctagcgtttctgatttgagcaagttttctaagggtgaaattgctgcgcccaagctaaaggccctgttgtttaagcctttgaaccaggttaacccagtcattaaaccccatcagaaaactattaagaggaagcgtactaatccaaataagaccagaactaaccctattcagaaaaatgctaagaaaaagaaggcccttgagcaggataaattagccatttctcctggtcagaaagatggtaagaagacccttgatcaagagaagtcagttagttctcccattcagaaaggtgctaagaagaccaaaccccttaaccaggataagttagtcatttctcccggccaggaagatgacaagaagccccttgtgcaggatgagccaatagtagtgtctcccatccagaagaataacaataagtatgttgatcaggagaagtcccttcagcaggagaagcaaatcatctctcccggacagaaagatgataagaagagcagcaaggtgggacctgactcagcatgtaatcatgtgcaacagaagaaagtgaaggctactgtatctaccggccgtgctgctaatactcatgtttctagttccaggcctcgctctgtttttatcccccaagcacattggcccagccagccaattgttgatcggtttgcgcatatacctgagcacctgatcagcccttctgcttttagttatgggttgccacaaccacttatgcatccagcctatcctcatcctcattctcatcagggattggtaggtcaaggacagggtaatttccttcatttcaatcctggtattgagctgcagcatcaaggccaggctttcttcggtcctccagctgtctaccaccccatggtgaatgggtttcacccattcggtatcaatggtgctcagcaagtgcagtacatcgacaataggatggtgcagaggccaccatatggttttggcccaggtttctggggatgatggttgcagcctgaggaaaggttggttgctaactagtgggggtttgaggtgaaagttgtcagttcaaagaaaaaaaagctgttgtgtctaatatactcaaagatttagctttaaataggggccagtggaaaatagctaaccatgtgtctgaaccttgatttgtggtttttgttcggtttcagctctagcttaccttagaagtaaaatgttctgttgatgttggattttaactctagcctatcctgggattaaaaggttttgttgttgttgttgtaagttgtaattgtaactgttaggtttgtactctagtctgatttaaaagtaaaaaggctatattgttgttgttgtatctagacctgtacaaggagaaataatcaaataaggaaaaaaacacaatgtgggaaagaaagctgtaatgtcgtttgatct

SEQ ID NO: 16925 - DNA, 1379 bp, Zea Mays
cgactagcaaagtggaaaattgatttgtccacatttcaggcggacaccaccgtgtcgcccccgcgtcctaaacttctcacctcgccggggtccggtagccgcgaacgatgctccgccgcgcgctcctctcctccgtctccccactccacggaacggtacgaatcccgagccccagctactctcctatccaagcccttctcgctcaatggagcaggtacgcctccgtggtctcatcctcggccccgccgccgctgccgccgccccctccatctccgcctcgaggtccatcgaggtcgagcggtggaggtcccacttcctcgtcgctgaaccctgcagaggtcgccaagttcgcctccatcgccgagacctggtgggattctagtggcccattcaaacctttgcatgtgatgaatccaacccgactgtcttttatctgctccactctctgtagacatttcagcctcttgctcgaatgggtgctacggttactgcaattgatgttgttgacaagaatataaagattgcaagtattcatgcggcatctgatccaacaactgcttcgattgagtattgttgtgcaacagctgagggactggtaaaagagaaaaggttgtttgatgctgtaatttctcttgaggtgattgagcatgtcgccaatcctttggagttctgtgaatccctctcggctttgacaattcctaatggtgccactgtgatttccacaatcaaccgatcaatgcgagcatatgccactgcaatagttgctactgagtatatcctcagatggcttcctagaggcacacatgagtggtccaaactggttaccccggaggagcttgtcctaatgctgcaaaaggcttccgtctccgtcgaagagatggcagggttcgtttacaatccgttgagcggagaatggtccctgtcagatgatatcagtgtgaactacattgcttttggcgtcaagaagggcgaggcatcatcgacaaatgacagagaagcaaatttatcatagctgaagaaaaacacgtgaccttgaattgtcgggcatcattttcagaggaccaattcatgtcactgaaatcttactgctaaggatgcaaccaagtagcagaagataattctcttgctctttttagtcttggaaactggagcttgtggagtgatgcttcctggaagcgccattgagaagtcaagttgacaacacgtgactgctaacaagtagagctatctgccttttttgggtaatgtttcaggcagtttttctcaattttgtggcaatcactgatctaaataaaaatactactacactgctgtacgtgaaaactgaacagatttgctgtctggaaatgtaactatttttaacagttaagaggtgtttg

SEQ ID NO: 16926 - DNA, 1487 bp, Zea Mays
agttgtttccgggttagtagagcaaatttcacatgatgtgtgccagagctgacccagcagatgtgggactccaagaacatgatgtgtgctgctgaccctcgtcacggtcgctacctcacggcatctgctatgttctgtgggaagatgagcaccaaggaagtggatgagcaaatgttgaacatgcagaacaagaactcttcctactttgtggagtggatccccaacaatgtgaagtcgaggtgtatatggctaccctattgagattcaagcccttttctttatggcactaaggtgtgctcttcaaatgcttaagcatgataatgaagggaaggaatttgtagagaagattgctacccgccttcacgctttaagttatcacatgcgaagttatttttggctcgatttccaacagctaaatgacatttatcgttacaagacagaagaatattcccacacagctgtcaacaaattcaatgttattcccgattcaattccggactggttatttgactttatgccttgtcagggtggttttttcgttggtaatgttagtcctgccaggatggacttccgatggtttgcacttggaaacatgatcgctatactttcttctctcgcaacacctgagcaatctaacgctataatggatcttattgaggagcgctgggaagagcttatcggtgaaatgcctctgaagatatgttatcctgctattgagaaccatgaatggcgaattgtgactggctgtgatccaaaaaatactagatggagttatcacaatggaggatcgtggccagtgcttctgtggctgctgactgcagcctgcatcaaaactggacggccgcagattgcaagaagagcaatcgacctagcagagaggaggctgttgaaggatggctggccggagtactatgatgggaagcttggtcggtatgttggcaagcaggcgaggaaattccagacttggtccatcacggggtatttggtcgccaagatgctgttggaagatccttcacatcttggcatgatcgccctggaagaggacaaggcgatgttgaagcctgttttgaagcggtccgcgtcatggacaaattgagatggtgacgaaaatttttagggaggcgaagtcagctgaaaacacgaattcctgtggtagcgtctccttgtctgctgaccccttcatttgacttccaaaccaggatggtttgtgtctacttggttgtacaatatctcagctcgtttcctgagttgaaaaaaagaagcaactgcagaaatgggcattttatttttttctctctctttctcaatctctgtaagaagacactctgattcttgcttaggtcataccctataaataatggatccttttggttaggctcaactttgttgtaccagtggactatacagatgagtaagctgattccagcttccctgtgaagcataagtgctatttctaacgaatgaataagctactttccctgcgttgc

SEQ ID NO: 16927 - DNA, 1596 bp, Zea Mays
ctgagaggtgttgttgtgaatgctgtagctcctcgttcttattctgcctggaatcttcccctggtggaactcgtcgccaaaagtattgagtcttccgacctcaacttctcacgttacggtgacaccttttttgaggtggtttttgttggaggacgcactcagcctggcactgtaaaacctgaagaaggagaccgccacccttattctatgttagattgtgtggcacagcgtgaaacaattttgcctttcgtactctatatccagaaaacattgcgcaggaggcctttcttaataaaaaatcttgaaaatgttatgcgcaaattcctccaatccttggagttctttgaggaaaatgagaggaagaaactcgccatattcacagcccttgcattttctcaaaagctgtcagggcttcctccggagacagtgttccagccattgctcaaggataatctggttgccaaagggatagtactttcattcataactgagtttttcaaggagtacctgaaggaaaacaccttggatgatttgattgcgcttttgaagaaaggaaaaatggaggacaatctgttggacttttttccatcagctaagagatcctctgaggctttatctgagcatttcatcaaagaaggtctgactagccttgttgagtacaatgaaaagaagatgtttgaagttaaacttaaagagataaagtcaacactgaccactatgatcaatgatgaggctgcaatacctgaagtgattgagactgtcaaacagcaagttaaggatgctaaatttcctgatctagaggtcattcgcatgttgtgggatgtgctcatggaggctgttcagtggtctgggaagaaccagcaacagaattctaatgcagcacttcggcaggtgaaagcatgggctgagcttttgaatgctttttgcacgagtggcagactcgaactggaacttatatacaaagtacagacacagtgctatgaggatgctaagctgatgaagctgtttcctgaaatcataagaacactgtatgaccaagatgtcctagctgaagatactgtcctgctttggttccgtaaaggttcaaaccagaagggcaggcaatctttcgtgaaagctctggagccgtttgtcaaatggctcgaggaggctgaggaggaagaataagtttttgatttggagaacggccgaatgctggcctaagtgttactttatatttctgaagttagaagtttgtggaggaattattgctgctgcctcttactgccgagaactttatgttatgatgtttagccacatggatcccggctgcagagtgctataatatgttgctgttaaaactttgtgtcgagcatttgttgaaacttttgttatcattactgaaaggatttataatgggacgtcagtttactgtcggtattgtacaattactggattattcataagctgcagaatgctacaaatgtcatttctggcaaatggaatattgaaatgttacgaatgtaaggactctccctgtctgccgtaatttagagcagcctaagtagggctcctttggaatccataggattctcaaaacgtaggattagaaaaaac

SEQ ID NO: 16928 - DNA, 195 bp, Zea Mays
cacatatgatgaatagtggtacagaaacaaatgtcacatctttactatataataggagttctgtacaaaataaataaataattacatcagaaggagacaacgatccagcaacccaaagttgactgggagacaatggactagacctctcacgaactcgtcatagcatcctccatgcgcatcatcctgcggtacctg

SEQ ID NO: 16929 - DNA, 2401 bp, Zea Mays
cctccagctccccgaaactttttgcatctcctccaccaccaccgccccctccccttcgccccgacgaacacggcaccacgagccccgcacctcacacagatttagcctacctctcccaccgcggctacattcctcaccccaccctgtcggctgcataaacttttaaaaaaatgaaggcaaatatgggcacaaaagctcgtccactatctgttgacgcagacaaaggagagattggcgaaatagatacaagggctccttttgaatctgttaaagctgcagtgagtttatttggtgaagtcaaggtttcatctgacatatcagctgcaagaaagcctaaggttcctcaagcagagagggttttagccaaggagacagagctgcacttagcccagaaagagttgaataaatacaaggaacagctgaataatgctgagacaacgaaagtgcaggctctctctgagctagagaaagctaaaaaaactgtcgaggagctaacaaccaagctggatgtggttaacaagtccaaacagttggccattcaggcaacagaggatgcaaagactcgaaccaagcagcttgaaggtggcagcacaaatgaatgtctaggaacagatggtcctctgaggcaggaactcgaaagtgcaagggagcagcatgctatcgctttggcagaacttgatgcagcaaaacaggagcttagaaagctcaagaaggattttgaaacatctttggatatgaggttgtgtgctgcccagcaggaagacgaatcactccatacaactgaagccaacaaagaaaaagctaaccaacttcttggtgagattgcggaaattcaagaatcgcttatgcatgttaaggcagctacggtgcaagcacacgaagaagaggcacaaatccttgctgagaaggatgttgctagggccacgtataaacaagctttggaagaaacacagaagaaattgttgtctttgaggaatgattttgaccctgctgcttatgatagtctgaaagaaaaactagaacaaaccaattctgaggttgcatctatgcaaaaaaagatagaagatgctcgggctcaggatttagagtctgttgctgttgtcagcacagagttggatgatgctaaggaaatgttgcaaaaagtagcagaggaggaaagttctcttcgaagtttggtggaatcactgaaagtggaattggaagctgtaaaacaggagcacaaccagctcaaagagaaagacacagaaactgaatccattgtcggagatttacatgtcaagcttcagaaatgtaaatctgtgctggaggctgctgtggctgctgaatcaaaagctacgtcagcttctgatgacctgatgctggcccttcagcaactgtccgcggagtcaaacaatgcattgcaagaagctgagataatgcagaagagtgcggcggagctaagagaggaagccaaaaaggctcgggctgaactagcagaagccgaacaaaagttgcagttgacgttaaaggaagcagaagaggctaaagcagctgaagcaatggcccttgaccggatcaagcagctctcggacagagcaagtgccgctagagcatcaacttcagagtccggagcaaatatcgcaatttcaaaagaggagttcgaatctctaagccgaaaggtcgaggagtcagagaagttgagtgagatgaaagtcgctgctgccatggctcaagtggaagccatcagagccagcgagaacgaggcgatcaagaaactagaagctgctcgcaaggagatggaggacatggagttggcaacagaagaggccctaaagagggcagagatggccgaggcagccaaaaaggccgtggaaggtgagctcaagagatggcacgagaaagaacagaagaaaaccgcagaggccgcacagccttctgcgggggcagaagaactgggaagtgctgcgtcgccccctgtacgtcagacttctgccggaaaagcttccgagaagaacgaggggcatcagaggagcagtaaagcgctgctgaagaggagcttcatgctgccaaacatcgccagcatgttccataagaagaaaagccatccttccagttctccctcgcaccttcctggggaaaaatctgtgtgatctatccgaatccgaagctcctgtttgcgaactgaaatttccaaacttgaacgcttgcttttacactatattctgtataaaaatccgtctactcccttgcgccttgtagtaaatttcggacataattttaagattgcttgtaccccatatttttctgcactttcaggacttccggatgagtgcattgtacttcagcaacaacagtatctaagtcatgttcttgcaagcttccagaatagtggaagcatcacacatgctgcgaattgcattca

SEQ ID NO: 16930 - DNA, 1871 bp, Zea Mays
ctcgctcacttcttcccagcggagtgcgcagtcgtcatggctaacgctagccgtggtcgtgtcggcggcggcgggcgaagttccgtgctcgcgctgcttctcctgctttccgccggaggagcccgagcgtcctacgacggcgagggcgaggcagcacgggcaggggcagaggagaaggagaaggctgcggcgtggacgggcgggctgagccggcggagctttcccaaggggttcgtgttcgggacggcggcgtcggcctaccaggtggagggcatggcgcacaaggacggccgcgggccgagcatttgggacgccttcatcaagatccccggcgagatcgcaaacaacgccaccgcggacgtgactgttgacgagtaccatcgctacaaggtgacaaactgaggacgtgaatatcatgaagaatatggggttcgacgcttaccggttttcgatctcttggtcaagaatattcccaaatggaaccggagaagtgaactggaaaggagtggcgtactacaacaggctgataaactacatggtgaagaaaggcatcacaccctacgcaaacctgtaccactacgacctaccggaggcgctggaggtccggtacggagggctgttgagcagagaagtggtgagatcgttcgcagactacgccgacttctgcttcggggcgttcggcgacagggtgaagaactggctgacgttcaacgagccgcgggtggtggccgccctagggtacgacgacggcaggttcgcgccggggaggtgcacggggtgcgaggccgggggggactcgggcaccgagccctacgtcgtggcgcaccacctcatcctctcccacgccgccgccgtccagaggtaccgccgcaggcaccagccgacgcagaggggcagggtcgggatcctgctggatttcgtgtggtacgagcccctcacggcggactcagccgccgaccgggccgccgctcaaaggtccagagacttccacgtcggatggttcctgcaccccatcgtctacggcgagtaccccaagtcggtccggagaagcgtcaagggcaggctccccaagttcacggctgaggaggccggtctagtccgaggctccatcgactacgtcggagtcaaccagtacactgcctactacgtgcgtgatcgacggccaaacgctacggcggcgccgcccagctactcgtccgactggcacgctgagttcgtctatgaacgcgacggtgtgccgattggaccaagggcgaactcagactggctctacatcgtgccttggggactgtacaaagccgtcacctacgtcaaggagaagtacggcaaccccacgatgctcctgtcagagaacggtatggacgacccgggcaacgtcacggtgggccagggcgtgcgcgacgcggccagggtggcctactaccggagctacgtcgccgagctgaaggcggcgatcgacggcggcgccaactgcgtgggatacttcgcctggtcgttgctcgacaacttcgagtggaagctggggtacacgtcccggttcggcctcgtctacgtcgacttcaggacgctccggcgctaccccaagagctcggcgtactggttcagggatgtcatcgccggcaccaactgagatcacgtacagtggcctcagtcgatctgatggcttgtttacgttagttcatcagcttcgtccccatgccatgcatcaagtaaaacatcatatatatcacggtgtgcatgaagtcaaaaaaataataataacgtgatgtcacgtatgggttctgagacgaatgctgcctctctctctctctctctctctttatatatatatatatatatatatatatatatatatatatgtcacgtgattg

SEQ ID NO: 16931 - DNA, 1348 bp, Zea Mays
ctggaatctggacgttgactaagtggcagataaagaattctagagatctcgctattaggaggaaggtttcagagctgcctcagagaaatcagaaagcgtgctcgtgactttgaggacaaggagaagggcgtcaagatcaagaaagaggactgggacaagttgcatgttcacatagcctcgtacaacaacttccccactgctgctggtttggcctcttcggctgctggccttgcctgtttcgttttcacccttggaaagctgatgaatgtgaaagaagattatggagaactttcttcaatagcaaggcagggatctgggagtgcatgccgcagtatatatggtggttttgtgaaatggtgcatgggagaaaaagatgatggaagtgacagtattgccgtgcagcttgctgacgaaacacactggaatgatcttgtaattattattgcagtggtcagttcaaagcagaaggaaaccagtagcaccagtgggatgcgagatagtgttgaaacaagtcctctcttgcagtacagggcccagacagtggtgccaggtcgggtgttgaaaatggaagaagctatcaagaaccgtgactttgaatcatttgccaaattaacttgtgcagatagcaaccagtttcatgctgtatgcttagacacgagccctcccatcttctatatgaatgacacgtcacaccggataattagccttgtggaaaaatggaaccactcagaaggaaccccacaggtcgcttacaccttcgatgctgggccaaacgctgttctaatcgcccaaaaccgtaaaactgcagcacatttcctccagaagctcctatactatttccctccacaggataatgatttgagcagctatctggttggcgataaatcaattctaggtgacgccggattgcattccatgaaagacgtcgaggctcttccagcacctccagatacgaagataccggatcagaaattcaagggcgatgttagctacttcatctgcagcaggcttggggcaggtccaaaggttgttgttgacgaaggtcaagcactgatcgattcagtcaccggacttccaaaaggcgtgtagttctagatttaggttggaataatggtttaagctggggattaaagacaatggtatcatacaagcaacctgggccggccaataaagatagaacacgttctcgccttttgtttttctccctcgcctagtatgtggctgaaatatttgtttcgctattttattgagcacttcagctgagacgcaagcggagaataataactttgtcgtgtaggagtactgcaggagcgctgcatcttggagctatgcctatgcgtgcgtgcgt

SEQ ID NO: 16932 - DNA, 1364 bp, Zea Mays
gttagatacaacctctctgcaaaatgcaggggcagctgcgaactccagtgctctcttcttgacagcagctgcacagaacctgttgtgtctgaagttagcagaggagattggtgttagtatcggaaacccatggattacttggttcaaggtttctagcgtgccagcagttcttgggcttttagtgactccttatttgatttacaaaatattcccccctgaaataaaggacactcctgaagccccagcattagctgccgagaagctaaagaacatgggtccagtaacaaaaaatgaatgggtcatgattgggacgatgcttcttgcagtctcactatggatttttggggaaactattggcgtatccagcgttgttgctgcaatgattggactctcaatacttcttgtgcttggagtgctaaactgggaggattgtttgaatgagaagtctgcatgggacaccctagcttggtttgctattttagttggtttggctgggcagcttactaaccttgggattgtgtcctggatgtcgaattgtgttgccaaggttcttcaatctttctcattgagctggcctgcagcatttgttgtccttcaggcctcgtacttctttattcactatatatttgcaagccaaactgcacatgttggagctttatactcagcatttcttgcgatgcatttagcagctggtgtgccagctctaatgtcggcacttgctttggcatacaatgcaaacctctttggagcactaacacactatagtagcgggcaatctgcagtatactttggagcggggtatgttgaccttccggatgtattcaagctgggttttataacagccgcaatcaatgctgtaatttggggagttgctggtgcattatggtggaaatttttgggtctttattgagtgtcggggcagtgtaagtacgtgaaaatcgtaccatattatcaaacaagtaattcatgatccagcatcggaggtggccagcgttgtaggagcttcggcatcggaacaccttcgaagcagactgaagagaaggacgaagaagctagcttcgtcataacgaacataaggagacgatgtcgagagaaggtgtcatccaaaatactaaatgcagaagacaatattgccctcatgttatttgagaatcctatgtattattcttgtgggcatacatgtaatttcatacgaagctgtacgatctcctataaatagatgaacaatgtcctgcataaagtacgttttggcagactgaatgattgtctcgtttaatctcgtcttcaaaacaccttcattctaattcactttttgaaaccaaaggtacgattgtaaattcattatgtgaaagaggagaaacgag

SEQ ID NO: 16933 - DNA, 2100 bp, Zea Mays
gcgagtgtcggtggccgtgctgtttagatctcggccttgagaccgatcctggtagcttcaacaacacggtagctgagaagcagggagttcttgaaactgtagctagaagagtaacaaagaagaatgaaaccaaagataacaagtcatttccttttaaggaggtcttcttggatcgatctgagcaagaagatgttcccacattgattgatcggaaggacaatgtttttatcatatcaaacccaaagtcaaaataccctgtgctgcagctggaccttagattgatatcagatcttgttgttgttatcgtgtctgctacatgtggtggaatcgcttttgcttgccttgggcaacctgtgattacaggttatctacttgcaggatctataattgggcctggaggttttagctttgtcaatgaaatggtgcaagtaaggttgaaacggtagcccagtttggtgtgatatttctcctgtttgcattgggacttgagttttctactgcaaaacttcgagttgttcgtgctgttgctgttctcggaggaatgctccaaattatgctgttcatgtttctttgtggtattttggctacactatgtggaggcaaaacaaaagaaggtgtttttgttggtgtgcttctctccatgtcttcaacagctgtggttttaaagtttctgatggaaagaaatagtatcaatgctcttcatggccaagttacagttgggacacttatattgcaggattgtgctgttggtctgctgtttgcgcttcttccaattttgagtggtacatctggccttcttcacggagttgcatcaatgacgaagtcgttggtggtattgataacgttcctgaccattctctctatcctctcccgcacgggcgttccttggtttcttaaactgatgataagtctgtcatcacagacaaatgaactataccagctggcagcggttgcgttctgcttgttatttgcttggtgtagtgataagctgggcctgagtctcgagttgggttcatttgcagctggagtaatgatatcaacaacagaccttgcgcaacatactcttgaacaaatcgaacctatccgcaacttattcgctgctcttttccttgccagcattgggatgctaattaatgtccatttcttgtggaaccatgtggatatactccttgcagcggtaattttggtgatcaccgtaaagacatttattgttgctattgtcgtaaaagggtttgggtatagcaacaaaacatctcttcttgtcggcatgtctcttgcacaaataggagagtttgcttttgttctcctaagccgtgcttcaagtatccatctcatcgagggcaagctatacctgcttcttcttggaaccactgcactcagtttggtgacaacccctctgctattcaaaatgatcccagcagtggtccacctcggggttcttttgagatggttttctgtcgataccaatcaggtggagctgggcctaaaaaatgatgtcctccgcattgatagcggcaagcgcataaatctgatagtccaaggctcacatgactcatgacacatggcacactgcaagctacttttttgtatggcttgagtttacaagctctgtaaagtgttttcacctgtattgaagagtttgtagcagatatacaagggtggaggcaagagaactcaactcagatcttgctcatagggtgagatcaatcctcccccatcatggagactgcatgggcagttgggtttgccgtttttgagagcagtgtgtctaggatgattggtggagtgagtggctgtcgaccccaaatgagggtctcgtgtaacataagaatgtatgatggttaattgattggatcagcatgataggatctaggcgtgatcgttatgccattgtatcctttcagcaaaactgtgtatcctcgcaacacgaaagtgtgtacaacagtatccatcagatcacgaatttcgttatgtaaccatatactcgtcctagttcatgattttttttcacgcgaggcttctagtaacctgtctatatatcactttgttggattcaggctcacaatgatgggtgtgcctcaacgaattgattgaatccat

SEQ ID NO: 16934 - DNA, 1392 bp, Zea Mays
ctatcacctaaaatctaggatatattattccccccaaaacaaaccctaaccggccggcccaattctcacgcgctcgccgcctaggagcattcacgttggcggcgggcggcggctcggttcctctcctccaccgcacctccaagaatccacctccacgactgagctgacggctcggtagcgccatggcagttcaccggctccaaccttccccatccggcctacagtgctccaccgcccggtcgccagtgctcctccatgggccacggctgacgggtgcacgcaccgggcgacgagcacccaccaccggttatgtgcaccctctctccttcggtccttcctccctttcttccgtgctaagccaccgagcacccaagcggtttggcctgatgccacatctctggttatttttccagcacttgacattcgagtgaaaaatgtcgcagggacatattctcttgaacataaaggagaaaatgatctcttcgcacatcagacaaggcttctactctttcagaagaaagtcatttttaggagaatcgtgaacaaaatgaccagatgtttaggcctggttggaaggacatttttcgaatgaatcagagtgagctcgaggctgagatttgaaaaggtctctcgagattctactcttgatccaaggaggaaggcctatctgatccaaaatctcatgaccagccgttggatagttgctcagcaataatcaccacaaccaagcgtcgaaggacataatggatgtacacgatgacctggatgtgttccttcgtaccgagacccagggaaacaaatatttgggctgtgagcattacaaaagaaactgcaagcttgttgctgcatgctgcaataagctattcacttgcagattctgtcacgataaagtaactcaagaggtccacttattgactcttatgaccatgtaattggtgttaatacaactacattaacatgtaaaggttggtagatctggaaggtcttgatggtctaatacctatctatgagtacggaagaaaaggcgggagaagtcggtctctgcagcatcgcgcgtgaaaaaaaatcagccaattccacgagcattgatgttgtcatgacttcaaaagaggagagaccatgctaagaataatgcattatgacatttgtcaggcttacatatcgactgtttgatatggatagatgtataggtttatgaccaatccagttcaaagcaattggagtatagaagaaataaggagaaacaggaaagctctgtacatcttgcattttgctgttgtttgtcgaagtttcaatgtctgtcgcgtgacaaaatatagttgtaatttatattttggcatgcacgaaacaggtgtatttattcatttttgaacgaaattttatgtcaaatcc

SEQ ID NO: 16935 - DNA, 217 bp, Zea Mays
attaatccaaccgtcgcgactgacccgcccaccccgctcgggcgcttacaaatacccgcgaaacggcgtgcgcaagcagccgcagggaaagggaagcgaatcaaagcgcgctcgacaagccttccaagtacagactacagagcagagcagggcagggagacggcgggcgatgggggatgatcctcgcccaggcggtggcggcgctggtgggtatgtg

SEQ ID NO: 16936 - DNA, 397 bp, Zea Mays
caatttcaaggatggacgtaaaagtttcggaagcagttggcagtccattacttcctgattcccataatattcgaaccggtggcaggcccagaccgcactttaaacaaaaaaaaaggttactctctacgtccctattcaacccctcgtagctaaatatcgatcaccagacaaaaaaacaaaataaggcatctactaaattcatagaatttaggtggacactcaaattctccttccggcctttatatttcttgagaaagccatcatgtcacgcggcgcgctcgtcgatgcagccgtcttctctaccggtggtggcacttgatgtcctttcttttggccgagtgcaactctatgacgagcaggtctacttatcaatcctgagtcaatgaattcgagggca

SEQ ID NO: 16937 - DNA, 1003 bp, Zea Mays
cttgcagccattgttcccatatccatgtctgaaatccatgtttggcgattaacgacagggcgcagggagctggttgttttgtcgggagcgcacacgattggagggaaaagggtttcgggagtcccagttgttttcgacaacacctatttcaaggtgctgctcgataataggccgccgcagacatcttcgactggcaatggcatggcggcgatggttgggctgcgcacggactgggcgctcactgaagacgacgagtgcttgagatggatcaggatctacgcagaggaccaagctaggttcttcgacgacttcagggacacgtacatcaagctcgtagacagcggagcctcgtggagaacagcttgactagaactgcctgtttctctacagtgttaggccttgttcggttataagggaataaatcccaccatggatttaatccggatctggattgggtgaatccatatgtcacacccaatcctatggtgggattaaatacaccatttaatccatgtatctcttaaaactagttattcttttgattcatggattctaatataaacttgtgcaacatcttcatggatttgctccatacataatgagctatggatagaatccatgcctttcatagtttaaaaaattcctaaactcttgggttataatccatgatgggtttaaccgaatacaaaaatttgagtaggcttggattgttttgggatatggattgtgccatgaatttaattccaatccatgctaatccagagctggattggtgtaaacgaacaaggccttaacggatccgcccctgtagaacataggggttgcgctgaaattttacgaaaaacaaaggatttttattatttgggggaaggttgggtgggaaaaggttgctgtcagtttagattcattggatctgtattctatttctccctagcaatgaacccacaagtttcttgcatgcacaaaacttgtggaacaggagtttacaacacaactcgaaacc

SEQ ID NO: 16938 - DNA, 675 bp, Zea Mays
tcaccctaggtattggcctgatttgctttaggctcttgggatgaagtttgttgctgcttacctgcttgctgtccttgctgggaactccagcccctctgctgaggacttgacggccattctggagtcagttggctgtgaagttgacaatgaaaagatggagctcctgctgtcccaactgagcggtaaggacattaccgagctcattgctgcgggcagggagaagtttgcttcagtcccatgcggcggcggcggcggtatggctgtggcagcagctggccctgctgctggcggagctgctcctgcagctgaggcgaagaaagaagagaaggtggaggagaaggaagagagcgacgatgacatgggcttcagcctcttcgactgagctgtgtgggcagtcatcacatcagagtagtttgttttgttttgacttttgagtcgtggaaccagaggaaaatcgtagtcgttgcttggactttaacctcgttttatgttggaaactagtttgaaaggctcctactgtctttatatttggtaattcagccgtaggtcgacattgcctccagagatgttatgaattggtcaggtttcctggctgctcactgttatgttgttacatgtcgacatcgcctcgttcatccttgcgtacgtgcgtggtaccatcgaatctgttgatag

SEQ ID NO: 16939 - DNA, 3242 bp, Zea Mays
ctgaccttgtgtttcaggagtggtggagggaggctgaaagcaaggtcggaggatcttgctgcactttgaagctgttgattctgcattctttgcttgggtaaatggagtactagttgggtatagccaggatagcagacttcctgctgagtttgaaattactgattgctgccatccttgtgattcggacaaggaaaatgttcttgctgttcaagttatgaggtggagtgatggctcttatcttgaagatcaggatcactggaggttgtctggtattcacagggatgtgctcctactatcaaagccacagatttttatcacagattacttcttcaaagcaaccttggatgaaaatttcagtttagccgatattgaggttgaggtggagattgactcacacaagcaagaccaggagcacgtcccaactttgtctattgaagcaacactcattgataactctggactatctaacagtatagatgctgatctttcatccgctaatgcagtcaatttgaaaccgaagccaaaacgaactcgaagcccttgtcttggttttcatggttatgtacttggtggaaaaatagaaaatccaaaactttggtctagtgagcatcctaacttatacacgcttgttgttctccttaaagatgccaatgggaagcttattgactgtgaatcatgccaagtgggcattcgtaatgtggtcatggcacacaagcaaatgctcgtcaatggatgtcctgttgtgctaagaggtgtcaacagacatgagcaccatccacgccttggaaagacaaatttagaagcatgcatgatcaaggacctgattttgatgaggcaaaacaatatcaatgctgttagaaatagccattacccacagcacccaaggtggtatgagttatgtgacatttttggtctttatgtcatagatgaagccaacattgagacacatggttttgatgaatctaacactttcaaacatcctacacttgaacctatttgggcaaatgcaatgcttgatcgtgttgttagcatggtggagagagataagaatcatgcatgcattattgtttggtctctaggaaatgaatcttcatatggacctaatcatgcttccatgtctggtaaaatattcttacctgtcagtttaatttctgtacttctcatctaatggtaacattcttctaggttggattcgtgaaagggatccaacaagactcctccattatgagggaggtggttccagaacatcatccacagatattgtgtgccccatgtatatgcgtgtctgggatgttgttaagatagcaaaagatccatctgaaacaaggcctctaattctttgcgaatattcacatgctatgggaaacagtaatgggaatattgatgcgtattggatggccatagacaacacttttggactccaaggaggttttatatgggactgggctgatcaggaggactcagatgggtctaaattttgggcatatggcggcgactttggagatactccaaatgactccaatttttgcctcaatggcattgtgtggcctgatcggacgattcacccagctcttcatgaagtaaaataccttcaccagcctatcaaaatatcatcagcagataatatgcttaagattgaaaatggacacttttttgagacaacagaagctttggacttcagttgggttcttcatggagatggttgtgtcttgggctctggtccattgaatattccaactttggcaccacaaactagtcagctcatcaacatggaatcatcaccttggtttgccctttggagtgcctgtgcagcaaaagaagtatttttgtctgtgaatgtgaaacaaaggcatgaaacacgatgggctaaagctggtcatctcttggcttcagcacaactgtgtttgcctcagaaaaatggctttgtccccagcgtgatagcattgtccagtagccctttggtctgtgaacgcattggtgataatgtaaccatctgcaagaataatgcctggaaaattaaagtaaacagtcagttgggaacaatcgacagctggaaggtcaacgacgttgagcttatgagcaaggggatactcccatgcttttggcgcgcaccaactgacaacgacaaaggaggtttcttcaccaagccatatgactcgcgatggagagaagccttcctcgacaatgtctcgttccacagcagccagttctctgtcaaggagttgccggacaacaccgtggagttctccaccctctactacggtgttcccgggcacctacccaagcctgacgacgaagcctccgagtccattctcttccgggtgaagatggtatgccggatccacgggtcaggcgacgtggttctcgactacgaggtaaaccccaggagcgacctccctccccttccccgggtgggcgtcgtgttcagcgccgggaggtccctgagccacgtcacgtggtacgggcgcgggcccttcgagtgctacccggaccgcaaggcggcggcgcacgtcggcgtgtacgagagcagcgtggaggagctgcacgtgccgtacattgcccccgtggagtgcggcgggcgggcggacgtcaggtgggtggcactccgcgacgccggcgggctcggcctgtacgcgtcggcgcacggcggctccccgccgatgcagatgagcgcgagctactacggcgccgcggagctggacagggcaacgcacgtccacaggctggtgaagggggacgacatcgaggtgcatcttgaccacaggcacatggggctgggcggcgacgacagctggtcgccgtgcgtgcacgagcagtacctgctgccgccgacgcggtacgccttctccctgcggctctgccccctgctgccgtcgtcgtcgtgccatgacatctacaggtctcagctccccagctgatggtgccgtgtgccggagacccgtcgacgtcgagccttgggaaacaacaatgaacgcaatggcctggccagtgaatgaaagtatataatattgtaataaagcagagacgtattagctcctgcaacggcctcgcgatcgcctggatatgtctatgctgagggggtgtttagttaactaataacctaactacatatggcgccaagttactaaaacttaataaataactattactaactaataaatagtaactgaattcctaacttaataaatacttcctccgtttataaatatatgacaccgttgattttttaaaaacaacttaga

SEQ ID NO: 16940 - DNA, 422 bp, Zea Mays
tccaacagaaggccgctttgtgcttattgacagatcaggttgtacaagaatgcaaagagatatacgagaactcgcttgtggatggcaaccctcagaagtccggttttgtgtttggcaaattgaagtgcttgacagcaaagaaaggcatatggaggaagcttgggcagtaagtgtggacttgagcagagtggacagaagtaccacctaggcaaagactgtacgtttcacttctctatgatcattcttttgttcttttgtcgatgctactgttgggtttcacgtttagactatcagtgtgtactcagcttgaggagcaaaaatgtatattccactttgcttagctacagaggattttggtgtaagaatatgtaatttattcaataaaatggttgctatttgcaataagttggcccaagtcatcg

SEQ ID NO: 16941 - DNA, 1417 bp, Zea Mays
aggttgagatgaacgtctctcgccaaaactccatctaaaatagcagcgacgagacgagcgagaatatctgccaattcaaaaccaaaaaggagaggaggggagccccggacggagaagagaacagaagaaaccccgcggccaccccttcctgcctatatttctctctctgtcttgcgcgacagggagagaccagcgccaacacctccggtttcttgattgggtggtgatcggtgaaggaaggagaaattaagatgagcctcttcgggcttgggagcaagaatcagaagacgttcaggcctaagaagaatgcaccgtctggcaacaagggtgtgcagctgaagaaacacatcgatgcaaccttaggaagcgggaatttgagggatgctgtccgattgccaccaggggaggatctcaatgaatggctagctgttaacactgttgatttcttcaaccaggtgaacatcctgtatggtactctaatggagttctgcacaccagctacatgcccaacaatgtcagctggaccaaagtttgagtatagatgggccgatggggtgcagatcaagaaaccaattgaggtttcagcaccaaagtatgttgagtacttgatggattggatcgaagctcagcttgatgacgaatccatcttccctcagaaactcggaaccccttttccacaaaatttcaaggaagttgtgaagacaatctttaagcgacttttccgtgtttatgctcatatttaccactcacattttcaaaagattgtcagccttaaggaggaagcacatcttaacacttgcttcaagcattttacattgttcacttgggaattcacgttgattgacaaggctgagcttgcaccacttattgatctaattgaatccattgtttcagtttgttgacatgacatcaatgattatttggatcattttcttatttttggagagcaaggagttacaactaagtgtccagtatgagggtgtgtttccatagggataaacaaaacaagattgcgagaacaaagtggtggaaactgaaaggagatacatcaaaagtctcaagaaaagggccatcaaagaagacacttggaaggaagaagatgacataaacaacatgtggaagaagatggcaccctatatttgcgaggtgtgtggagcaactaaagggagtggatgcgaagctaaaggtacttggtagtggaagtacatggatgatttgatacttgtcaatacagtgtattagcgcaacagtgtttttcagcctctcgcaatagggtacagtgcgggggtatttataggtaaccaggggacgatttcaccctctcaaatacagttatgcccctggttacctacgttatccctgaaatattcccctctcaagggttattacaagtcattacaacatgattaggtatttc

SEQ ID NO: 16942 - DNA, 1653 bp, Zea Mays
ccctagaccactatgtgctacaagaccttgtgaacagtgggccttgaatccctaaatctgggaatttgtccaaaattaagtattctgtgcattgaggccccaaatatgtctataatggagctgaagggttgtggtgtgctttccgaggcttccatcaattgccctcgcttgacatctttagatgcctctttctgcaggcagcttgtggatgattcactgacttgtatgaccggggcatgtcctctgattgaacatcttatcctgtcatcatgcctatccattggcatcgatggattgtcttcattgcattgccttcataagttgaccttgcttgacctgtcttatacatttttgatcaacttgaagcctatttttgacagttgtccacagtgaaggtgttaaaactttcagcttgcaagtacctcagtgactcatcattggatgccctttacagagagggtgctcttccattgcttgttgagctagatctgtcctactcacccatcgaacagaatgcaatagaaggtcttcttgcttgttgtagtaatttggttaatgtgaacttcaacggatgtacaaattttcaagaattggtgtgcgaatctggggatagcggttctgtggatatgccagttgactcttgtccacctagttcaccaatcaagaatgaagagatcagtgagcaacctggccgtctgcttgaagttctcaattgtactgggtgccctaatattaagaaagttgttattcctttgatagcaaacttttcacatttgtccaaaattaatcttaatctttcaaccaacttgaaggaagtggatttgacatgctccaatcttttaacgttaaacttgagcaattgtagctcactggaggtgctgaagcttgattgcccaagattgaccaacctccaacttttggcatgcaccatgttgcaagaggaggaattagaatctgcaatatccctttgttgtgcgttggaggtccttaatgtgcattcttgtccaaagatcaatgctctggattttggccgactccgtttggtttatcccagtctgaagcgcatccagagcagcctcatttcataatgcggaggctactaccatattaaggagtgcaattcatgcaataagcctctgttcaggtttgatgaaagaagcaagtcgggaaaagctctccttgatgctctttgtacatattacccaagcattgccggtatattgcaagccaggggcaacgtggtcctatttatccagtccattcatggttctgtaataagtactttttttttgcaaatttgttttgttgccggagatagcaaaatatctgttcatgtctgtttgtctttgttccttggagtgtaccaatggagctatcagatgtatatgctggtttatatgcatcaataatcttgttttgatctaggatcttggaatcgctttgctaatgcgatctggggtgtagttttgtacaactttaattgttcgcagattttagcgagtgttatgaagcttaactgatctggggtgtagttttgtacgactatgtttaatttttcgcagattttagcgcagtgttatgaagcttaaccaaggctatgcaaggcagatgatgcacgcacaatcttagctagagttctgagttgtttcaccg

SEQ ID NO: 16943 - DNA, 2945 bp, Zea Mays
agggagtcacaaggatcataaatcaaaagaggaggcggctaacatcatgataacaccaggagaattcactgagatggcctgggaggggattgttggtgcggttgatgcagcaagattatcaaaacaacagatagtagagtcggagcacttgatgaaagctcttctggagcagaaggatgggctagcacgcaggatattttcaaaagcgggtgtagataacacatcagtcctgcaagctactgacgactttatttctagacagccaaaggttgtcggtgatacaactgggccaattataggatcaagttttgtgttgatattggataatgcaaagaagcataaaaaagaacatggtgatgaatttgtgtcagttgagcacatcctgcaagcattcacttcagataaaaggtttggacaacagctcttcaaagatctgaaaattgtggagaatgatcttaaagaagctatttcagcagtacggggaagccagcgagtcacagatcagaatccagaaggaaaataccaggctctagagaagtatggtattgacttgacagaatcagctcgacgtggaaaacttgatcctgttataggccgtgatgatgaagtgcgcagatgcattcagatcctatgtagaagaactaaaaacaatcctgtaatcattggcgagccaggagttggcaaaactgctattgctgaaggactggctcagcgtattgtacgaggagatgttcctgaacctctaatgaatagaaggcttatttcgttggatatgggagcattacttgctggagctaaattccgtggtgattttgaggagagattaaaggctgttctaaaggaggtcactgcttctaatggacagatcatcttgttcattgatgagatccatactgttgttggtgcaggagctgctggtggagcgatggatgctggtaacctgttgaagccaatgctaggccgtggagaactccgctgcattggagcaacaacattggatgagtacaggaagtacattgagaaggatgctgctcttgagcgtaggttccagcaggtttattgtggtgagccagcagttgaggataccatctccatattgcgcggtttgcgagaacgatatgaactgcatcatggtgttaagatatcagatggggctcttgttgctgctgcagttctatccgatcgatacatcactggacgttttttgcctgacaaagccattgatctagttgatgaagcagctgccaagctcaaaatggagataacatcaaagcctattgaattggatgaggtagacagagaaatcataaggcttgaaatggaaaagctctcattgaagaatgatacagataaggcctccaaagaacggctgagcaagcttgaagctgaactagaatctctcaagcagaagcagaaaagtctttcagaacattgggaatatgagaagtctttgatgactcgtataagatcaattaaagaagagactgacagagtgaacctggagattgaagctgctgagagagaatatgatttgaatcgtgctgctgaactgaagtatggaacacttttatcacttcagaaacagctggaagaggctgagaataaacttgttgaattccagcaatcagggaagtcaatgcttcgagaagaggtgactgacgtggacattgctgagattgtgagcaagtggactggtattccagtgtcgaaccttcaacagtctgaaagggaaaagctgctgctgctggaagatgtacttcacaagagggttattggccaagacattgcagttaaatcagtggccaatgccatccgccgttctagggcaggcctatcagatcctaaccgtccgatagcaagcttcatgtttatgggacctacaggtgtgggaaagactgagctgggtaagacactggctgaattccttttcaacactgagaatgccctaatacgaattgatatgagtgagtacatggagaagcacgccgtctcccgtttggttggtgccccacctggatatgttggttatgaggaagggggccaattgactgaatcagttcgtcggcgaccttactcagttgttctgtttgatgaaattgagaaagcacaccaggaagtctttaacatattgttgcaactgttggatgatggaagaatcactgattcacaaggcaggactgtcagcttcactaactgtgtcataatcatgacatcgaacattgggtcaccattgatccttgacacacttagaaacaccacagacagcaaggaggccgtgtatgagataatgaagaagcaggtgattgagatggcccggcaaacattccggccagaattcttgaacaggatagatgagtacattgtgttccaaccactggatacaaccgagatcaaccatatcgtggagatccagctgaatcgggttcagaaccggctgagacaacagaagattcatctccagtacactgcggaagccgttgagcttctggggtctcttggctttgaccctaactatggtgcgaggcctgtcaagagagtgattcagcagatggtggagaacgagattgcccttggtgtcctgaagggcgatttcaaagaagacgatactgtcctcgtggatgtaagttcggcggcgatcgcaaaaggactcgctccgcagaagaagcttgtccttcagagggtagaaaacggaaacgacgagttagttgctaatgactaggtcagatgggatcaccttttagcgagaatgttcaagtgtgatgaaacgcagctgttagctctgcgttttcgcgtatgagaaacttggccttttatttaggttctaccatgaagtcgtgtccagtctccggtggcaaaactcaatgttcaaatctctctgaatataatcttgagagctctacctcaagagctgtgaatatctgttcaggcaacccctatctttctcg

SEQ ID NO: 16944 - DNA, 869 bp, Zea Mays
cttgaattctgtagatgatgtgttgttgattttagacatcgacctcacctggcgcatgcacaaggcatcagatggtcagaggagacgtgtccagatttgcatgggacttcttaagtcattcaaggttcttcttcttgatgagatcacagttgatcttgatgttctggcaagatcaaatctgttatcgtatcttaaaaaggaatgtgaggaaagaggtgcaacaatcatctatgccacacatatttttgatggtcttgatgattggccaacacacattgtttacattgctcatgggaaactgcaattagcagtgcctttggaaaaggtgaaagaaatgagtcagttatctctcatgaggactgtggagagctggttgaggaaagaaagaaatgaggacaggaggaggagaaaggagcgaaaggagaaaggcctcccagaattcgacaaggttgtcgagggtagtcgggttataggtgatccagcaaagaacgcagacagagttataaacaacgggtgggcagctggacggcttacctcgacgattgcaggagaggaaaatttcgtcttcagctctaacagcgtacttaggcaatgatctagctttgttttcctttatctatacattgaaaacggtaaataatagtcttgcggatccaatagagatatcgttggagctttgtcatttatagcgaaagttctgtcaggaaaggagaattcactctatatagtttggatttgaggatttacactgtaattttattcgcagctgagtgttcgagaaaaagaaattgcactgtaacaacatatatatactgcaccaaatatttgtgtggtcatatttatttctacaggggctacgcataacttgg

SEQ ID NO: 16945 - DNA, 2675 bp, Zea Mays
ctaatgagtcgccaacagtagcccaaaattaggttggtttctcctacacttccatgttcgacgcgagcggcgaaccgacttccctctcattcgtcttccacaaaccccataaccctagcaccgctgccaccatgtcctcgtctccatcttcagtgaaccgccgtcccccgggcccgctagcgttagggctggagtccttggcgaagaagaagacacataggaagaagctcaccgccaaacctcctccagatccagtcgttgccctccaatggtcggatacagaacgtctcgtctcttcctttgaatccagcagtcggtgctcctcctctggatccggcggtcaactccatcatccgcagcttctatggcacctcccctagtccccctccatcgccgccctcacccaccgcttctatatcgccacctctctcattatagaagaagacactgagaatctggtgagcttccacctttttagcttattccgtttagatctgttgtctatatttgattctcgttatggaagaagctgctagtgcttgcttgcatcatcgctgaggatctgctggtaggatagattagcttgatagcttgatcggtgcatccatgcgtgcaatctaaacttgcaatctagaactccacctagaaatctttctcttttgattaggtcttttctgataaattggtcggtgcatccgtggatgcagtttaaacatagcttagttttttttaaacagtgcacttcaggcttagtttttttaaacattgcactttaggcttgctttatattcttgttcctattaagaactgagcaactagctaagctgagatcaagttacagtttactaaatactggtatgttaaaaaggaaccctcatgtagctgtgagagtaaatttcttcttcttgtgccagagtatattagcatttcttggttttcaattatatgtcagtttgcatttctcacaaacacatgcattcattctctggtgctatcaaactgatgcatattttgatgagcagcactaggactatggtcatacgattagtgctagatgctgagttactgacaacaataatctcatctgttgtttgatgtggtggttgtgtcaatcaaaaaaacatttttccatcaccaacagaggaactgcgatttagcaagcgctgcgcaatgttgatgacctccattttcagattacttgttgtttctagacccgaagagtgtaggttctagtaattatttgtgcctagctctatattttttctttaaagaaaaaggaagaaaagcattagaatctttcacgctgaatttagaagaagctctatcatcaaacaattttttattgagaaatattttttccacactttttctagcagttctctaaaataaaccatggaactgagagttaaaaaagcagcttcttctcatttagttgatgcatggaatcctatatgtgtcactgagtttactttagagaattacagagaatcaattctgatgatcaatgaatcaccatacacaaagaacacaatcaggaagagctcaaccaatctgtctcttgctagctgctagggctactgtttccattttgcagactttgtgattcgtaaaattctttggttggtgcaaaatagaatttttctaaaaataattaaatatttatattgtcaaataaaagcaccagcaatggtacctccatgttcatgtttataattatctgtgattcttacatatttcaattactatgcttatttgttaaggttaaaatgtattatcatgtgacctgccttttgtccacctgcactgcttgttcgtagatgtgcatgcttgtccctcttgcactgcttgtctgttacctgcagcaatctttgccaaacggacacagggaacctatgccccacaggactgcaccacacgtgggacaggtaatgcaggtattgcccccgctgtggctggccggtgtgcaattcaccaggctgccaaacgagccctaaaggccccagcatgggcgaccctctccaggccgccgtcgcagccgcccacgcgctctccctgctatggagaaaaccgctcatggaggttaaatatcctatttatgatcaaacagtgtaccttaacgattatcataagaagatgttgaaggatcaatatgttcaagctctgcaaggtgatgtctgttcagtttggccaaaaaggcatcccctacctgaacacctacgacggccgcaccatccgctaccccgacccgctcatcaaggctaacgacaccatcaagatcgatctggagaccaacaagatcatggacttcatcaattttgatgtcggcaatgtggtcatggtgactggcgggaggaacaccgggcgtgtaggagccatcaagaacagggagaagcacaagggcagctttgagaccatccacgtgctgcttggagctttttgctatgtctagttttctcctatttgttgtacaggaaaacatagaatggaattcaaatttggtggtcgcaaaagtctgaagactttaattcatataaagttaggcttaacattagtgcaaacagttgtattttagtttagatttagagtacacttatgtatgcgttgtttgacaatgcttatttatgatatattgaatggtacttatttatattatattaattataatgttgttcagt

SEQ ID NO: 16946 - DNA, 1191 bp, Zea Mays
cctaaggactataggttatatatataggcagtaggcctgggcctaatgggccttaacatcccacaccctgaatgttgccctatttgtgatcaagaatttgaagatattgatcacttgctggtggggtgtgttttttctagacaattctggtacagatggctcgggcaggtcaacctgcagggcctcactcagcctggcgataggagcactatggattggtggaagaaggcctttgatcagttgcagggcattgctgcaaaatggcttaattcccttatcatcctggggttctggacactttggaaccacaggaacggctgcgtttttgagatgctcatctctgatgttgcttcggccattaggaaagttgagaaggaattggagctgtgggagatggcagggtccaagagtctctctcctaacggctcccattcctgcgatttagtggggagttcctttgttgtgtagtttatttactgtttttttggccaccgtttggtgttcctctttgttcttgtatttggtctactttggaccttctttttcttcttaatataatgatgcgcagctctcctgcacgctcaagaaaaaaaaaattcaccaatggggacgctcatttccctatatgcaaaatctgcactgttaagagattcgctaggcttgagagagatgcttatcctctttttaggacacttcgacagaagtataagacaagcacagatcgtgacgctgtgtttcaggagttactggacgaaatagctgcaaaattttacaatatacagcgccagaaccctttagaaggacttttcagcgaaatgttcaggatataatgcatgagaaaagaattttatgtcgatgctttcatcaaaaccattggctaaaataatacagttgctgccacggcagctcatgatcaatgaaggtgcttggctgcttgcccaactagaatgtccaaagccatacatttagcatcttactgcatgaagatatatacttgactctggaaaatcgttgattagtctcagattgttacggagcatgtgtaacttaattttgttttctattacatgttttcctttgttgcccttgccctgtccacttttagagatgtatcttgcgtgacccagagatcaaaatggtaacctatttatattcattgattttaatatacggtgtttatcggtaaacttc

SEQ ID NO: 16947 - DNA, 3575 bp, Zea Mays
aacacggcgagggcccccggtaggccgggacacaggaccttgacgcgagtacacgacacagctgaaggctgcgctcccctcgacccctcctccccttcgctccccagctccacaccaactcgctcaccgcctgcccgcctcgccggccaagccaagcgacccccttctcatcccctctctcgctgtcgatgggccctgcggcgctcctctgctccggccctccccgcaattaatcctcggcgtccgtgctctccccactctccgcgcacgccccgcccgtgagtcgtgatctcgccgtctccctcactcccatcctctgcctcaccgcacgagccccgtgcggtggcggtggtaaatggcgagcagcggggtgaggaacggggtggggtccaggatgagcgcgaagccggaccggcagggcgccggcgccacgcccaagacggccgcggggaagcaccgcctctcctcggcggcggcggggggcggcgcgtaccggcggaccagctcgggcccgctccacgcggcggcgggcggccgcgcggcgtcggatggagtttctagtagagtaagggttgctgtaaggcttaggcctaggaatgcagaagagttggtggcagatgcagattttggtgattgtgttgaacttcagccagagctcaaaaggttaaagcttcgtaaaaataattgggagtcagaaacatacgaattcgatgaactgctcactgagttttcttcacaaaagcgagtgtatgaagttgttgcaaaaccagttgtggagagtgttatggagggatataatggtacagttatggcatatggccagactggtactgggaaaacttttactctgggaagacttggtgaagaagacaccgctgctaggggaatcatggttcgtgcaatggaggatattctagcagacataacacctgggactgattctgtctcagtatcatatcttcagttgtacatggagatgatacaagatctccttgatcctgtaaatgataatatagccattgtagaagacccaaggactggggatgtttcattgcctggagccacagtagttgaagttagagatcaaaaaagctttgtggaccttctaagggtgggtgaggctcaccgtgttgctgcaaatacaaagttaaacactgagtcatctcgaagtcatgcgatcctcatggtgaatgtcaggaggtctgtaaaaggtagaactgaaatggatgtcagcatttctggtgaaaatgggcattcattgtccatgatggggtctttgagaccacctgttgttaggaaaagtaagcttgtagttgtcgacttggctggatcagagcgcatagacaagtcaggaagcgagggtcatacgttagaagaggcaaagtctatcaacttgtccttaagtgctctgggaaaatgcatcaatgcgcttgctgaaagcagtcctcatgtacctgttcgtgattctaagcttacaagattgcttaaagattcatttggaggtactgcaagaacatcattggttgtaacaattggtccatctccaagacatcggggggaaactaccagtacaataatgtttggacaaagagcaatgaaagttgagaacatggtgaaattgaaggaagagttcgattacaagagtttatgtaggagacttgatattgagctggataaattaattgcagaaaatgaaaggcaaaggaagtattttgacgatgaagttgagagaataagagatgaagctcagtgccgcattgctgaggccgaaagggaatgcaaaatcacattagagaatgagaaaacgaagtgccatcaagaatacttagactcaatcagaatactggaggagaagtggaaagtacatcaacaatcacccaagaaacaaaatgaagaggccgagtctacatccaatgataccagagaagtgcataacttactgcagaatgagaaaatgctacgtcaatcggctgaagatgaggccagtgacctcaagaatcaagtatcacactggaaaaaactggaggctacagctacagctgaggtagtaaaactacggaaaatgctagatactgaagctagccagaaagagaaacttgaagcagaaatagatattttgagaagtcagttattgcagatgagtatggaagcagatgagacagggagtcttgataaaggaaatggaccaggaaaaatatttcctggtttagattcattggtgtctcagactcgaagctcacaattcagagagcagagcaatggaccaaagcaaccaattgccaaactctttgaacaagttgggttacaaaagatattgtcattgctcgaatctgaagaacctgatgtccgcgttcatgcagtgaaagttgttgcaaatctggcagctgaagaggcaaatcaggaaaagattgtagaagcaggtggcctcacttccctccttatgctacttaggagctctgaggatgagacaattcgtagagtagcagcaggagcaattgctaatcttgcaatgaatgaaacaaatcaagatcttatcatggcagaaggaggtgtaaccttgttgtctatgacagcatctgatgcagaggatccacaaactcttagaatggtggctggagcaatagctaacctttgtggcaatgacaaactgcaaatacggttgaggggagaaggtggaatcaaagcattgcttgggatggttaggtgtgggcaccctgatgtccttgctcaagttgcacgtggcattgcaaattttgcaaaatgtgaatctagagcagctactcaaggaaataaggtgggaaaatcactattaatcgacgatggatcgctcccttggattgtaaaaaatgccaataacgaagctgccccaattaggcggcacatagagctcgcactgtgtcatttggcacagcatgaagtaaattcgaacgacattatcaatgaaggagccctatgggagcttgtacggatttcaagggactgttctcgagaagatataaggaagttggcataccggacactgacatccagccccactcttcaagcggagatgaggagactgggaataaaactgtgatgacagagcaacaaagtgcagctggggctggcactatgaagttccatttctcgtgcactttatagaggtacccgttgctctgagtgctggtaatcgacttacctggtttcggcaggcaggcatacacgggcaccacaccgactaatcacaagaggcagtggagcaactttctcctcgagagttcatttttctttgttctgaggggggcagttgaaagcctggacaacactagcaattcatttatttgtaatgatcctagcatagcagatgttgttacctacccaatgcagcgtttgtaatttttttgctgtaaaaatatcaaaggcagaaaaaagtactttcgcagtatacctgttttccgtgaacactagaaagtttttttgtttttgttttattcatatactgcagacgagtcatgtttgctagccgtgattttcttgctttcttaatgcgcgttgacgctttcgtttcttttaccatgtatgctctcagataatct

SEQ ID NO: 16948 - DNA, 1126 bp, Zea Mays
tatgttccgaagactcagtgcctcattttcttcaacttccttacactggtcacacagaaccaatcccccttgtcctgcaggctgtcattgaccaccttgttctttggcgtttaataccagaaagcaggaaaccaaacagtgtcatcatcaacttcttcgatgaggatgaacattcgcagccctacttcaagcctccccatctggacaaccccatttgcactcttctgctgtctgaaactacgatggcatttggcaggtcacttgtcactgacagcaacggcaactacaagggacctctcacactctcactaaagcaagggtccctattggtgatgcgtgggaacagtgccgacatggcgcgccacgtggtgtgcacgtcgtccaaccggcgcgtgagcatcacgtttgcaagggtgaggccatcgacgccggtggatctgagcccactcccgtcccccaccaaggccttgacgccctggcagccgcagccagccacggcctcccaggtgccggcgcccgcgtgcatgacgcagaagcccccggtcagcggcgccatcatcggttatgccccgaccccgcagaccgtgctggcgcccgcggcctggggcatggccatgcgagcgcccgtcatgatggtggccgcagcgcctgcgaggcccatggtgatggcctcgttgggcaccggaggcggcaacatcagcaagtggatgagccgcagcggcaccggtgtgttcctgccgtggacggtcgggccgaagcggtacaacaagcaccttccgccgcgcatccagaagcgccggttctctgcgatgatgtcgcccatcgaggcgcagggctgaggacctgcccgacttcacgtcgccgtcgaacctgtgttttttttttttccttgagggctttcggtccgcctgtaatttagccgggtttgtgacttgtgacaatgtgagtgagtagcggtttagcggagttcagaaccggtagaggagtacgagcgtagggataggtgaaggcagaatcagggcagggttttccttttgttttcatcctgtccccctattttccgttccgagtaaaacttatggatgttgttgtcatacatgcatcagcagctgagtttggattcccc

SEQ ID NO: 16949 - DNA, 1622 bp, Zea Mays
agtctgaaataggagatgagatagtgaatgagatatggtagctgctggagacagcctaagagcttgttcgttttgctctcaatccatgtggattgggtgggattgtgagagagaatgagtcccgcattgttggccaacttcttactctcatggatggaaacaaaaaggcgtcaaagatgcttcctcacatagttgttgttgcatcgactaacaggatagatgccgttgatcctgcattgagaagggcaggacgttttgactcagaggtagaggttgccgttcctacagttgaagaaaggctgctgattcttaagctttataccaaaaacctacatctggatgaaaaagtcgatcttcagactgttgctgcgttctgcaatggctatgttggagctgatttagaagcattgtgtcgagaagctgccaagcttgcatatcatagaatgttaaacttatgtgagggtgacaaagtacttaaactacttatggaagactgggaatgtgctagatctatggtgggaccaagcataacaagaggggtaaccaaagaaatttcaattgtttcgtgggatgatataggaggcttgaaagatctaaagaaagagcttcagaaagttgttgaatggcccatcaagcatgctgctgcattttctagacttggaataccaccagtccggggggtgctgttgcatggcccaccagggtgctccaagactactcttgccaaggctgcagcgcatgctgcccaagcttctttcttttctttgagtggtgcagatttatattccaagtatgttggagaaggggaagctctgttgcgtagaacatttcagaaagctcgtcttgcttctcccagcattatattttttgatgaggctgatgccattgcccccaagagaactggccctggtgggaattctagtggcaatgccacagtcggagaaagacttttgtcgactttattgaccgaaatggatggtttagaactggctacgggaattatcgtattgggtgctacgaatcgcccaaatgcaattgatgctgctcttttgcgtccagggcgtttcgataaggtccttcagtgcttctgttaatgacacatggacatatagacactggccataatttcccattgatctgcaggtgctgtatgtcccgccaccagatgtggaagggcgacacgagatactacgcatccatacacggaaaatgaagttgggagaggatgtagatctttggaaggttgcagagtgtaccgagctattcaccggtgctgatcttgaaggcctttgcagggaagctggaatggcagcattgagggaagatatctcagcaagtttgatacatgacgctcacttccaagccgcacgaagttcattaagcccctctcttacaaaagcagtagttgatgagtactcaaaggtagatataaatgatccatcgagtaggaaacattgatatgttccttttctatttctttgttgcacactaggcgcaatacacatttgcaaccttgccaccaagacacacagatggagatagagagatctttttaagaatattctttttaaaccaatcctcttaccgtcagctctggatgttatttaaaaaaaatgccctca

SEQ ID NO: 16950 - DNA, 986 bp, Zea Mays
ctgaggttgcctagattcactggcggatcatgcccctcaagggatctgtcgaatccaatcgatccccgagtctacgaaattgaagacacgggtggtaaagaagagtgtcaatccggaatgggacgacgaactcaccctctctatcgaagaccctgctgttcctattagactggaagtttttgacaaggacactttcgtcgatgatacaatgggtaatgcagaggtggacatccgcccattagtcgagattgtgaagatgaaactccaggacgttgccgacagaaccgtggtaaagaaactggtgcccaacagacagaactgcctagccgaggagagctcgatatatatatcggaggggaaggtgaagcaagacatggttgtacggctgaggaacgtagagagcggggaaatagagctccagcttcagtggatcgacctccctggctctaagggtgtatgagtggggggcggctatgagctctgccttgccctgctgttttcgcggatctccaactctttttctacttgaaaagaagaactagtggtttgcgtgcgctcgctcgcgtagagctgtcagttgtatgtaagaagttatgattgcgttggcgtttagtaaaatatcgtcagggagatgtatgtgcatgaacatctgagaatcaagactataaaaatgtgtacaatgcatgtactaaaggagtgtttggtttctatagattaatttttagtccctacattttattccattttagttccaaaattaccaaatatagtaactaaaactttattttaatttctatatttagcaatttatagactaaaatgaaataaaatgtagggactaaacattagtccctataaactaaacaccccctaagttcgtttcgtagacatgctcctcatccaagttaaattaatttctagggttgtcttaagttgcaaaatattaaattgtccaaaatcttgaaaaaagtaagaatgtttatgat

SEQ ID NO: 16951 - DNA, 1067 bp, Zea Mays
cacaggcacagatctcatctggtgtgtagtagactcgtcgtctcagctcgcgcgtgctcaccactgacctaccccgcttcaaaacagccaaactggaaaaaaagattctccgtccacgcctcgtcccaaccctagccccgtcgatctcgcatggccaccggcccgcgatctctccacgccctcctcggcggcggcgcaggcctcttccacctcttcctaaccttgaggtttcagatgcagttgttgaaaaggctgcagattatgctcttgtatggatcaataggctgctggctgtcggtcatgacatcgccatcaagagaaataggaaagtttttataaaggtgatattgattttgtggctggtttcatttgttggaatgctcttcaactttcttacactcatttacattggtgtaatgctttctctgttggttccaccactctatgagaagtatcaggatcaggttgatgaaaaggttggcgtagcgcacagtataatatcgaggcacataaataccattgttatcagggctgggcaatcagccaaggagaagaagactgaataaaagaattgttttgatgtattgtggaacatctctggttgtcaagtggagttatgatagtgggcttttcatctttggactctccatatggccctccacttacattagttctcgatatgctgatctgaggttttgatgtgcgctgttgatttcaggaaatgagacggcttgtgtatttttttctttttgaacatgaggtttactatgggcgcatatcttactcgaaatgatattttgagaaattgcaactcgtgcatacaagtgtgtgggctgcttgcgctgttagccatatgatctctctgtcactgattttaattttaggctgctctgacgaactctgtggagctcattcgatgcccatctgctggtagctcgttttctgaaatactaataagatgtattttgcaaagacagctgtaccgtgtgaatgaatgggttattttgtcgacgattctgtaaggtgtagagaagtctttatcagtggacttttaccgtcaatttctg

SEQ ID NO: 16952 - DNA, 3679 bp, Zea Mays
ttgagttatcttgggactcgggacttcgtgagtcggggactcgggaaccggagcacacaccaaaacccccagtgccgccggcggacgccctccagtttccggtcttcactaactccccgttttccgtactgctgcggcgcctcggcagtcggcaccacagccggcaagatgccccccttccgaatgccttcccacttcctcgcgcttccgctcctactcttgctgctcctccaggcgccgtccccggaggcggccgagtctacgccggggacccggacgcgcaagatcggcagctcgggggcgtcctcggtgttctcgctctttaacctcaaggacaagagcaagttctggactgagtcgatcatccgtaaagagttcgatgacttggaaggttctgcgtcgcgggactctagcaaaaacggcctgctcaacttcacaagagctggtaatattgcaaactatttgagcctggcagaggttgattccatatatcttccgatccctgtgaacttcatctttattggatttgatggaaatggacggcatgagtttaagttggggcctgaagaactggagcgctggtttacaaaaatagatcacatatttgagcacacaagaatccctccagttggtgaagttcttaccccgttctataagactactgttaagaaacttcagcattatgatcttcctttagtcagccatgtgaaccacaatttctctgtgcatgccatacacatgggagaagatgtcttatctgtttttgagcatgctataaaagttctatcctgtaaagatgatctcgtggattccagagaaaatgaagagatttttttgcaagtggatagtgctcaaatggaacatatattttcaactcttgttgatcaccttcagatacaagaggcttacaatatctttgttctgaaccccaagcctattggcaagaggattaattatggttatcggaaaggcttctctgagtctgagatcaatttgctcagggagaacaagaccctgcaagctcggatactccagtctaaaagtgacaacaaactcttccttgatatcgagaagggagtcaatagaaggccgttatatgaaagtcatcctctatcatcattttcatggacccgaactgacagtatggatatgggggattggtcaaagaaatgcaaggaagcattaagcaagtttgagctgctgaaggaagggaagagtaaagaggacattgtttatgaaaaggctgttcagatattacacggtacaaaggatgaggtgcatgacattgttcaaagtgctcttaagtccagtgatttgaagggtctccatgcccaatgtcttacagatatatggataggcagagagaggtttgcttttgttgatctgagtgcagggccatttgcctgggggccttctgttggtggtgatggtgtccgtacagaacttagtctgccaaatgttgcaaagactgtcggggctgttgcagaagttacagaagaagaagctgaagaaaaattgcaagacacaataagggagaggttttcgtcctttggtgaggattaccatgctgttgatattctattagcagagattgatgtgtatgaactttttgctttcaagcattgtgtgggaagaaggatacagcttgccctttgtaaagaacttgatgagaggatgcatgacctgaaaaaggaactggagggttacaatactggagattttgatgaaactaacaagaagaaagctcttgatgcactgaagagaatggaaagctggaacttattcagagatacttcagtggaacatcatagttacacagtggctcatgattcatttcttgcacaacttggatctatgttatggggctctatgaggcatgtaattgctccttctgcctctcatagagtgtaccattactatgagaagttatcgtttcagttgtattttgtgacacgagagaaagtcaggagtataaagcagttacctgttaatgtaaaatccatcagggagagcctgaattctgtgctattacatcatcaaaactccatgtttagccaaaacatgctgtcattgtcagaggatccatcattgatgatggcattttcaatggcacgtcgtgcagctgcggtgccgcttctattagtcaatggcacctataagtcaactgttagcacataccttgattctgctattctccaacatcagctacagaagctaaatgagcacaattcactgaaaggaaggcattcaaatcacaggtcaacattagaggtcccaatattctggttcatacataatgaacccatattattggacaaacattatcaagccaaggctctctcaaatatggtcgtagtagttcagtcagatgatgattcctgggaaagccatttgcagtgcaatggaagacccatcttatgggatttgaggaaaccggttaaagctgctattgctgcaactgctgagtatgtatctggtctacttcctccacatctggtttatagccatgctcatgaaactgcaattgaggactggacctggtctgtgggttgtaatccctcagctgtgacttctgaaggttcacaactttcagagttccagcaagatgtgattgctcgtaactatattattacttcagtggaggaatccattcaagtaatcaattcagcaattcagcaattggtaatagagcggactactgaaaaaggcttcaaaattttcaaggctcacgaaagtaagatggttgagaagtacaatgccgttgttagcttgtggagaagagtatcggctatgtccaagggattgcgatatggtgatgcagtaaaacttatgtcaatgcttgaggatgcttcaaatgggttttctagtgctgtgaactccaccatttcaagtctgcaccctgtccaatgcacccgcgaaaggaaggtcgacgtgcagctagacttgacaacacttcctgcttttctagctgtatttttgttgctttggtttcttctacgtccaaggagaccgaagcctaagatcaactgaacaccgagccaatgagcagcataggccatagagtttttgtgaatacgcgcatggattacagatggcgctggagcatggcccgggaattccaaaggtccaaaacaccgggtggcagggaacaaggtttcagaagattgcaatcctgacacatccccaagttgtagcagagttggaatgtcatgaaaactttaattcattcagtcctgtcctcgttccgggtttagccaattcttcctcgttccgggtaaggccttgttcgtttgtgtcggattggtgggtcggaacaattcccggccggattgcttctctaatttatataaactttgattagccggaacgattccgggtgcaatccgacgcaaacgaacaagccctaactgagattaatttgtccttgctgtaatgtttagccagtcctgccccgatccggggaactgagagattgtctttatcgcaacattaacggctagcggttagtatcatcttccagtcacctggaatgttactagtacaatccaattgtctgtttcctgccgcttacatgtaaaagtccatactcaagttttacagaaagaaacatgttctgtcatttattacaaaataaagccaaatagtaaaatgttatgtgtacgtagggacagtatgatta

SEQ ID NO: 16953 - DNA, 900 bp, Zea Mays
cagtcaaccactgcagcaaaatttgtacgctatatcgggtatggtggcggcccttacgaatgagagtgcaaccagcaaatcagtatacttttcactttgcacatcggaaatgatatacatcactcatcttctagcaccagagcccgagaaacttgcaggacccttattagctgatacatacgtcacactgctgaaaggtcgcaatgcatggtatgggcagaagttagctaagggagaactgactctagaaatgggggacagcatcaagggcaaagggactatccagggtgtttctgcagtcaatgcattttatgaactgctgagccagggaagcctaagcgtgatgcatccagaaaccaagaaggctgttgctcctgttgagctatgcccaatactcaaaacactatacaaaattttgatcaagagggagcttacgaccaattccatcctccaggcaatacgtgatgaatcaatgtatgatccacgggaaagaattgagatggcacagaggcagtctctttaccggccatctcttcttggcctgcctaaagctgatgcgaaggcctaagatatggtgtttcttcctacctgatgagagcttgcaggagccaggaggcgcttactggtcttcaagatccttacgtgcctcagatgtgtgttgtgtcatgcgtgtacactaatacactatagagttgggtgatggcatatttagcatgccaggataaactttattgcccgtgtctgaaatacaagctgttgtgattcaaatttatttgtcacttagactggagtaaagatgtgtatgccttttattttatgatggcttcagagtctcaaaattggttgtaagattactccctgcgtctcaaaatataattcgttttagattaatcatatatt

SEQ ID NO: 16954 - DNA, 1661 bp, Zea Mays
ctcagctgctgttgatgaggatgggaggcacgcggattaagacccgcaagcggaacattgcagctcctttggaccctgcatcattctctgatgcaattgtccagatttatctggataatggtggagatctggaactcgtcgccaaaagtattgagtcttccgacctcaacttctcacgttacggtgacaccttttttgaggtggtttttgttggaggacgcactcagcctggcactgtaaaacctgaagaaggagaccgccacccttattctatgttagattgtgtggcacagcgtgaaacaattttgcctttcgtactctatatccagaaaacattgcgcaggaggcctttcttaataaaaaatcttgaaaatgttatgcgcaaattcctccaatccttggagttctttgaggaaaatgagaggaagaaactcgccatattcacagcccttgcattttctcaaaagctgtcagggcttcctccggagacagtgttccagccattgctcaaggataatctggttgccaaagggatagtactttcattcataactgagtttttcaaggagtacctgaaggaaaacaccttggatgatttgattgcgcttttgaagaaaggaaaaatggaggacaatctgttggacttttttccatcagctaagagatcctctgaggctttatctgagcatttcatcaaagaaggtctgactagccttgttgagtacaatgaaaagaagatgtttgaagttaaacttaaagagataaagtcaacactgaccactatgatcaatgatgaggctgcaatacctgaagtgattgagactgtcaaacagcaagttaaggatgctaaatttcctgatctagaggtcattcgcatgttgtgggatgtgctcatggaggctgttcagtggtctgggaagaaccagcaacagaattctaatgcagcacttcggcaggtgaaagcatgggctgagcttttgaatgctttttgcacgagtggcagactcgaactggaacttatatacaaagtacagacacagtgctatgaggatgctaagctgatgaagctgtttcctgaaatcataagaacactgtatgaccaagatgtcctagctgaagatactgtcctgctttggttccgtaaaggttcaaaccagaagggcaggcaatctttcgtgaaagctctggagccgtttgtcaaatggctcgaggaggctgaggaggaagaataagtttttgatttggagaacggccgaatgctggcctaagtgttactttatatttctgaagttagaagtttgtggaggaattattgctgctgcctcttactgccgagaactttatgttatgatgtttagccacatggatcccggctgcagagtgctataatatgttgctgttaaaactttgtgtcgagcatttgttgaaacttttgttatcattactgaaaggatttataatgggacgtcagtttactgtcggtattgtacaattactggattattcataagctgcagaatgctacaaatgtcatttctggcaaatggaatattgaaatgttacgaatgtaaggactctccctgtctgccgtaatttagagcagcctaagtagggctcctttggaatccataggattctcaaaacgtaggattagaaaaaac

SEQ ID NO: 16955 - DNA, 999 bp, Zea Mays
ggacacacgcacacacggaagaagccactagctctccgcagtccgctctcgcctctcggccttctccttgtgccgccgaacaccctcacaagagtcggcctctcgatttctcagtccagcctcagcagtccccttccctccctccatcaggtgttgcctcccgcagatccaaatcggaattcggtccttcgtccccaaaccaccaatccggttgcattctttgggtttgctcacagcgcacacaaagccattttactgctgggaatggtggctggcactattagcgtctccggctcttgagtgatctccaagggaagtgaagtgatgggggagtgcgaggacggcaaggagtacaggtgctgggaggagctgctgccggacgcgctgggcctcatcttccgcaacctgccgctgcaggaggtgctcaccgtcctgccgcgggtgtgcaagtcctgggggcgggtggtggccggcccctactgctggcaggagatcgacatcgaggagtggagccagcagcagggcaagccggagcagatcgcccgcatggtcgagctactcgtgggccgcagcgccggctcgtgccgccggatcagcgtctccggcctgccctgcgatccgcgcttctccttcatcggagacaagtaattctgaaacctgagcgatgcttcttgctgtttttgatcgattcctgtggcaagtgaatttttttctgcaattttttttttttgcgtggagtgttagattagaattatacgctcattctaagcctcgccgtcaggtttaagccgtgatgggggtgtttgcttgcagatctgctgagaacgtgagtgtctgttcagaatttctgacgtgcaaatccaggtccatttgtttgtctatgctggcttggagaccattctgatttttctgattagcagggctagaagtgggcctagttaaactttgatgagatttggtctggatctttggagcaaataaaaacctgctatcgcagag

SEQ ID NO: 16956 - DNA, 635 bp, Zea Mays
tcgtattatatgcgggggtggctaaggaggttatcggtaccatcttaaaattggcgaggcaggttcatatccaaacaagaagccacgatggaatctggatttcccctctatctgatggaatctggatttggtgccagtctgttttcctgtgattttgggataccagccccattccccttcatggagggtatgcgttgctgttggtcggcacactggaatggaacagatatagacagaaccttcaggttcataagcaaggagttgcgcttgaccgatctatggatctctctagatgcactgactaaggtgaattgaaagcggaactagacatgatgtttgaattcgagggtgaattagtatctgcaaaccaaaactggcagattgtttataccgacaacgagggtgatatgatgcttgtgggagatgacccgtgggagaatttgatgtggttgtgtatgatgtactttatattttggcatactatgcacaaaaacaaatgccttctatgaccatcgtgatttatacattttcaaacaaaattttatgatacttcttattgtgttttacgctttcactaaaaagcaagtgtcacattcgccgttacaaaacagatcgataatttacgtaaattttgt

SEQ ID NO: 16957 - DNA, 3028 bp, Zea Mays
aataatgcaagtggggtcacggcaaaggtgtggcgcgtgcgtggacctcgccctcatctcgtctcctccggcggtccggcctgtccaataattctagtattccaccgccgcacacctcctgtcttccttcaccttcgcgctccgccgccgccgtcgattcgtgctgctctcacccctaacctgtccaacatcgccggggagggaagcagcagaagaagctccccttacctccggctatcgcctgaggataaagtggggtctgtaggggagtcttaggggggagcaaaagggataggatagggagagatgaagcaatcaatttcttcgtccgccttcgcccctgcttacgtccccgctactaaccctaggatcattctgtcttttctcgtttcttatccgactcttcttcgttttatgcctatcagttatgaggttgaacgccttcagaagcttctctactagattagtgtaaatagtagacttgttcgagtttagcttggctggaagaattagtctctggtccgtgtttatatctgctagcaataatggctgcgatgaacggagaggtattgggtgaatgtggaaggaacataaatagtctcaagagaaagcgggagagccccgctgcatatgctgctggcgtattctgcacctctgaattgcatcagcatactgtcaatgattctgctgttaggtttcatcttgataaagaccgtaaggcaaagatcgtgtgccacttcaacaagcaggttttgcagagctataagaaattcatgagtagtgcaccacctaagcgtattttgcttcgccaaggtgctgtctggaaagactttccagaaaagattgtcaaattggcccaagctgacttcagggcaaaaaagatgatcacagaaacaggatatcagaaccagctatttttgctggattttgcccatatgacattcatagacacaaagacaggttttcagaggccaattgcttggatcgatgaaaatgaaaagtgctacttcccggaatcatttatacaagatcagaagttatttatgaagaaagattttggcaacggaaatcatgagtacattagtgaagagcgaaatgggacacgagaaacgaatcaccagtttggagcatcagaaagttctgctgaaagctcaaactttgagtcaagtattggagatgtttctagtcctaagagagctagggctgaaaagaatttcattgtaaaaaaatattgtgatatgggagaagctattggagaaaatgagtcatgcactttgttgcctacagcctgtaacctactaccacaccaagctaatctgggtgaggtatcccgtgctcagcgcactattgaagccgtggagaagctgttgctgcaggggatgggttcagttattgaatccaaggacattattggaatctacaggactccattattggatgaccacggacaagtccgttaccatattcaccaaaagcaagtacaggttaccggatgtcatcgtggaaacgcaaatgtccgttatgcatggcttccttgctccaaaagcactgtgcatgtaatgatgctgaatggtgttttgcaagttgataagcctcccaataagtgtgcagcctatggagagggcactctccttacaccagcaaatcgttcggatgcctgtgtgaaatactctgatgttgatgaaaatggcattgtccgtatgatgttgtgccgtgtaataatggggaacgtagaaatagttcaccctggatctaagcagtgccaacctagtaataagtattttgatagtggagtagacgaccttaaaaatccacggcattacgttgtgtgggatatgaatctgaatagtcatatctattctgagtttgtagtcactgtcaaattgccttctaaaaccaaagattcctttgtatcgcaagaaaactgtcagaattcgtctgatctatcactggtgttgaactctagttcacctgattgtatttcacaggtaagatgctttacatggggtattaacaagatagtactgtaacactagagacaactgttgctaacttgatatacagaagagttccactgttggagcagcaagagtgcagtaattcagattctgtgatttgactcaataattgacatgattgcattattgagattataacttggagctgattatattcgttatctatgatagaaacctccaaatatgataagtttccctgtgaaaccatgctattttagccacgctggagttggttaaagcaccagttaacaacttccttttatgcataaaacaggagatgaacctggaggcacctccagcattgggaggtggatgtgcagcccccatgctaggagattcgatggaaaaggctccaagctcaccttggatgcctttctccatgctgtttgcagcgatctctaccaaagtgtctcctgagaatatggacgtgattattggttgctatgaagagtttaagagcaagaaaataagccgaggtgaactagtgaagaagctgaggcatgtagttggtgatagagtgctaatatcgacgataatgcgtctccaagataagcagttacctccagtggataagcgtgaggaaccagacacatcggcgtccaaggtggtggcggaaccatgagatgggtgtcaggaggtgggcgaggaatgcagaaagggaggaaccagccgacttgacatagaaaaccctgtgggaagcagcaactatgaagcctcttgcatcagtcttgtgcatggaggctgctgtttgttctctgtatcgtaggtgtctacgtttgcgaggaaattgtatccggtgtttctctttcttcaaattaaaccacgcacatgcagctgccgtactttttggaccattgaagtgtttcgtccgtgaaaaaggctccttttaccttcccgtttgccttcctaagagcatctccagtagttttgtaaaataaaactccctaaaagacgatgtagagagttgctaaataataatagagagtaaaaaattgcatgttcttcaatag

SEQ ID NO: 16958 - DNA, 282 bp, Zea Mays
gggcaggtccccgccgccgcagcagctctcacatacgctgcaccgcaggccaccgaccgaccactcctctgcttccgccgtccggcgcccacgccgcctcctctccgcgagaatccgagctctcctctcccgctgctttgatgtgttattttggtgtgtgtgtcagtgtgtgtgtgttttttgttggcttgcggcttttcgcgacggggagaaagcagccgggcttcgagtgaatcgaatttcctggatttcacgagatacgctgccactaaaataacaccg

SEQ ID NO: 16959 - DNA, 1975 bp, Zea Mays
tcagggtttcgacgagcggcgatatgtgattgaacttatggatggacaggtggagacctttgtcggagatgaggaaggcgggtcgcctcaagttccttacgatggggagcagccaacgctgtatgatagtgtcgcgaagcagtacagtgaagagctaggtgaccagtacaacgagcaacctcgtgcccaatatgatgaagggtctgggaatccgtataatgattatgaagagcaagcaaacctgtacagtgaggaaactgggaatcggtacaacgaggacccagcagattcttaccaggaagagcaggagaatgcattcagtgggggcataaaccaacaggacaacttgcaggtcaacaatgttgacgataacaaatggcctggatggcctggagagagtgttttccgcatactcgttccagctcagaaggttggagctatcattggccgcaaaggggagtttatcaagaagatgtgcgaggagactaaagcgcgcatcaaaatacttgatggcccacctggtgtaccagaaagagcagttgtgactgcagtctaaggccccaaaacaaacaacctttcataaatggttgatctgacatggttttgaaagtccagttttgggctcctgtgctggaaatatgaataggtcatttcattattggatgaagatctcgttcaagatgctccttaaactatctggtaatgatttcagcaaaggatgaaccagatgcacctctctctccagctatggatggcttacttagagttcataaaagaataactgatagttcagatggtgaatctagtcaacctcaacgaagtgctggtaatataggaccaacacgacttctagtgccatcttcgcaagctggcagccttattggcaagcagggagcaactattaaatcaatacaagattcttcaaaatctattgtccgtattgttgagaatgtgcctcctgttgcactaaatgatgatagagttgtggagatacaaggcgagcctcttggtgtccaggaagcagtggaattaatatcgagtcacctgagaaaatttcttgttgaccgcagtgttctaccattgtttgaagcgcatatgaaaatgcatggtatgccgagggagcaaccagtgccacctccccagcattggggccctcctcaaacctggatccgccctccaaacattcctccaggtggtcctggttttggaggaaatccacagttcatgcatccaaggccgcaagacagttactatccttctcctgatgtcccccatatggaaaagcagccgcactacggtatttctgcatacggccgggaggccccaccaagtggtgcttctgctacagggaatcaaccaccctctcatgcaggttctcaggtggctcatgacatgcacattccccttgcctacgctgatgctgtgattggggcagctggtgctagtatcagttatatccgtagacacagcggcgcaacagtaactattcaagagagcagaggtgcacccggagagatgaccgtggagataactgggactgcagcccaagttcaaactgcgcagcagctgatccagaatttcatggcagaagctgccccaccaccaccaggcccggcgccagcttccaaccctcccgcaccaccagttgatccaagctatggctcttacccaccaccatatggagcagctccttcttatggttcttccgcagctgctgggcctccgcagtacaatggtgggaactacggtggcccgacctaccctcccagctatggctattagtagacaagtgtagcataccaaggatttgccccccccccccccctctttttttccgaataacgacagtgttgggcttgacatccccctgcccctggttgggagtgcagtttttaaaaccacaatttttcaataccagtctgataattgctatgatataactatggtctttttatattcgtcaatcgaacacccg

SEQ ID NO: 16960 - DNA, 1059 bp, Zea Mays
aaaaatccccaaatctctccactcccagccgctgcacctggcttcttcgccactctctcctctcctcgttcactctgccaggtggccggccgcccctgctcccatctcccacagccgccgccgccctcagctcctcagccacctcccatggcctcgtctccctgctgcagcgaagccgaccaccgtttcctgcagcctcgatagctcccccccccccccccccccccatgccgtccctgctcacctcaccttcgtcggccgtccttggacgccgtgctcggcgcccgagctccctacgccggccaccatccttcccatggcaggagctccgatcggcccctgctgaccttggcactcggcgtggctccaagcagcgccttctcccccaggaccggctcaccgtcagccgcgagctcctctccctcacgtcccctacagacaagcagcagccacagcaactccgcgctccgccggcttgcggttttgtcaagcccagtagacagcagcaaccccgatgtcttcacgtcgtgcgctccaccccgatttgcgcagcccctgcgcgacgtcgtccacccgctagatgttgacgctgtgccacgcgcaccaagcgttcgacgaaatgcccaaccaacggacagcacgcgggtctcgaacccgattcggctaggttgttcgatttgtattttgtggtctactctaattacgctttggtcgatgtcgcatatatatgtgtgtgaatatgtttgtatggattcgagttagggaaggagaagaaagcgaagtagaaaagaacccggatgtttcttaggttttcagaggattgtggttgtattggatgtgtgttgaaaatgcctcctcgcaaagagtgtatggtcccatgcatgcgatgtgtgatttttgttggtgaatgcgaaataagtttagtgtttcaaaacggttaattgatagtctctgttagtgctattgtgttgatttttgttgtgtggcgaattgatgcttcgttttaacaagtcactacattttatatctagcgggtgattaaatgccacatcggttaga

SEQ ID NO: 16961 - DNA, 8209 bp, Zea Mays
cttctttccctttcttcttcgttcttccgttcaccgttctccgccaccgcggcccaaccgcgccgccgcacagccgcgccgccgccgagccgcgcgttctgcactcttcgcgccatcgctctcctcgcgccgtcgcccggccgcgccgtcgccctcctcggcctgccctgctcgcgtggagcgtccgcgtgagcgagacagggagacggagcaagacggcgtctcggtgggacgagcgcattcggccgatttgagagagcgagctcgtccattcctgcagtgcgcgttcgcatagttaaacccttgacagttcccctgcccccgcctctatccggcgcgccggccttgcagccgccaacatcgccatgaaaccctcgccgcacttcccggagatcggaaagaagcctaaagatttgattgctaaggaccacacatttaacatcgcggcttacatctcgtctggagcggatgttattgctgccgcgctccgtaaacatgttgaggaggaagcccgagatctcagcggtgaagcttttttaaggtttatggatcagctctatgagcagatatctagtttactgcagagcaacgatgttaatgaaaatttactggctctccgtgctatcgatgcattaattgatatgccctttggagaaggcgcttccaaagtttctaagtttgccagcttcttgagaaacgtatttgaagtgaagcgcgaccctgaaatcctagttcccgcaagtgaagtgctgggtcatttagcaaaagcgggaggagcaatgactgcagatgaagtggagcggcagattaaaacggctttggggtggcttactggtgaacgagtggaatatcgccgatttgcagctgtactcattctcaaagagatggcagaaaatgcgtcaacagttttcaatgttcatgttcctgagtttgttgatgctatatgggtagcactgagagaccctaaacaagctgttcgtgaaaaagcagttgaagccttgcgcgcttgtctccatgttattgaaaaacgggagacacgttggcgtgtacaatggtattaccggatgtgtgaagccgcacaagttgggcttggcagaaatgcttctgttcatagtattcatggatcattattggccgttggagaattgctgaggaatacaggggagtttatgatgtctcggtacagagaagtggctgatattgtcctcgattatttaaagcatcgagatcagcttgttcgacgtagtataacatcacttcttcctcgaattgcccacttcctgcgtgacagatttgtgactaattacctgaagatttgtatggatcatatcttgtttgttctacgtacaccagacgagcgcgctagtggttttgttgcccttggagagatggctggggctctgggtgttgaacttgtgccttatttaccagcaattacctcacatttgcaagatgcgattgctcctcgcagaggaaggccatctcttgaggcaatttcttgtgtaggaagctttgcaaaagctatgggtcctgcaatggaacctcatattcgtagcggacttctagatgctatgttttttgctggtctttctgataaacttatagatgcactcgagtctataagcacaagcatcccgtctttactacccacaatacaggagcgtttattggattgtatatctcaagcactaccaaagtcatcaataaggccaggtgcttctgttggtcgagcaagcaggtcaaacaatttgcaacagtttgtggactctaatagtcctgttcttgtgcaacttgcactgtggactctagcaaacttcaactttaagggccatgaacttctggaattcgctagagagagtgtcatactttatttggaagatgaagatagcagtaccagaaaagctgcctctttgtgctgttgcaaattagttgcacactccctttctgcttcttcagcttcacagttcggttcaaataggacaaatcgtattggaggagctaagcgccgccggcttgtagaggagatagtggagaaacttcttatggctgcagttgctgatgctgatgttggtgttagaagttcagtcttcaaggctttgtatcgaaatccagcttttgatgatttcttggcccaagctgacatcttgacttcaatttttgttgccttaaatgatgaggaatatgatgtcagagaattggcaatttctgttgctggtcgattgtctgaaaagaatcctgcatatgtactgcctgcccttcgtcgctatcttatacaattgctcacatatcttgaccagagtatggatagcaagtgtagagaggaaagtgctagattattgggttgtttaattaggagctgcgcgcggctcattcttccttacattgctccagttcacaaggcgctagtgactagattgtgtgaaggaacgggaccaaatgctaataatgctcttgctgcgggagtgcttgccactgttggagaactggccaaagtgggtggctttgctatgaggcaatatcttcctgagctgatgcctgtagttgtggattctcttttagatggaggtgctgttagtaaaagggaagtggcagtgtcaactctgggacagattatccagagcacaggctatgttattgccccctataatgagtacccgccattgcttggcttactcttgaagttgcttaatggtgaattggaatggtcaactagactagaagtgctgaaggttttagggattatgggtgcattggaccctcacgcacacaagcgaaatcagcacaatctacctggtcagcatagagaggtcctacggccaacaatcgagaccgcacaacatattgtttccatggaagagttaccgactgactactggccttctttttcagcatccgaggactactattcaacagttgcaattagctccctcatgcgaattcttcgagatccttctctttcaagttatcaccaaatggtggttggctcccttatctttatttttaagtcaatgggcctcggctgtgttccatacttaccaaaggttcttcctgatttattccgtgctgttcgcatgtgcgaggatggtgctttaaaagagttcataacctggaaacttggaacattgatatctattgtccggcagcacatccgaaaatatttacaagacatactttccctcatctctgagctgtggacttcctcattcagcttggctgcaccaaatcggaccatacagggcccacagggttcaccggttcttcaccttgtcgagcagctatgcttagctttaaatgatgagttcagaatgtatttacttcacattctaccgagttgtatccaagtcttaggtgacgctgaacgttgcaatgattattactatgttcctgacatattacacacacttgaagtttttggcggaaatttggatgagcacatgcacttggttgctccggtgcttgttcgtttatttaaagtggagctggttgatatcaggcggcgtgcaattgttactttgactaatcttatacctaaggttcaggttggtactcatgtttcggctttagtgcatcatctgaagcttgtcttggatggcaacaatgatgatctgcggaaagatgctgcagaagcgctctgctgcctcgcacatgcccttggagaagactttactatcttcataccatcaatacgcaaaattcttgtgaagcaccacttgcggtacagaaaatgggatgagattgaaaatcggctactgaggcgagagctactcatcactgaaaacttgtctgtgcaaaagtacacacaatgtccacctgatgtcattagagacccccttgatgattgtgatggtacaccttctgagatagctgatgatacacagcgacaagcaagaagtcatcaagtcaatgatgtccggttgcggagtgccggtgaggcttctcaaaggagtactagggaagactgggctgaatggatgagacatttcagtattgcgcttctcaaagagtcaccatctccagctttacgcacctgtgcaaggctagctcagcttcagccttctgttggccgcgagttgtttgctgcaggttttgcaagttgctgggcccaaatgagtgaatcctcccaggaacagctagtgagaagtctcaagacagccttctcatctcagacattcctcctgaaattcttgccacgctgctgaacttagcagaatttatggaacatgatgagaagccacttcctattgatacaagactgcttggtgcacttgctgagaagtgtcgagcatttgcaaaggcactccattataaagaaatggaatttgaagctgtgtgcaccaagaagatgggtgcaaatcctgttacagtggttgaatcccttattcatattaacaatcaactacagcagcatgaggcagctattggcatattgacttactcacagcaaaattcggaagttcaattgaaagaatcatggtatgaaaagttgcaccgttgggatgaggctcttaaagcatacaccgtgaaatcatctcaaacatctggtccctttacaaaacttggatgctacattaggtcgaatgaggtgtctagcagctttggctcggtgggaagatttaagtgcattgtgtagagagcaatggacgggtgcagaaccatctgctcgactggaaatggctccaatggctgcaaatgctgcttggcatatgggtgagtgggaccatatggcagactatgtttctcgcctggatgatgcagatgaaaataagctccgtatgttgggtaacgcaacagctagtggtgacggaagcagtaatggtgctttcttccgggcagttcttttagttcgttacaaaaagtatgatgacgctcggatgtatgttgagcgagctcggcggtgtttagctacagaacttgcagcactggtacttgagagttatgagcgagcgtataataacatggtgcgtgttcaacaactttcagaactggaagaggtgattgattactgcactcttcccatggaaagcccgattgctgacggacggagggaacttattcgcaatatgtggaatgaacggattaaaggaacaaaacggaatgtcgaggtgtggcaagccctacttgctgtcagggagttggttcttccccctaacgaagacagagacacctggataaagttcgctgaactttgctggaagaacggtcgtattagtcaggctagatctacgttagtcaaacttttacagtttgatcctgaatcttcccctgaattgacactgtatcatgcacatccacaagtagctctggcttatctaaaataccagtatgcagttggtgatgagcttaaaaggagggatgcattttctaaactgcaagagttgtctgtgcaggttgctaccaccatgggcaatttacctggaacatcagcaaaccatggcaccatgtcaaatgctggagtaccactcattgctcgtgtctacttgacacttggtagctggaagaaggcactatcacctgcattagatgacgattccattcaagaaattttgatttcttaccataatgccacgctaagtgcaaaggactgggggaaggcctggcacatatgggctttgttcaacacagaagtcatgtcacgctatactttccgaggccgaccagatattgctggaaaatatgttgttgcagcagtaactgggtatttttattctattgcttgtgcatctactacgaaaggggtcgatgatagcttgcaggatatccttcgtctgttaactctttggttcaaccatggggatacctcagaagttcaaacagcgttgcagaaaggtttttcccttgtcaagattgagatgtggctggttgtgctgccccagataattgctaggattcattcgaacaatagagtagttagagaactgatacaatctttgctagttcgaattggaaaggggcatccacaggctttgatgtatcctctcttggttgcctgcaaatcaataagtatattgagacaacgtgcagcgcaggaggtcgttgataagatccgccagcacagtggaggtcttgttgaccaggcacaacttgtgtcgaaggaactgatacgggtagcaattttgtggcatgaaatgtggcatgaggcactcgaggaagctagcaggatgtattttggtgagcacaatatcgaaggaatgcttgctgtacttgagccattgcatgcaatgcttgagaggggggatgagacaattaaagaaaatgccttcattcaggcttatgggcatgaattactggaagctcatgaatgctgtttgaaatatcgggctacaggagaggatgctgagctaactaaggcctgggatttgtattaccatgttttcagaagaatcgacaaacagcttccaagtcttacgaccctcgatctgcactctgtttcgcctgagctactcaaatgtcgaaagttggaacttgctgtgccaggaacttatgctgcagattcaccacttgtgacgattgagtattttgttccccaattgatttgttataacgtccaaacaaaggccaagaaagctgacaattcatggaagtgatggcaatgattatgcattcttgcttaaaggccacgaagatttgcggcaagatgaacgagtaatgcagctttttggtttggtgaatactctcctagagaactcaaggaaaacatcagagaaggatttatcaatccaaagatatgctgttatacctttgtcacctaacagtggtttaattggatgggttccaaactgtgacacacttcatgctctgatccgtgaatacagagatgccaggaagattttcttgaatcaggagcacagacttatgttggcttttgcacccgattatgatcacttacccctcattgcaaaggtggaagtgtttcagcatgctttgcaaaatactgagggaaatgaccttgcgaaggttctgtggctgaagagtcgaacttcggaagtatggcttgagcgccgcacaaactacgctagaagcctggctgttatgagcatggttgggtatttgcttggtttaggagatcggcatccaagcaaccttatgttagatcgctatagtggaaaaatattacacatcgacttcggagattgctttgaggcttcaatgaatcgagaaaagttccctgaaaaagtaccattccgtttgactcgaatgcttgtgaaagctatggaagttagcggtattgagggtacattccgaacaacttgtgaaaatgtgatgcaagtccttcgcacaaacagagacagcgttatggccatgatggaggcatttgtacatgacccgttaatcaattggcgtctgttcaatttcaatgaggttcctcaagtgtcgaactatggtaatgttcatgctcacacggttgtcagtagtgaagaagcagtggctaaccgagagctcatgcaacctcagcgaggagcacgtgagagggaactgctacaggctgtcaatcaactcggtgatgccaatgaggttttgaatgagcgtgctgtagctgtgatggcacggatgagtgacaaactaacagggcgtgacttctcttctgggtcagctttggctggagcaggtagctctatccaacatggcagtgagcatttggcttcaggagatgcccgggatgcccaacctggtctctcagtgaaggttcaggttcagaagctcatactccaagcgacttcacacgaaaatttgtgccaaaactatgtcgggtggtgtccgttctggtgagctctcttggaaacagtagcagtttataacatgtaaatattgtgaataccgtgtgcatagaagtttcgtggtgacagtttgtatgtgcagctttgtaattagcagaacttcaagatgccttggaccatccttttgtcagtttcttagaccgtgtttagcagttcacccttatggccatccaaaacactgtttttgtactgtagattgtattgtttgtagattgtactgttcgcagggtggatttttgaatatgagtataagaatgtgtaagctgttgaagatagccttaggttttcttccgtgccacttgagggtttgttcgattagctctcaatttatgtggattgagtgagatcggattggtttaaatctcaagcaagttaaattttcttcttaatttttctaatctcatcaaatccatgtgtaacgggaataaccgaac

SEQ ID NO: 16962 - DNA, 1802 bp, Zea Mays
actactgtgttgctgaatacaagcgagtaaaaacatggaaattcctatcttgaaaggtagtgcaaggatatcatcacacctcaattttgtatgccctcagcttttcccatcctctgggttttggtcggaacaaccttcaaatgatgtcatggaaaatgataagagtgtttcatcggaagcctgtggaagtgtgtctgcgcaaaacctcctaaagaacttctattccaaacttgttcacctacaaggattttgtagaagagcttgtatctgagatcccagcgattagagaagttcctgaacaggtttgcaaattctggcaaaataatgtgaatgataataatatactaacaccaactggcaatcatatgggtgaagaacaatggatcaataaaaaatcagataaggtagatgatggcactctttttcaagaaattgtcttgagaaagcatccaagggacaatcaggaaatcccttgttgtgtggaggatgcaacaagggaagatatggagatcacttttttgggcacaggttcatctcagccttcaaaataccggaacgtaagttccatatatattaacttatttgaacgaggaggtatacttctggattgcggcgaaggaactttaggacaactgaaaaggagatttggtgtaaatgatgctgatgaagctgtaaaaggtttgaggtgtatttggatttcccatattcatgctgatcaccacactgggttggccagaattcttgctctaaggtcgaaattgttaaagggggtgcctcataaacccttgcttgtgattggaccaagaccacttgagagattcctaaatgcatattctacactcgaacatcttgacatgcagttcttagactgcaggcatactttgaagtctagtgttgaggcctttctcagtgaaaatgatactgacccagccacacctcaactggagaccaccatgtttgcccctggaactagaatggagaactacaacaggaagcctgcaagtccaagggataccacagctcttgctaatttcaaagaagtcctacaggaatcaggtttagagattttgtacagcgtccctgtactacactgtccacaagcatttggagttgttttgaaggccatggaaaaagcgaacagcactggaaaggtaattccaggctggaaggttgtatattctggcgacacacgaccctgtccaggtcttatagacgcttccagagatgctacagtgctaatacatgaggcaacattcgaggacagtatgaaggacgaagcgattgcgaggaaccatagtacaaccaaggaagccatagaagtcggcacatcagctggagcgtaccggataattctgacccacttcagccagcgatacccaaaaatcccagttatcgatgaggttgatatggagaagacctgcatcgcctttgacctgatgagcgtaaacctcgcggatctgccggttgtgcccaaggttctaccgcacctgaaggtcctgttcaaggacgagctggtagttgatgaagccgaagaggtccaagaggctgctgtgtactgacatattgcatggataaaaatgatgtaaattaacttggatcgccttgtagcttagcgacattgtttttgacctgaactccagtccaattgaaggtctggatcatctgtctctgtgtctccctttaatggttgcatcgatttttacagttggttttgttgggtgagtgttgtgagttgagttgtgaaaataacaaagataattgtaattgttttgattgtgttggcgccgatctggacgctggtc

SEQ ID NO: 16963 - DNA, 1313 bp, Zea Mays
ctgggatgggctgactggctctcgcagttcgccaaagaaaactcgattgagcttcaccttccaggcatcaagctcggtgagcatgaagatgtgaccgaggaagctgtgttgactacattgaaaagggcaatcagccgtttctctactctccaggcacatgatggacactggcctggggattatggtggtcctatgttccttatgccaggcttgatcataacattgtatgtgactggagcactaaacactgtcttgtcattggaacaccagaaggagatccgccggtatctttataatcaccagaatgaagatggcggctggggcttgcacattgagggtccaagcaccatgttcggctcagcactgacctatgttattttgagattgcttggagagggaccagatagtggagatggagccatggagaaaggtcgaaactggatattagaccatggtggagcaacatatataacatcgtgggggaagttttggctttcggtactaggtgtatttgaatggtctggtaacaacccggtgccaccagaagtatggctactgccatatctcctcccatttcacccagggaggatgtggtgtcattgtcgaatggtgtatttgccaatgtgctacatttatgggaagaggtttgttggccgaatcacaccacttctgttggaattaaggaaggaacttttcaaagacccttacagcaagattgattgggacaaggcccgcaacctatgtgccaaggaagatctgtactacccacacccattcgttcaagatgtgttgtgggccactctccataaattcgttgaaccagttatgatgcattggcctggcagcaaattgagggagaaagctctggaaacagtcatgcaacatgttcattatgaagatgagaacactcgttatatttgcattggtcctgtaaacaaggtattgaatatgcttgcttgctggattgaagatccaaactcggaggccttcaaacttcatatcccacgagtctatgattacttgtggcttgctgaagatggcatgaagatgcagggttataatggcagccaactttgggatacagctttcacagttcaagccattgtggctaccaaccttattgaagagtttggtcctacccttaaactagcacacaactatatcaagaattcacaggttcttgatgactgccctggtgatctgaatgactggtaccgccacacatctaaaggtgcatggccattctcaactgctgatcatggttggcctatatctgattgcactgctgaaggactaaagcattctgaggagga

SEQ ID NO: 16964 - DNA, 300 bp, Zea Mays
cagaatatactcaagtatcccatcaactttgggcttgcagttcattgtcggaggacgccttctccgtgcttcaacatgaaatcttgatggacaatctttgttgttcgactctcctctgacaaagtcattcaccctagaatatggaatcagcgcaagcctatccatagaatccctccagccctccaccattgaccacgagatatccgctgctgagaactccaatgatggtgggttctgaactggaagagtcaaaatttcatcccacctagtcatctgcatgtacagcagtcgacctcatca

SEQ ID NO: 16965 - DNA, 3520 bp, Zea Mays
ttttcatttcacattttttcctcacaaaaaagagagggaaacaatattgcagggccgcccgcgccggaaccgaccacttcaccggcagcgagccggagactccgtggagcccctgtccccgcgccggcgtgggcggagggaggggagcagcggcagcggcagccagcagaagaaggataacggggggctcttggagcctctgggaagaagcttctagaagctgcctgaggcgagggcgagcgcgccgttgccagagtgatctcggtggaataagccgcgcggggccggcgccgtgggggatgcgcctctgggtgccggcaccctccgggatttgaatggtagccagatctcgagggggaggggagcttctcgaagctgggtgaggcgcgcgggccggccgccctgcggttagggtttggtggaagcgggatggtggggagctcggtggagggaggagcggacggagatggaggctgctgcggcgtcggggacacctcgcccgggaccatcgtgtgggtgcggcggaggaatgggtcctggtggcccggcaggatcctgggcccccaggagctcccaccatcgcagatcatgtcgccgaggtccggtacgccggtcaagctcctcggccgggaagacgcaagcgtggattggtacaaccttgagaaatcaaaacgtgttaaagcattcaggtgtggggagtttgatgcctgtattgagaaggcagaggctactcaagggactcttgtgaagaaaagagagaaatatgcaaggagagaagatgctattcttcatgcgcttgaattggagaggaagcagcttgcatcaaagtaccagactcaaggtttcagacctggaccacctggtaatatttctgcttgcacaaaacatcacaaagaccttggaagtactcgctacaagagtaagaagggcaagaagcgcaaagatgcatctgttcctcctgatgtaaaaaaagaagtgggacaatgttttctgcctgctggttcaaagagaaacttttcaggatcacttactcaaggaaatcttgtcagtaatcacatgggtgacttctcccctttgggacattctcatggaggtgccactttagaaaacaaggagagtacagttgtgaagaaaaatagatcagatggaagtgattttgaagactctcttgtttcaaaatcagacagacgcagaccactttctcaagtattgcagagcagtgaaaacttgcttcctcacttaaagcaaaatgatgattttggggctttgttaatcgcggagagtaataatccttcacttgccgcctcctggtccagaagaaataaatatacgtacatggctagtgattctggcgaaactgagagtcatagtgatttaccttctataaagatgtcttctactagaactgattttgagaatgaaagctatcttcagcatcctgtttatttttctgaggagcagacttctgacttcattgagaagcaaataaccgagtcttccgagagggaatgttcagaaagcgagactgaagatgatgctgaacttctgcagaatgcaagtgtgattctacgtacagaatcacatgctccttgtccatattctattccagtttctgacaagttcaagcatgtggattatgatgacaatgaggtgatctattctacttatatgccccagttgaatgaatatgaggaagaggatggttcttctgagctgggtgtctctcagtggcacatgaaaggtaaacgtaacaatcgtaatgccgtgaagagattagtggatatgagagatggaaatacatggttaaataaatacaatggatcattaaaaggatctttgcataacacaaatggtgggaatcccagaaaagaaggtatgcacacatctggtgagcagttttttgaggaaagcttttaccaaataaaagaggagcccaattatgattctgatgaaactaatttatttgagaacatgagccattcagagactaacttgtactatggtaaaaaatacccttcatccttgagaaccacaagagatcttagccgaggctacagttactttaatgactcttcaaatgtttctcccctaaacaaggacactgaacgaatatatcatgttgatcggaatgcatattgggatagaccttcattttaccaaaggaagttgacttcaagttttggtggcatgggaccaatgttgttcaatgttaacctcaaagttcaggccagctaccaaggagagcatgtccctcttgtctctttgatgagcagacttaatggcaaagcaattgttggacaccctatccaaattgaaatagttgaagatggttccacagcagtattctgtggtgacagtggtatgcaagagaccacagctgctccacctgcttggccaacaggtagaaggactgccatgcaaagagttccccgttcaaatccatcaggagcactgttggatggcgataatgaaggtggtcttgtgtattctgattatgagacgaaaccaaccttaagaaagtactcatcttcttcgaatcaccaggttaaggtgaataataaaatcagttctaatgctaagaggtcatcagctaagccccctaagaagtcatccaagaaaacaaacctctcaagccagaaacttagagctctctcttccatctccactgcaaaaaaccatcatggagaaggtggtcaagcgaaggcaaattggcacaatgacatatttggtggtttaatcggatcagaaggagcagttcctctagtgacatgtgtcccaacgaaggttgtgttcactaggatattggaagcagttggaaggccacctctgtctgccgctcgccgtgttagaatggctagtcctccggtacgagatcctccataggcttcaactgtagtgctacatgcggtttatgtcgccagccatcgacatgcaagttttatgtacattcctgttaattgatgaagaggcagaccattcaatcatccggtaacacctgtgaggagtcgattgacatggttgctccgtaataacttggaacagctgatcccttattagcagtggtgacaacctgtaaaaatcagtaatatttctgactggagactgaggtcatgaatgcttcagagcagctcacatatttctgactggagactgcgtccatgaatgcttcagagcagttgagccatcgataccatgaagaggtactcttcggtgtagctagcactggtaactttcgtcacaactgtctcctgtaaagtactagtttcaacattttaggtggcaatttagtcaaaacatttgtgccgtcatatatagcgataggtcatagatttcctaatgccatgtataatcccttaattacatcctgatgtgtctgtcatttgttgtcgagaagtagttggttcaactgtatgtttagagaagcatgtgtacctagtcgatgtaatatatactagtccagagcgcgcgccctgcgcgcgtttataaacaattaggtataaatgcataaacatcttttaat

SEQ ID NO: 16966 - DNA, 2547 bp, Zea Mays
aggcggcgcccgcgtcttggctgtcaccacacgcgcccgccgacgccgaccaggctttggggatttggttgcttcctgtcggggtttgagaggagcggcgctcttgaattgttgctttcaattggtccgtttggcagggtttggcaatagaaagatttgttgccggagatgggcaagccgtcgctgaagaagaagagggcctccggcggcggcaagtccggcgaccacgggggcaagccggcgtcactggagcggtctggttccaaggtcctcgacggcgatgagaccctcttcacggacatggcgcaggagcacaaggaagagggcaataagctcttccagcgccgggactacgaccgcgcgctgctcaactacgacaaggccataaagcttctgccccgggcgcaccccgacgtcgcctacctccacagcaacatcgccgcctgctacatgcagatgagcccgcccgactactaccgagccatcaacgagtgcaacatcgcgctcgaagcgtcgcccaagtacaccaaggcgctgctcaagcgggcgcgctgcttcgaggctctgggcaggctcgacctcgcgtgcagggacgtcaacaaggtgctcgctctggagcccaacaaccttactgcgctggatgtatccgacaggatcaagaagactatggaggagaagggaatcgttctggacgacaaggagatcatgcccacgccggaggaggtggtggccgctgcacccaagcagaaaccgcgcaagaagaggggaggacggaagttcgctgccaaggctgcggctgctgctgtggaggaggtcgatgaacagaagattgcggaagctatcaaggaggaggtggaggagcagccaaggcaggtgaaactcgtgtttggggaggacataaggtgggctcaggtgccggcgagctgcagcatggcacagctgcgcgaggccgtccggagcaagtttcctggactgaaggctgttcttgtcaagtacaaggacaaggagggtgatcttgtgacaatcaccaaccaggatgagctgaaatgggctgaggagttggctgaggctgggagctcacttcggctgtatgttaccgaggctgatccggaacatgaaccttatgttgacgacaccaatatggagagaaatgtaaacagcaattcggataatggaagtattagaagcaataggcaggatgaggacaggagcactgtgacctgtattgatgattggattgtgcaattcgcccggcttttcaagaaccatgttgggattagctctgatgagtacctggacctccatgaggtcagtatgaagctctacactgaggcaatcgaggacactattactactgaggaagcccaggaggtgtttcatcttgctgagggaaactttcaggagatggcagcacttgcatttttccactggggtaatgttcacatgtcccgggccaggaagagattgttgctatcaggagattccccaagtgaattggtgcttgagcaggtgaaggaagcatatgaatgggcaagggacgaatacaataaggctggaacaagatatgaagatgccgtgaaggccaagccggacttttttgaaggtttccttgcactggcgcaccagcagtttgaacaagcaaaactgtcatggtactatgcaattggtagtaatgcagatttggacagctgttcttctgaaattctggagctcttcaataaagctgaggataatattgagaaaggtatagagatgtgggaggaaatggaagaacagcgtctgaagaatcgatctaaacctagccaggagaatattgtgctagagaagatgggcttggaggagtatatcaaggatgtatccactgatgatgcggctgaacaggcttccaatttaaggtctcagataaacattttatggggtatgctcctttatgaacgttcagttgtggaatttaaattaggtctcccaatgtgggaggattgtttgatggctgctattgaaaagttcaaacttgggggagcttctgccacagatattgctgtgctggtgaaaaaccactgtgccaatgaaactgctcaagatggtttgggcttcaagattgatgaaattgttcaagcctggaatgaaatgtatgacattaaacggtggctgcgtggtgttccatcatttcgccttgagccattatttaggcgaagagttccacaattgcatactgcacttgaacatatatagtactcatgaagttgttctacatcatattggatttcaatgcttttttatcagtgacacttttctctttttttggtgagtacaataactgtatttttatcttgtaatagattagttttattcatacgacaagcactatgcactgtgatatttgttgatttttcctttacctgcccccttgcactttctaattaaatgtttgtgactatggaatggatcttttccattccatgtggtttgggggacaattgatgtgctttgctttgaagacagttgtagtggtcatctgattgtgaatttgtggtgcacaagttggct

SEQ ID NO: 16967 - DNA, 1724 bp, Zea Mays
cataaatcgtcagcgaataggccgcccgcacgacttctcttcccaattcccatagatcgatcgccgacccctcgagcaacgcgatcgcccgccgacccgacggcggcatggacaccgagtccttgcagcaggggagctcctcgtcgtggcacacgacgggcgccgtgtcgtgtggagccgcgcagcagcagaagcgccagcggtgccagggttcttccagcgatcaagctggttccagctcaagtagttctctgcaaatatcagaaccagaaccccaacaaatccaagaagaagaggattactatatggaggatgattgtgatgatgattttgatggctacgacgaagatgattatgacttcgatgaagctgactttaaccagcaccttgctgataaatttgatgatttggatcttcctccaggcgtggaggccaccgtaccttggttgcagaaaactacacccaaggaagatgtcaaagagccacctaaatcaaatactgcagatgagaatgcaaataaatatacgcagttcaagcagtttgatactgttcagaatttctctgaccattactacgctaagaattctcatggagagccaaacagagcctggtcaaagagagttcaacatgactggaaacttctggagaaggatctaccagcgtatatttttgtccgggttgctgaagatagaatggaccttcttagggctgcgattattgggcccaagggaacaccttaccatgatgggcttttcttctttgatattcacattccctctgcttatccttgtgctcccccgctggtatattaccactctggaggacttcggattaatccaaacttgtataacaatgggaaagtgtgtcttagcctgttgggtacctgggatggtagaggttgtgagaagtggaatccagctcaatcgacaatgctgcaagttcttgtctccattcaagctctgattttgaatgacaagccatattacaacgagccaggatatgagtcctatgccaacactccgaatggagagcggttggctttggactataatgacaacacctttctgcactcatgcaagactatgttatactcacttcggaggcctccagagcactttgcagatcttgtcgctggccactttcgggtgcatgggcacacgattctcgcggcatgcaagcactacatggcgggtaatgatattgggtcagtggtgccagaggaggaggaggaggaggaggaggaagagtcatcagaacacaagagcggtgatgctggagcatcgggtagtgcaccagagctaggagtgatcaaggcaatccctacgaagagacgcagctcattcaatccaagcttgaaggtgctgtacgaagatctgctgatggaattcaatgtgaagggtgccgacacaaggaaattcatcgatgagaagttgaagaagaacaaacctgcagccgcctgaggaacatgcttgcaggcaaagcttttgtaggtttacccaaggacgaaagctaagtaccaattggtttggaactgtattacggtctacttgtttttatatatttgacgccatatagttcaattctattaggaatatggtacattatgtatagaggatggatttaaagagaaccgttggagggcctagaatttaggggaatgaaatattttagagatgaaaaagtagaatttagaggggtgaagtagagggaatggttggccaccc

SEQ ID NO: 16968 - DNA, 1672 bp, Zea Mays
gaaactcaagtatataacatgcatacactaaaatatatgttttttttgctgaattgttggtcaaagttttaaaacgttgacttttctgaaaacatgcacgccttattttatgggatggaaggagtagtttcttacttcctagatcaacctcacattctcccgaaagaggcccacatgatctccattgttaattcagatcagacaatcaaaatcactcagtgtcaggtatagaatgcggaattttcattgtcccctgaaaccctagctcattcacatcgtcctcgtgccataacgctccactctcatcccctcccgagccgcacctctcccttccttcatccgcatcggtgagcaagagatctggagtcattgtggtggctccaacggtcggtgtcgagtcaatgaagtggtggctccgcctactcagatggattgctctatgggtcatcctcatgcgtgagtgcgtttggttgcaatgatgagacatgatgaaataggatgatcctcagataaggttgtttggttcagggtcaggggttaggacaagactgtctcagtattgtccccaattgtccctcgaaattagagggacgagaggggacgccagggaacgtccctgtcctaggtatcccgcaaccaaacgcaccgtaattctacaggtggggatgactccaacggtcagcgtcgagtcaatgaagtggtggcaatgacacttcccctcaccgagatcgggtatatgtgtagggacgaggaggtaccggtgaacgttgttttgtgtgctggtctcgtccccttctattatacacggtgtgatgaggggctgcaaccaaaacgttgttgtgcccccgatcaaggcgcgaagtgtagtcagactcggtcctctgaccgagtctaccgtgagacttaacactaccctcctcctttcactcaatgtaactgaatgcaattctctctgctttgtcatatgaaaaacaaacatgctcatgcattgccagttttttaacattacaggtgctattgcacatccataaattaaattacttggtatgaaatgttgctatcatcaacatgcaggccataatgattggtgtagacttgtcagcacgagaatactacattcctggtccttctggctcttacctaaactatggggctgctgctagtgaggtagagattgatcttctcactggagcctccacaattgttcgaagtgatcttatatatgactgtggccagagcttaaaccctgctgtggacttgggacaggttgaaggggcgtttgttcaaggaatcggctatttcatgagtgaggaatatgtcaccaactcagatggattgcttatctctgacgggacttggacatacaagatcccaactgtggacaccatcccaaagcagttcaatgtgaagttacttaacagtggattccacaagaaacgcgtgctctcttcaaaagcatctggggagccaccgttgcttcttgcagcttcagtgcactgcgcaacaagagaggcaattagagctgcaaggaacgaacagcactgctctggatccaaaccttcaccatcccattttgatctggaagttcctgccatcatgcccgtggtgaaggagctgtgcggcctggacaacgtagagaggactgcaggagtgggatgaacagaggaggagc

SEQ ID NO: 16969 - DNA, 798 bp, Zea Mays
tccgtttatcagagagattcctatcaaaaaaatggtaaaggatacacgctattccttgcatttgtaatcgaccggctgcaccactacctgcgaaagctgatgacactgaggaaaacatccagcacatccagagaggaggtggagaaacttcagatggagaaccggtcgctccgcgaaaaggaggagaagtcctccagtgagacgaagaggcttcagcgagagattgcgaggctgaatgagggcatgaagaagctgaaatctgagaccgaagagcacgagaggaaggcgtcggtggcagaggcccatgtcgacgcgctgcagaagcagtcggaggagctgctcctggagtacgaccggttgctggaagacaaccagattctgcagactcagctacttagcagaggctaagctaaggagcttggtttgttagcaagactcctttaccaggtagtgtcgtagagccaaggacttgcccgattctgaatgcttacatgccgcggttctaaatttcggcatgtccattgtggttcttggcgtccatgctgttcctaacttgtgatcttgttgatgtatggatgcagcgtgtatttttagagttcatgtttcttccatttccgatagatggaggtacatgatgtaaggtccaggaacgacgggacgtccttgaggaattcggtagtcaaggctctcagaatgtgcttgaaaaaaatcggagtggcatgttacgcagattctgattcgtcctgaacttgaagcctgcatgaatgaaccaaagttgcctgaaaaaaaaggctgaac

SEQ ID NO: 16970 - DNA, 2551 bp, Zea Mays
taagttctcattgccaattacctgtgacaacaacagatttccaggtcattggaaagctcagtgaagggagggcaacacatataccctatcgtgattctaagttgacccgtctactacagtcatcattgagtggccatggtcatgtctcactaatttgcacaattactccagcatcaagtaacatggaagaaacacataatacattgaagtttgcaagcagagcaaaacgtgttgaaatttacgcctctcgcaaccggataattgatgagaaatcattgatcaagaagtatcagaaagaaatatcctctctaaagcaagaactcgatcagctaaggagaggaatgattggtggtgccagccgggaagaaattttgagtttacgtcagcagttggaggcgggtcaggtcaagatgcagtctcgtctggaggaggaagaggaggcgaaagctgctctaatgagcaggatacaacgtttgaccaagttaatacttgtttccaccaaaaacaatattcctgccttgacagatgggcatcagagtcacaattctctcagtgagcaagataagttaatcacttcacaagatagttctacacttgtccaaactgagggcaccacaaaagaccccctatcatccgctttgccagactccttagatgagatcaatcagttaagatctggcaccggtgaacaatcttcagttaccggttctgcaacagattcaatgcaggtgggattcacggcatcagatcatatggatctactgattgaacaaattaagatgcttgctggggaggtcgcatttggtaccagttcactgaaaagactaatcgaacagtccatagatgatcctgaagcaacaaaggaccaaatcgagaatttagagcgtgaaatccagcaaaagaggagacatatgcgagccctggaaaaacaaatcatggaaagtggcgaggcatcagttgctaatgcatccatgatggatatgcagcagactatcacgaaactaacagcgcagtgcagtgagaaggctttcgacttagagttaaagtcagctgataatcgtgtactccaggagcagctacatcagaagaatttggaaatctacgatttacaagaaaaagttcttcgcgttgagcaacaactctcagcaaaagtggatatatcccctgagaaggaaactgattgtgcacagcaggagactattgatttgaaatctaaacttcagtccaaggaagctgaaatcgaaaagctgaaatatgagcatctgaaaatttctgaggaacattgcgatttaatcaaccagaaccataaattaagtgaggaagctgcatatgcaaaagaattggcttcttcggctgccgtcgaactcaagaatttggctgaagaagttacaaagctatctgtgctaaatgcaaagcaggcgaaggagttattagttgctcaggagatggcacattcaagggttcatggtagaaagggtcgtacagctagtaggggtagggatgaggttgggacatggagcctcgatttggaggacatgaaaatggagctacaggccagaagacagagggaggctgctttggaagctgctttggcagagaaggagcttctcgaagaagagtacaagaaaaagtttgacgaggcaaagaaaaaggaactatctctggagaatgatctagcaggcatgtgggttcttgttgctaagttgaaaagaggggctttaggcatatctgatttgaatgttgacgaccgaactgttaacctagctgatataactaacagcacaaaggagaacaaaggtggaaagaattttgctctagttgagaagcaagcatcagaagattctgtgaagtcactgagttcagaagaacatacaagtccggagtttgaaccacttcttgttcgtctgaaggctaaaattcaggagatgaaggaaaaggacattgatcccctgaccgataaagatgggaactcacatgtctgcaaagtttgtttcgaatctgcagccgctgcagtattgcttccttgccggcatttctgcttgtgcaagccttgctcgcttgcctgctcggagtgccctctgtgccgcacaagaatcgcagacaggataatcaccttcacgtgagctgcgttctagcttcaggtcattctgaagcacacatcctcttgtaaaatcttcaatggtatatgtttctctttttccttagcaaagaaggtgccttttatgttccttctgtgttgtatcgccattctttgggttccccttcccctatagcttcacgccttcaccttacgttctttgttgtatcgaggagttacaaatgatgacttctcgctctgcaaatatgtatagatacgcaactcgacgctgtaacacattttgattctctactcctgaagaaaagcagcgaacgacatgatgacgtgtgtatactgtgctcctagtcgtccctgttagcatggaaggctatattctataattgctgagctacgcccctataattatagatgatggccttcacttttattatcatggttgattagttgcctaca

SEQ ID NO: 16971 - DNA, 2712 bp, Zea Mays
ctcatgcctagtatgatagatctggttaaggacgtaagatggaactctgagcttggaggcgttcaaatggaaatgcgtctggtcaactattttgctgcccaattcaataagcagctcggtgatggggttgatatccgtcagtctcccaaggcaatggctaagttgaaaaagcaagtcaagcgcaccaaagaaattcttagtgcaaacactgcagctccaatttcagtagaatctctgtataatgatgttgatttcaggagtaccataacacgtgagaaatttgaagagctgtgtgaggatttatgggagcaagctctaactccagttaaagaagtgctgacacattctggcatgaagatcgatgacatctatgctgtagaactaataggaggagctacccgggttccaaaactgcaggctaagctgcaggaatttctgggtaggcgtggcctggataaacatcttgatgctgatgaagcaattgttctcggagcttcacttcatgctgctaacctgagtgacgggattaagttgaaccgtaagttgggaatgattgatggctctacttatgcttttgtacttgagatagatggcctagattatgtcaaggatgaaagtattgaccaaattttggttccaagaatgaagaaaatgccaataaagatgtttagatccatcagacatacaaaggacttcgatgtctctctcaactatgacaaagcttatgaactgcctccaggcattccatcacacaagtttgcagagtattccgtatcaggactgacagatgccagtgaaaagtatgcaaaccgtaatttatctgcacccatcaaagcaaatctacatttttctttgagtagaagtggaattattgctcttgatagagcagaagcagtaattgagataactgaatgggttgaagttccaaagaagatattgactctagagagtaacatcaccaatcagaattcttcttctgaagtaggagcagctaatagcacaacagatagtaaggaaaatctgagttctggcagtaatactaattcgagcactcccattgatgagagtaatgctcaagaaattattacagagaaggtgctaaagaaaagaacttttagggttccattgaaggttgtggaaaaaacaactggtgctggaacaattctttcgaaggagttgtattctgaagcaaaaaataggttagaggcactcgataagaaggatgcagaacggaggaaaactgctgaacttaagaataacctagagtcatacatatattctatgaaggagaagctggaagaaagcgcagatattttgactgtctcaactgaacaggagagggaatcctttgctgagaaacttagtgaggtgcaggattggttatatatggacggtgaagatgctcaagctaatgaattcaaagagcgtcttgaccaacttaaagccattggtgacccaattcttttcagattgaatgaattaaaaacccgaccaacggcctgtgaaaatgctcgattgtatcttgatgagctgcaaaagattgttaagaactgggagacaaacaaaccatggctcccccaaaagagagtagatgaggttgtaagtgaagcagagaaagtgaaagcttggctgaaggagaaggaaaacctgcagaaaaagtatacttttgagccagcttacttttttttattgtcttgtaaaaggtggctaactcccattgagcattttgcagtacccctgtctttaacccaccagttttcacatctgaagaagtttctgagaaagttctggacttacaagataaggtctcaagtgtcaataggattccaaaaccaaaaccgaaggtcgagaagaaaacagcaaaggaggaagaacctgctagcaaggagaaaaccacctatacggaatctgcacccgacgagggtgaatacaccgaaacgtctcagaaatctaaggctcaagaagaggatcagtctgcatcagccaacactagtgattcagaacctgaacctcatgacgagttgtgagaagcagaatccataggaacaggtcgggacgacgcattacgcatgtactacaagaaggcagtttgaggataaattttggttgctcatttttttccaaaattttatttgacgaccgaaagacgaggctatgtaggtgttgaggaacactagatgctgtagggccaaaaatattttatcggtagtttctgattgctgtatagcagcctcatcgttgtgtaagttactcgcctcgaaggcgtagttcaggatctagaatcgctttgttatactgaactcatttcattttttaatgaagaatgctatataggattttacgtcagtaaggtattgttgtactgagctgatttgattttttaaataaataatttcatagattgtacgtcaatccttgctgtgtttaaatatataattagatctatacccgtcggtggagcaagagtttaatatataattagatgtatacccgcataggttcaaacttccatttggctacatctgccctttacctagataaatgattcttgattttttccccattcattaaactttatatggaaatgaaaggaatccagaataacaaatgaaaaaaataaaaatatatatcactagtttaaagcccaggccccgcctgttgacataagttttacattcttgctattgttgtagcaagtgggcataagtgctc

SEQ ID NO: 16972 - DNA, 1600 bp, Zea Mays
ctgcatattctgcaacacataattatttgacttggcaacatcatgtaaagtcgtcatttgttgccgtgttgctcctctgcaaaaggctggtattgttgatttgattaaaagcagaacgagtgacatgaccctggcaattggtgacggggcaaatgatgtttcaatgatacagatggctgatgttggtgttggcatatgtggtcaagaaggtcgtcaggcagtgatggcttcagactttgctatgggtcaattccgctttctgaagagattacttcttgtgcatgggcactggaattatcagcggatcgcatacatgatcctgtacaacttctaccggaatgctgtcttcgttctaatgcttttctggtatatcctatatacggcttattctgcaactctggcattaacagattggagcagtgttttctattcccttatatacacatcagttccaacggtagtagttggcattctcgacaagaacttaagtcataatacccttctttgttacccgagactatatgaggcagggcttcgaaatgagggctacaacttgacactcttctggatcacaatgctcgatacattgtggcaaagccttgttcttttctatgtcccttttttcacatacaatatcagtacaatggacatatggagtctgggaagtttgtggacaattgctgtggttataattgtcaatatccatttagccatggacattcaacgttgggtgcttataacccatcttgctgtatggggttctatagctgctacgtttttgtgcatggtgttaattgactctataccaattttccctaactatgggacaatttacaacatggctgcttcaaggacttactggcttagcgtttgtcttataatagtccttgggttgcttcctcgtctcctttgtaaagtggtatatcagaccttttggccatctgatattcaaatagcaagagaagctgagctttttaaaaagctgccccaacagttgggttcaaggcctgcaagtgacatcagctaacaacagcttcacacagttattttgtcaattctaaatttgaggctgtgttgattcatttgttgagctgatttttgtcgaattttgattatacgctgaggacaaacttcggtaaggtgtacaaatttggctcgtggaagaggcttcagaatgcaatggagcggctgacaaagggaactgactactggtggtgatgaaaacggcttgggtcttcgggggctagtaatgacaattgtacagatatgggacacaacgatacatacacttgtattttacggtagagtttgttagcttgtgtttagggaataaaaacataaatagatacagattcttttcgcactgcggtatttttttaatccctgactatatgttaaccgtcttcatttacttccagctgcctgagggtttagctgtagcggtttgcgctgtcagaatttttacattttacagcaatacgaggcccagttccctaatgtagtggttccaaaccacatcgaattttgttgaacatttattttcggatgtcagttttaattgtgagatgtaggtctgtttggttggatgtttaacttgcca

SEQ ID NO: 16973 - DNA, 1522 bp, Zea Mays
agtggcgaagttggagctgctttcgttgtggggaaattgacccttgcaagagtattagtgatgaagatattcgcacgaccatccagaattctgggggtccaaaaggggctatgtttctgcccgaggtaccatttgagattcttgtgcggaagcagataggtcgcctacttgacccaagtcttcagtgtgcccagtttatctatgatgaattaatcaaaattagccacagtgcttaatcagcgaacttcagaaatttccagctcttaaaaagcggttgagtgaagtcgtttgcagtttcttgagagatggtcttcgacctgcagaaacaatgataacccatatcatcgaaatggagatggattatataaatacttcgcacccaagctttgttggaggcaccaaggttgttgaacttgcaaagcatgaagttctacctcccaaaacatcagcttcactatcaggtcgtaaggatggtactattgttggttctgagatacaattagcagccgaaagaagccaaaagtcacgtgctgttttcgcaagagatgcaatcagaagagtaacatctgaacaggcttctgtggaagcagaaacaagtctgactggtggtaatcagataggtaattcacaggttggtgagagttcaagcaaattaccctcaatcattcctctaaaagagccacccattaccttgaagccatcagaaactgagcaggatgcaacagaggtagccgttgtaaaactattgatcaaatcctactatgacattgtaagaaaaaacattgaggatgcaatcccaaaagctgtaatgcactttctggtgaaccatacaaagcgggatctgcacaacttcctaattcgcaaactatatagagagaacctgctcaatgaattgatgagggaaactgatgaagtacttatgagaaggcagcgtatccaagaaatgcttgaaattcttgaacaggcacataggacacttgaggaattcccctttgaagttgataagcttgagaagggctacaaccttactgaacatgcaactggcctgtcaaaaatccatggagtcagcggggacagcacaaatgtcatttacacatcctcccctaattgctactctccacatcgagcgtctcatatggtcctatagagcagcatgtaccagtcaccaatggagcttacctttccgcaacagtggtatgtacctgttgccaatggagcttgcctttccacaccagtgttacgcgttaccgatggagcttgcctttccgcagcagtgtatggtagtcaccaaatgacctttgatcccaattcttgaggtttttaagcaatgagcttgagagttacctgtaaattctagttttgctagggagcaaactgctttctagtagaaagctatttgctggtagagaactttaattgtgtattcttgaaattgtcacagccgacatcaatgcggtagtgaatatgggcaacaaggtagttgtatagggctatatccaacataccaatttgccctagttat

SEQ ID NO: 16974 - DNA, 961 bp, Zea Mays
cggcctcccaaggcccagccggccagtccccgaaattcccagttcccagcccgaaccaccggcgacgcacgctccgcttcgctatggcgctctcgctcgcgcgcagccccaaccccgccgcggcgctccccgccccgcgtgttccccactttgcccttcctctcctcacgctccgctgccctcgccgccagaaccaggcacgcctccgcgtcgcagcatcctcgcccccggaggcgcaggctgcccccgtggcggaggatgagcagggggagaagcggcggaagctatacgttgccaacctgccctggtcgttcccggcgccggagatcgagaagctcttcgcgcagcacggcactgtcaaggacgtcgaggtcatcaaggggaaggatggaagaaacagggggttcgcgttcgtgacgatgtcgacagcggaggaggcggccgccgccgctgataagcttaactcccatgatgtaatggggcggacaatcaaggtggagttttcaaagagcttcagaagaccagctccgcctcctcctccaggcactattatagagaggcacaagctttacgtgtccaatctcccatggaaagcaagggctcccaatgttaaagaattctttgcaaactttaacccgctttctgctaacgttatattcgacaatggaaaagcagctgggtacggtttcgtttcctttgggacaaaagaagaagcagaggctgctctcactgagcttgatggaaaggaacttctgggaaggcctgtacgcttgaattggcgggaaagtggtgatgataaggttgaagttgcaaaggctgacagtgaagttgaagctgtaaatattgaaggagcatgcgttgatgatgccagcacggatggaggtgaagataaacaggaatagtaaaaaaaaatattatagtggcctacggcaagaaagtttcatctgccttattgattctt

SEQ ID NO: 16975 - DNA, 150 bp, Zea Mays
ccccccacaggagaagaacaagtggttctggaggagccataaagcgaggagtttgatctgatctaggtagcgtttccccagttgacttgcgccaaggatgatccttagttcgttttatatttaccttttattttgtaataagacttccgc

SEQ ID NO: 16976 - DNA, 3420 bp, Zea Mays
aaggcgtcctacgtgaagtgtgtaaactgtttttaaatccctgggggcgcctcgtctgcccacagagcatccaacttaaagttacaactcccactagcaagcaaaacaaagcagttcaaaaggacttctggcagagcagaggtgccaattaagagcatcatgcgtaactctaagccgccgagcaaactggccatgctcatggtgttattgtttctgctttgttacggagttgagaaagtccattgctcgacggttcatgaaaacaaccaagattttcactctctgctcgatttcaagaagggcatcacccacgatccaaatggagccatgaacgattggatcaacaacacccacttctgccgatggaaaggtgtgaagtgcaccttaacaccgccatatcgcgtcacggagctcaacctctctcacaacaacttagctggccaaatctcctcctctcttggaaacctgaccaaccttaatttgctggctctaccaaataatagatttggtggaccaataccccttcttgacaggctccaaaacctaaattacctatccctggacaacaactccttaaatggtgtgattcctgaatcacttgcaaactgcttcaacttaaacaaactaggtctctctaataataacctcaccggtgttatccctcctaacataggttctcttaccaagctacaagttcttctccttcatagaaataagctttccggggtcatcccatcaagcctcagcaacatcacaaatttaattgcaatatctctttcagaaaatcaattgaacggatccattcccattgaattatggcaaatgccacagctaacgtctttgtaccttcatgataattatctattcggtgaaatcccacaaactctctctaatgtatcttctcttcatatgctatccttggcgtacaatatgttgagcaacactttgccatctaacttcggccatgccctccataatctaaaatggttgtacttggaaggcaacttgtttgaaggacatattccagattccctaggcaatgtttcaggtctattacatttggatatatcttctaatcatttcactggcaaaatccctagcatatttggaaaactttcagggctgtcttttctaaacctcgaggaaaatatgtttgaagcgagtgatagtacaggctgggaattctttgctgacctagcaacatgtagttacctgtcggagttttcattggctagcaataatctgcagggtgctataccaaattccatcgctaacatgtccaccaacctcaaaaggcttctgatgagtgataaccacctatccggaatagtcccctcaagcattggaaaatttaatggtttaattgaactcgatcttggtggaaacaattttaccggtacaattgaggattggatcccaaagttgacgagcctacaaaacttatatctcaatgacaacaactttgatggtataatcccaccttaattctattagtaaccttactcaattggcacttttggatgtttcaaataataaattcactggttcaataccacctagcatgggaaccatttaacctctattcaatttgaccctaagcaacaacaatttcagagggagaatacctgccgagttttgggaccttaaacaattagtcttccttgatgtttcatcgaacaaatttagtggggaaattcctcaaagtttgggccagtgccaaaatctaggcaccattgaaatggaccaaaatattcttacaggaaacatcccgacctccttcagtaatctatatagcttgaccttgctaaatctttcccataacagtttctcaggtcgcttgccagattatctaaatgacctaaagcttctcaataaaattgacctgtcttacaataatttccaaggagagataccaaaagctagtatattcgataacgctacagttgtttcactggatggcaatccaggattgtgtggaggaaccatggatttgcatatgccttcatgccctactgtttctagaagagcgacgatcataagctatttgattaagatattgatcccaatatttgggttcatgtccctcctattacttgtctactttttagtccttgagaagaagacttcaagaagagcacatcagtcacaactttcttttggtgagcattttgagaaagttacttacaatgatctagcgcaagcaacaagggacttctcagaatccaacctgattggaaaaggaagctatggcacggtgtacagtgggaaattgaaggaatcaaagacggaagtggctgtcaaggtttttgaccttgagatgcaaggtgcagagagaagcttcttggcagagtgtgaagcattgagaagtattcagcaccggaatcttcttcccatcataactgcatgctcaactgtagatacggcgggcaatgttttcaaggcattaatttatgagcttatgccaaatgggaacttggataaatggatacatcacaaaggcgacgaggcagttccaaagcgccgtctaagcttaactcaaagaattgcagttgtcgttagtgtagctgatgcattggattacttacaccacgactgcggaaggcccactgtccattgtgacttgaagaagcttaactcaaagaattgcagttgtcgttcaattagttcgatcggtattaagggcacaattggctatatccctccagaatacggaggtggtggccatgtttcgacgtccggtgatgtttatagttttggtatagtgttgttggagattttgaccggtaaaaggccgacagatcctatgttcaccgggggactagacatcatcagcttcgtggagaacagttttccggatcaaatatttcaagttattgatccgcatcttgtggaagaccgccagaagataaatcagccaaatgaagtagcaaacaatgaaatgtaccaatgcctggtggctctgctgcaagtagcactttcttgcacgcgctcattaccatctgaacggtccaatatgaagcaggtagcaagcaaactgcaagcaatcaaggcggcacaacttggaggcaaatccaagtgagattagatgtactccctcgacgagcagcgtaaaccggaatacgagatgactagaaatgtactctagtctagcatacaagtgttgtttaccttgtatatgcatctatggttcaatatggttataccgtcaagcaactacaacatgatatgtaatatctagtatttacacattgaaagcatcgaactatgtatggtttgaaatagttatttactttgtttagatttcttgaattatgtagttcattatttaattgtgagaaaatttaatgagtttatcctctcatacgtgttataatatttattaagctaattgaattaggaaaaaattagagaggatctctg

SEQ ID NO: 16977 - DNA, 1055 bp, Zea Mays
cttttggccttggcttgtcgtagagccaaccactcgtgtcatgtcatgagatcgtatgtcatattacggtgtggattttaaaatcaagttccttacagttggtggaaagaaactaaagttgacaatatgggatactgctggccaggagaggtttaggacaattactagttcttactacagaggtgctcagggaattattctagtatatgatgtcacaaagagagaaagtttctcaaatttggctgatgtttggactaaggaaatagaagcaaactcaacaaacaaagactgcataaaaatgcttgttggaaacaaagttgacaaggatgatgaaagaatggtcacaaaagaggaaggtcttgcttttgctgaagaatatggatgtctgtttcttgagagcagtgcaaaaacacgagaaaacgttgagaaatgttttgaggaacttgcattgaagattcttgaggtgcctagtctcctagaggaagggtcttcttcggttgtcaagaggaacatcctgaaacagaagcaggaaagtgatgcaaagaacggtagtggatgctgtcaatagatgtatgtgctgatccacaccacacggttggctttcttcgtgtgagctgccctgattgtctgctgtacatgttcttgtgagtaagaagggcgagcataattgatttgtacaaaggacatgtcagtttggtgtcatagttttcctcatctccagtttagtatagcaattttgttgtcgccctagcaatggtaatatggaatcctctctctacagtattgctatctggccggctggcccttagaaaccgggaccgtggaacttgttcacattcctcgttccagaaatgttcgttctgttccaaaaacgtgggaacaattttgtttccgtagtgttaaaatcttgtttaaggattagtttggcaacttcattttttcatgggatttctaattttccttgaaaaaatggacaaaaaaatggactaatttccttgagaaaatagagtttccaaactagccttaagtatgtatgttcctatcctcgaccttag

SEQ ID NO: 16978 - DNA, 1627 bp, Zea Mays
tatatcttctcctacacacgaacacccacgtctctctttcgatcctagaggctagaccctctctcgcgcacacgctctctcctctcttcacacggtttttgcctcgcaaacgaaaagacaccaacccgggcccggagggtcaagtggagagcaggggaggaggggagaggaaagggaaaagcgggtcgcgagtcgcgactcgcgagtgcccgcttttgctccaatccaatcggtgccgcctcgggcgagatccgctccgcgtgccccgccgctgccgagatagagggtgtcgtccccactccccagcatctggttccacggagagttgttgatcttggatacctgatccgcaatttggggctgattgagtcacttgaccttttcaacatctgccccgttcctgctgccttgctcactataagaggctggcctggttccagagatgattctattgtgagtggagatggattctgtgagaagttggttccagaagttccagccgagagacaaatcgaagaggccagtggtggctgccagacatggaaaagatccaggaaagcccccgatggacgatgccccttctagtgcgacgaaacagagggttgccgctgcaaaacagtacattgagaaccactacaagacccagatgaagtccctgcaagataggaaagagaggcgctggatgttggagagaaaattacaagatgccgaagttcctgtagaagagcaaaataacattcttaagcatttggagaaaaaagagactgaatatatgcgcttgcagagacacaagatgggagttgaagattttgaacttttgactattattgggagaggtgcattcggagaggtgcgtcttgtagagagaaggtctctaagaatgtttatgcaatgaaaaagctcaagaaatctgaaatgcttcgtaggggccaggtagaacatgtcaaagctgaaaggaaccttcttgctgaagttgatagtgcttacatagttaagctctattattctttccaagacgaagagttcttatatctcatcatggaataccttcctggtggagacatgatgactttacttatgcgcaaagacacactaacagaagatgaagctagattttatattgcagaaactgtgcttgccatcgagtctattcacaagcacaactatgttcatcgggatatcaaaccagataatcttttgttagatcacagtggtcacctgaagctttctgacttcggtttgtgtaaacctttggacagcagtaatttccctaatttgaatgaaccagattatatgtctggaaaagttaccacacctttgcctgataccactcggttaagcaacccttctgcaccgaggcgtacacagcaggagcaattgtcacactggcaaaagaaccgtcggatgttggcatactcaacagtcggtacacctgattatattgctccagaagtgctactgaagaaaggatatggaacggagtgtgactggtggtcccttggtgctattatgtatgaaatgctagttggttaccctccattttattcagaggacccaatgtctacttgcagaaaggtaaagttttttttaatctgtaacagctaactattagcttggtggattcaaa

SEQ ID NO: 16979 - DNA, 2274 bp, Zea Mays
acagcactccagagtccagacttattagctacaaacaggcgggtcacagattatcctacatattgtagctccgcaacctgttcagcaaaatgaggccttcagatgacagggcacagctttcaggctttgcacaatcagatgaatcgacacttgatgtggaggggcattgctgccatcagccgtcattcccttgttcgccgtcaatgcaaccgattgtttctgggtgcacacacacagagaacagcgcggcatacttcttatggccaacatcaaacctacagcactgtgcagccgaggggcgtgcaaactactttgccaacctttcaaagggacttctgccaaagattggccgtcggctgcccaagggccagcaagcaaacagcttgcttgacttgatgactataagggctttccatagcaaggtactgcgttgctttggccttggaacggcagtgggcttccgcatcaggaaaggggttctaaccgatatccctgcaattctttgcttcgttgctcgcaaagttcacaagaagtggcttgatccggcccattgccttcctgccattcttgcgggtccaggaggtatttggtgtgatgttgatgttgttgagttttcgtactacggtgctccagctcaaactccaaaagtgcaaatattcacagagctcgtggataagttgtgtggcagtgatgaatgtattggctccggctctcaggttgcaagtcaggacacttttggaactttgggcgccattgtaaaacggagaactggcaacaagctggtaggtttcgtcaccaaccgacatgttgctgttgacttggactacccaaaccagaagatgtatcacccattgccacccaaccttgggcctggtgtttatcttggagctgtcgaaagggcaacatcttttatcacggatgatgtttggtatggaatctatgctggaacaaacccagagacatttgtacgtgctgatggggcattcatcccatttgctcatgactttgacatctccacagtcacaactacagttaggggtgttggtgatattggggatgttaaggttatagatctgcagtgtccacttaatagattaatagggaggcgagtatgcaaaatcggcagaagttctggccacacgactggaactgtgatggcttatgcccttgagtacaacgacgagaaaggaataagctttttcactgacctccttgtcgtcggtgagaaccgccaaacatttgatctagaaggtgacagtggaagcctcattatcctgactggccaggacagcgagaagccgcgtcccatcgggataatatggggtggcacagcaaaccgtgggaggctaaagcttaggtgtgaccatggccctcaaaattggaccagtggagttgatcttggccgccttctggatcgtcttgaacttgatcttatcataaccagcgaatcactcaaagatgccgtgcagcagcaaaggcgcgcgttggcggctgcagctaattctgctgctggggagtcgtcgacagcagcagctcccgtcctagaagagaaagtggaggagatcttcgagcctctggggatcaagattgagcagctgcgtcggcacgacgtttcggcctctgaagcggaggaggcagctgggatcaatgtggaagagcgccagttcatctcaaactttgtgggcaggtcccctgtgcgtgatgaccagggtgctccaaggcaaattgcgaacctgaacaatccgtcagaggaagagctcgccatgttgctgcacctaggcgaccagtagcccaagcggcttcgcagacagaatccgacctcgacgggaaacggcgaagcgctcatttcagtgtctctacatcgaagagtcgcaagtagtccgaagaaggtcacctggagttcagcaaactgaacctgcatcagtagcttagaccagcagcttcctggcacaaacattataatgaactatgctgaaacttgattcagcacttacatgatttgggtggtattcccttcagttttgctgtgctcgtgaagactttaatatgtacaatgctgagtccctgtatcaaaacaatgcaggtagtgataaaatcgtattgatcaccttctcttttctaccattatcggtggagttgtctcaagatgactagatcagcttctggcaggcctgtctagtgcccaatgcaactagggcgatggtacaggcccccaattttttgagttttctgaaatagataatataagaaggcaaatattgtttgatgttttgt

SEQ ID NO: 16980 - DNA, 705 bp, Zea Mays
cgcgcgccctcgcgcctcttcttggcttttttgcggcctgtcggatcggcacgaccttctagatgattctcaaacccacttccgggctgccgccgaggttatctacaacaccgagcagcgagaaggggttggtgtccagcacgaattgaatcgtcgccagaagtcatggcggattcggccacttcccgtccaaccgttctcgtcaccggcgccggcggccgcacaggccaaattgtctacaacaaactgaaagagaggtctgagcagttcgtggcaagagggctagtcaggacagaggagagcaagcagaagattggggcagccggtgatgtttacgttgctgacataagagacgcggatcgtctagcacctgctgtacaaggtgtggatgcgctcataatcctcaccagtgctgccccgaaaatgaaaccgggtttcgaccctagcaaaggtggacggcccgagttctactacgaagacggaatgtaccctgaacaggtggattgggttggccaaaagaatcagatcgatgctgctgctggagtgaagcatattgtgctggtgggatctatgggaggaacaaatcctaaccatccgctgaacagcatgggtaatggcaatatactggtatggaagcgcaaagcagaacagtatttggcagacagtggaatcccttatacaatcataagcaaagaggcatttacc

SEQ ID NO: 16981 - DNA, 1011 bp, Zea Mays
tcatttgatgtcatcttctagcacatgcttttctcatcttcactgatttaggcatttgtgtgggatgggaaagcactacccaatgggcctgttgtaatttcacctgatggcttgtttccttcactctaccgagaagttatacggagagccccacatgaattcaagattgcttgcctggaggacattaaggcgctctttccttctgattacaatccattttatgctgggtttggtaacagagatactgatgagctcagttacaagaagatgggaatacctaaaggcaagatttttatcatcaacccaaagggtgaagtggctgtcaacagttctgttgatgtgaagtcttatacgtccctacatacccttgtcaatgacatgtttccaccaacaactctggttgagcaggaagactacaacaactggaattactggaaggtgccattaccagatgttgatttgtagtgtagttttgacagaaacagccgtagataccagtagatcctgcaaaagcctagcagtagagcttcctgtaccctaatattcagccaccacgacggttttaggtccaatttgtgaaggtctcaagaattccgggatgtatggttttctgaaagccaatggcccaaggaaacgttgccactttatttccttcgacggagctttcacgtgatcatacggcttttgggtagtcatctgattgtcttcgtcgaacttgttgtacccagaggtctgagccctagaccctcgattcattagagaactcgtgatctggtcattgtccaagctactttgttctgattgcaggaaatctttaggtgccaaaagcagctgtacattttttttttcgtgatccaaaaacagctgtacatcgtatatcagcgcatagaagagaattgctaagcatatctgcatcttgaaacccttctttcttgtgctctaaaagttggatttgataattgttgagcatatctacctgtgaggtggaatggaggtgtgttgctgtagttg

SEQ ID NO: 16982 - DNA, 1133 bp, Zea Mays
tgggtctgtccctttttgtgttgcgaagaaattacaaattgaggaaaatggttgtggatcaggttgacatgttatgttttcatccaatgcactctcgagactgttctcaggtacaacgccttgcatctatttatcaattgaagagcgggtgtcaaggttctggcaagaagagatttgtaactgtgacattgactgggcactcttccttgccatctgcagatggccaagttcgacttgaaaagcttttggggactgaatctgagaactctgtctcgagctctaaaggcccagcacgactgaagggccattctgctccaggaaagtgtgtaaaacactgggaatccagtggaaataaatctaccaagaaacaggtctccttcgcagagcgtccagtatcttttgtcaagtgtggaaccattgtggactcccttactgaggcaatagctggcccaagtggtggtgatacctcgtgtgttaaacctgttgaaagtaactccacccatctaggctcctttgaggtgcacaccaagggctttggttcaaagatgatggccaaaatgggattcatcgagggcactggccttggtaaagatggccaaggtatagtgcagccgatacaagccgtgcatcgtcccaaatctcttggactaggtgtagaatttgacagtgtggctgaggcgatcaaagcaagggcagaacccatcaaattaatttcagagctgaggcggaatgtgtgggcaccagagacgagtggcgttggctcctttgagaaacacaccaagggttttggctccaaaatgatggtgaatatggggtttgtcccagggtccggactggggaaggatggccagggcattgccacccccttgaccggagtaaggcgaccgaaatcacggggactgggagccgaggacaaatattagcttacaccattttcgcatttgatgtatctttcttgtcgtgttccttgttacatgcggattacatagtttgctgggagggcgaacctttgagcaccctgaatggtgaaacaatgggttttcacttgtttctttcaacttctcaatgaagttttatatatttgttctatcaatgttatatttgtttcatttttctatggcccttgcttgtgc

SEQ ID NO: 16983 - DNA, 878 bp, Zea Mays
gcaacaattaagtaggactctatgcttccaagtattcatgagtgaaggaagatgcatggcagatctatgcggcgcactacattgtgatctgatgatgcagttcaaaaaaccaaaaagtaaatgcaatgcagctgcagctacaaggaatcgtcatctttgtgagagccttgcagacagttgctttcctattaatcaaggtcttgctgccagccgtcttcatgaatttttcttgcgccagttttgtgatgctcacacttgcagtaagggaacaaaacctttccccaaaggtggcaggaaacaaacaaacaggttatacctcgctctctccattttgacgctgatacttttgccgctgttctatctaattgtgttcctgcaccagagggaaatgaggaaaggtacccaagatctaaaacggttttcgaaaattgggcagaagaaaaagccatcctagtgtccaacagtcacaacgttctcgagctcatggagccaaggatgagctggataaggaacgtggtatgcagtgtgaaatgtttttatgggcagggaagaaatttccctcatttccaggacgggaacaatgtccgcaggtcgaggaatgctggcttcgaccttttcttttctttttctttcttttttgtttcgacatgtagatgcaaacttcgagaggcaagcatgtgtggtctttgtgagattacggcgatattctatatcgtcaaccataaccgaagtcctattgataatttaaggatttttgggaggcctcaggcttaaaaaccaatgtcagtgaatgtagtatgacttctatccaatgtaatgatcaatgtgttggtgaggcacaatctttattcccttgcaacattgttggatttccttgc

SEQ ID NO: 16984 - DNA, 1392 bp, Zea Mays
caagatttggtggagcttgaatgtgagcactgggtgaacaaaggtgtcaatattaagtatgccacaagaaccagccgcaagggattcaaggcaggagctctgaagaaaggaatggaatgtgactatgcatggcaaagcgaatacattgctatatttgatgctgatttccaacctgaaccagattttctgctccaaactgtcccattccttctgcacaatccagaagttgcacttgttcaagctcggtggtccttcgaattttgcagtgaatgacacgacaagcctgctgacaagggtacaaaagatgttttacgactaccacttcaaagttgaacaagaagcaggatcagcgacctttgccttcttcagtttcaacggaactgctggagtgtggcgtacaggagccataagagatgcaggaggttggaaggaccgaactacagttgaagacatggacttggcggttcgagcaacactaaagggctggaaattcgtatatgttggagacgttagagtcaagagtgaactgccgtccacttacaaggcctactgtcggcagcaattccggtggtctagtggtggtgcaaacttattccgtaagatggcaaaggatgttttgtttgccaaggatatatcactcgtcaagaagttctatatgctctatagcttcttctttgtgaggagagttgtagcgccgacggctgcctgtattctctacaatgtcatcatccccatctcagtcacaatcccggagctttacctaccagtgtggggtgttgcctatattcccatggtgcttaccgtggtcacagctataagacatccaaaaaatctacacatactgccattttggattttgtttgagagtgtgatgacattgcatcggatgagggctgcgatgactggactgctggagctagaaggattcaaccagtggattgtgacaaagaaggtggggaatgatctcgaggacactgaagttcctttgcttcagaaaacccggaaaaggctgagagacagagtcaatctccccgagattggattttcggtgtttctcttcctctgtgcatcatacaacctggtgttccatgggaaaacaagctactacttatatatgtaccttcaggggttagcatttctgttactagggtttaacttcactggcaattgttcttgctaccaatgatagcatgtcaaagctgtacgaattgctgattgatattcattttctggtcatgcgttcgtaatgtttcaaatggtttagatcttagatgcatagaaagatggcattcattattctgcacgcttgcagcgattcagatcttgtaatacaatactgtcttaacaaagctcaaaggaagggaatatggaagtcgcaattttcagaaagtg

SEQ ID NO: 16985 - DNA, 974 bp, Zea Mays
caccaccagttcaccccctctcctctccgggagcttagacacctgtaggctagcgcattgttctcaaggtcagagcttcgccgaggaggcgaggacgatggcaatcgccgggcagtgctcctcctgctattatacgtcacccaccctgcagctccaccgacgtcacagccacctgccgcggcagccccaagccgcacgaagagcgcggcggccgaggttgcaggtggccgcagctgccgacagcgggcccatcagggcggccacggacgccgagttcttccagccttccgacaccaggccaatcatgctcttcgacggcgtctgcaacctctgcaacggcggcgtccgcttcgtgcgggagcacgaccccaacaggttcttccgatgggttcgcaactccaacaggagcatcaggtacgtgccgctgcagagcgagtccgggaggaagctcctgcagaggtcagggaggtcccctgacgacatctccagcgttgttctcgtcgagaaagacagtctgaagcggtgctgaggataatggagtacctcaacctgcccttcccgcagctcgccgtcttcctcaagttcgtccctctgttcctgagggacttcgcgtacgacaacgttgcgaacaacaggtacgccatgtttggccgcgccgaagcagaagcatgcgagatactgtaacaactggtgcccctgagatctcgatacttagtctatacgattcgatgtcaacagtcgcatacatgatgtcccacgaacatctatgtgtgcgtagttttagccatctaaacaaagctcaaacaaaaaaaaccttgctctatctctatgctccttgcagtgcagtgagcgataggcactgaagggcgtatgctagctacaaaggctgtaaaaactgtatctttggcacgacgacgccctcggttgtcccgtgggcgttcagaatagtagcgttggacggggcggtgtggttg

SEQ ID NO: 16986 - DNA, 1139 bp, Zea Mays
aaaacaaatttagctgttttttctttcgacgttttcgtccctacctcgcggttggggctcgcggctctcgcggcccgcctgtgctactgctgcacccgcacggccgcgcgcacctccaccgcaacggtcacttctagctctcgtgcagtcgtgcgtcctccatcgtcgcctctcctcccgcggtcaggggagtgtctgttgttgcgctgctaaggcatttcgggtgcccatgctgctgggagttggcctctgttctgagggacacaaaggagagatttgattctgctggagtaaaactgattgctgttggtgttggcactccagctaaagcccgtattcttgccgagcgcttgccctttccgttggaatacctctatgctgatcctgatcggaaggcgtataatctcttgggtctatattttggtgttggtcgcacgttcttcaatccggccagtgcgaaagtgttttcacggtttgactcccttaaggaggcggtgaagaattatacaatcgaagccaccccagatgacagggcaggtgtcctacaacaggggggaatgtttgtgttcaaaggtaaagaactgttgtacgcaaggaaagacgagggcacaggcgaccatgcacctttggacgatgtgctcaatatctgctgcaaagttcctgtaacctaacccgacggcttgtcccacagctcagtaggtacttggaaagcactttcggcgtccttgattcctgaacttccaggatcgcctgctgcaagagtgtcttctccaccaatgtgccgatattttcttttgagatgcttggtttactttgatatctttttggtgatggatcgtgagttgttggcttgttgcattatgaattgcgtactgtaagtatccagtttgctgtttagcacttatacaattcgaaagcaaagttcgaagtcctggctgcctggctcttccttggagatggaagtttttgcacttccagaaatatcgggaacataaagtccatgtgatcttttgtgcctttaaaattttggatcgtttcctaatggaaatctgttccagttttattgacatcagaaatcctatctcctgtagtcctgttattcagcgtctgagtggagctataaaattgatcttatcatt

SEQ ID NO: 16987 - DNA, 478 bp, Zea Mays
accaaccaccgtggccccgtcaaatttgccattcctgtctcggttccctcttcccggcgcaccagcctacctcgccgacgccaggccgccaggccgccggagacatgaaccagcccgtgcagaagaacaccctctacgtcggtgggctggcggaggaggtggacgagaaaatcctgcacgccgcgttcgtgcccttcggtgaggtcaaggacgtcaagacgccgctcgaccagtccacgcagaagcaccgctccttcggtttcgtcaccttcctggagcgcgaggacgccgccgctgccatggacaacatggacggcgccgagctcttcggccgcgtgcttaccgtcaactacgccttccccgagcgcatcaagggaggggagcagggatgggctgcccagccaagctgctgtatcaaatatagacaccatttttctgcgatctagagactcatgatggattggcgtatgttcatgac

SEQ ID NO: 16988 - DNA, 1936 bp, Zea Mays
ccatggcgtctcttctgtttccttccttccgcaccccttaccgatatcgtcgctcttccccttcttgtatttcatgataagagacctgaatgtcgctaaaagaacagaagacatcgggttctacgctggttttgtaggtgcctcattcatgtttggtagatgcttgacttcaacagtatggggcatagcggcagaccgcgttgggaggaaacctgttgtcgtgttcggcatttcctctgtagttgtgttcaacacattgtttggtctgagtgtcaactactggatggcaatagctacccggtttctgcttggtgccttgaatggtttgcttggaccgataaaggcttatgccattgaagtttgccgacctgaacatgaagccctagcactatcacttgtcagcacagcatggggaataggtctcattattggtcctgctcttggaggctaccttgcactgcctgcagaaaattttccaactgtcttttcacctgactcaatctttggaaggttcccatatttcttaccatgcttatgcacgtcaatcttcgctgcggttgttctcataagctgcatatggatgccggagactttgcacaagcacaaagtccatgaaaatagaagtcggaacattgaagctttggaggcccgtctgattgattcaaatgaaaaggttgaagaaagtggtagtttagatagtaagaagagcctattcaggaattggccattgatgtcatcaataattgtctattgtgtcttctccttccatgacatggcttacacagaggtgttctctctatgggctgaaagcgacaagaagtatggtgggctgagtttatcatctgaggatgttggtcaagtgcttgcagtcacaggtgccagtcttcttgtataccaactctttctataccccagtatcaataaggttcttgggcctatcaaatcttctcgagttgcagctatcctgtgcatacccatcctctttgcctacccctacatgacgtacctgtcggaacctggattatcaatcgttttgaatattgcgtcagtgataaagaataatctcggtgtcaccatcattacaggcactttcatccttcaaaacaatgccgtgcctcaggaccagcgaggcgctgcgaatggactgtccatgactgggatgtcctttttcaaggcacttgctccagcaggagcaggcattgtgttctcatgggcgcagaaacgccagcatgcgtttttcttcccaggtgaccagatggtattcttcctcctgaacgccgtcgagctggtcgggcttctcctcacgttcaagcccttcctggcagtaccagagcagtacgatacgagatagttagacgatctatctatctatacaagttctggaacgttcaagacgattcatcgtgtgcggctgtaccagtgaaggagaagcgccaaagcgtgtgccctttacgccgcggaaggtctacaaacagggacatactcctatataggaagatgcaatgcaagagctgtggtgtacttttaattgtaggtgatgtagtagtgtatggtagtatcagcattttctgcattcatgaaatgcacacgcaggtggtgggaaatgtgggcatggatcgagagtcgctgcgctgttaagtagcaataaatgttaaggttcagtgactcgctgttatttgttgggaatgaaattactgggcatctgtaccctcgttgttttatatctggctgttggattctattatttcttcagagtaatctttttgcatcatgtcaggaacacgatgaagagactgggagagggcattatgactcctgaaaatgcaatgctttttaattacaccccttccgaggtccagtcttcttccggcgtgggatggtttcgggccgccacctggtaggtttggtttggcccatgcttcggattttgtatttc

SEQ ID NO: 16989 - DNA, 1940 bp, Zea Mays
acggcccctccccggcgacctggctggctccgcctcctccgttccgtctcatcgctccttcctcatcatcagttgttgccaccacccttccctccctccattcctctccgcgtcgccccacatcccatcttggcctggacacctgggctgcctcgctccgtttccgcgctcgcggacgcgccgagtcccggccgaaccaggcgcccgccctccctcccgccgctaccagcgtcgatctgcgaccgaagagcgattcagaggcagggtgagggggggagacgagttcttgtcggtttcattcttggccgccgacttcacatgccaacaaccccaaggagcagaagccaggctaggaccactaggccttggatcttgtcagggatggactttgctgattcgagacggaagcctaatttcacggggaagattgccgtggctgctgccctcacggtcatgtgcataatcgtgttgaaacagtcccctagtttcagcggcaccagcgtgttctctcgccatgaaactggggtgacccatgtgttagtaacaggcggtgctggttatattggctcacatgctactcttcgtctccttagtgacaagtacagggttaccattgtggataacctatccagagggaacatgggagctgtcagagttcttcaacggctatttccagaacccggaaggcttcagtttatttatgctgacttaggcgatgccaaagctgtgaagaaaatattttcggagaatgcatttgacgctgttatgcactttgctgctgttgcttatgttggtgagagcacaatggagccactcaggtactaccacaacataacatcaaacacattgacagttcttgaggcaatggcagcatataatgtaaatactctgatttactcgagtacgtgtgcaacctatggtgaacctgatacgatgcctattgtagaaacaactcctcagaatcctatcaatccatacggtaaggcaaagaagatggcagaggacatcatcctagattttacaaaatcaaagaagcaatcagacatggctgtaatgatcttaagatacttcaatgtgattggatcggacccagaggggcgactaggagaagctccaaggccagagctacgcgagcatggacggatatccggtgcttgctttgatgcggctttgggaatcattccagggctaaaggttcgtggaactgattactccactgcagatggaacttgtattagggactacatcgatgtcacagaccttgtagatgcccatgtcaaagctcttggtaaagctcagccaggcaaagttggaatctacaacgtcggaacaggccaaggtagatcggtgaccgagtttgtagaagcttgcaagaaggcaacgggagcttccatcaaggtcgaatatcttgcccgtagacctggagattacgccgaggtatacagcgacccgtcgaaaatcctcagggacctcaactggacagcccaatacacggatcttggccaaagccttgcccaggcgtggaaatggcagaaggcgcacccgaacggatatgcatcggcctgattcagagctcaaaaggttgagagactcatcactcagattcatccaaggggtccgtccatgtgcagtcaatatagccttcagacaattggttcttcaccatagaaaaaacgtagcaacagcaacagaagagtcgtgattcttttattgcagagctggaagaagacaagagtatcgcagggagaatacactacctgttccttgattagtttcatttatatgtataggtcctcttttcgttggtggcattttagtacaatttggtgtaataacacaaggaaatcgtgttgtagacagggtagatcgaatctcgtgtatcgaccttcgtcttcttcgtggtggtagaatgaaaggatatatataaataaaaaaaaaag

SEQ ID NO: 16990 - DNA, 721 bp, Zea Mays
catccaggctgcttcgtgtccgtctccgtctccttccctatgaccctatcacactctcatctcaccccaccccgcgccctggcttttctatcctccattattctcccctccccacgtaccccacctccctctacatataccccactctcatctcatctcacctcctcctcaacgcaccacccacccacccacgccaccgtgtggtccgagtccgaccctgtgactgtgagtactactaccccagcatgtgctcaggacctcgcaagccgtccacccctcctctcccggcggagacggcgacggccaagaactcctcggtgatggcgacggcactcctgctcgagctggcggcggcggacgacgtggtggcgttcaggcgcgccgcggaggatgacaaagccccggccttggacgccgtgggccactggtacggcccgtccgccgcgggcgcgggcgcggccgccggccgcccccgcctcgaggcgcgcacgccgaccatggtcgccgcgctctacggcagcacggcggtgctggcgtacgtgctgtcctccgcgccggcagaggccgcgcgcgcgtcgcccacggacggcgccacgccgctccacctcgctgcggccggcggcgccccggccgccgtcgcggccgcgcacatcctcctcgccgcgggcgcgtccgcggacgcgcgcgccttctcgggcctccgcgccggggactctcttcc

SEQ ID NO: 16991 - DNA, 839 bp, Zea Mays
ctggtatattgctgggctgactctaactgtctggtctggttttcaccccagaagggccttttttgtggtgctcaaaaaaacggtcatccatagaggatgtaaatgccaaactagacacgattaccagtgagccattgcgacatgaagaaaagagaaaatctcgaaggaaaatatctgcaagactgaattcagtatcttctgagcacacagatatcgttgttgagactgagcacaaagatgttattgtttctttggccggttccacttcaaatgtctcaatggagcagcggacaaatcaagagcaggatggtgattgtttctcaaggaaatccaatgaaaatcagatattagggaggaggtctctaagacgagctgctgaaaaggtcgtctcttacaaggagatgcccttgaatgttaagatgcgacgaccttaactgccaggaggatgaccatggtgacatgttgtagcttgctgtcctgactagccttaagcaggtatccttctgtttttttgtgtgctccagaatcagtgattgcttgcacatctcgttctacttcaaacgaaccaccaaacagtggcgaagctagagcaaacttgaaggttgtacaattgttttgtgggtgcatagacatcatgtgatcgttgtgtatgtaagatgaaagtttgttctttataattagttctgcactttttagactccaacagcgaactcgttaaatataggggttggtcagctcctttctcttttcaacaagagactgtaaaaagtctgtaatacctaaaattctattttaggaaatgtcttctaaaaatgggttccccactttattctttttgt

SEQ ID NO: 16992 - DNA, 448 bp, Zea Mays
tggtagcggcaagaagggcgtcgccgacgacatggcagcgtccaatcaggagctatgaccgtgccgatgggagagacgagacaggcatggggagtgggtgcacagcgccacacacttcacatgcatgaagcttacttttgctcggctcctccttcctgatgctgttgttcgatgaacctcttgaatagtgcttgccatcatcgacccatgggctagctagctaggttttgtagattgttgtcagcgagtctgcttattgtgtgctaggtggcctggccgctgaaaagagccacccaaaaaaatgtgtgtaattttcttgtatatatattctaagtgctatgatattctctctatccagcaagatgtccactcactagcagatccatgcccagtgtttgcttcttttcttttatttctttatggtgcgatgaatgatcagatttgcctg

SEQ ID NO: 16993 - DNA, 2575 bp, Zea Mays
gtctactaccttctaagtctttggtcaaggctggtgacatccgtgccttacttgaaaggtgaaacaccaagtcttcttgatgaaactgttcccaagatcacagaaggttttatcacttccagaattaattctgttcaggccatccttgctgacaactcactggaaaatcctttggatagtgtggaagttctccaggaccagctggagtttcttcctttcctttgcagattccagtaccaaagtagtagtctgtacatcataaacatcatggaacctcttctgcaagcttatacggaaaggtccagattacccgctcctggtgatgctgatgagctgtctgtcattgaaggccaaattgcatggatggttcacataattgcggccattgtcaaagttaggcaggtaacaggtgttagtcaagaaacacaagagttgattgacgcagaactctctgcccgtgtactacagttgataagtgtgactgatacaggagcgcacacacagagatatcaagaattaagtaagcaaaggcttgaccgagctattctcatttttgtacaaagtttcagaaggtcatatgtaggagaccaagctatgcattcttcaaagttgtatggaagattgtctgagcttctaggacttaatgaccatttaattctactcaatgtgattgttggcaaaattgctacaaatatgaagtgctatgctgagagtgaggatgttattgatcatactctgtccctgttccttgacttggcaactggctatatgactggaaagctgctgcttaagctggagagtgtaaaattcatcattgcaaatcattctccagagaatttcccatttcttgcagaatacaaatgttcacgtagtagaactacgttctattacatccttggctccttagtcttcatggaagatagccctgtgaaattcaggactttcatggaaccacttcaacaggttgcattaaacctggaggcaactcctgatgctgcttttcggactgatgtcgctaagcgtgcatttgttggttggatgagagatctacgtggcatagctatggcaaccaacagccgcaagacatatggcctcctatttgactggttgtatccatctcgcatgccacttctgctgagagccatctcactttgcactgatgaaccagaggtcaccacacccttgctcaagttcacgtatgaatttgttttgaacaaagctcaaagactgacatttgattcatcatcaccaaatgggatccttttattccgagaggttagcaagataatcgtggcttacgggtcacgaattctattgcttcctaatggcacagacatttatggaagtaaatacaaaggcatatggatctcactgactgttctttcaagggctttgtgtgggaattatgtcaattttggcgtatttgagctctatggtgacagagcacttgctgatgcccttgatatatctctgaagatgaccctctcagttccattatctgatatattggcattcaaaaagctgtcgaaagcgtactttgggtatatggaagttctgttcaacaaccatatcaagtttgttctcaatttggacacaaacacattcatacatattgtcagctcactcgaatctggcttaaaaggtctagatgcagggatatcatcacagtgcgcttctgccatcgacaacctggcagccttttactttaataacattacatctggtgactcacctccatcaccagcttcagtaaatctcgcacgacatattggagagtgtcccaatttgtttcctcagatactgaagactctttttgagatcatgctctttgaggatgctggtaatcagtggagtctgagtcgaccaatactgagcctgataatgaccagtgaacagatgttcagtgaactcagagcgcacatattagcatcacagactgtggaccagcaacaacgcctttcacagtgcttcgataagctgatgacggatgtcaataggaacttggaacctaagaatcgtgacagattcactcaaaacctgacagcatttagacgtgattttcgactgaagtaacagctccttggtaccagctatcagtttgaaggtgttcctgcatgatgtaaatactccagttaccttcttttttggaaccacctttctgtgggttgagaaaagaagagcttgtccttaggtttgccttggattggctgaagatggtcttgttgatgcatgtggtagtgaaagcagctgtaaatttcatagcatgtcattttaatcagaatggtgaaaggtggagattgtttcttttgttttttattttatattgcatccctttagcatgtacagcaaaattggtgctagaacaggggtggctgtttgcccaatttgttaagtgggaggcagtcatctcagatataattcatttgttaagaagtcaacgaggtaaaggatgtaaatgattccgttggctttgctgaatatgaaagttgaacagtaagaaggatggctcagttgcatccgctgtgcagattgaactgttaatgataacaatttcttttttttttgtctctgtttg

SEQ ID NO: 16994 - DNA, 1942 bp, Zea Mays
gaacattccttggtgagagcacacaaataccttatacaaagcagcaagagaagaaggaagacaagtcagacaaaacagaagacgagaagaggttcctaccataacacttaagcaaggaatcctgggttgtgacttgtatattgtcaaggatcacttggatgtggtaaatgctatactggacactgatgatagctgcataaggattgtgcgaaaaaacgggaagacatccctacatactgctgcaaggattggataccatcgtattgtcaaggcactcatagagagggatccaggaattgttccgatcaaggataggaagggacaaactgcacttcacatggctgtgaaaggcaagaacacagatgtagtggaagagttactgatggctgatgtttccattctcaatgtgcgggacaagaagggaaatactgctttgcacatagctacatggaaatgggagaattttgggattatgaaacaccgcagacgtggcttcgacgaaacggaggcgtaggcgagggattcgacattatgaaaaaccagagaagatactacactctaaaatggacatgaatcctctattaccagggaaggatgatgtttattacactgaaacagacgctgtctcacatccgttacccgcactagacgcacccagtctttctacagagagaatcgcgccgttcttgaatctgccattcgctgaatctgccattcgctgctgttgtttctggacagtgaagcagtattccggacagtgaacaaaaatctgggaacacatttcattttcactgtcattggctaccagagtccgggaacaaaatctgggaacaaaatctgggaacacaaaaatctgggaacaaaatctgcctttggctaccagagtttattgctcccatatcattcgctgtccatttcactgtccattcgctgaacacaaaaagctgggaacaaactcattttcccagtgaacaggtagcacaatttagttcacaaaatctgggagcacaatttagttcacaaaatctgggagcaataaacaggttgaacaggtagaacaaaatctgggagcaataaactgccatcccagaacaaaattcgcagctcacatttcagttcacaagctagttcacaatttagttcccaggtagcagtttcacaagctatcacacaagctcacatttctgggagcaaaaaacaggtggcgtagtagcagtcgtgtgttcatcttcatttgcagcaacgacaagttcacggcttggtgcttcatcttcatttccagctacaacaacgacaagccacctgctttggcgcggactagggttgtggtcgcagcgccgccgccacctgctttggcgcggggccgcgagcagcaagggagaagacgcggagtttggagagaaggaggtgcagcgccgccgccacctgctttggcgcgggaccacgggcagcagatctccgggcagcaggggaggagactagcaggggagggaaatggagattgaagaaaatgagatggaaggaagaggcttgacgggagagagaagaaccttgaagagagaagaacggctctggacggcagaagaaaacggcgcgtgggctgatagcgacggaagatcattattcgttctcctgaacgactaataacgatgggatctggaataacaggagcctgatggttgcatcagtagagttgaccacttctcagtattgcgagatgcatcttacatggtcaagaagataattcctattctgaactacttgctcgtgttgatcagttttgcctagtcccagtaccatacaaagatgttcaggtgaacctgaaaattcttctcaatttgacttgcaagctttctgatgcgagcactaaatagtgatttttttgcaattttgtatgagccttgtttgagtgaatctttcctttgggcagcatggatataaa

SEQ ID NO: 16995 - DNA, 173 bp, Zea Mays
ttttggcccaagccgaagctgctttctctattgatgacacgaaggatccctcggccgaagcaagcttagttggcggaaaattctttactgacatttgggaaaatggcagccgagggatagcccacgagataataaaaaagagcgaaaaagatactcacgatacaagagaagca

SEQ ID NO: 16996 - DNA, 2499 bp, Zea Mays
ggtggagtagtcgtcgccacatcccgcttcccccgtacgccgtacccccgcagctcgctctcgccttctcctccggttcctgctgcaacctgcactccgtagtccgccctttctgcccgccgccggccacttcaagactactccccgccgcgttacctcctcctcgtcctcctggggttacccagctctgttcccctttcagggaacgccttgagaggcggggcgggtccttggtccggaggcgcggcgacggcgagtgatttttgttcgccagagggagagttttttttttcaccgggtttggtgggaagtaaggaggcggccgcgagtggcgagacgttcacgggttagatctggcggtacggcgtcgcggatctgagcgaggtttcggtggagcgatcaggaggtggtcactatcttcgcctcatttcgagtagtttgggcgcctgtagtttgcctgtttccttttcggtgtctgatcaagaagatgatgtgctcagagggcttctagttgttgctgatatcttgtcttgtgttgtatcacccggaagctggaaaggagcgcatcactcctgctctccccttttactccttggttacttggtatttcttggatatccaggctggaaggggttagatccagttcctgcggccctagtaataaggtgcacttggggaaggtgccatgacctacttccccggtgaggtggtggagcacattttcagcttcttgccgtcgcacagcgaccggaacacggtctcccttgtgtgcaagttgtggtacgatgtcgagaggctgagccgacgaggtgtgttcgtggggaactgctacgctgtgctccctgagcgtgtggtgctgcgattccccaatgtaaaggcgctgacggtgaaggggaagcctcactttgcggacttcaaccttgtgccgcctgattggggtggctacgcggggccatggattgaagcaacagccaggagctgcctgagtcttgaggagctgcgcatgaagcggatggttatctctgatgagaaccttgaactgctagctcggacattcccaaaattcaaagtcctcgtccttatcagctgcgaggggtttagcacggatggtctagctgccattgccaatcactgcaagctcctgagggagttagatttgcaggaaaatgacgtggaggaccgtgggcccagatggctttccttccctgattcctgcacctcattggtttccttgaatttcgcttgcatcaaaggggaagtgaattctggtgcattggagagacttgtcgctaagtctccaaacctacgcagtttgaggttgaatcgctctgtttcagttgacacactctcgaagatactagagcgaaccccaaatttggaagacttggggacaggtaatttgacagatgagttccaagctgagtcctttgtcagacttactagtgctctggagaaatgcaaaaggctgaggaatttgtctggattttgggatgcttctcctatctttgttccgtttatctatccactctgtcatcaactaactggcctaaacttgagctatactcccacactggattattctgatctgactaaaatgatcagccgctgtgtgaaactccagcgtctttgggtactggactgcatttcagacaagggtttgcaggtggtggcctctagttgcaaggatctacaagaactcagggtgtttccatcagaatttaatgttgctggtgcttttacggtgacagaggagggacttgttgcaatatcatcaggctgcccaaaactgagctctttgctgtatttttgtcaccagatgaccaatgaagcactaactactgtagccaagaattgcccaagtttcatcagatttagactctgtatccttgagccaaagaagccggatgccatgacaggccagccgttagatgaaggctttggtgcaattgtccgtgactgcaaaggtctaagacgactgtcaatgtcaggccttctcacagacagggttttcatgtatatcagaatgtatgcgaaataccttgagatgctttctatagcttttgctggagatggtgataaggggatgatggatgtgatgaacggatgcaagaatctgaggaagcttgagattagagacagtccatttggtgattttgcactcttgggaaatgttgccaaatatgacacaatgcgatccctttggatgtcatcatgcaatgtcacattaaaggggtgccaagtccttgcatcgaagatgccgatgctcaatgtggagatcatgaacgaactagatggaagtagtgaaatggagaaccatggtaacctctctaaagtggataagttatatgtttaccgtacaactgctggagtgagggatgatgcaccaaattttgttcaaatattatagagctagctgcaattaccttggtatcttcccttcctacgagcatgcctgggaccagggcaacagtggtaagttcttgaatcgtctcccttttg

SEQ ID NO: 16997 - DNA, 1562 bp, Zea Mays
ctcgccactgccgtttgatccctcccgctcccccgctccgccatgcgtcccgccgtcctcgctgccctccttctagtggcagcggccgcctccacggccgccgcactctactcatccggctcccccgtcctccagctcaactccaacaacttcaaatcgaaggtgctgaactcgaaccgcgtggtgctggttgagttcttcgcgccgtggtgcgggcactgcaagcagttggcccccacctgggagaaggctgccggtgtgctcaagggcgtcgccacggtcgcagcgctcgatgctgatgcgcagcaggcgctcgcgcaggaatacggaatcaagggatttcccactattaaggtgttttcccctggtaaatctccagtcgattatcaaggagcaagagatgtaaagccaatcgtagagtttgctctgtcacaggtcaaggcccttcttagagataggttgagtggtaaggcatcagcagggtcaaatggcaagacatctggaggttcaagtgagaaaaatgaaccaagtgcatcagtagaattaaattcgcgtaacttcgatgaactcgttgtcaaaagcaaggacatttggattgtggaattctttgcgccatggtgtgggcactgcaagaaattggcacctgaatggaaaaaggctgcgaagaacttgaagggccaagtgaagctaggccatgttgattgtgatgctgaaaagtccttgatgagcaagtacaaggtggaaggttttccaactattttggtatttggtgctgataaggagagcccgttcccctaccagggggctagagttgcatctgccattgaatcctttgcattggagcagttggaagccaactctggcccagttgaagtttctgagttgactggcccggatgtcatggaagagaagtgtgcttctgctgccatttgttttgtatcattccttccagacatcctcgattcaaaggcagagggaagaaacaagtaccttgagctcctgctctcggttgctgagaagtataaaaagagtccatacagttttgtctggacagctgctggcaagcaagctaatctcgagaaccaggttggagtgggcggctacggctatcccgccatggttgctctcaacgtgaagaaaggtgcatacgctccactccgtaatgccttccagcgcgacgaaatcatcgagtttgtgaaggaagcagggcgcggtggaaagggaaatcttcctctgaacgttgcgccgacagtagtcacttccgagccgtgggacggcaaagacggagaggtcatcgaagaggatgaattctcccttgacgagctcatgggcgacagctcctcagtaaacgatgagttgtagttctgacgattctgtaactgatctgcgtgccgattagcctgactgtaaatctgaggaactctgatgttttaaaaactcattaaattttcagattttggatgctagaattagaatggttaagattaaagagaactgatgtgataggcacatcttttttttacgaaaaaaagccccgtgccattcaaccagccattatcact

SEQ ID NO: 16998 - DNA, 2331 bp, Zea Mays
ctggatacagccttagtggatagaagagagtgaaacttggagaaccaggatggagggaaaggtactatgaagagaaatttggggcaagaacacccgagcagattgaagaaatacgcagagatgttgttctcaaatacacagaaggattgtgttgggtaatgcactactattatgaaggggtatgctcatggcaatggttctacccttatcattatgctccgtttgcttcggatctaagtggattgggccaacttaatattaaatttgaacttgggacaccattcaaaccttttgatcaacttatgggtgttttcccagctgcaagtgcccatgcgctaccgctacagtatcgacgattgatgaccgatccaaattcaccaataattgatttttatcctacagattttgaagtagatatgaatgggaagagatattcttggcaagggattgcaaaactaccgtttattgatgaagatcgtttgttggctgagataaaaaaagttgagcatactttgacgcctgaagaagcaaggagaaacagtatcatgtgtgatatgctttttgtgaatgggtcacatccactttcgccttatatctactctctcaacagcaaatttgggcatctgcctgacaaaaggagaaatgaaattaaagaaaaacttgatccttctgctaggttaactaagctcaatattgttgttgttcgacaaagtttaacacctgctattattttgtacagtggaggaatgaatggatacataacactttgcagtggggatccatgccctcctatctttaggtctcctgtggacgggctggaggatattatggacaatcaagtgatatgttcaatctacaatcttccagaccatcataagcacatagcccagccgccagttggtgttatcatgcccaagaagattgttgaagccggtgatctgaaaccacctccagtgctgtggcatgaagatagtggcaggcggcctcatgataatagcaacaggcaaaacccatctggtgccatatcaggccgtcaacttggagaggcagctcaccgacttgtcataaacagcttaaatgctcagggtagggggcaacatagtggcacatcaatgccatatcgaactataatgaatggcttgcatcatctggatgtagcgtcccctgtcagcaatcaaggcatgcgtccacaagtggggcagtctgccggacctcctggttggtatgttcctaggggtagtgtatcaaatggtcaaccaccagcttatgcatcatcaggatcaggtcattatcagtatgaaagttcggggcattcacaatatgaacaaggtaaccatggaaggcaacaatctcacccatatgcaagagatggcttccatgatacacgaggaagggttccacctgcatatgggtaccagcagagcaacatgtatccatcgggtcctggattgtatgggcaacctccatcagcatatcctggggttcatggtggaggctaccaaccccctccatatggcggaggccagcagtggcagcaacaatcatatagttcgtatgccgtgcgaggcccctacggaggcaggccaccacccacaagggctgattcagggtcacagcaaccacagaaccgttatggtgctttagacagaagtaacaaccggaggccttcatctggatacagaagataatagtttgtgacccagtttatgttataactcaaagtttgttatcagtaaagcttcgagtaactcagctaaagcataggcggaatagtctgctaagtcttgtgaccttcaagcagttagggggtggccatcaaagatattgggaggcaaaatttgtatgctagtgcagactttcaggtactagcggttttgatcgccattgaagcagctaggtttgcggcatctcagaggttttgtgaagcaagatttgtatactactgttatcaacgggccatcaggtactggtggctggtcgccattctttatctgtagctgccatttgtttagaagatgtcataaacggccctggggtttaaataggtcccattgagaatatttttgaaggacgtttactctgagacttgacaagttttgggggcattttgatatcagataaatgtatgcaggagtgcagttttgatgatgtgtgtattccaagtcattaattaaagtgtgacgtgtctattgccaggcgaggaaggaaacgttacgctttgcacttatcccgttccaaattacaagtgatttcaagaaaaaaaattcagctttcttggagagtcctaaattactacctccattctcaaatattatttgttgttcgctaatt

SEQ ID NO: 16999 - DNA, 2776 bp, Zea Mays
gtccatctcaccgtctccttgaaacgcacccgagccaggtcgagccgtcgagtcgagtcgtcgacgacagcacgcggcgggcggaaggggacgcagacacgcagttgcaggctcgcagcagcaagaaggaggcggcgtggaaggggaggcagatgcgggaggcccaccgcagggtcgtcgcaccagatggacacgccggataggccccgcgccgccgccgccgccgggttcgaggattctcctgtcttcaatttcatcaacaatctctcgcctataccaccacctaaacctttagactcagcacataatgtgcagctattcaagtcatcagacttggcacctgtttcttcgatctttgcctcaccacatgttaatccagtgaaggaaactaaagttttgatcagggatgaatctgttcaccttcctcaagaattgcactcgcctagcagtgtcaggactcgaatagacacctcaggctcttttagaatgatcagatgcaaagacattgtgtcggacaattgcaatatcacttgtcaactaaacgaggcatctattgattcttctgatcatacatcaaactctacaggccaattgactcaatccatacaggatgctgctggcagtatggaaagcgataaggatcaatgcgatgccaataaaacagaccttaccatatcccaggagtgcacaggcctagaaggtatgaaccttgatgagagtggcccagacaaaatggattcgtcacattctgggattgttgttcatgaaaaccagctatctgaacaaaacaatgacgaacctgcagcatataatgagggttacattattacacaccaatcaactagtgatatgctcactttagccataccatctggaacagaaacacaaccagtgaatgatacacaaatggctgataacccctactcttgtgaatccttgttggatgatcagtcaagtggatattgcacccagaattctgtgcatgaaccccatttgtactggactggggcagttgaagggtctgcagtatcctatactccccaaacactccctggtgctttgcaaagtcagctgatgccatgtaacaagctcagtgaaccaaaagattacgtgcctactgagcaaaatgccttgtcacagcacttacgtggcatgcgtaggcgcagccttttcaatgaaaaggctggaattagtaataaaggtgtagacaaaacttcggatcatcatcctgtaaattcaactacccccaaatgcaaaactatttctggtgacaactcaaagcctctaagaacccctccatgcgcattacctggtattggcttgcacttgaatgcccttgctacaatacctaaagagaaaatagtccctcgagagattcagtctactataaatgaatcaagtaacttgataggccctgctggatcttctccagcaccttttgagcaaaacattataaatgatgatttcactcaaacaactgatgttgcaactgccgaagcttctagtcagggtagtcccaagaagaaaaggcataagtttgacaatggtgatggcacttcatgcaagcgttgtagttgtaagaagtcaaaatgcctgaaactttactgtgagtgttttgctgctggagtctattgttctgagccttgttcgtgtatcggctgtcagaacaaccagagtcatatggaaacagttctgtctacacggcaacagattgaatctcgcaatccattagcatttgctcctaaagtcattcatacatctgagcctggtatggacttaggggacttttccaataaaactcctgcttcagctcgtcacaaaaggggatgcaattgcaagaagtcgtcgtgtctaaaaaaatactgtgaatgttttcagggcggcgtgggatgctccgtaagttgcagatgcgagggctgtaagaatgcttttggaaaacgggagggggcttctgtgttaggcataggggaacctaaacagggattggaagaaaagtatgtttgtgtgaaagaagaaaaaagtgaaatcgataaacagcttgttgtctaccagactactgacgctgctcctgctgaaaatgtactgaccacaccttccatggtggagtgcagacccttggcttgtcttccacccgcaagctccaagaaaagctccaaaaaaccacggtcttcaacaaagctcacaggacatccttctcggccgtgcaacttacaagctcctccaaagaccgacgttgtgctctccccattcgaaaactacgcggaaatggtcctcggtgatagcacatcagatatcctgaagggaaattcatctcctcatacttctgttaaagttgtgtcaccgaataagaagcgaatctctcccccacggatgggtatcgggctatctccaatctgtaggagtggcaggaagctgattctcaagtccatcccttctttcccttcccttggtggtgatgtaaacaacgaggatccgaaggccaagctcccagcgccttgaatttatcatgttttgtgtcactcgtggcccttcccgttggttctcgaaatcgcccacgcgctgactgcaccagactgtttctaccaccataccatcagatagtggatggacaaccaagcgtgcaccgtttcatcatttgtgtaattgtgtttgcttcgattaataattattcacgtactgctataataacccactgtgatggcagaattctacctacctcccagaaccaccagtggcatttggtttgctggaacgtgcctgagcatgtctttcatta

SEQ ID NO: 17000 - DNA, 1104 bp, Zea Mays
aacacagaagcgtcgctcacatcaacatcacatgttcacatccatcttcgaaccccttcttcctctcttcagcgccgcacccgcgcccgcgccgtcgaaggcggcgcctagtctcgaggcttgcacgctgccgcggaggatcgcctcgctactgcgcgccatcgcctccgatctcctctatctccaatctgctccctcatcgccgtgcagtggaaactaggggaccgattcctcttctcgtttgtcgcatatttctcgctgcgtgccgcgtgctgcggtgagtgattctccaagaattctggggacgctgatctgagtccgcacagaacgcagcggcagcaatgatgatgtcggacgatgacgatgctgagccccagctcaacgcggtggagggctactacttcgttgactccaagaacgagaaggagcctgtctgcttctccaccctgcctttctggttcggggacactgatgatcttcctgacggcaagaagaagctggtgctgcgcgggactggtgacccgggcgtcaaggtgtacgatgaggtggtggcctgcaggctgggtctcgaggggaaacaacccgagtttgcagtgctcacagcaaaaggcagacgttggatacgtctcattaggcccttgaacagctacgaggaaatgatcaggactgtgttgatcacagcgcagatgctgcattttctaaggaggaagcctcatgagccagaaaaaaccttgtggaaccacctttgcaaagtttttaacaagtttgacgttccaccctcagaggacgatttcaggaaccactgctcactgatgaagcagtttgcggcaaaagatcctgtcttagcaaaatcagagattttgcgagtatttattgaaggaaaatctagaaaaaaattcactgaggttggtgcagaccatattgatgtcaagcagccgttcatcactgatgatgagggcatagatgaaatgaatgtggaagatgtcgataatgaatctgatgaagatgacgatgaatatttgtttgattcaatatgtgctatttgtgacgatggaggagacatattatgctggatcaagagatttagtgttttctattgtgaca

SEQ ID NO: 17001 - DNA, 2238 bp, Zea Mays
tggaaacaggtaggtatacgagccaaacaaaccaccaccaaaaccctcctcccgtcctcgctcggtccctccccctcgctccggccgccacaccacgcgggcacgtcaatggcgcgcatcgtgtcacgagcgctcccgttcgcctcgcgctcgtccctccgcctcccgctcccaccgcccttccccggcgcggcgctggtccgttccgccgctgcgggttcgcccctgcccccagctgccgaggctgcactcgcggcctcgctgctctcctggcgcgggcacacggccacccccgagtcctcgatagcggcgccgccgccgttcgcagggtttctcgctggaatccgcaggttccgcaagggacggcgcggacaggcgtcggcgaagcggtcgcagcctcaggacgccccgccgcccccgcccccgcccccgcctccaccgaaggagagagagatcgaactcgtcgctcgcatcggcatcgaggaggacatgcctgacgacccagaagtgctgaacattgtagaaatccttaagttaaatgtcccaatggcaatgaagattgcacttgatggacttctggattccagttacagcacccgagatacctcaataagtgatgttgggaagtatgataaggttgaggtttctgtattgctatgcaatgataacttcatccaagatcttaacaaagaatggagagatgtggactgcgctactgatatactctcaatgtcccagtacattccagatcttgatgttcccatcctaatgttaggtgatatagtaatatctgttgaggcagctgaaaggcaagctggggagaaaggtgttacacttcttgatgaagtgcgggtcctagtggttcgtggcatattgcatcttcttggttttcaacacgagtcgagcaatgaggctgcagcagaattggagaaggaggagcagctcattttaaaaagtctaaggtggaaaggaaaaggtctagctaaaagtgttctggattcaagcaagcctcaaacagattcattggatggacaagtgacaaatgacctgaagaaagctggcagccttagattttacaaaccaaaattcaaatatattttttgtgatatggatggtacgctgctcaacagtaaaagtcaagtttcagcaaggaatgcagaagctctaagggaagctaggtcaagaggagtaaacatagttattgccactggaaaggcacgtcctgctgtaatcgacgctcttagtatggtggacttatctggaaggactggtattgtttcagaatcatcacctggtgtattccttcaggggctgttggtttatggtttggaagggagacggatttataaaagaaatttggaccaagaagtatgtagagaggcactctcatattctatagagaacaagataccatttgtagcatttagtcaggatcattgttattcgatgtttgaccaccctttggtcgattctctccattacatataccatgaacctaaggctaaaatagtgccatctattggtcagcttttagaaacagctgagatacagaaagtattgttccttgaaactcctgagaggatttcgtctgcactgagaccgtactgggcaaaggcgatagagggaagggcccatgttgttcaggcacagcctgatatgcttgaacttgtaccacctgcaacttcgaaaggcaatggtgtgaaggttctgttgaaccacctttccattagtccagatgaggtaatggcaattggtgacggagaaaatgacattgaaatgttgcaactagcttcgtttggggttgctcttgcaaatggatctgacaagacaaaagcagcggcaaatgtaattggcgccacgaatgatgaagatggagttgcacaggctatttatgaatatgccttctaagagcaacgaatcattttggactgggttaatttcttctgatttcccatttttcgtggactcaacacagaacaattgtagtggttccaacttgcaagtacacaccgctccaccggagcgcaatctcgctctggtgttacagtttctgaactgtttgcaactgtaagacattttttagttggcatgaaccgaaatccagctaccagctcgacatactcttggctggatatgtaaccgctaaccgaattactatttttttctcatttttttatgcaaaagctttccttttttttacccactttgtctcttcgatccgaccacaaaatagacaag

SEQ ID NO: 17002 - DNA, 1128 bp, Zea Mays
gttaatcccgctgttctgtcttctgagagtcaccagagggcagcatagctggaggaactgctggtgttgtggtggaaacagcactttacccgattgatactataaaaaccaggcttcaggccgctcgaggtggaagccggattgaatggaaaggcttgtattctggattagctggaaatctcactggcgtccttccggcctctgcgatatttgtcggggtgtatgagccaactaaaagaaaattactggaaacccttcctgaaaatctgagtgcagttgcccattttactgcaggggccattggaggtattgctgcttccctcgtccgtgtccctacagaggtggtcaaacaaaggatgcaaactggtcaattcaagtctgcacctgatgctgttcgtctcattgttgctaaagaaggatttaaaggactgtacgctggttatggttcctttctacttcgagatctaccatttgatgccatccagttctgcatttatgagcaacttcgaattggctacaaacttgtggcgaaaagggagttgaatgatccagagaatgcacttatcggtgcttttgctggcgccatcactggagctataacaactccccttgatgtcatgaagacaagattgatggttcagggacaagggaaccaatacactggaattgtaagctgtgctcagacaatcctcagagaggaaggccctaaggcattcttgaagggcattgagccgcgagtgctgtggattggcatcggtgggtccatcttctttggcatgctggagaaaaccaagtcgatgctagccgagaggaggaaccgcgagcttcgggccgtcaaggacgaatgagtggagatcagctcttttttggcgttgagtccttaccctgaaacaaaatacacatttttacttgccggggacaacctcgccggcccgtacttgtactccacggcgttcacgttatcacgtacgtagaaattatgagcatgactgacggtttctacagattgaaaaccaaaacttattacatgcgctggaaacctgccactcactgtttacgttgggagttaataacactatgcaacatttaaatgctatggtaagcctctaaaaccgcaaaatatttttt

SEQ ID NO: 17003 - DNA, 1237 bp, Zea Mays
ccaacacgggagaagctcccctccgggctcagtggcaagtgtcggctgtgctcccaagagttccaatcgaacgaactgttggaggtgggtctgtcagccgtggaaggaaggaggatttaggtttggttggagcttggagtttagagggaagatttggtgatgagcagccgcagcctgccgccgaaggatcgcaggatgcgtactgaacgcacctcataccgtgatgcaccatatcggagggacagccgccatggtccaagcaggtttcgtaatgatttgtgcaacaattgtaagcgtcctgggcattttgctagagagtgtcctagcgtggctgtctgccatacctgcgggcttcctgggcacattgcagccgaatgttcttccaaaggtgtttgctggaactgcaaagagcctggccacatggctaacagctgcccaaatgaagggatatgccgtaactgtggcaagtccggtcacattgcaagagactgcaccgctccaccagtgccgccaggagaagtgatcctttgcagcaactgctacaaaccagggcattttcgtgaggaatgcaccaatgagaaggcctgcaataattgccggcagagcggccaccttgcccgtaactgcaccaatgatcctgtttgcaacctgtgcaatgttgctggccatctggcccgtcagtgccccaagtctgatacattgggtgagaggggtgggcctcctcccttccgtggtgttggcgctcccttccatgatgttggcgctcccttccgtggtggcttcagtgacgtggtctgccgggcctgcaaccagattggccatacgagtcgtgattgcatggctggtgccttcatgatctgccacaactgtggcggccgtggccacatggcttatgagtgtccctctgccagtctcatggaccggttcccccctcgccgtttctgaaggaaggacatccaagggctgttcagatggctgttgttttcagcccattttgtcaggagcacctgttttgctttgctttatgtatttctaaacccgaatggattctagatatttcagattcataactcgtcagcgctatttgtaattctggatatgttacccgactccgatgttcttgatgataatgtttgaagacggggatacttgcccttacgaactcaaattcatctcatgagttttaaataatttgctccctgtgcaaattattattaaataatttgctccctgtgca

SEQ ID NO: 17004 - DNA, 1688 bp, Zea Mays
agctcgtcgtccccgtcggaggagaacctgtttatattcttgtgaggaagaaacgttcccatccccgtcattgaggaattcggaatcggggatcgagtacatctccacttcttcccaggcggccaggccctggcccgcggccgcaccgcaccgtagtttgttccttccgcaaggaagcgagagaaaatcgagtgaaaaggaaggggaaataaggctgaatcacagtttctggatcggaggagcatccccgcctaggtctctgcagccatggttcgcggatcgctcggcaagcttgcatcgcgcgccctctccgtcgcccgggagatggcagcaccagcagctccgccgcctcaacatccacgagtaccagggcgcggagttgatgggtaaatacgggatcaacgtgcccaggggcgcggcggctgggtccgtacacgaggtcaaggacgccttgaagaacatgttccccagcgagaaagagatagttgttaaaagtcaaatccttgctggtggccgagggctgggaactttcaaaagcggactgcaaggtggtgtccatattgttaaggctgaggaagctgaattgattgcaagtaaaatgttaggccagattctgataacgaaacaaactggtccagagggaaagattgtgagcaaggtctacttgtgtgagaaactatctcttactaatgagatgtacttcgccatcacccttgataggaaaactgctggtccgctcattattgcttgcagcaagggaggaaccagtattgaagatcttgcggagaagtatcctgatatgattattaaggttcctattgatgtatttaaaggaatcacagatgaggatgcagctaaagttgttgatggtcttgatggagagattggttgcatggtgaatggagcaggattggccatggcgaccatggatattataaagttgcatggtggtacgcccgccaattttcttgatgtcggtggaagtgcatcagaggggcaggttgtggaagcttttaagatactgacttcagatgatagagtgaaggcaattctagtgaacatttttggtggcattatgaaatgtgatgtgatagcaagtggaattgttaatgctgccaaacaggttgacctgaaagttcctgttgttgttcggttggaaggcaccaatgtagaccaaggaaagaggattcttaaggaaagtggaatgactttgatcactgcagaagatcttgatgatgcggcagagaaagctgtaaaagcatccgtcaaataactagtgtatcaatctgaagtttctttttttttcactggtacaagatgagcagtgctcttttacggatttcgatttggagcagaagtcgtgaactgcaacgtttttgaagtagggttattttggccttgttttgctgttaaatgttgccagtgccgaaattgtggtctcgttttaataaacaaatcaatcggtcccattggtcagctgctattttgccaattgcaaatcaatttacttttttggctcgggcagaggcttctaccctggtagtaaaaaaaaatcgctgccagggcctacgttgccagtttattctgccacatggccaatgccagtttattctgttacgttcctgcaccagtgcaggaacgttgtgaattgtgatctcgtgttaataatgatttcacactatgaatca

SEQ ID NO: 17005 - DNA, 1427 bp, Zea Mays
ggggcattcaattttactgtgaactaatgacaaaatttcagtatggaagtcagatgacggaattcatggtggacatgaaatgtgagggatgtgtaacagctgtgaaaaacaagctgcaaactcttgaaggaataaaaaacattgaggtggacttgtctaaccaagtcgttagagttttggggtctcttccagtgaagacaatgttagatgcccttcatcaaacaggtcgagatgcacgactgattggccaagggaacccaaatgatttcttagtttctgctgctgtagctgagtttaaagggcctgttgtatttggtgttgttcgtctggcccaagtaaacatggagttggctagagttgaagccacgtttagtggtctatcacctggtaaacatggatggtcaataaatcagtttggggatttgacaagaggtgcagaaagcactggcaatgtctataatccgccagatcatttatctgataagccacttggtgacctgggaacactagaagctggagagaacggggaagcccatttctcaggaccgaaggagaaattgagagtggttgacttgatcggccgctctattgctttgtatgcaaccgaggacagatcagaccctggcattgccgcagccgtgattgcaagaagcgccggggtaggagagaactacaagaaactctgcacttgtgatggtgtcaccatttgggaatcaagctaaacctgctaccagcgaattttccatactatttacttccgtatgttgtacacacacattaacgtagaaacaatcaaagtggcaactgaacatttggaataagcttgaatacattgaggaataaaggctgttctcatgtggagcttggacagtattttttttgcgtcggttagtggacctgttctgcttctgccgctgcgacacaacagatctctggtttgattacccaaaggttcctgctccattgcttgcttggctaaacgcacagtacacaaacgaagttcacattggtggcagccatgtgaggacgagggggctccggacgacgtggacgccagccaggacgccgtggctccacctttgaactctgtaacctaaccttgacacggtaatggtagtatggtacgtcgaggacgacggacccgacgttcgtcacggtgcgacgcaccgtcagcgcagcagatggccggataattcaagtcaccaggcgagctgaaggtgtgcttgcatgtcttgctcgagttcttggtgaaggacctgagctgcaacggcgtcaggttctccacgcagaggaactgcaggtagtcgtcctggaccatatcgtagaccaggccagacttgagaacacgcagctagcgggcgtatgtggccagctccgtgatcgaacggcgtggacgccttgcagttgcaggtggccgcgtcgttcag

SEQ ID NO: 17006 - DNA, 2148 bp, Zea Mays
tttcctataaacattataaaatagagcttttatgagttaaagcccataattcaaaataagtcattcttcgagctcttaacaaaatttgctgaactctttcgaccttaggccaaggctcaggctcccagcaacaatccgcgttaccagagtcacagacggaggtgagcgtccgacgcgcgccggcggcgcttccagagtctctgcgccgcgccctcctctgacttcacccgtgccttcggtggccctgcgtcatctccctcgtcctcctcccagtcatgcccctccctcaccgagtgggaggcgacagatccgagttctagttcgtgcggcaccgtgcgagtagcgcggccccggtgcttccacgcgtggaaggaacgcgggctccgatggcctgacgcgcgggggcgaggtgctggcaactccggcggcgcggtgtggaaggcgagctcgtctccgggcagaggtcaccgaaaggctgagcgtgcaggagggcagtaatctgcagcggcctgcagagctcttatctcgacacaacccaccccgcctgacgggatagaatcggtgggataagaggaccgatatcctttgcttgtctgcaaaatttaagtacacaagtgcaaatcagctggatttggaggtaaagacgggaaccaaagagctggtggattagagaggtgtggggagatgtaccgtgggggccttgaccgcttcaagaaggcacagacattggagcccttctcagtcaagtctgagtcaggcaccaagaaggcacctgcagctgcaggaacagctaaagcaccaccggctccgttgacactgccacagaattctaattttgtgctgggtcagaataaccaaagtctgcaaggtaccaacacaagggtggctgggcaagatggtgttgccccagggcatgttgggacacaggccggtggagggcaatcgacgtggcaacctccagactgggcgattgagccacgcccggggatctactatcttgacgtggtgaaagatggggaggtcattgacaggatcaatctggacaacaggaggcatctattcgggaggcaggttcctgcttgtgactttgtgttggaccatcagtctgtatcgcgtcagcatgctgccgttgttccacacaggaatggaagcatctatgttatcgacttaggatcagttcatggcacgtttgttgcgaatgagagattaacaaaagacaaccctgttgaactggaagttggacagtcacttcgctttgctgcatcaaccagaatctatatcctgcgaaagaacacagctgctctattcccaactcctagccttccatcagatgtcagtttgccatctcctccagaccccaatgatgaagatgctgttgtggcatacaatacagtacttaaccgctatggtattagtaaatctgacatattatccagttccaaagattcttcagggagtgccagctctggtgcaaatgatgataaacatgcagttgaaaggcccttgaagagaagtaaaaagcgcagagtgtcatttagagatcaggctggaggtgaacttacccaagtggttgggatttcagatggtgcagatgttgaaactgaaccgggccctataggtgtaaaggaaggcagtcttgttgggaagtatgaatctcttgttcaggttactgtcataccgaagggaaaggagcaagcatcacggaaagactttacctctacctcaccaagtggggtaacggataagctacaagaggtgcttaaaagagtaaagagcacgaccaggcctggaatttacgacgacctttatggggattctattgcgacaaaagtgggctcatcttgggcgtacaaatcagatgatctgtcagacaaagcccagcctgttgaggagaagacacttggcatggattcaaacttgaattcagccgatgacagtgatgacttgttcggtgacacgtgattcagaaattgtcagtgaatacaaacaaatgtattcttcagaatttcgtggcatagttgtttcatttgttagaggcttttcttttggcttagttatacatggttgtaccctctgcaaatcaaggctagatccaacaagcatagcacagtccacggtcggtaccgaccaaggcgaagtcaatagcgg

SEQ ID NO: 17007 - DNA, 3934 bp, Zea Mays
gttgttccgagatgcgtgtcattgttaaagagatatcttatccggtacattccaagggtgcaaactctgcgacaaattgatctgttttgtgcgaatacgattgcaaaatgtgaaccgatggcaaataatagagcagcatcttttgccaagaataatgtatcagcagcagctgcaataaattcttcatcccttgccccaccaatatccaactttgcttcagcatctcttgtgaagtctttaaactatgttcgctcattggttgcaaggcatactccaaagttgtcattccaatcaatagtcgcggcaaagcagtcacttccttcactttcatcatttctgaataggtccttactttctcaactaactccagaagttattagcaacagagaacatcttgaatcgaaggaatgccatagctcacctgattttatatcatcagcaagtgaaaaagttgatgtgggtgaacctgtagatgatagcaaatatatatccttcgacattttaagctggcgatggcatgtgtatggcgaacggcagtcgtccttatctgccaaagaaagcagtgattttgtgggtcttcaagattttcatatacatggttttcttgaagtcggtgctgcagctcttctagttggggatatggatgcgaaaattaatgatcaacagtggaaatattctgttatccaggaatttccagatattgatttgttacaaccttcatcttctgccgcaagtacttttgcgtcatcacaaagtcatttaaaagcaataactgcttcaaaacgcatgagatcagctccaaatcaagtctggatgaacataccaataaacacattccagcctcgagcacggcctctttttcagtacagatactacagtgagcagcaacccttaagattgaatcctgctgaaatttctgaagtcatagctgaagtttgttcagaagcaacttcaaatgcaaatcagttgattgttccatcaagattgagcacccagagtcggcaaccttcagcagatgtggcattcagtgtccttatcaaacttgtcattgacatgtatatgatggactccgagactgctgctcctctgacactttatatgcttgagggtatgctgagctctcaaaagtcatcagccagaacgaaggctcttgatttgatcctaaatctgggggtacatgcacacctgctgcaacctatggttattggagatgcgccgcttatagataaaagtgaatctgtgaaccgttcttatctgagcaatgaatacggatcaagtataaatgaaccgagggaagcagaacctgaagtagaacagaagatcagtcctgctattgatcaatttgaatcatggcttcttaaaatgctttttgaggttctccttctcctagtacagatagaggagcgacaagagatcgtgtgggcctcagctttgagttgtctattttactttgtttgtgatggaggaaaaattatcaggagtagactgggaggtctggacataagggtggttaagactcttcttgagattagtgtggagcactcttgggcaaaagtagtgcacagcaagctcatttgcatgttatcaaatatgatgtaccaagtatcagatttaactcagaatggtgtttctgacacacattttgttcctgagcggattgatcttcttggtgggattgactacatttgtcttgagtattcacgagccaactcaagggaagagaagcgggatttgttctttgtcatttttgactacgtagtgcatcaaataaatgaggcatgcttggctggtggtatttcaacctatacttatgatgatgcccagccccttgcttcccttcttgcctttgctgatgctcctgaggctttctacatatctgtgaagcacggcgttgaaggcgtcggagacatgctaagaaaagctatatcagcagcattatctcagtctgctcaatatgaccaattgaatgtgcttctggataaggttatgaggaaacttgatggaactgccagcacattttccaggattgacaatgagttttcttatatgatccaagtaacgaaatcatgcaagtgttttggcagcattaaagatggatgtgatgatgctgatgtagcgcttagagccaggctttgctgggcaactttgcactcacttcttcactcacatatttcatcatataggcaccatggatatatttggttagttgaattgctcctttcagaaatcagtgaagaaacagatggttctgtatggtctaaaatccaaaagcttcaagaggaaattgaagttgctggtagccaagacctatcatgttcagaagtctctctgcctgtttgtatgctttgtgggcttctaaagtcaaaacacaatttcattaggtggggattcctatatgtgctggacaaatttcttatgcgttgcaaattattattggatgacaatgacatgcaagaccacacaactgctgatcataataaaaattgtcttgataaagcttttgcggttatagatattatgaatagtgctttgttacttgttgttcaaaacaatgagacggaccatatcaacatattaaagatgtgtgacatgctgttctctcaattatgcctgagaattccatccacaaatgcgatgcaagttaggggtcttcagtcccttggtcaactttttggttatacatctaagaacatcgatagtcatttggaaacccttgcatctcaccaaagtattggaaataagaatatttgccggagtgagacattgcaagatattggcatagatcaatctggtcaatccacttctttctgtgaagcatcaatggcagcactgcttctgagagggctcgcgatagccccaatgcagcttgtagcccgtgtaccaacctctttgtttttctggccattgatacagcttgaaggggcagccagtgatgacattgcattgggtattgctgttggtagcacaggaagaggcaaccttcctggtgctacatcagatatccgagcagcactccttttacttttgatcggtaaatgcacagctgatcaggaggcactgaaagaggtagaaggcaatgagttcttcaggggtcttctggatgacacagattcaagggtagcatactattctgccgcttttcttttgaagagaatgatgacagaggaaccagagatataccaacggatgcttcaaagcctcatctcaaaagctcaacagtgtaacaatgagaaacttctggagaacccataccttcagatgcgtgggatattgcagttatcaaatgacctaggagttcaatgataagatcgtgatgacatttcaatggataaagctctaagttagaatcactacttctggctgtgtttattgcagagaacctgaagatgttccgaactaagttttgcagatgctatgtgaatcatgtaaattattgctttggccagatgcatgtacagatccatgaatttctttattctttgttagactagtcacagtccaagggagtcacagattaacaagataatctgatgatcatcctgtgttatggacacagtgcattgtggtttaccaacctggacgacttgacaaaggtttaagccaaggtggcgtagatgtgactccctacaattttgtattgcagaaaccgttgagatctgaggcaaggcattatatatattttttgggcgagacatgctcggttcaataaatatttgtgtgttcgctttgcatatatggtaactgatcagaggagtgtagatttgtattgcggagtaacaatgtaaatgttaggtttgaatatactgatttcgagatgatgtaatccttctatactagcttagcttccatgttggttgtttaatttcgataagaggttgtttacttttatatgctgtttggtttacatatttgtgacgtgatgaataaccgataa

SEQ ID NO: 17008 - DNA, 1555 bp, Zea Mays
cagaaaagaaagaaaaagagattgagcaggtcgtgcggtagaatggtcccttgctaattggcccccaaatggagggtgatccatgtgaagaggcccagcccagctgacaacaccagcccctgagaagcagcgcaggcgcagggcattccagaacgttcggcgccggcgaggccacacgcccaccatcagtcagccgccccgccaaagccatgcgcctccccgccggcgcacgcctcgcgctcctgctcgcccgccgctccctctcctcctccccccgcatcccgcgggcgcacacagggatatggagcgaggcgccctcccggagctctcccttctctccgccgagcagcgcccgcaggtccttccacgggaccaggccggtggcggcaagggactactacgatgtgctcggcgtcagcaagagcgccagccaggcggagataaaaaaggcctattatgggcttgcaaagaagctccacccagacacaaataaaggtgatgcggatgcagaacgcaagtttcaagaggttcaacgagcttatgagactttaaaggatgaacaaaaaagatcattatatgatcaggttggccctgatcagtatgagaaaactgcttctggcggaggcggaactggcttcgagggtggttttggaaatccatttgaggatatttttggtggtggcggtggcggtggtggaatgaatgatttctttaggaacattttcggggatagggactttggaggacgagatgttaagttcaagggtgcagcaaaacggtcaccttccaaacgtctgtaacatgtgaaatctgtggtggagccggtgtgcctcctggaaccacacctgaaacatgtctatcttgcaggggttcaggatttatattcatgcaaaccgggccattcaggatgcaatcaacctgcacaaaatgtggtggttctgggaaaactgtgaaggaattctgcaaggcatgcagaggaaacaaagttgtgcctggaaggaaatcagtccgccttgacatactgcctggttcggataatgaggacaccataaaggtggttcgatcaggtggagaagacccagatggccgtccaggcaattttgggagggacagttcaagtcccaactctcagtggagacgttgttctaaagatcaagcccggtactcaacctggtcagaaggtagttctgagaggaaaagggatcaagacaagaaactcaccgtaccacggagatcaatatgtccatttcaatgtcaacatccccgaaaatttgacgtctagacagcgggagctgatcgaggaattcgcgaaggaggagcaaggcgaagacgagaaggacgccaaggcagcagctggagcatcggggggatagccggttttaggagccacagtagtgccttttagctggtatttataccgtgaccgtagacctgtctcaaattcgcagcggaaagatttatagataggtctttgtttcggattttgtagctggaataaatgaataatacgtctagaactgattttctgtctttttcgtaaaaaataaaaacaaat

SEQ ID NO: 17009 - DNA, 773 bp, Zea Mays
gaaaaagtggtatcccactgcattatccagaaccgaaaaaaaaaactctgcggagattgaccgaccaccaccaccgcctgcgttcccgcgccgccaccgccatggctgccgctgccccccatgcatactcctccctcgtgcctgtttcggctgcgcggcctctctccggaagcacagtttctttcggtgcttcgtgccacaagtggaggaaggttccggcatggcgactccactgtgttgctgaagacgaagaggaagtcaaagattttggagtcaatatggcactatccatgctaaaattttacaaacgagaaatatcacctttactaccttcaagctgccgatatgtaccaacttgcagtgagtactctatgcaggcgtacaaacgatatggtgttgtaaagggttccatcttgactgcttggcgcctttgccgttgtaatcctcttggtggatatgggtatgatcctccaaaatggtttggcgaggaagatgtacctctgcaatagtaatgcctagtaattgaaagtacaggcattgtaattcttcagatccagacttgcagcagtttttatgttctggtcactgtcagaaacaatgcacaactgtatgtggtagtttcaagggaaagcctccccatcgactatactgccaaggaacttgattggatttctgagatttctatgctgaagatacataaatgcgcaaggcgacgatcactctgacatgacatggatcggccggaaagacttttgggcgcacgagcgttgact

SEQ ID NO: 17010 - DNA, 1889 bp, Zea Mays
caaaaatcccccgttcctccttctcaggcttccccttcttcctccacatcgatcccctcccccctccactcgtctccaaaatcgccagcgagagccatgccgcctcctcccctgccctcgccgagcctgaccgactgaccccacctcgccactgttctttcccttccacctgggccccacagcgcccccttaccgtcgccaccaaatccccaaatcccggaggcacgaggagggaattcgtcgcctgaccgatcggccgatccactgccgtcggcaccccaatccgccgctgccgccatgttcaacaagatcatcaagaggggaaaccgcaagggcgcgcgcggggacaacgcggaggccgccgcgcgccccgcagcgccctcctcgtcctccgggagcggcggcggcggcgcgggggcagccgcgcccgtcaccgtcaaccacgcctcccgggccacagcgccttcgccgtcctcgcccacttcgccgcacgtggcgccgtctgcgcttgcgaccaacccggcgggggcggcgtcgccgccactcctcgagccgctcccgctcctccgcgacgtcgccgccgcggatcgcccgggcctcttcctccgcaagctccgcatcgtcgccgcgctctttgacctttcggactcgctcaagcacccgcgggagaaggaggccaaacgccaggctctcctcgagctcgtcgattacgtgcaggctccagctcaggctgcgggcgccaacgcacccacgcgcctcccggaccacgtccaggaggcgctcgtcgccgccatctctgccaacatcttccgcccgctgccacccgcgctgcacgaatccgccgccgcgatcgaccccggcgccgcgcccgacgaggaggaggagccatacctcgacccctcctggccacacctccagctcgtctatgagctccttctccgatacgttgtttcgcccgacaccgacaccaaggtcgccaagcggtatgtggaccacgccttcgtcctccgtctcctcgacctctttgactccgaggatccgcgtgagcgcgagtacctcaagaccgtgctccaccgcatctatggcaagttcatggtacaccgaccattcattcgcaaggccatcaacaatgtgttctaccggttcatctttgaaacgcagcgccacaatggcataggggagctccttgagatccttggaagcatcattaatggctttgccttgccaatgaaggaggagcacaagctattccttgcccgtgctctcatccccctgcataagcccaaatctgttgcgatctaccatcagcagctgtcctattgtattgttcagttcgttgagaaggactacaaattagcagatactgtgattaggggtctgctcaaatactggccagtcacaaactgccagaaagaggtgttgtttctgggggagcttgaagaagtgctcgaggcaacacagcctgcagagttccagcggtgcatggtgccactgttcaagcagattggacgatgccttaacagttctcacttccaggttgctgaacgtgctttgttcttgtggaacaatgatcatattgtaagcttgatagcacaaaatcgtgttgttatatttccaattatatttgaagctcttgagaggaatatacagagccactggaatcaagcagttcatggtctcactgcaaatgtgcgcaagatgtttttggacatggacagtgaactatttgaagagtgccagcagcagtacatggagaaacaagcgaaagccaaagagatacaggaacaacgagaatcagcatggagacaattggaagctgttgttgctgccaaggctgctggagatgacatggttttggtcaactagatcataccatcttggctggattt

SEQ ID NO: 17011 - DNA, 1183 bp, Zea Mays
aacctgggcatattcctctctctttcctcatcctcatccgagtggctctctccgtgtgctgtggcggcgcctggctctgctcggacggactccaccgaaggcgctcggctcccctcgggctccacctgcgacggccggccctctgcctgcaccgacggtgcccggccccctcggcatccaccagcggtgctcggctccaaggagcactgctgtgaggaaggccatccattttgtcaacctgtggacagctggaaggtctagtggaaacctggctatgaactccgtaccaaaacccgcccctgggtccgaaacatctgggagggaggattttgctgtgggggataaggatgctgtggtcattgttgatcatgggtcaagacgccaagaatccaatctcatgctaaatgactttgttgagatgttccgggcgaagactagctataggattgttgagcctgctcatatggagctagcggagcctactataaaggatgcttttggaaaatgtgtgcaacaaggagcatcccgagttattatcagtccatatttcctttcccctggacgacactggaagcaagacattcctgctttagcagcagtggcatcaaaggagcactcaaatataccctatattgtcactgcccctcttgggctgcatgagcttatggtggatatcatgaatgatcgcatcaagtactgcctgcgacatgttgcgggtgatgtcgatgagtgtacagtgtgtgccggaactggaaagtgccgcatgtactcctgatggagcatacctgggaattgtttctggagaatacgagatctgacgagtgtatatctaggtccgctgtgtaccgtgaaaccaaaagcttgtacagttcattctgaacagatcgtcagaattagacaagtgccaaattagttatgctgtgcatgcttgcgaacatcaataacgattcattagctaatcttgagtttatttacgtcacgaacaaactcagtcaagtgctctgatatttccattcacatgttatctatattcctgctaccttgtagttgaattagacttattgccttaacatggatcaaatgagaatataatgtacccttgtttgatttgccagttctttttgtcatatatctgttagggacttgttctcaaatgctatgaattaaaaacaagacaacacaa

SEQ ID NO: 17012 - DNA, 3738 bp, Zea Mays
tggtcaggatgatgaccatttcactccgatgggcatgttttgtcttaccaataacacagatattcttgatctttcttgcattgagtccaacatgggtgagagaacggaaagcattcgcaatggcaacagtagttgccttactatgcaggaagaacatttacaggcagaatgtggaggatatcctcatccagattatatatctgttgatatgattgatgaaagatcactgcatgatttgccacatgggttatcacaaaacaatgagcagtatgagatggagcagctcccacagaatatatgtgaaagtggttctatgcagatggcctctccggaccaatattgttcctctccggaccaatattgtgatgatacatctttatcagatttttacatggatgtatcctccccagagtcaatatcctgtgagcagaaccagcctgaagatatttttttcaagagcgagtctagcactgactcttctccagtaccctctagcagaaattccaccacagaggatgctgataaatacttaggtcaaccatcaaaacagttgctggactccaaaatcgttcctttcagcaaccaacacacgtttaagaacatggaatatcaaaaacctctggtattggataaacaatatgcatatagaagcaacaactcttctattcacaattcaacaaaaggttgcttcagtagagatggggacatggtttctgatttatgtgtgctagagggtaataggaatcctgctcctgctcacctatggccttatcaggggaagttccatcataattttcagcaacctgtgtatggtaattccatcattcctgcatttggtggtacgagatacaaaccacacgatgaaagaaccactctgcgccttgcattgcaggatatttcacagccaaattctgaggctaatccacctgatggggttttagcggttcctttattgaggcatcagaaaattgccttgtcatggatggtgaaaaaggagactagtatctcgctttgctatggtggaattcttgcagatgatcagggccttggtaaaactgtatcagccatatcactgattcttactgagcgcccaccagttccacagtcatctactaagaacgagccatgtgaagctgtaactctagatgaagacgatgactgtattggacctcattcggaaaagctgatgcggacatgtagctctcaagtgacaagtaacacagtgaagcaagaaaatcctattgtagcggttaaggcaaggccagctgctggtactttggttgtttgcccaacaagtgttttgcgacagtgggcaggagaactgaagaacaaagttacaagtaaagctaatttatcttttctgatatatcatggtagcaatcgcaccaaggatcctaacgaacttaccaaatatgatgttgtgcttactacatattctatagtaagcatggaagtaccaaaacaatcaaatcctgatagtgatggagaagagaaagggaagcctgacccgtatggtgcacctgtgtcctcttcagggagcaaaaagagaaaggcatcctcttctaagaaaacaaaaaataaaagtgttgcagagagttgcttgcctgaaaaacctcttgcgaaagttgcttggtttagggttattcttgatgaagcacaaagcattaagaactaccgaactcaggttgccagggcttgctggggtttgcgagccaaaagaagatggtgtttgtctgggacacctatacagaatgctgttgaggatctctatagctacttcagatttctcagatacaatcccttacgctgtatataagcagttttgcactctgataaagattccaatcagtaggaacccaaataacggttacaagaagcttcaagctgttttaaagccggtaatgctacgccggactaaagcaaccatgcttgatggggaaccgatcatatccttaccacccaagactgtttcacttaagacggtggacttcactagcgaggagcgtggtttttataacactttagaagttgaatcacgagaacagttcaagctgctggtactgtaaagcaaaattatgtcaacattctattgatgcttttgcggctaagacaggcatgcgatcaccctcacctagttagaggctatgactcctgttctagttggatgtcttcgttggagatggtgaagaaacttcccatggaacggcagcacaaattacttatttgcttgcaatcttgttctgcgttttgtgctctatgcaatgatgcgccagaagatcctgttgtcactctatgtggtcatgttttttgcaaccagtgcatactggagcaactcactggtgacgacagtgtatgcccagtgtctaattgcagagtccgactaaacacatcctcactcttctccagaggcactcttgaatgctctctgagtaaattagcctctgatttcaagtctgatgatacatgtatggaaatgatacatgctgaaaagcgccctgggatggattcatcctacgcatcttcaaaattgagagctgcattagatattcttctctcattgcctaaaatagatcccactattgatagcaaatgttcaatcgggattgaatctgagaagtttgatggaaagggtatttcagaacaaactgacaccaagttgacagagaaggccattgttttctctcaatggactagaatgctagacttgcttgaagtccatttgaaagcttctcatgtgacatatcgaaggcttgatggaacaatgtctgttgctgcacgggataaagctgtgaacgacttcaatatggttccagaggttagcattctacaatttctggcgaatgaaatacataatatgctttcaggaatatgagttctgcttttgacttgcactattggcaggttactgttatgatcatgtcactcaaagctgcaagtcttggcttgaatatggttgctgcctgccacgtacttatgctagatctttggtggaacccaaccaccgaggaccaagctgtggatagggcacaccgtattggtcaaaaacggcctgtcacggtatcaagattaactataaaagacaccgtggaagatcgtattcttgctctccaggagaaaaagcgggagatggttgcttctgcgtttggagaagacaaatctggttcccgacagactcgattgaccgttgaagacctgaattatctgtttatggtgtagaatcgctcctgagagtgaacagttttgctcattggattggtgttagacgtggtagataaaaatgttctctgaaaaaataacaaaatgctttcatttagggattattagttcttgtagcttgtacagttgcagagatttaggggttgctagcgacgtgtcttccaattctttttgcacgggaagcagtaagatgctgaactaggtgaattcttcagatagctgctatagtgcctgttaacttggggggtgttttctatgtactaatttctagttcctccattttattttcttttacttcctaaattgtcaaacacagatactaaaatagagataatctctcttttagtctatgtgtttagcaatttaggggctaaaagggactaaaatagagagactaaagacaccccttaatgtaatgaagataacgacaatgaagctcagatgatatatatgtacatattcttctcgtatccgataaaccatcgagaatattgggccatattacggagggcttgttctcaa

SEQ ID NO: 17013 - DNA, 3020 bp, Zea Mays
atatctccgacgtggcgagccggcactggccccgcgtatacggaggccggattcctgcggggccccggcgctatcctccgacggccgacgtgtcctgccggcgtccacacggggctggggaaactagtcgccggcgtacgcggaggtccgctcaatccggcggcgtcgtggggccggatcgaatctgcgccgcttgatcgttcgcgcggccgccgcggacagcggactgaaagcgaggtgatgatcctgctggctcggccgatcgacagggctgggccaccggcgccgcgcgcctcgtgctcttgcgtgctgctgttggctgttgccgccgagaccgagagctgctcctcctgctctcgtatacgtgctcaaggttgtcgggtacatgagacggcgctttcgttcttccggcgtgaggttgacgctgacaatggcgtgcgtggaattccagtgtcgtcgagacttgagacggaggccctgtctgctcgtgctcgtctcgtccaagagcaaggaggccgggcgggccagggcccagggccaccacggcaagcaatggccattggaagtaactgacagggacgagggcgagtcgacggcgacgccgccgttccaagccggccccaacttgcaagcgatttttggtttttgtttttttgtttttgctcgcgcctcgccggtggagtcgacgcctctaatactaataattcaaataaacaccagccatgaaaaaacgcagcttgttctttttctttttatgttttgtaccagccaaataagaatgctatgagcaactggaacgggaacctctcgtagtatatatatgagagggatcgggcaggaaactgcttcgtgaagaggctgagagctcgccttgcatgcacgcgcacacctctgcttgggtgtacgtgcacagcggcagcagcggactaggagctccatgcatctgtctctagggtgtagagatcctgctcattgtacggtagctgccaccgtctcatcgtcaaccatgtctgctgcttccaccgtggatcctcatcctcctcatcagcagcagcagtgcagcgataaggtgtcgtccatggagatggagatccccgccgaccttatcatccggatcggcgagtccgttttccctctccacaaggcggtgatggtgcccaagtgcggctacatccgccgggccgtcgaggcggtggcgaccaggcccagcagcaagggcggcgccgacgccgacgccgacccgccggccaccgtcgagctggacctctcggcgctgccgggcggcgccgacgcgttcgacaaggcggcgcgctactgctacggcgccaacttcgagatcacgccgcaaaacgcggcggcgctgcgctgcgccgcggcgttcctggacatgcgccacgcctcagcggacctggccgggcgcgtggacgagttcctggcgcgggcggcgctgcgcgcgctcccgggcgccgtggccgtgctccgctcctgcgaggcgcccggcctgcgcgcggccgccgaggagctcggcgtcgcgcgccgcgccgcggacgccgtcgcgcgcggcgtctgcgccgaggcgctgtccctgtcgtactcgtcggcgtcgcgcggccccgggtggtggaagctggagctggcggcgctgtcgccgcgctcgttcgggaaggtcgtcacggcgctgcggtgccgccgcgccgagccggccgtggtggccgcggcggcggcggcctacgcggagctcacgactgagattcggcgcggaccaccgcgcgctgctcgagtccgtggtcgacgtgctgggaaacaccacgcgcccggcgtcccggcgccgttcctctgccgcctcctccacgccgccgtcgccgccggggcgtccgccaagacgtgccgcgacctcgagctccgcgtcgccgccgtgctcgaccaggccaccgcccaggacctgctcgccgtcgcgctggacgccaccggggagcgcgtcaggaacacggacatcgtgcgccgcgtcgtcgtcgccttcgtcgagcgccaggcggcggtgacgcccgcgggtgagcggaggagccgccgggcgtccatgtccgggacgacggcggcgacggagctcggtgccgccaggcccggcgcgctggagaaggtcgccatgatggtggacgaagtggcggcggagatcgcgacggaggaggcgctgcccatctccaagttcgtcggcgtggccggcgcggtgcccaaggacgcgcgcccgtcgcacgactgcctgtaccgcgccgtcgacatctacctcaagacgcacccggagctggacgagatccagcgggagaaggtctgcagcgtcatggacccgctcaagctctcgtaccaggcgcgcacgcacgcgtcgcagaacaagcggctgccgctgcaggccgcgctcagcgcgctctactacgacgagctcaagctccgcagcgccgcgacggccgacgtggtattggacacgcagtcgtcggccgcggggagggcttgcgcgcaggccagggcggcggacgcggcgctggcgcgagagaacgaggcgctgcggtcagagctggcacggatgcgggcctacctgtcagggatggagcgcagcaaagggggccggtcaacgccgccgtcctcgccgtctcggagggcaaagaaagcaagcttcctgggctccgtgtcccgcactatgagtcggctgaacccgtttagaagtggggggtggatggcgaaggttacgaccagtaacgccgccggtggtggacgccagagcaaaacgatgatgcagcatgtggtgacacccaagaggaggagggcatccataagttaataatcatgacgctgtcgtgtaattttaggaggataccgtgtgtgcatggcttgtagtttgattattattgtgtgtttttagtttattattgtgctaatatataaatgaatgcgtgtgtagtaccaagtggtttgctaaatcagacgataattttacatgttcgcatcgtagtcatcaattttaggccctg

SEQ ID NO: 17014 - DNA, 1156 bp, Zea Mays
agcaagggcggtggcgctgagcagggcgcactctgcgtacatttggtggcggctatagtgctgcgtatccaggactctaggaacctttcagatgtgttctgggaagcgatttataaaagctattttaaaagactctacctggagaagagtggagcaaagtctattggaacaacagccaatttgttagttgcagctgctgctggtgcttgcaatgcaatcgtgacacagccattagatacagcaacttctagaatgcagacgagtgcctttggaaagtctaaagggctgagggaaactcttgcagaaggtacttggatggaagcatttgatggcttaggcatttccattatattgacttgcaatccttctattcagtacactgcatttgatcagctcaagaaaaggataattcagaggcagcgacgcaaaaatgcagcatcggcagaggataattccatagtgtctctttctgctttctcagcttttctgcttggtgccgtctcaaaaagtattgctacagtattgacttatccattaatcaggtgcaaggtgatgattcaggctgcagaccctgatgaggatgatgacgttgattctgaaaggccaagcaagtcaagaacaccaaaaacaatgctaggtgccttgcatgctatctggagcaaggaaggcattccaggcttcttcaaaggcctgaatgctcagatccttaaagcagttctgagctccgccttgctgctgatgataaaggagaagatctcgaagttcacatgggtctcgttgcttgccctgcggcggtatcttttcgtttctcagaagaggatcaagagtgtaactgtataaatactagctccaaacatagcgacatcgtgcttctgtagatgttatgccaaggaattaatctgaggaataatgagcagaaatactgaagcaagagagtgtgtaaagtgtgtatgtgtgatcgatagcatcagagggctcttcaataagtttgttcattcttttttcccctctgaatctctgatagctagtgacacaggtgttgcacggatctgaaactggactgtacttttggctttggttgtctgtaatgtgtaaaatgaattgattggcacataccaagaggggttgtaagtcttgtgatatcacaccaactacg

SEQ ID NO: 17015 - DNA, 2623 bp, Zea Mays
ccggcccggatgagataccggcggcgcaaaaggcgaggcgcgcagcgcgcgctggtgtacatgcaaatactccgtgtgttgtgtctgcgctaggcagacgggcgcgacgcaaaaagctttgttctcagcggaagggcctcagcctcacgggggcgaggccgcgaggcgaggctataaaacgctgccccacccaagccaaccgcctcgtcgttccatccagctctcccagcgcgctgctcgactcgactcgacttcctctgcaacgcgtgtccggtgtaggctgagagagtgagtgagaggcgagatgaggagcgggcggctggcggtggcggtggcggtggctctggcgtgggcgttcgcggcgtcggcggcggcggcggcgcagaagtacaatgccatcttcaacttcggcgactccatcaccgacaccgggaacctctgcaccaacgggaggccgtcgcagatcaccttcacgcagccgccctacggcgagacctacttcggcacgccgacgtgccgctgcagcgacggccgcgtcatcccggacttcctctgctccaggttcggcctgccgttcctgccgccgtccaagtccacgacggccgacttcaagaagggcgctaacatggccatcaccggcgccacggccatggacgcgcccttcttccgctcgctcggcctctccgacaagatctggaacaacgggcccatcagcttccagctgcagtggttccagcaggtcacctccgccgtgtgcgggcaggactgcaagagctacctggccaactcgctgttcgtgttcggcgagttcgggggcaacgactacaacgccatgctgttcggcaactacaacgcggaccaggccagcacgtacacgccgcagatcgtgagcgccatcgcggccggcgtggagaagctgctggccatgggcgccacggacgtggtggtgccgggggtgctccccatcggctgcttccccatctacctcaccgtctacggcacctccaacagcgccgactacgacgcgctcggctgcctcaagaagttcaacgacctctccaccaaccacaacgcccagttgcaggcccagatctccgccctccaggccaagtacaagtcggcgcgcatcatgtacgccgacttctactccgccgtctacgacatggtcaagaaccccggcagctacgggttcagctcggtgttccaggcgtgctgcggctcggggggcggcaagtacaactaccagaacagcgcgcggtgcggcatgtcgggcgcgtccgcgtgctccagcccggcgtcgcacctcagctgggacggcatccacctcaccgaggccgcctacaagcagatcaccgacggctggctcaacgggccctactgccgccccgccatcctccacagctaagctaagcgaggggagggcgattaattttttattgttgccatgttatttatacctgtgtttacgttgccgggaaaaaagtgtcccggcagctgcatgcatgtgttgcctcttgtaacttgttatactggtggtcttcatttacaaatcaaatggtatagatttttcatggaaccaaggcatgtggtcggggctttatagagaacttttgcagcaatcactctccaaggtagcctgtctgctgcgacttattcggaaacggcttctactttttctaccgtattctgtctttataaattgcaattaaattgcaactgcaactgagcgctagtccaaatatctgaacaaagcgctatccgtatcgcccgtcaggagggcccgtgatagggtctttgcgcttggctccaagcctccaacgcaccatcaccaagtccttgcagaagatatatcataagagccctccaagcatctgtttctttgcatccatatcgccgctacaccatcacaacaaacctttcggtgtccggacagcgaaggctggttgaccggtgaacatgagcactgtttcaaacagatgaaattaaatgcagcagagcaaaataacgaccaagttgctggttccaagtagaatggtgagaaagcggctgctagagtgatcaccctcaaggctcagctttgctcacttagctatggatggatcaggcgaagcagacggctcagattttactccaaaaaagagaacctcagggaatatccctaattccagccgatcacagctaggtgtatgcattgtctatcaatcgccgatgcatccattccttctagtttctatacaacaaaattccttttttgctacggtacaggatgaacgttccaaacgtcgatcgcggctccactgcaaaaaaaaatgcaatgagtggctttgctacagtgctgccttgagcagcgctgccacattgattgcacctgataaatgaatgaatcaaacgaatactccaaacgcatctactgagtgagggcggaggtcaactatcggatccgttagtttgtgttccaaccgagaaatcatcagtcctcggactcggacacctcggctgcaacggttggaccacctgtgcattcttttctttgatgaagctctagcatttttacctctgggtggcatagccctgcgtcacatatttggacattagcgaagctccagcttggtctttagtgatt

SEQ ID NO: 17016 - DNA, 179 bp, Zea Mays
aaaatagcaaaactttagattattttgataggaaccgcgcgaacgtgtatcccctctatcacaaattatgatgtccactctcctttaggagatggtaaactagtgctcctcccaagtacaatggaggccactagcctaggccatggctcttcttgatcggccataagaccccatccagg

SEQ ID NO: 17017 - DNA, 947 bp, Zea Mays
attttatataaataaaacaaaaaacaaaaccgcagcagctcctccactggcacactccccctctggcctctaccctgcctgccgtttccatctccatccagttctccgcacccacccacgaccacgacccacccacccactcctttccccaacccacggccgtggacgccagggtcttctacctcaagatgaagggggactaccaccgctacctcgccgagttcaagaccggcgccgagcgcaaggacgccgcggactccacgctcgccgcctaccaggccgcgcaggagctgccgcccacgcatcccatcaggctcggcctcgccctcaacttctccgtcttctactacgagatcctcagctcgccggaccgcgcctgctcgctggccaagcaggccttcgacgaagctatttcagagctggatagtcttggggaagagtcgtacaaggatagcacactcatcatgcagcttcttcgtgacaacctcaccttgtggacttctgacatgcaggaggatggtggcgatgaaatgcgggatgcaaacaagcctgacgaggagcagtagtagccaaacatctccatcgatcatgccatgccatgccatgcttgtacaaggaccattttcgtgtgtcctttccttcaatcgtcgacctttcgttttgttgttatactgctattgtggaaccctgttactgttactgttagtgtatcctattggcaataatcaaatgtggtatggttgactactatactaatgggtgatcattattcatcatttgattaagttagataattgaatgcttgtgtgctatcactaccatgtgatggaatagaattcaccaggcaaatatattttataggacattttaattcagccggctaaggttgagtaaacaagtgtttgaccgggtttaggacattttgatccaaaatctcatcaatccag

SEQ ID NO: 17018 - DNA, 2607 bp, Zea Mays
ttgttgcctctcccgacgcccctccctaccctacttcaaaacatttcaaaccactctacgcgactacgcctccttcctctcctcaccccctccccctccactcgctcgccactgaggcgcctgaccagtgatcgtaccatctcccctcgaccacagtccaccgcccgtcaccgccccgccccgcccgctcgacgaggccgcggccgccgcgccgggtggtgaagagggtgctgctatgagtagcgctgtgaaggaccaactgcagcagatgtcgacgacgtacgattctctcctgttggagctcaacatgatttgggatgaggtcggtgagcccgacatggcgagggaccggatgctgctggagctcgagcaggaatggctcgacgtctacaggaggaaggtcgaccaggccaatcggtgcagggcccagttgcggcaggccattgcggatgcagaggccgagctcgctggcatctgctcggccatgagcgagccaccgatacatgttagacagtcaaatcagaagttacatggtttaagggaggaattgaatgcgattgtcccatacttggaggagatgagaaagaagaaagttgaaagatgggaccaatttgttgatgtcatagagcaaattaagaaggttgcatctgaaatcaggccttcagattttgtacccttcataattcctgtggatcagtctgatctgtcattaagaaagctggatgagctaacgaaagagctacaatcccttcagaaggagaagagtgatcggctgaagcaagtgatggaacatcttagcactttgcatttgttatgcgaggtgcttggtgtagatttcaaacaaacggtatacgaggtgcaccctagcctgggtgaggctgatggatcaaagaacctaagcaacagtacaattgagagacttgcatcagctgtaaacagattgcgtgaattgaaagtccagaggatgcaaaagcttcaagatttggcatctagcatgcttgaactttggaatctcatggatacaccgcttgaagagcagcagatgttccagaatttaacgtgcaatattgctgcttcagaacatgaaataactgggcctaacaccctctctactgacttcctcagctacgtggaatctgaagttttaagacttgaacagcttaaagcgagcaagatgaaagacctcgttcttaaaaagaagacagaactggaagatcataggagacgtgctcatttgattggtgaggaaggttatgcagccgaatttagcgatgaggctattgaggcaggagctgtcgatcctgcgctggtgctggaacaaattgaggctcacattgccacagtgaaagaggaagcttttagccgtaaggatattcttgagaaggttgaaagatggctgaatgcatgtgaggaggaagcttggctggaagattataacaaagacgacaatcgttataatgccgggaggggggcccacttgacactcaaaagggctgagaaagctcgtattttggttaacaagatcccaggactggtagatgttttgaccacaaaaattgtagcttgggagacagaaagaggaaaggagttcacatatgatggtgtccgcctgcggtcaatgcttgaagactacataatcattcgccaggagaaagagctagagaagaagaggcaaagggatcagaagaagatccaggatcaactcaaagctgagcaggaagcgctgtatggatcaaaaccaagtccatctaagactcaaagcacgaagaaggtgcctagacaatccatgggtggtgcgaaccgaagactgtctcttggtggagccacaacgcaagcccccaaaacagatataatgcactccaagacagctcgtgctgcgaagaaggctgaagatttgggcgctttatctcctagtagcagaggcttggacattgccggtcttcccatcaagaaactatctttcaacgcaagcactctgcgagaggcagaaacaccacgcaagccttttgcccagatcatgccaggaaacaatgtctcgtcgatgcctgcgcggcccatctccaacgacacagaggaagagaacaaaacccccaaaacatttgcagggctcaatccaaaaacgccggtgacagtgacggctcctatgcagttggcggtgacaccagctgtggccaacaaggtcatagccactcctgcaacccttttccaggagaaggcagagtcgccagcgctgcctggggacatcgagtactcgttcgaagagaggcgactcgccgtttacctggccaggcaagtggcattttttgttcattcaccttctcccagttgcgctaatacccagctattacttagttgaaagctgagctgactgcgatttctcggcagaggccaatgttacctgttggtcgatactcgatagtagtgggcctcggtcttactttgcactactattcattcatagccatattgctactagccagtaaagggagtttttagtcttgagagcttgtggtctgcatcgtaagttgtatagctttatacggtgcatcgtcgatgacctgttattgttattatatggtttattactgttatccaaatatcttgtct

SEQ ID NO: 17019 - DNA, 1316 bp, Zea Mays
ggcgcgtatacgagcgaaggaaacggaagtttaagttattcccaaattgaacggcccaaagggaaaccccaccacaaccggtctcgagtctcgacagatcggcgtcttcgatgccgccggcgcaggcgccctccagcggcggcgccgcgtggcgccagctgctcctgctcctgacagtcctcccgctcacgctcgctgcgctggctttcgtgctccagtggcgcggcggcggcggcgtcgatgaccctaccactcgctggccctcccacgccttccccggcatggccgagcccaccccaccgtccctcccctcgtccgactgcgcagacgtgctcgtgggatcctccgccccctccttcccctacatccgcggctggtcattcacctccgactcgggcgctgctatgggttctgtagaggaacatctccaacccaaggtgtgcgtgcagacgagcacctccgcggggcttgagcagatcctgccctggctcttctatcacaaggtcgtcggcgtcgcgcagttcctgctcttcgtggagggcaaggcggcgaaacccaatgtcgcgggagtcctcgagtcaattcctggggtaaaagtggtgtacagaactaaggatcttgaggagcggcaggcacggagtcgaatctggaatgagacttggctttcaggatttttctacaaaccttgcaactatgaactctttgtgaagcaatccctcaacatggagatggctattgtaatggctcgggatggtggcatggattggatcatacatttagacactgatgagttactttatcctggcggagctgctgagtattctgttagacgtttgttagctgaggtccctcgtgatgtcgacatggttatttttccaaactatgaaagcagtgttgagcatgataatataaaagatccattcagcgaagtatctatgttcaagaggaattatgatcatcttcctaaagatacttactttggcatgtataaggaagcgacacgaggaaatccaaattattttctcacctatggtaatggaaaatctgctgcacgaattcaagaccatctccgtcctaatggcgcgcacaggtggcataattatgcaaagagcccaaatgagatcaagttggaggaggctgcagttctgcattatacatacactaaattttcagatttgacatctagacgtgatcgctgtggatgcaagcctacaaaagaagatgttaagagatgtttcatgttagattttgacagagcagcttttataattgcatcaactgctagtgaagaagaaatgcttcgctgagaatctgag

SEQ ID NO: 17020 - DNA, 398 bp, Zea Mays
gcctggtttcccctagccgacgtcacgactcactcacaagcacgacgacggggcacacgagctcacgggtgatggcgaacgagggcgtcgcggccgagcgggcggtcaaggcccctccaccggagacggagagcatcgtgtggagggaggacaaggggaggttccagacgcccgacggcgaggccttccttcagtaccgcctcctcgacggccgcggggcccccgctgcggcagtgatggacctggtgcacacgtacgtgccgcggagcaagcgcgggcaggggctcgcggcgcggctctgcgacgctgccttcgcccacgcgcaggcccgcggcatgcgcgtcctccccacctgctcctacatctccttgctgaccttgtgtcatctaatctagaag

SEQ ID NO: 17021 - DNA, 136 bp, Zea Mays
taattggactaactagtttgctctagattatgagttctacaggtgccaaaggttcacatcaaaccaataaaaagaccgaaaaaggattcaaatatagagagcaaaagtcagccgaattgtcccctggtctggcgca

SEQ ID NO: 17022 - DNA, 1532 bp, Zea Mays
gcccgtgtccgatccacccaccacccaatacccgccataaagggcggcgggccgctagggttagcgtatcgaaatcaatcgtgttcctcgcctgcacgacgagagcccgagaccaatccagccgccgcctccgccttcgcctcgcctagtattccctccgattcagaggccgatggagtgcatcgccgagatgccccgcgcgccgctggacagcaggctgcgcaagcgtcagcgtctcggctgggacgtcggccctgccgagatgtataaggccgtgcggccgcggcacgggtgggacgtcggccccgccgagatgtatcagttagaactttgtggacaagaagttgtgaatgccatcagtgctgcagccttgggcctttcgtcgggctgtgtttcttctcaagtcaaacaagagcagcctcatgatggttcccctcctctgagagaagatgacagggatgggcattatgtttttgctgttggagataacctcacatctcgctataagatcaatgcaaaaatgggagaaggtacctttggtcaggtgttggagtgttgggacaaggaaaggaaagaaatggtggctatcaaaatcattaggggcattaaaaagtacagggatgctgcaatgatcgaaattggcatgctcgagcagcttggtaaatatgatgaaagtagatctaggtttcatcccgatccccaaaggagggatcctattacaagcgggtgcccaagtctagtgctatcaaggtgattgattttggtagcactacctatgatcaacaggatcagagttatgttgtgtcgacgaggcattatcgggctccagaagttatactgggacttggatggagttacccatgtgatatctggagtgttggttgtattcttgttgagctttgcacgggtgaggcgatattccagactcacgaaaacttggaacatctggctatgatggagagggttcttggacctttgccataccatatgttcaagagggcagatcggcactctgacaaatacatcagaaaaggacgcctgaattggcctgagggttgcacttcgcgtgaaagcatgaaagctgtgatgaaattgtccaggcttcagaacctggtgatgcaaaatgtggatcaagctgcaggagatttcattgaccttttgcaagggctgctgaagtatgatccatcaagccgtttaacagcacgagaggccctgaggcatcccttctttacccaagggttttggcgaagatgatgatactccttgcattctaccttgtttgtctgacttgatgtcttgcatttgacagtctgtacttttcagtggtgtatgtaggcggtagatcaatctgtataaagccgttgtagagttgtttcagtcttgtttggaacgtcgtgcagattaagttgtagcataatggaagtcaaatggatgcatttgactttaaatcctgacttgtttgaatttggaatgtcaatggaaatctggtttgaggagaaagtgaacatcatatattaaggccctgtttgatt

SEQ ID NO: 17023 - DNA, 1085 bp, Zea Mays
tgacaattcaagagcctacatttgaaaggatgatcgtggtgtatagcccagaaagtaagccagatcgagggatatttgtaaagcacttcaagcacattccgatggccgatatggagttagtcctgccagagaagaagaacccaagcttaacaccgatggattgggtcacatttctaatttctgctgtgattggtttggtcactctgataggcagtctagaaatgcccaaggctgacatatggtttgtcacagctatcctatctggtctggttggatactgtgcgaagatatacttcacattccaagcaaacatggtccaataccaaaacttgattacaaagtcgatgtatgataagcagcttgatagtgggagaggaacactcctccacttgtgcgatgatgtgatccagcaggaagttaaggaggttatcatttcttactacattttgatggagcaaggaaaggccactgtacaggatcttgattcacgttgcgaacagctcatcaaggaagagtttggtatggagtgcaattttgatgttgtagatgctgtaaagaagctagagaaactcggcattgtttctcgggactcgattgggaggatcctatgcgtcccattgaagcgcgcaaatgagatcataggaacaactactgaagaaatggtgatgcgagcccaacaagcttcgggataattacatcattcagtcaaaacttatgcgatgcaaaggcctgccgcgctgatgcattcttttgagcagtttgctggtgtagaggagatgttgttattctttcatctgctcatccttctctctttttagtgtacgggcagttcaacaagtggactgtagagagcacacgatttacatgtacagaaccgttgcttcctgattgctttcgcgtagattagttacttcctgattgctttcgctgcttcacaccagcctgcttatgatatacatacagtatcatgtattggaacatttaaggaaacataaggcagcttgcttctgataatagtctagaccaaggaaagaacatctgtagttctgtactatgcaacgacattaacaattttcagtttttag

SEQ ID NO: 17024 - DNA, 587 bp, Zea Mays
ctctgacacatttgggagttgagaagttctcattggcatacgaagttgctgttttggtgttgcaaacatgatattggttaaacggatgagagaggagttatttgattccattctttcacaggatatttccttttttgatgaagaaacagtaggagatctgacaagtagacttggttcggactgccaacaagtgtctcgtgttataggcaatgaccttaacctgatttcacgcaatttacttcagggtgcaggtgcattaatttatctgctagtcttatcttggcctctcggattgtgtacaatgtttgtttgtgcaactctatcagcaattatgctagttcatggacggtttcagaaaagggcagctaaatttgcacaggagttcaccgcaaacgccaataatgttgctcaagaggtgataactttggttaggacagtgcgagtatatggaacagaaaagcaggagtttaaaaggtatgcaaactggcttgataagctgtatgatgtgagctttcggcagacagtggcttatggaggctggagcctgagcttgaactatctataccattctactcagctttgcgtag

SEQ ID NO: 17025 - DNA, 905 bp, Zea Mays
taaatccatctggctacctcatcttcatttccatattggctggattctggggccagtgtttggttaggaagatcgtgcatgtgctcaagagagcatcgcttattgtcttcatcctctcctctgttatcttcgtcagtgctcttacgatgggtgtcgttggaacccagaagagcatttcgatgatcaacaatcacgaatatatggggttcctcaacttctgcgagtaactcaaacaccatcagactgtcgatccgtccgggagaatccaggccaatgcctaattgacctcatctccctcaaaatctagaagaataaagtcgccgagtatgtgcacaagttagctcctcgccaacatgtgcgcatttagaccgacagagtcgctgtagtgaattcagctcgtgttagctcctggctaacgagctgaccatacggctttagttttgtgaagtgggcgcgatttcgtcatgtcatgcatgtgttagctcctggctaacctgcaaatgcgtgtgttggtgcaggtttttgtcacgtctgcgtcagctcctggctgaccagcagttgtttgtcgttcattctctgcgtcagctcctggctgaccagcagttatttgttgttcattcttgcgctagcaccaggctaggctgcaaaactgcaaatatttgttgcatggaacattgtaaatatcagtcaattcccattctgtttgtgcaagccgagtgcgtttcaagccgtatttccgtgaaaatcagaacatgttcgctgcggcttccaccgacttctgttttttctacagtatttttattatagctaaagcagtccaaacagctttaatctgtctctttgagtgaagatgctgttttggacctaaaatatgatggatcgaaatcatataaagcactggcaat

SEQ ID NO: 17026 - DNA, 1355 bp, Zea Mays
  misc_feature (1)..(2): n is a, c, g, or t
nnatcgttgagaagtattccaactccaacattgaaattcatactttcaatcagtatcctcgcattgttaccgaggacttcttgccacttccaagcaaagggaaatctgggaaggatggctggtatcctccaggccatggtgatgtgttcccctctttgaataacagtggaaaactcgacatcttattggctcagggcaaggagtatgtcttcgttgctaactcagacaacttgggtgctatagtcgacatcaagatcctgaaccatctgatcaataaccagaatgaatactgcatggaggttactccaaaaacattggctgatgttaaaggcggtactctcatctcttacgaaggaagagttcagcttttggagattgcccaagtacctgatgagcatgtgaatgagtttaaatcaatcgagaagtttaagatattcaacactaacaacttgtgggtgaaccttaaagctgtcaagagactagtagaggctgaggcacttaagatggaaattattccaaaccccaaggaagttgatggtgtgaaagtccttcaacttgaaactgcagctggtgcagctattcgtttctttgacaaagcgattggaattaatgttccccgctcaagatttctcccggtgaaggctacatctgatttattgcttgtgcagtctgatctttacaccttggttgatggctttgtcatccgcaatccatccagagcgaatccagctaacccttcgattgagcttggacctgagttcaagaaggttgccaatttccttgctcggttcaagtccatccccagcatcgtcgagcttgacagcttgaaggtttctggtgatgtctggtttggttctggaattacgctcaagggcaaggtgacaatcaccgccaagtctggagtgaagttggaggttccagatggagctgtatttgaaaacaaggatgtcaatggccctgaggatctttaagctatgcttgccgtcaccagtttttcccaaggatttgtcaataggagcagccaacccaaatcactcccactgagctctaccttttgtaattctcgtgccattccgctcccgctgtgagggtcctgtgagcccgctagagaatatgactgtaatcttctttggtgcgtctgcccttctgtttttgtgcgccagggacgtatattttgctgaaatgatactaccatagctttgcgtgccggaggtgctatgtggtgtttctgtgcgtttggttgcaatgataggacgggatgagatgagaccctcaaattaggttgtttggttctgggtcaaagattgagacaagaatatcctagtattgtttcatgttgtcctttaaaattggag

SEQ ID NO: 17027 - DNA, 2102 bp, Zea Mays
gttctacgcgtccctggcgctcggggtgcgactgcgcggcgtgtgcggtggtgcggccacgatggtggtggattcgcttaggacattgtaaaatggaagtactgcgtgatatgcacctgccaccaggatttggattccatccttctgatatagaacttgtttctcactatctcaagaggaaaatacttggtcagaaaattgaatatgatcttataccagaggtggatatatacaagcatgaaccatgggatttacctgcaaagtgcaatcttccaatcaaggacaacaagtggcatttctttgcctctcgtgacaggaagtaccctactggctctaggtcaaacagagcaacactagctggttactggaaatcaactgggaaggaccgagccataaagctgaacaagctaactctaggaacaaaaaagacgttagtttttcatgaaggccgaccaccctctggcagacgcactgagtggattatgcatgagtactacatcgacgagaatggatgtaaagtcagccctgatatgaaggatgcctttgtcctctgccgtgttactaaaagaaatgactggtcattagataatgataatgaggtgggcaacaggagctctcatctggaacaaccagatgctgctacatcagttgtcagcactgtaaagccagaagatgttgctgcctcagtcatctgtccagaagaatcgaaccatgcaactacaccaattggcagtgctgaactatctaatgatgttgctcaggcagctatcactcctgcagctatcactcctgattcaacaactccaaatggtggtaatgaactggaaacatggctgcaagaactgttggatccttcacctccatttaaccttgtagctgatactggttctgctgacgtgtgtccgactgaacaatatgctgaatcatcaaatttgcagaatcctggttccatggctccgaatatcagaccaggccatgctagccctatccaggatggaacagatgccacagactacctattcacagatgatcttcccgaggatctttacagtatgttgtatcctggtactgaccagttcaatgatagcatatttttggaacaaactggccaggaaggtaataacaatcagacaaactacatgatggggattggttcatatgttcttccaaacaactttgagaatgaaactccgaatgccgaattgcagttagatcatgaaaataacaagatggatatgtcaaatgaaaataatgacaccggaattacaatacgaaggcgcagagcaactgcgcctcccgctaacatttcactagcagctggcaagattaaaatgcaggttggaattaagaggatggttacgagtaattcagaatctatcaaccagactatgaagtttacagataacagtggtcgtcgtcttgatctcaggactgatgttgagcaccagaagaaaaatgcaaacaatgtcatttctgccaagcagtctgatgcagccaatcatgaagcccacagcaaccaaggttatctcgagggcttcaaaagatgttcatcagctggattcagggcatacatatttgttgccctttttgtggttggagttgctgctctagtgctgcattatcaccgctccaatgccaacctatgaatttgaatcatggaacatcagcatgcttgattgtagctctagtggtcagtggcagcattggcttcgtccttggagtagttcgctagctttgcttgcattggaaatggaatagaaatcgagttcctcagcttatctcactgggattactggaaatacatttttgcgaccactgattcccagttatctccactttttttttgtggtgctgtacatattaattttttttctctcttcttttgatcgtctagttgctaccaacgggtgcctatcgaaaatcgaaaaagaaaaaaagtgggaaaagggttggtcgtatgaacaaaaaagatgtagcttcagactgttactactatccttagctttgtaaatctgaaccatgtttgtacagtacactacatagtggagcggccactgcattgtctgcattctcttttattatagcatctttttgaacaagtg

SEQ ID NO: 17028 - DNA, 1386 bp, Zea Mays
gcgagacggctcgcgagccggacccgtcaggccgtcactgcaccacatgacaaacccggaccgaacacggacgcctcccagcaagtggtgacccgtttctccattctcgccgtccgattataaatgcgtccgcaaatgccgccagtccgctctctctcgctgcgcctccgcccccaaatctgcgcaaaggcctcccactcaaattcctcgcggcgaccgatatggttgggagcgtgggcaacgggctggccgatctgggtgcaagagccgtctccatgaacggggcggggaaggcgctgcgtcctgccgaagcggcggcggcggccgccgccgcggagacgctcccgatggagctggatccgtcggaggccttagtggccgctgcggtggaggcgaagggcgagaaggctgccaacgggaggagggagatcgtgatggggaggaacgtacacacctcctgcttcgccgtgaaggagcccgacgcggacgacgaggaaaccggcgagcgggaggcaaccatggctagcgttctcgcgctctaccgccgctcgctcgtcgaacgcaccaagcaccacctcggttacccatacaatctggactttgattatggtgcactgacccagctgcagcacttctcgattaacaaccttggtgatcccttcatcgagagcaactatggtgttcattcccggcagtttgaggttggagcacataaatgccctttctagcaatgtggagtatctggcgtcaagggatgcaacaatcatgggaagcaggaatggccatgcccctatcttcctctggtacaccctcaacaggaagggctacagaggcttccagaaagaagtccaaaagtgcttgagaaacgcacactacctaaaagatcgcctcaaggaagcaggaatcggagcgatgcttaacgagctcagtagcacggtcgtgtttgaaaggccaaaggatgaagaatttgtccgaaggtggcagctggcttgtgaagggaatatagctcacgttgtggtgatgcccagtgtcaacattgacaagctagactatttcctgaatgagttagttgagaaacgggcgacttggtaccaggacgggataagccagccaccctgcattgccagagacgtaggtgttgagagctgtctctgtggccttcacaagtagcgagccttttgctttgcaagtgggttcattcttgagtcgagttaaaagtgttatgttgtactgtgttcattcttgagttgagttaaaaagtgttatgttgtactgtgttcgtgcgttctgcttctgtgtttctccacagtgtagcttatttgttgccatgggaataaaattccttctattaaattgattgatggaagttgcatcacggttggcttt

SEQ ID NO: 17029 - DNA, 2947 bp, Zea Mays
aaaaactgttggaagatgaaaagatatagagagggatttttctctctccaaatgatgatttagagagtatgcaactgctagtgcccgttctgatggcctccttttgctttgtggtggaagggatgccaatagtgtgccactatcaagtgcatatgggcttgctaagcatagagatggacgctgggagtgggcaattgcccctggtgtgtctccatcacccagatatcaacatgcagctgtttttgtcaatgcacggcttcatgtctcaggaggggctcttgggggtggtcgcatggtagaagactcctcaagcgttgcagtattggacactgctgctggagtttggtgtgataccaaatcagtagttacaactccaaggacaggaaggtatagtgcagatgcagcaggtggtgatgcttctgtagagcttacacggcggtgcaggcacgcagctgccgcggttggtgatttgatatttgtgtatggaggtttacgtggaggtgtgctgttagatgacctcctagttgctgaagatcttgctgctgctgaaacaaccagtgcagctaatcatgcagcagcagcagctgctgcatcctcaaatgtacaaagagaaccgggtagatatgcctacaacgatgaacaatcaggacaaacagttacagtttcaagtcctgatggagctgttgttcttgggactccagttgctcctccagtcaatggggacatgtatactgatattagtcctgagaatgccattatccagggacagagaagattgagcaaaggtgttgattacttggttgaagcatcagctgcagaggctgaggcaatcagtgctactttagctgctgtaaaggctaggcaagttaacggtgagatggagcattcacctgacagggaacaatctccagatgctgcaccaagtgccaagcaaaattcaagccttataaaaccagatcctgctcttatgaacaattcaacaccaccacctggggttcggttgcaccatagagcagttgtggtagcagcagaaactggaggtgccttaggtggcatggttagacagctctcgattgaccagtttgagaatgaaggtagaagggtcatttatggcacccctgagaatgcaactgcggcaaggaaattgctggatcgacaaatgtctattaatagcgtgcccaaaaaggtaattgcttctctgctgaaacctcgtggttggaagccccctgtgcgaaggcagttctttcttgactgcaatgagattgcagatctatgtgataatgctgaaagaatattttcaagtgaacctagtgtcttacagcttaaggctcccattaagatatttggtgatctgcacggtcaatttggtgacctcatgcgcttgtttgatgaatacggtgctccttcaactgctggagacattgcttacatcgattatcttttcttgggagattatgtcgatcgtggtcagcatagtctggagacaatcagtcttctccttgcactgaaggttgaatatcctcacaatgtacacttaatccgagggaatcatgaagcagcggatatcaatgctctatttgggttccgaatcgagtgcatagaaagaatgggtgagcgggatggaatctggacctggcaccgtgtgaacaggttatttaattggcttcctttggctgcactaatagaaaagaagataatctgtatgcacggtggtattggtcggtccatcaaccatatagagcaaatagaaaatcttcatagaccaattaccatggaagcaggctcagttgttctgatggatcttctatggtctgatccgactgagaacgatagtgtagagggtctcaggccaaatgcacggggccctggtcttgttaccttcgggcccgacagagttatggagttctgcaacaacaatgacctgcagttgattgtgcgagcacacgagtgcgtgatggatggcttcgagcgtttcgctcaaggtcacctgatcactcttttctcagcgacaaattactgcggaacggcaaacaacgcaggagcgatcttagttctcggaagggatctggtcgttgttccaaagctcatccatcctttgccgcctgccattacgtcacctgagacctcaccagagcaccacattgaggacacatggatgcaggagttgaatgccaatagaccgccaacaccaaccaggggccgccctcaagcgcccaataacgaccgaggctctgttgcttggatatagcggcctggccatattatgaaacagtcagatttctcgcctcccaccagtggcttgaggcttatattatccatccatcttgggcacatgcaggcggtctgtgctgaaagcacatgcttagcccaaaacaacatcgaaagggaactgttcagggagcgagactaagcggtgctctgaagacagaaggccagagaagactcaccagtcaccgtcgacagtgctctccaaatccttcccctccaaatgacatgagaagtagaagaacagaaccaagtgttggcaaaccacagggtcttgcctgaggtcacgcctgtacatactcagatgccagcagataggcggggttgtgtactgtgttctttttgtcgagcgtccaaagtggtagcagcagtccattgtgctaggtattcatttgctgtagggtttttgtttcttgtccctcatgttgcagagtatggaagtgataaaaatgggtcgttctgtcaggtcgtgtataatagcgttgtcgcttgtttatgggtagtagcagcgagtcagctgtcagcacgccttacacctccctcgtgttgtaattcccgtcacctgtgctgagagtgtgcacaatatatcgtcgtctgttgtccaaagttttgggtcatggacgggtttggtgatttgagttgatttattagagaagcaatgtgttgttcgattttgagcttt

SEQ ID NO: 17030 - DNA, 140 bp, Zea Mays
cgcggattgtaggctcggccgggactacttcgtcaccaacgtcctcgttctcatatatgggtggaagataaagatttgtccagggttgatggtgaggtatttcgaattgatggccaaaacgcccatgttcgcacaaccaa

SEQ ID NO: 17031 - DNA, 805 bp, Zea Mays
aaccagaacattcgattctaaaatttacaatttacaatttacagctgtgcggaggcgggagcagggggcagcgagcacctagcagcgcgcggccggcgactccaccgagacacctcagccggccgcgcggtcgcggttgcctccggctggctcctcgcctcgatggtggggatgtaccagcaccaactccgcgacgaccccttcgacaccctaagcggcggccactgcggtgagcagccacgcgttgccggcggcggcgcctcctcctcctcaccctcggctgttcatgacccgctgtctgcagaggtacatggcggcggacagccgcggcagcgggtcgaggcgcttgccgacggaagaagcatgttgcgcggcgggggaagcggtatagttggcgccgcgggtggagatctaggggtgctagtgcggtggatgcgggaactcgcagcggatcccgtgggtccacttccggcgccatcagagcacagggtgaggaagcggcacgtgctggcctggcggcgcgctcgctacctcagattggaggacgtggcggacgcagaagagcttcccagcttctccaagaaaaggaagctctactgggatcaaaaaaagaaaggctgcttgaacatgccaacaaggaaatctgagaggcttgctaagagaatgaaactcatggcatcattgctcctcacgcaacggaaaaagattggagtagactcggtcttctggaaattgatagtgacgaagatgacgtggaggaagaagaggacgaagatcaacctgaaggatccagctctctcagaga

SEQ ID NO: 17032 - DNA, 2383 bp, Zea Mays
gcagtgataaatttaccacctgtagaatcctctatctgtttcggtaactgtttgcaacagtttgtgtggagattgcataccatcaccttccctgaagtgaaaaatatatgggctgatcttggcatttcatgggaggttctgaagatgacgagccaccctcaaaacgcgcaagaacatcctcagtagaatctgcaagtttaccagactgtttctcgttttcgaaattttccaatcctttgggaagtacaatggctagacctttgccttcccaagggaaagaagttatggttggttccaagggtgttattaagaaggaggaatttgttaggataatcaccaaaactctgtatagtcttggatatgaaaaaagtggagcagttctggaggaggaatcagggattattttacataaccctatggtgaaacttttcagagaacaggtgattgatggaaattgggataatgcggtggttaccatgaatacaattggccttcaagatgaaaacatcttgaaatctgcggcatttttgatattggagcaaaaattctttgaacttctaaaaaatgacaatgtcatgggtgctatgaagactttacgatgtgagatcacaccccttggtgttaatagaaaaagagtgcatgaactgtcgacttgtatgatttcttgttcttcacagcagttgttccttggtttttcaaagcttggaattgattcttctagttcacggttgaagcttctagaggaattgcagaaggtgcttcctccagctgttatggtgccagagaggaggttagaaaatttagttgagcaagcacttactgtgcaaagagatgcttgctatttccataattctgttgatgggttgtcactttacattgatcatcactgtgggaaagatcagataccatcttgcacgctacaggttttgcgtgcacatcacgatgaagtgtggtttattcaattctcaaataatggaaagtatttagcctcagcgtcaaatgataaatctgcaattatatgggaggttgatgaggatggagagctattactgaggcatacattgagtggccatcaaaagtcagtgatgatggttgcatggagccctgatgattgtcagctcctcacatgtgggcaggaagaaaccatccgacgctgggatgttaaatctggcaaatgtcttcatgtttacgagaagtctgccactggtttgatatcatgtgcttggttcccagatggaaagcaattatctggtttagctgatcaaaacttttgcatttgggatttagatggtaaggaagtagattgctggaaagggcagggatcaacaggaacatctgattttgctgtagcaaaagatggaaaccttataataagcatgagcaagcagaacacaattcttctatttgatagggagacaaaacaggagagaataattgaagagggtagtacaattacttcattttgtctatcagaagacggtgatttcctgcttgtaaatcttgtaagcgaagagattcatttgtggaacataagaaatgatcctgttcgtgtcaaccggtacaatggtcataagcgcacccggtttgtgataaggtcttgttttggcggatttgagcaggcgttcattgctagtgggagtgaagattcacaggtctacatatggcatagagccactggcgatctcattgagactcttgctggtcactcgggcacagtcaactgcgtcagttggaatcctgcgaatccccacatgctcgcctcagcgagcgacgatcacacagttcgtatatggggggcaaagaagtccagtcttaagcgcaaggatgttgggagcagcaattgcaacagtaacggttctcgctcgaatggcaatgcacataacaacgttttcgttcaaaagtgcaacgggaacaacaccaaatgatttgccagggcaatgtatccccatggatggttgactggcgtctgtaaatccccctgtcctttacttccctcgtggaagaagaatcgccaccgccatagttaagacaacaacaacaaagctgcagcacaaagtgtggggaacctgctaggtttcgtgcgctatctttcccttgttccttcatgactgtcatcacatgtatttcttaattcaagctgggatggaattatggtattactttgcatctttgatatcttgatttgccctctctgattgattgtaactgcattttggtggtgatggttgttaactcctcttattgcattttgccttgagaagaaacaaatgttggcctaggatgctccgtctaaagaacgggacggaacatcttatcacaaatttaagtagattcatggatcatttatttccaatgaattaagtggtctgtttgattgtcatat

SEQ ID NO: 17033 - DNA, 681 bp, Zea Mays
gttctgaaattcaagatgagctgtaaatttcgacacaagactactgcagtaatagagcgacctctattctatggattaaagatgggtctcctaccatctggaaacagggctctaaagttatcaatccatgccttcttgcttttccatttcctagttttctttcttccctggcaattcagaaagggaggttctgttggaagccaaatacttactgaaatcagtattttaatagtgactgctggtgtttccttctgtttggaaataaactatcattttgtccaggttgcacatacaaggaggtgcagtttcgctccacctcagagcactgccgctgcagagacaaatcccactgaatttattctggaaactttggaacaaagtgatccacaatcattgatacaatatcttgcttaccaagatttgtgtgtggtatctgagtgtaacttggaaccgtggcgcagagctgctttctttgaggaatctggtgaaacttatagaagaattgtgacagcttgtttgaagccacttgaggagtttacttcaaaaattgctgaagcccttgaaggtttttctagtgatcagccagaattgatgctacaacagtccagactctttagtgcatttgatgattcccaggtaaagttacatcatgtatataatgacctctgttgcattttcggc

SEQ ID NO: 17034 - DNA, 574 bp, Zea Mays
tcccatctttgtctgcatggaggaaattgaaagcaaaaacaagcaagtaaagctcctcatggatcagctccgtgacctaataactgacgtagccatgtggcagagcccttgctctgtgtgaagtgtgaactgtgaagtgtcaaagagaccctagctggacgtctggtaaaggcatattgtgcatgttgggtaactgactacttggcagttggaagggagaaatagatgggatatgactgggcttcacgaaaaaaaacataaagttttcctctctataccaactaaaattgtgttgggtcatcgatgcaaatgcacataggctgtaatatgttggatatgaatgttattttggacgagtgtagatacgcgtatcctttgaaacttgtctgattttttaccgtgacgaaattcctgtaatgctttgagaatcctgaatttctgtcatataatggcttaaatacaatgattatatttgcttcttgaacgatgaaaggaatacttaatagtgtgtttggtttgaggaatgaagatagtgtgtttggtttgaggaatgaagtaatccatcttcttctct

SEQ ID NO: 17035 - DNA, 666 bp, Zea Mays
tccagatcgaacggcccataaagccacaacccggaaacgcgcaaagcgaagagggaaggggggatatcggggaaaaaaacgcaaggtaccaccgtaccagcagcgcaaagatcaggcggccgccatggcggatcagttcgcggattcggcgaacaacgtgatcatcgaggaggtgaacaagggactgaacccaggaatggtggttctgctcgtggttgccagcttcctgctgctcttctttgccgggaactacgcgctgtatgtgtacgcgcagaagacgctcccgccgaagaagaagaagccggtctccaagaagaagctgaagagggaaaagctgaagcagggtgtctccgcgccaggggagtgaacagacagggatgccgccgatcggcccgtcctgagcccgccccctatttacatgattgtcgaagaaaaaagatacacctgctggagccgcggtgttcgtagtaattttgttctgtagatgctttttgttgtcttcgatggtagtgcatttgtattggacaccttgtttcagcaactgatgaatctttagcctaaaccgagttactcttttgttcctgtaaactacaagtacttcaaatgacgctggtgatggtgaacctgagtaaaattggcgagtcccagctcccgcctactcttctg

SEQ ID NO: 17036 - DNA, 138 bp, Zea Mays
taagtgtctagtggcgacgactgccactgccactgccactgccgccgccgcccgcgaggggccatgcccctcatctccacctttgagcgcttcgcccaggtatgtctgccccgcagttgtcgtgcttcacacagctca

SEQ ID NO: 17037 - DNA, 8327 bp, Zea Mays
agcactcggggtaagcttgctgttggagaaggtgataaagttgctataaaggatgtgggacaaatcattggacagcctactgcagcacctattacagcagacaaaaccaatatgaagcccctttccaggaatattgtccgctttgaaattgtccatttagtttacaatccattggtggaccattaccttgctgttgctggatatgaggattgccaagtgttaacattaaatagtcgtggtgaagtaactgatcgccttgccatagaacttgctctgcaaggaccatatattcgtcgtttggaatgggttcagggttctcaggtacaactcatggtagtaacaaacctgtttgtgaagatatatgatctctcacaggataatattagccccatgcattattttaccgtagctgatgatgtgatagttgatgcaaccctcgtcccctcctcaatggggaaattggtgctacttgttctttctgaaagcggtgttttatataggctgaatgttacattggagggtgatattggtgccaagatattgactgaaacagtcttggtcgaagatgtcatatccatgcatagagggttatcattgtacttctcatcaacctacaggcttctttttgtatctcaccaagatggtacaaccttcatgggacgtttgaatgctgattcttcatcaataacggaattgtcatatataaatgaggatcatgatggtaaatctaagccagctggactctactgttggagagagctagtagctggcagtggtatccttacttgcctatcgaaatctaaatcaaatgctcctcttgtggcgttgttgagtcctcatcaattggttgcacaaaacatgaggcacaatactggtgcaaattcctcagtggttggtgttgctgcctataagcctttatccaaagataaaacacattgtcttcttttgtatgatgatggaagccttcatatttactctcatacacctagtggaggtgacggttcgatgaaccttacagcagagcaaacaaagaagctgggcagcagcatactcagcagtagagcttacactggcacaaaaccagaatttccacttgatttctttgagaagacaacttgccttacatgcgatgttaagttcaatagtgaaacaacaaagagtggcgattctgaaagcattaagcaaagattgacatcagatgatgggtatttagagagtttgacacctgctggcttcaaggtggctatttcaaatcctaaccctgatatagtcatggttggttgccggattcacgttggcaacacatctgctagcaatattccttctgagatcacaatttttcatagagtcattaagcttgatgaaggcatgagatcatggtatgatattccatttactactgctgaatcacttttggcagatgaagagttcacaattactgttggcccaacattcgatggttcatctatacctaggatagattgtattgaaatttatggccgagccaaagatgaatttggatggaaggaaaaaatggatgcagcgcttgatatggaagcattgggtggtaatgctactggtggtagatctggaaagagactccaaatcgtgaaggctgctcctatccaggagcaagttctggcagatgcccttaggattctctcacgaatatacctgctatgccaaccaagttgctttactgacatggttgatggaggcatggaacttgataatatgaaatgccgagctttactggaaaccatttttcaaagtgacagggaacctctgctacattccgccgcatgtcgtgtccttcaggctgtgttcccaaagaaggacatgtaccatcatgttaaggacaccatgcgtctccttggggtaataaaatcactcccagcaataacttcaagaattggagttggaggtgccgcatcgagttgggtgataaaagaatttattgcccagatccatacagtttcaaaagttgcattgcacaggaaatcaaacctagcctcttttcttgaaagtcacggtacagaactagtcgatggtcttatgcaggtattctggtgtatattagatttagacaggccggacacacagacaataaatagtcttgttgtgccttgtgtggaatttatttatagctatgctgaatgcctggctttgcattccaatgaaaaaactagtgtgtcagtgggacctgcagttgctctgctgaaggagctgctctttgcaccatatgaagcagtacagacatctagcagtttggctatctcatcccgatttcttcaagtccctttccccaagcagacaatgatagctaatgatgatgctcctgaaaaccaagctaaagcaagtgcttctgctatgaattcaaccagtgcaaactctcaggttatgattgaagaagatcctgtcacatcatcagtgcaatattgttgtgatggctgttccaccgttcctatacttcggcaaaggtggcactgtagcatatgtccagattttgacctatgtgaaacttgctatgagatacttgatgcagatcgtttaccagcaccccattctaaagatcatccaatgtcagcaatacctattgaagttgatacatttggaggtgaaggcagtgaaatccatttctctgtcgatgagctaacagattcaggtgttcttcatgctgataggagtgttcagacctccccatcatcaattcatatatttgatgcaagtgagtctgcagacttacctgagactattacagaccaggcaactgtttcgatttctgcatcaaaacgtgccattaactccctggtacttaaccacctaattgaagagcttagaggctggatggggaccactgctggtactcgagccatacctttaatgcagttattctacaggctttcttctgctgttggtggtcctttcatggatagttcaaagccagaaaattttgatttggagaagtttgtgaagtggctaatggatgaagtcaacataaataaacagttccctgccaaaacacgatgcacatttggtgaagtattgatccttgttttcatgttcttcacacttatgttccgcaactggcatcaacctgggagtgataattctcattcaaagtcaagtgggagctctgatttgacagataaaggtcctgctcaggttctgggatcaacaacaataactcttccgtcatctagtgctgacctggataaaaatgagtttgcttcccagttagtccgtgcctgttctgccctcaggcagcagaaatttttgaattatcttatggatattctgcagcaacttgttcatattttcaagtcatcatccataaatggagaagctggttcttctggttcaggctgtggatccctattgacaataagaagagagctgccagctggaaatttctctccctttttttcagattcatatgctaaatctcatccaactgatctgttcatggactactacaaattattgttggagaatactttccggcttgtatatagtatggttagaccagaaaaggagaagtctgctgagaaggatagatgctacaaggttcccaacactaaggatctaaagttggatggatatcaagatgtgctttgcagctatattagcaatcctcatactgcatttgtccggagatatgcaaggaggctcttccttcatttatgtggcagcaagactcactattacagtgtgagggattcgtggcaatgttcccatgaagttaagaaacttaataagatcataaacaagtctgggggtttcagaaatcctgtgccttacgagagaagtgtcaagctcataaaatgtttatctactctttgtgatgtggctacggcaagaccaaaaaattggcaaaagttctgtttgaagcacatggatcttcttccatttctcatggacaatgtttatcatttcagtgaagagtgtgttattcagactctcaagcttctaaatctggctttctattcaggaaaagatgctaatcataatgcacaaaaagcagagactactgatctaggaggttctacgaggactagctcacagtctccagatatgaaaaagaaccggaaggctgatgatggttctgaaggttcctcagaaaagtcgtgcatggacatggaacaggttgtagagatgttcagtgataaggaaggtgacatgttgaaaaactttatcaacatattcttactagaatggaactcagcaggtgtccgtcatgaggctaaatgtgttctatttggagtgtggtaccatgcaaaaaaccgacttagggagacaatgctatcgattctgctacagaagctgccctgatgttccgtattcaaggacgaagcttgaaaccctcaagtctgagacaaaatttactgacaacagaattataataaaatgcactggaagctttactatacagtcagttacaatgaacgtttatgatgctcgtaagtctaaatcggtcaaagtacttaacctgtattacaacaacaggcctgtgactgacttatcagaattgaagaataattggactctttggaagcgtgctaagagctgccatcttacatttaatcagacagaattgaaggttgaatttcccattccgattacagcatgcaatttcatgattgaacttgattcattttatgagaatcttcaagcttcttcccttgagtcactgcaatgcccacggtgtagcaggtctgtcactgataaacatggcatatgtagtaattgccatgaaaatgcatatcagtgccggcagtgtagaaatattaactatgaaaatcttgactcttttctctgcaatgagtgtggatacagcaaatatggtcgttttgaattccacttcatggcaaaacctagtttttcatttgacaacatggaaaatgatgatgacatgagaaaaggattggcagcaatagagtcagagtcagaaaatgctcataggcggtaccagcaactgatgggatttaaaaagcctctcatcaaacttgtgtcaagcataggtgaacaggaggtagactcgcagcagaaggatgctgtccagcagatgatggtgtccttgcctgggcccacatgcaaggtaaatcgcaagattgcacttcttggtgttctatatggtgaaaaatgcaaagccgcttttgattctgtgagcaaaagtgttcagacattgcaagggctccgccgtgttttaatgacatatctacaccaaaaaagttctagtgacaccaatgcattaccagcattttcaataccaaggtctccaaatagttgttatgggtgtagcaccacgtttgttacacaatgcttagagttattacaagtgctttcaaaacatgaaaactgcaggaagcagcttataagtgctggagttttgtcagagttatttgaaaacaacattcatcagggccctaggacagcacgcactcttgctagggctgtgctatcttcgttttctgaaagtgatgaagatgcagttcatgaattgaacaacttgattcagaagaaagtgatgtattgccttgagcaccatcgttccatggacattgcacaatcaacacgagaagacttactgctgctatcagagacttgtgctcttgtggatgagttttgggaggcacgattacgtgtcacctttcaactgttgttctcttctattaaggttggagcaaaacatcctgcaatttcggaacatattattcttccttgtttgaggataatttctcaggcttgcacgcctccaaaatctgattgtggggacaaagagtcaggtttgggagtatctagcttgacgttgcactctaagaatgatgatacaactggtaacacagcatctaataaccccaatactaagattcagtcagatatatctggaaaaatttatgatggaagtcgaagagaccaggatattccacttttgagctattctgaatgggagggcggtgcgtcatatttagatttcgtccggaggcagtacaaagtatcccaggcagtgaaaggatctgctcagaagacacgccatgattcatataagtctgactatctggttctcaaatatggactcagatggaagcgtcgtgcatgtttgaagtcaagtaagagtgacttctcaaaatttgccttgggctactgggtatcagacttgatcttgagttcgtgttcccagtcaataagatctgagatttgcactctcataagcttgctatgcccatctaactctcctagacaatttcagttattgaacttgctcatgtcactacttcctcgaacactctcagctggtgaaagtgcagcagagtactttgagttactagggacaatgattgattcagagtcttctcgtctattcctaactgttcgtggttgtttgacaacattatgttctttgataacaaaagaagtgtccaatgttgaatcacaggagagaagcctaagcattgatatctcacagggattcattctccataagcttgttgagctcctgaacaagtttcttgaagttcccaatatcagagcaaggtttatgagtgataggttactatctgaggtgttggaagcttttttggtgatccgtgggcttgtcgtgcaaaagacaaagttaattaatgactgcaatcatcttttgaaagaccttcttgatagcttgcttcttgagagtactgaaaacaaacgtcaatttattcgtgcttgcatctctggattgcagaggcatgtgaaggaaaaaaagagacggacgtctttgtttattttggagcaactctgcaatctgatttgcccagtgaaaccagagcctgtttatcttttgatactgaacaaggcacatactcaagaagagttcatcaggggttctatgacaaagaacccatactccagtgtggatgttggccctctaatgcgggatgtgaaaaataaaatatgtaaccagcttgatttaattggacttttggaggatgattatggtatggaattattagttggtggtagtataatctcacttgatctgagcatttcccaagtctatgagcaagtatggaggaagcaccatggtcaaactcaacattgtttgtccaatgtcagcgcaataactggtgcttcatctatcagagattgcccaccaatgacagtgacctacagactgcagggtttagatggtgaagctactgagcctatgattaaagagctggaagaggaaagggaggaatcacaagatcctgaaatcgagtttgctatagcaggtgctgttagggaatgtggaggccttgagattattttgagcatgattcagagcctgcatgatgatgagttcaggtctaatcaagaagagttgacttctgttcttaaccttctaaaatattgttgcaaaatccgtgaaaataggtgtgcactgttatgtctgggtgctttgggtttgcttcttgagacagctagacgcgcattttctgcggacgcaatggaacctgctgaaggtattctactaattgtagaaagtcttactatggaagctaatgagagtgacataagcattgcccaaagtgtttttacaactagtactgaagcgattggcgctggtgaggaggccaggaaaattgttctcatgtttttggagagaatatgtcatccttcaggtgccaaaaaatcaaacaagcaacaaaggaatgaggagatggtggcaaggatcctgccgtacttgacctatggggaaccaacagctatggaagctcttattcaacattttgagccctaccttagggactggtctgaatttgatcaattgcagaagcaacatgaagataatccaaaagatgataatataagccaaaagctgtcaacacagcgatctgctatcgacaactttgttcgtgtatcagagtcactcaagactagttcatgtggtgagaggctaaaggatattattctggagaagggcatcacaaaagctgctgttgagcatgtaaaggaaagctttgcttctgctggacagactggcttcagaacaagtgaagaatggacaacaggcttaaaactgccatctattccacccattctgtcaatgttgaaggggctggctaagggccatctgcctacacagaaatgcattgatgaagaaggcatattaccactgctccatgctctggaaggggtgcctggtgaaaatgaaattggtgcaagagcagaaaatcttttggatacactagccaataatgaaaataatggtgatggcttccttggagagaagattcaagagctgcggcacgctacaagggatgagatgcgtcgccgtgctctttgagaaagagtgatgctacttcagg
